United States Patent Application Publication US 2007/0067865 A1 - sequence listing, part 4

SEQ ID NO: 11574 - DNA, 794 bp, Glycine max
aactagccaatagctttggtaggatttacgctgtgccattgataccttatgttatacaaattatttcatgtattacacatgctgtaagcaacgaacttttggggaatggggcagatacaggttaaaacttgtgatgaagcattccaacaaaattactagacaatataagcaaaactatatgtggaagaaactaggagtgaccccttacacctgcttacctttacacctattcataatttaacattacatatttatatatttagacgaataaatgtagcgccataccttattccccacaggttacaaagaatattacaagcagcacttgctttcctttcctttgctgaccaaacttcactatgctatctatcgtcggtatccgttggccagaacaggaatcctcaccttgtgccctctgctccctttcatcaaaacctctccaaaactataccttcttgtcactgagcgcactgtaagtgacaccgaaaactgacgcgatgcgcccgctttgatagtcattgctggagggttgacttcaatggcaacagcaggttccattctggctgtgatcacataggtttcctcctcggcaacatttgtgacagtgcgcgtgacaacttgagttctcacaagataggaaattgtgattgatggggtgtttaaatttgatggttttcccatggtggtgttacatggtgtatgagtgtagtgccttatctcatgaacatcgatgctgggtgttgtgcacaagaagcctacataatccttggaccctgggctcatatacagatgca

SEQ ID NO: 11575 - DNA, 1210 bp, Glycine max
gtgccccctgtgttaaattcgttctctgaccaagatagcaaagttcgttattatgcttgcgaacactttataacatagcaaaggttgtgagaggggattttattattttcttcaaccagatctttgatgccttatgcaagctttctgctgactcagatgccaatgtacaaagtgctgctcatctcttagatcgacttgttaaggatattgtgactgaaagtgatcagttcaggattgaagaatttataccattgttgagggaccgcatgaatgtactgaatccatatgtccgtcagtttctggtaggatggattactgtattggacagtgtcccggatattgacatgcttggctttcttcctgattttcttgatggtttgtttaatatgttgagcgattcaagtcatgaaatacgtcaacaagctgattcagctctttctgagtttcttcaagagattaagaactccccatctgtagattatggtcgaatggctgaaatactggtacaaagggcaggttctccagatgaatttactaggttaacagctatcacatggataaatgagtttgtcaaacttggtggagatcagcttgttccatattatgctgacattcttggagccgttttgccttgtatagctgataaagaagagaaaattagagttgttgctcgtgaaaccaatgaagagctacgtgccctcaaggcagatccagctgaagcgtttgatgtaggagcaatcctctccattgccaggaggcaattatctagtgaattggaggctactcgaatcgaagctttgcactggatatcaacccttttaaacaaatatcgtaccgaggttttgcaatttctgaatgacatatttgacaccctgctcaaggcactttcagatccatctgatgaggttgttcttctagttcttgatgttcatgcatgcattgcaaaagatcctcagcactttcggcaacttgttgtcttcctagtgcacaatttccgggtagacaattcccttttggagaagcgtggtgctttgataattcgtcgactttgtgtgcttttgaatgctgagagagtctaccgtgaactttctacaatattagaaggggaatctgacttggattttgcatcaattatggttcaggctctgaatttgatcttacttacatcatcggaactatctgagattcgagatcttttgaagcaatcact

SEQ ID NO: 11576 - DNA, 459 bp, Glycine max
tttactttggaatattcacaaccactcttcagtacgtaagtgagagggacacgttgcattgcgcaggatggggagagacggtgagattgacggcggagtgcggcggagaggatgcacgttcaggcggaacgacttcttcccggaggagtcgttcaagagttggggaaactacgctcgagcggtgctggagacgccgtggaggctgaaggatcgtgtggtgacgcgatcggaggaccagacggagttggtggagatgaaggctcgtagcaaccacgagatgaagaaaacgctgaactggtgggacctcatgtggttcggaatcggtgccgtcattggctccggcatattcgtcctcactggcctcgaggcaaggacggcggtcggacccgccgtcgtgctctgctacgtcgtttccggcgtctaccgcttgttctcggtgttctgctacaccgagttcgc

SEQ ID NO: 11577 - DNA, 778 bp, Glycine max
cccacgcgtccgcggtggtctgccttgtcgttttctctgaaactcaagaaccgggttcttttatgaataaaatataggtattttttttgtgtgtgtggtggttttttggtttggtttgaaggagagagaaataaaaatgaagtttatgaagttgggttcgaagcctgatgctcttcaaagtgatgaaaaatctatcaggtatatatcatctgaattggttacagatattatcataactgttggtgaagttaagtttcacctgcacaagttccctctactgtccaagagtaatcgtttacaaaagttgctgtcaaaggctaatgaagagaatgctgatgaaattcaattggatgattttcctggtggtcccaaggcttttgaaatatgtgcaaagttctgctatggaatgactgttactcttaatgcttacaatgttgtggctgctcgttgtgccgctgagtaccttgagatgactgaggatattgatagagggaacttaattttcaaaattgaggtgtttcttacctcaagtatctttcgcagctggaaggattctataattgctctccaaactactaaatctcttttgccatggtctgaggtcttatagattgttgggagatgtatcgattccatagcttctaaaacttctgtggatccagcaaacatcacttggtcttacacttataaccgtaagttatcagagcttgataaaattgttgaggacaagataacaccacaagagaaaattgagcctgttcctaaggactggtgggtt

SEQ ID NO: 11578 - DNA, 603 bp, Glycine max
  unsure (1)..(603): unsure at all n locations
aatgttcacagcaagctgttcccccactgggtggtgtattattgaatgtgtgaatgaactagtaacatgatggcaaaagaatcatcttcaacatcaacatcaacatcaacatcaacccctctcctctccagcactaacccttcttccaccactttcacttcccgcattctcctcttggtcgcctccatgttcctcctcgcagccttcgttctcgccctctacttctcctccccaacgtcgtcgtcgccgtcgctgcctccgccacgcgccaagctcccccacccggtggtgatcctcatttcctccgacggcttccgattcgggtaccagttcaagacccccgctcccaacatccagcgtctgataaaaaacggcaccgaggccgagaccggactcatccctgtctttcccaccctcaccttccccaaccactactccatcgtcaccgggctctaccctccccaccacggcatcgtcaacaacgtcttcttcgaccccctcaccggcgagaagttcaccatgcaatcccaccaacccaagtggtggctcgcccagcccctctgggagaccgtccttcttcacaaccttttcgncggcacctac

SEQ ID NO: 11579 - DNA, 545 bp, Glycine max
caacggtggcggcaacgacgacgacgacgaaatcgaccccttggatgccttcatggaggggattcacgaggagatgcgggcggccccgccgccgaagccgaaggagaaggcggaggaccggtaccgcgacgacgaggacgacgatcccatggagagctttctgatggcgaagaaggatttagggttaactctcgcgtcggacgcgctgcacgctgggtatgattccgatgaggaggtttatgctgccgcgaaagctgtagacgctggtatgattgagtatgattccgatgataaccctattgttattgacaagaagaagattgaacccattcctgctcttgatcactcttccattgattacgagcccttcactaaggatttttatgaggagacaccttcaatatcaggtatgagtgagcaggatgtaagtgaatacaggaagagtttggctattcgtgtatcgggttttgatgttcccaagccaataaaggcatttgaggactgtgggttttcttcgcagattatgaatgctattaaaaaaacaa

SEQ ID NO: 11580 - DNA, 461 bp, Glycine max
cggctcggaccatgcctaagagagtggaaggagttgttgccatgaagcagcactttgtgcttgtacatggcataggtggaggaagttggtgctggtacaaaatccggtgccttatggagaattcaggctgcaaggtctcatgcatagacctcaaaagtgctggaattgatcaatctgatgctgattccgtgctatcttttgatgattacaataaaccacttatggatttcatgtctgatttgcctgagaacgaacaggttatattggtggggcacagcgctggagggttgagcattactcaggcctgtcacaagtttgcaaacaagattcgtttagctgtttatgtggcagcaactatgctcaagttcggattcctgaccgatcaagatcttaaagatggggtgcctgatttatccgagtatggggatgtgtatgagctgggatttggattgggacatgat

SEQ ID NO: 11581 - DNA, 1876 bp, Glycine max
caaagaagacatgacagagtacgaactaagaaagatccgtaggaagttgaggtcacgcaaaggaggctggcatggtacttggtagggggtaggcgcgtcatttcactaatattctgagcaattgagagcttgagttgaagaaagcaccataaataaatcttcttcttcttcttcttcttcttcgcttcccttccatcaaatctcacactctctcacttacagccatgtccatggattctatggccacttccatcggagtctcggtccccgtgctccgcttcctcctctgcttcgccgccaccgtgcccctcagcttcctctgccgcttcctcccccgcggcctccccaagcacctctactcctccgtcgtcggcgtcgccctctcctacctctccttcggcttctcctccaacctccacttcctcgtccccatgttccttggctacgcctccatgctcctctatcgtcctcgatgcggcatcctcaccttcttcctcggatttggctacctcattggctgccacgtgtattacatgagcggtgatgcatggaaggaaggtggcatcgatgccactggggctttaatggttttgacgctcaaggttatctcctgtgcggttaattacaacgatggtttgctgaaagaggagggtttgcgtgaggctcagaagaagtaccgtttgatcaagttgccttccttgattgagtacattggttactgcctctgctgtggaagtcactttgctggtcctgtttatgaaatgaaggattatcttgattggactgaaggaaaagggatttggagcactgaagcaaaagggccattgccatcaccttatggggcaaccctccgggctcttctccaagctggtttttgcatggccatgtatttgaacctcgtgcctcattttcctctgtccaagtttactgatcctacctaccatgaatggtgtttctggaaaaaattaagttaccagtatatgtctggctttactgcacgctggaagtattatttcatctggtcaatttcagaagcttctattatcatctctggcctggggttcagtggctggactgattcgtccccacctaagcctcgctgggaccgggccaaaaatgttgatataattggtgttgagtttgcaaagagtgcagttactattccagctgtgtggaatattcaagtcagcacctggcttcgtcattatgtttacgaaaggcttattcagactgggaagaaaccaggtttctttcagctacttgccactcagaccgttagtgccgtttggcatggcttgtaccctggatacataatattctttgttcagtcagcattaatgattgctggttccagagtgatttacagatggcagcaagccgtgcctccgacaatgtctctggttaagaatgtgttggtgtttacaaattttgcttatacacttttggttctaaattactcctgtgttggtttcatggtgttaagtctgcatgaaactcttgcatcatatggaagcgtgtattacattggaactattgttcctgttgttatgattcttcttggtaaagtaattaaacctggaaagcctgccagatctaaagctcggaaggaacagtgaggtgacaatgctgtttattcttgttggaatttttgaaatcagattaggataatgcggcagaagggtttctagttcccacaggttttctggccctggttttcaacattgttgtaacagctcctttggtcttgaaaatggttgggcgctttcatactcttggctttagcattgaattgtatttctgtgataagaaacttcttgttggcaggtttgataaaagctgttattgaagaaatgttagaaacatttgtatttctgtg

SEQ ID NO: 11582 - DNA, 464 bp, Glycine max
accgggaatggactgggccggacccacgcgacgcgtcttcatttcattaaactacattttttggtacaacatgaaacgttttgtgttttctctagcatgggtttttgctcttgtgctagcttcttcgttggctcatgctgcggttgtggaacacacttttaatgtggaggacattactgtgcagcgtttgtgtcgtcaacaattgatcactgccgttaatggaaccctaccaggaccaacaattaacgctcgagagggtgatactattgtcgtccacgtattcaacaagtcaccctataatcttactcttcattggcacggtattattcaatttttaactccttggtcagacggtcctgaatttgtaactcaatgcccaataccttccggtagcagatacacatacaaatttaacctaacgggacaagaagggactctttggtggcatgcacactcatcatttc

SEQ ID NO: 11583 - DNA, 692 bp, Glycine max
tgcaaaatagcttgaatgatttggatagtggcaatttttgtagtttctcttacttacctgtgtctatggagaagaagcaagaaaaagggaaagagattaccacctggtccaaaagggttgccaattttgggaaaccttcacaagttggggtcaaatcctcatcgtgatctgcatgaactagcccagaaatatggacctgtcatgtacttgcgcttaggatttgtgccagccataattgtttcttcaccccaagcagctgaactgttcctcaagacccatgatcttgtctttgctggtagaccacctcatgaagctgcaaagtatatggcttgggagcagaagaacttggcttttggtgaatatggttcttactggcgcaacgtgcgcaagatgtgcacattggaattgctaagccaaaccaaaattaactccttcagaatcgtgagagaagaagaacttgacctatccatcaagcttctaagagaggcatccaatgatggagctgctgctgttgatatcagtgccaaggttgcaagaatcagtgcagacgtggcttgtagaatggtcttgggaaagaagtacatggaccaggacttggatgagaaggggtttaaggctgtggtgcaagaggtaatgcacttactagcaactcctaacataggtgattacattccttacattggtaaacttga

SEQ ID NO: 11584 - DNA, 409 bp, Glycine max
cccacgcgtccggcgatatcttcgactgtgggaagcttctttttctgatcttttacgtgtcaatataaattcccttcaaagaaataagctttccactctttttcaatcacatcaccaatggctccttctttcacttacgtcaaaatcttctcttctctcgtcgcagacggattctccaacgctctcaccagacgcgggtacgctgttgcatcacaaagtgcaacaaagggaggagtggcctcaatgagcggcaagatggcaccaaagtcaggggaagacaacaaaggggtgtctacgtacaaggtttcgtgggtgccagatcctgtcactggttactacaaacccgagaacatcaacgagattgaccctgcagaattgcgcgcgatgcttctcggcaaaaaaatcgaca

SEQ ID NO: 11585 - DNA, 638 bp, Glycine max
gttacttggagcccccacatataatcctcagaaaagggttgattgctgggattgagtaccgttttttggctgaacacgtggctgatttcatggcgaagacactcttcttcacgtctctgcttttccgttccactgctgaccacaaacgggacgttgccgaattttgtgggaatgtggagttatgcaggctcactgaacaggtcgttttctctgacccttataaagtttctcaatataatcgttggacttccccctatctcgatcgtgatgctgaggctgttcgggaagacaatccgctgaagcttgaagttgctgagctgaaatccaagttcattgagagggcccaggcactaatacatggagatctacacactggttctgtgatggttactcgtgaatcaactcaagttattgatccagaatttgcattttatggaccaatgggttttgatattggagcattcttgggaaacttgattttggctttctttgctcaagatgggcatgctgatcaagcaaatgatcgaagagcctataaggagtggattcttaagacaatcgaagacagttggaatcttttctatcaaaaattcacttcactttgggatgagcacaaaaatggtgctggtgaagcatat

SEQ ID NO: 11586 - DNA, 639 bp, Glycine max
gtacgggataacattttgtttggttctgtctttgacccggcaagatatcaaagggcaataaatgtgactgaactgcagcatgaccttgagttactgccgggtggtgatcttactgaaattggtgaaagaggggtaaacatcagcggtggccaatagcagagagtatccatggctagagctgtctactccaattctgatgtgtacatctttgatgatcccctaagtgctctggatgcgcatgtggctagacaggtttttgataaatgcatcaagggagatttgagagggaagacccgagttcttgtcacaaatcagctgcattttctttcgcaggttaatagaatcattttggtccatgaaggtatggtgaaggaggagggaacttttgaggaactctctaaccatggaccgctgtttcaaaagcttatggaaaatgcgggaaagatggaggagtatgaagaagaagaaaaggtagttactgaaaccaccgatcagaagccatcttcagaaccagtggccaatggatcagttaatgatcatgcaaagagtggaagtaaaccagaagaaggaaaatctgttcttattaaacaagaagaacgagaaacaggggttgtcagctggaatgttctactgaggtac

SEQ ID NO: 11587 - DNA, 1222 bp, Glycine max
gttgaaacagagagaagaaattgacggtggattttgtgttttttgacagttaaaggaagaaatcgctgtctctgtcgcgggcaacgcagattagacattagagtgtgaactccaaactctgaaaccctcaactcaaatccaatcctttggtgggtttcgaattggagtccaaccaaattctaaacacatggactcagctctgttcgcggttgcatctccacaatctccctcctctttcctccgccgctcaccgccctctcttgcagcctctcgccgccgcccgcttctttctaccgctcttctcctcctctcccacgcctccgcttctcgccgcttctcgccgctaacaccctcaccgctaataacatctcgccaagaagtggactatacactgttggtgactttatgacaaagaaagaggatttacatgtggtgaaaccgacaacatctgtggatgaagctttagaaattcttgttgaaaacaggataactggttttcccgtgattgatgataactggaaactggttggtgttgtttcagattatgatttgttagcactggactctatatcaggtcacgggttaaaggataacatgtttccagaagttgacagtacttggaaaactttcaatgaggttcaaaagctgctaagtaagaccaacggaaagttgattggtgaattgatgaccactgcccctatggtcgttcgtgagaccaccaatctcgaggatgctgcgaggttgttgctagagaccaaatttcgacgccttccagttgtagatgctgagggtagactggttgggattatcacaagaggaaatgttgtaagagccgcactccacatgaaacaagcgaaccaaaagaaagcatgataggattcagaagatcattaaaaaacttgttgctggatttcatgcagtagttcgattcaagtgttcacagaatttgtcccccaaaaaaaagtgtccacagaatcttgcttaaatcagaattaaaattttagcttaggcatgtatatcttatcgttttggcatttacacgaatgtttgtcacgggcaatattttgatagggctattattattcttcttaatatgttcttgttgtaatttatatgggcaaccttggtgataatgatgttgaaaatgttgtgaattcacagcattaatcatatgtcaaagactatagatatataagacgcaaatttcacccggcagaaaaaa

SEQ ID NO: 11588 - DNA, 1489 bp, Glycine max
gctatttgcttttgctgcatcacgtcgtcgcaggcaaggaaaggattctggtacaagtgaagggccatctggctggcttccactttctctttatggtaattcacactctgcagcttctgccaagaccaacacaacaggaagctatgcatcctctctaccatcaaacctttgtcgtcatttctcatttgctgaaatcaaggctgccacaaacaactttgacgaggctttgcttcttggtgtgggaggattcggtaaggtttacaaaggagaaattgatggtggaacaaccaaggtagcaattaaacgtgggaatccactatctgagcagggggtgcatgagttccaaactgagattgaaatgctctcaaaacttcgtcaccgccaccttgtttcactgattggctactgtgaagaaaacactgaaatgatccttgtctatgactgtatggcctatggaacactcagggagcatctgtacaagactcagaaacctccacgtccatggaagcaaaggcttgagatatgcattggagctgctcggggtttacactatctacacactggtgctaaacacactatcatccaccgtgatgtgaagacaacaaacattttactagatgagaagtgggtggctaaggtttctgattttggactgtcgaaaactggtccaacattggataatacccatgtaagtactgtggtaaagggtagttttgggtacttggatccagaatacttcaggaggcagcaactgactgacaaatctgatgtttactcgtttggtgtggttctctttgaggtattgtgcgctcgaccagcattgaaccccacccttgctaaggagcaagtgagtctggctgagtgggcagctcattgctaccagaaaggcattcttgactcaattattgatccttatctaaagggaaaaatagctccagaatgcttcaagaagttcgccgagactgcgatgaagtgcgtggctgaccagggcattgataggccatccatgggtgatgtcttgtggaaccttgaatttgctttgcagctgcaagaaagtgcagaggaaagtggcaacggttttggtgacattcactgtgaagaggacgtcactgtacacagattctaaaggaaagaaggactctgatccgggttatgatggcaacgtgaccgactccagaagcagtggcatttcaatgagcattggaggtagaagcttggctagtgaagactctgatgggctaacccctagtgctgtgttctcccagatcatgaatccaaaaggtcgttaaggttatgcagtagtaacaacactttcactacatacgcggtcaacccactcaagttctgtagtgcaatctgctttcaccaaatttgaatgttactcgttattcattttcttaatattgctattcctttgtatgttgtttctaatttattatgattatgtaagttgtaatttgtgaccatgttatataaagattgaagagca

SEQ ID NO: 11589 - DNA, 937 bp, Glycine max
gtttttctgttgttgtgtaatgatactcattgtcaccaccaacacgctttcatcttactgaacaacgacttcatcttcactcttccttcaaatttccaacaagggttcaagggtattatgcttgctggattcattctcttgctgaaatgcagtctttctagaaagtttgttcaactgtcccattattggcgttagctatgctacccactggagcaaaagagacccaattacgtgagagcaacagtcagaaggtccatcctcaaccaatagaagaggccatgaatcagaatccagaagcaatggaaaccctaatatctaaagtttttatgaatatctcttccttgaagtcagcttatattgagcttcaagctgctcatactccctacgaccctgataaaattcacactgctgataaacttgttattagtgagctgaaaaatctgtctgaactcaagcatttctacagggagaacaacccaaaaccagtgtgtgtttctccccaagactcacgtttagctgcagaaattcaagaacaacagagccttctgaaaacttatgaggtcatggtgaagaagttccaatctgaaatccagaataaagattcagagatccatcaattacagcagcagattgaggaggctagccagaagcgagcaaaactagagaaaaatctgaagcttagaggtttgtcaaccaaagaatcggaagatgaaattggctttttccctgtcgatctaactccagatctcttcacctctgccgtggaagcagctgcaaaagccattcatgatttttctaaacctttgatcaacatgatgaaagcagctgggtgggaccttgatgctgctgccaactcaatcgaacctgatgttgtttatgcaaagagagctcataagacatatgcatttgagtcttacatatgccaaagaatgttcag

SEQ ID NO: 11590 - DNA, 452 bp, Glycine max
agttgttgtgtaatgatactcattgtcaccaccaacacgctttcactttactgaacaacgacttcatcttcactcttccttcaaatttccaacaagaaagtttgttcaactgtccctttattggcgttagctatgctacctactggagcaaaagagacccaattacgtgagaacaacagccagaaggtccatcctcaaccaatggaagaggccatgaatcagaatccagaagcaatggaaaccctaatatctaaagtttttacaaatatctcttccttgaagtcagcttatatccagcttcaagctgctcatactccctacgaccctgataaaatccacactgctgataaacttgatattagtgagctgaaaaatctgtctgaactcaagcatttctacagggagaacaaccccgaaccagtgtgtgtttcttcccaagactcacgtttagc

SEQ ID NO: 11591 - DNA, 592 bp, Glycine max
tggggtaagagtggagtaatacttgtgtatggcacataataggaatgccaggccactttaaactactccttaggtgtgtgccaatgaatcatttgggtatcttgcatggcttgttttgaagcctatccataaaggagcagtgcctagcttcaactttgtttcttgttctttatatttggttgttattctattgcacttcacctagatctttggatggatacttgatgatcttgtagattgctttttagatggtcaccatggtcctaaggtttggaatgcaggccaagttgtctcaaatggctttccttttggccttgtttttgttgattcttcagatatcagatcatgttatatccagttacgttttgtgttctagtccaggtttgttaaacctagaactagaagattgtagagaaggtttattcgtgttttttatgcttgttttatgggtgaagttagcaggaaactatacaacttgtagtgtggaatcatcttggacagaaaataggttaaagtggggtgtacaaggaaagccatgggagacactggtgtaaaaaactagattgcatggttcttattttggtgaaaagga

SEQ ID NO: 11592 - DNA, 650 bp, Glycine max
ctctgtctctcttcctatcacatcataaattctatcatgattcatgcttatgttttttttattctctttcgaggtattgcatagagatttggggtgttcattatacttttttcaatagttttgcatagagatttggggtgttcattatacttttttcaatagttttatcacttgattgattatatatatccaccatgattcgtgcttaagtagttgattaacaatatgtcattttctgtgttgaaggtaaaccatgggaatctagtgaagttggagggattttgcatagacccagaagaagcaaattgctatctagtctatgaatatgtagagaatggatctctatactcatggctgcatgagggcaaaaaagaaaagttgagctggaaaataaggctaagaatagccattgacattgccaatggtctccaatacatccacgagcacacaaggccacgggttgtgcacaaagacatcaagagcagcaacattctcttggactccaacatgagagccaaaattgccaattttgggcttgcaaagtctggaatgaatgccattaccatgcacattgtgggaacacagggctatattgcccctgaatatcttgctgatggtgtggtctctacaaagatggatgtgttcgcatt

SEQ ID NO: 11593 - DNA, 754 bp, Glycine max
gcgagagagagagagaaagggtcgctttaaggcacagaagctttaaatgcgagttggttgattgtagcttcctttcaatcttctcctaatgcttatggactaagcatttgcccaagagcgcgttttttattctcaatatccttcttcttgttattattattattgttattgttccttgttgttaacatatattaataactctttcttaaacccaaatcttgtgacatcacaaaccgtaccctttttgtttatttcctttgtgggttctcaattcgtgcaaatttctgcgacacccagatggattttgcgccgaatccgtgccctttgcgttcttcttcgttcgtgaatctcgttgagaggattaaacagcttggtaccctcgccgtttctgcagtcattgggaacatcttctccgcgatcttgaccttctgcttcgcattagttggcactttgttgggggctttgactggagctttgataggacaagaaactgagagtggcttcattcgaggggctgctgttggtgccatatcaggagccgttttctccattgaagtgtttgaatcctctcttgttctctggcaatctgatgaatctgggattggttgtgtcttatacttgattgatgttattgtcagcttactgagtgggagacttgtgcgtgagaggattggtccggccatgtttagtgctgatcaaagtcagatgggtgctgttgaaaccagctttgatgaagttcaaaacatctttgaca

SEQ ID NO: 11594 - DNA, 999 bp, Glycine max
atgaatatgatcacttgaagaaagaaaacactgagaaaaaagtggaattgcttgcatctcgcaaaggccacacacaccgcaaatacaataacactccatcttccaaaacaaagacttcgcgtccaagcaatttctgagtgataacaaaacaaaacaaatattatcaaaaggggcaaactttgaaaccaaaatcagattttattttttatttttttgctgaatctgaatagatcagaaggtgatgtcgtgttcgtcgtcatctgggtcggaggaagacgatgagggattcgactcttaccggaaaggaggctaccacgccgtcagagtcgccgatcagttcgccgccggcaggtacatagcgcagagaaagttgggttggggtcagttttccaccgtgtggctcgcttacgatactaaaactgagtcatatgttgctctcaagatccagaaaagttcggcccagtttgctcaggctgcccttcatgagatcaatcttctttcatccattgctgaccgtgatccgtcaaattccaaatttgttattcaatcgattgaccactttaagcacactggtccaaatggacagcatctttgcatggttcttgagtttcttggcgatagcttgcttcgcctgatcagatataaccgttataaaggtcttccattgaataaagttagagagatttgcaaatgtgtgttgactggtttggattacttacatactgatcgtggtatgatccacactgacctaaaacctgaaaacattcttctatgttcaaccattgatcctgccaaagaccctttaaggtctggactttccccaattcttgagcggcctgagggaaacacaaatggtggagttacaagtcttattgagaaaaggttgagaaggagagcaaggacagcagttgctaagatatctggaagaagagcatcaatgggaggaataggagatgctgcaaagactggtagaaatattgatgggattgatgtgagatg

SEQ ID NO: 11595 - DNA, 432 bp, Glycine max
  unsure (1)..(432): unsure at all n locations
gcatagagaaaaaagtggaggattgttgaaagagagagtctcgtgatttgaggaggccacacacacccctctcccatctccgaaacaaaagcttcaaatttcggtcacaatttaaacaaaaggggatttatttaaaatcttttttctctattaaataaaagaccagaacttggggtgtggcaaagcatagagtctacgccgaaggaaatgagaaaatagaagtatagcggctcacacagtggttcttctaatgaagaaatgagaagacaatctggaaatattgaggaacatgagagaactttaattggaaaaaaaaaacccataaaagttaataaactatgtttttttagcttctagtgtactgtttattgtttatcatatcttatagttcaccctgacagcnnnnnnnnnnnnnnnnnnnnnnnnnnnnnn

SEQ ID NO: 11596 - DNA, 498 bp, Glycine max
aaaaagtggaggattgttgaagagagagtctcgtgatttgagaaggccacaaatctccgaagtaaaagcttcaaatttcggtcacaatttaaagaaaaaggggatttatttaaaaacttttttaaataaaagaacagaacttggggtgtggcaaagcagagaaagaagaagaagaagaagaatcatttgggtgtgtttttgaagtgaaaggtgatgtcgggttcttcttcatctgggtctgaagaggaggatgaggggttcgactcttaccggaaaggagggtaccacgccgtcagagtcgccgaccagttcgccggcggcaggtacatggcgcagaggaagctcggctggggccagttttcaacagtttggcttgcctatgagcctactacatctgccgctgtcgctctcaagatccagaaaagtgcggcccagtttgttcaggctgcccttcatgaaattgatgttcttacatccctttctgatggtgccgacatg

SEQ ID NO: 11597 - DNA, 406 bp, Glycine max
atgaacttgagacaaaggcttcaactactttagttaaatgcaaatttggatcagttgaggctgcagcaaaggtgcgtactttggaagagcaggggagttcggcagacaaaattaaaaacttcgaatataattgtttgggagaaattagaattcttggtgctttaaaacacccttgcatagtggaaatgtacggacaccaaatttcatgtcaatggtctgtctcagctgatggtaatcctgaacaccgtgtattaagatctgcaatttttatggagtatgtggaagggggctccttaaaaaattatctggagaagctgtcagaagctggtgaaaagcatgttcctgtggagttggctttgcatatcgccaaagatgtctcatgtgctttgtcagagctgcactcaaa

SEQ ID NO: 11598 - DNA, 600 bp, Glycine max
  unsure (1)..(600): unsure at all n locations
cccacgcgtccgtctttagctgtgtatagacttaacaactacaaaggcagagtaagttaatctacatgtaatgacaagtgtcttggaagttgaaatgtgattccatttgggcaagtaggttctcctacatgaaagaatggtgcgaaggtacctaaagtcactataatggttggaggaagcttcggtgcaggaaactatgcaatgtgcggtcgtgcctatagtcccaatttcttgttcctttggcctaatgctagaatttctgtgatgggtggtgctcaggctgctggtgtgctggcccaaatagagaaaggcaacaagaaaaggcaaggaattcagtggagcaaggaagaagaggataagttcaaagggaaagtggtggaggcttatgagagagaagcaagtccttattactcaacagctaggctttgggatgatggaatcattgatccagcggatacaagaaaagtcattggtctatccatctctgcctccttgaaccgtgacattcaaaacccaaaatatggtgtatttagaatgtaaatttcaacctttattctgccctaaaatatgtgaatatcaaacagccaaaaaaaaaanaaa

SEQ ID NO: 11599 - DNA, 1275 bp, Glycine max
gaagagggcatgatggtcccacgcatcataatcgcctcctaaatcaacggatggaaacgcacgatgagacaaaaccagttcaaccatccagattcgcggttccaaattacatcatttcgcatttaagatataaaaaaaatgaagaaaaagggcgtcatttcctcgccacaccctgtttcgtgaagctcagtgcatcaagatctctgtctctctgtctctctgcaatcgaaaatgagcaagggaccgggtctctttaccgatatcggcaaaaaatccaaagatcttttgactaaggactacaactccgatcagaaactcaccatttcctcatacagcatctccggagtggccctcacttcaacatctgtcaagaaaggaggactctccactggggatgtggcagcactgtacaagtataagaacactattattgatgttaaactggacaccgcatcaactatctccacaaccctcacattcaatgacgttcttccatccaccaagactattgcttcatttaagctgcctgattataattctggcaagttagaggttcaatacttccatgaccatgctaccttaacaacagctgttgcactgaagcaatcccctgtcattgatgtttctgccactgttggtaccccaaccattgctttgggtgctgaggcaggctatgacacttcatctggtggttttacaaaatacactgctggaattagtgtcacgagacctgattcttctgcttcagtaatccttggtgacaagggtgacagcattaaagcatcatacctccatcatctggatctattgaagaagagtgccgctgttgcagagatcactagaaagttctcaacaaatgagaacatttttacagtaggagggtcttttgctgttgaccctctgacacaggtcaaagcaaggctcaacaatcatggaaagcttggggccctcctgcagcatgagatcataccaaagtcagtgtttactgtttctggtgagattgacaccaaggccctggataaaaagcccaggtttggattggctattgccctcaaaccttgaggtttttattcatttttgagaaaagtgatcggagttccaaacttcgttcaatttttttggtggcccttgaaaggagggaaaataattagctcaacagatgagcatttctaggctcttcatgaatggataaaatattgaattttcaataacttggatgagtggcttctgtttcccattttttattgaattttctgcgtttcctccaacattgtg

SEQ ID NO: 11600 - DNA, 996 bp, Glycine max
acactgtataatcccccacaacccttattttttttcaggatccagccctctctctctttggaagtgttggaatttgttttcaactggcccacgggggaaaaaagtcaaaaaacaagaaaaaaaaggggattgtcgtttgtgacttttgtatatatcgagacaaaatcgagtctttatttataaagtggggtattttgcaattatatgtatgaatatgtaccaattgcaacagtttcatattcaacccatgatgatgaagatggataacacgatgaggaagagggagagaagcaaagccatggagaaagagaggcttcaagtgatggacttgagtggcatgtccttggagtttcttcccaaaccttcgcttgatttagccaccatttgcaagttggacctatctaataacaatctccaggaaattccggaatccttaacggctagacttctaaacgtggaagtgttggacgtgcgttccaaccagctaaactcccttcccaattccattggctgcctctctaagctcaaggttttgaatgtctcaggcaacttcatcgaatccctccccaaaaccattgagaattgcagagccttagaagagctgaatgcaaacttcaacaagctgagcaagctgccagacacaatagggtttgagctcataaacctaaagaagctctcagtgaactccaacaagcttgtgtttcttccaagctccacttcacacttaacagctttgaaggttcttgatgcacgcttgaattgcctaagggcacttcctgaggaccttgagaacctcatcaacctagagacccttaatgtgagccagaacttccagtatttggagaccatcccttactccataaggcttctctggtcacttgttgaacttgatgttagctacaataacatcaagaccttgcctgagtcaattgggtgcctcaagaatctccagaagctgagtgttgaagggaaccctcttacctgtccccctatgga

SEQ ID NO: 11601 - DNA, 608 bp, Glycine max
aagactgaccggaagcgaatagcgggaacaaattgacgaaccgccaaatctcaatattttttttttaatatttccctttaaatttaccgctttatttatacccacaaaattggtttaagctattaaactaaacttaccaaagcaaaactaatatatcagcactgagttaggaaaatggggaagaagaagaagagaagtagggtttccgaagacgaggaaatcgaatccgataccaaccccttcgataaaaacgaaaactctctctatcaggttcttggtgtggagaaaacagcatctcaacaggaaataaagaaggcatactacaagttggcattgaggctgcatcctgataagaaccctggtgatgaggaagctaaagcaaagtttcagcaattgcaaaacgttattgctattcttggggatgaagaaaaacgggccgtttatgatcagactggttgtgttgatgatgctgaacttgcaggggatgttgttcagaatcttaaagaatatttcagagcaatgtacaagaaggtcactgaagctgatattgaggaatttgaagcaaactatagggggtctgacattgagaaaaatgatttgattgatct

SEQ ID NO: 11602 - DNA, 388 bp, Glycine max
gcagagcatgacagcgggaaaagattgacggcggaagagagtggcgggaacaaattgacgagcaaatccctttcattttccctttaaatttatctctattatttacacccataaaattgatttaaatcaaaccaacctataagcaaaactaatatatcactgaattagaaaaaaaaaaatggggaagaagaagagaagtagggtttccgaagacgaggaaatcgaatctgacaccaaccctttcgatcaaaacgaacacactctctaccaggttcttggtgtggagaaaacagcatctcaacaggaaataaagaaggcatactacaagttggcattgaggctgcatcctgataagaaccctggtgatgaggaagctaaagcaaagttt

SEQ ID NO: 11603 - DNA, 948 bp, Glycine max
ctcggaattcggcttttctctcactattatcatcaactatcaaattatatttgcagtggagaaggaaagaatatctatctctcattctctcgtgcctcaacgcttttttaactcctttcgcttttccattccaacctctttcacacttcagatctgtttcttcatcggttgttcaagtaaatggcctttgtcaccactgctgaagtgtgtgatgcgaacccacagttaattttgagtggggagcttcgtgcccttcagccagtttttcagatttatggccgtcgacaggttttctctggacctatagttaccttgaaggtgtttgaagacaatgttttggttcgtgagttccttgaagagaaaggcaatggaagagttctagttgttgatggaggcgcgagtttacgctgcgctatattgggtggcaaccctgtggtacaagctcaaaacaatggatgggcaggtattattgtgaatggatgtataagagatgtggatgagatcaatggttgtgatattggagtgagagcccttgcttcccatcccatgaaagccaataagaaaggcatgggagagaagcaggtccccataaatattgctgggacaaggatcagtgatggggaatggctctatgcagacactgatggaattctgatctctcgaacagagctgtctgtttgatttcaattcatgaatacttcatgtaaggactatatttatgggcagcacacgacctagtatagtgcagttcggtacttgtgttcttgacccggttccttgcttccacaaaattataaccgataaaatccccttgataatgaaagtatgttggaatgtttgtccatttcataccaacattatctgtgttgcagcttcgtttaatggttgtctgttactaagcctggagagatataagtccaaatgcaaagtatacacatatccatattt

SEQ ID NO: 11604 - DNA, 1134 bp, Glycine max
cggctcgaggctgactaacgttcattccgctcttcgctttctttcacatccaatcaacgaaaaatgctggctgttttcgacaaatcggtggcaaagagcccagagggtcttcagagccctcactcaaattccgtctcagccctaaaagacggttttctcgcagagcacttctcttccgttcaccctggttccgtcaccgttaaccttggctcttccggtctcttggcctattctcttcacaaacagaaccccctcctcccaaggctgtttgcagtcgtggatgacattttctgtttgtttcaaggtcatcttgagaatgttgctaaccttaagcaacaatatggattgaacaaaacagcaactgaggtgatcattatcattgaagcatacaggactctaagagatcgtggtccctatcctgctgctcaggttgtgagagacttccaaggcaaatttgcatttattctgtatgacagtggttctaagactgcatttgttgctgcggatgctgatgggagtgttccctttgtctggggaactgatgctgatggaaatctcgttttctcagatgagacagagatcgtaactaagagctgtgggaaatcttacgcaccattccccaaaggatttttcttttcaacatccggaggtttgagcagttttgagcatccactgaatgaggtgaagcctgtaccaagggttgacagttccggacaggtgtgtggtgcaactttcaaggtggatgctgaggctaagaaggaagcaactggcatgccaagggttgggagtgctgctaactggtcgaataatatctgattgcgactctattctgtttgaattaagacttttattttatcatagctgcactcggccgaattttgaagttctgtacctgttcccataatatgataactttgaggctctagcgaggcttagcttatcatattaatttatttactggcgaggcttagcttatcatattaatttatttactgaatctgagatatgatttcatgaagctatacgaagttgctttgaagcaaatattaagctcatactctcttcgcactcatcatgtaataatgtaaacttgcggacaggttcttccaaatgattatttactgcccttgtttc

SEQ ID NO: 11605 - DNA, 308 bp, Glycine max
tcagctcgatgctttctttcacatcccgtccaacgaacgatccacgaaagatgttggctgttttcgacaaatcggtggcaaaaagcccagagggtctgcagagccctcactcagattccgtctcagccctaaaagacggttttatcgcagaacacttctcttccgttcaccctggttccgtcaccgtcaaccttggctcttccggtctcttggcctattcccttcacagacagaacccccttctcccaaggctgtttgcagtttcttcagtatcttattttctcatgatttgtgggtcgaaaaatata

SEQ ID NO: 11606 - DNA, 522 bp, Glycine max
ccacttttcagcagagtctattgcagagctgaaagcaagggctaactctgagtccaaatccaaaaccagcgaaatctcttcgttggaatgcttatcagcgcatgtttggagatccgtaacacgagcacggaagctgccaaatgatgagataacaagttgcaaattggccataagcaatcgatcaagattggaaccgcctcttccacacgagtactttggaaacgcagttgatgtggtgagcactgcagggttcacggcaggggaattgcttgagaaggatctaggatgggcagcatggaaggtgcacgtggctgttgcgaaccaaaacgacaaagcggtgagacaaaagctcaaagagtggttgaagcttcctgtggtgtaccaacttggtgtgcactttgatccttgtactgtgaccatgtcgagttccccgaggttcaacatgtatgggaatgaatttgggatggggaaagcggttgcagttctgagtggatatgccaacaaatatgatgggaacgtgac

SEQ ID NO: 11607 - DNA, 488 bp, Glycine max
  unsure (1)..(488): unsure at all n locations
atagattaaaggcctggttctttaaacattcccaatggcccgcccaaaaccttcggcttcgggaagcttgggaactaatgccgctattaatcctccctggatgtctgaaaagtggttcattgtgctgggaattgattattntgttttgtatttcatttaatttttataagttttgtatacaagtttttctcaccaattttttattttggcattttgtcacattgatccacgccaatgatgataaatccaaaggcttgtttctcaaaacattcgcagtggccgcctaagagctttcgccttcgccaggcttgagagcttgtgctgcttttatccttccttggatgtctgaggtcattatattatttctttgttgaccattttcgtctgtggttgattgatgctgtaagttagtagtttttttttctttagtatgatttagttaaacatggttaaatgaaagatatgtttttatcaccacatttttgtag

SEQ ID NO: 11608 - DNA, 920 bp, Glycine max
tcctaatccgaatagaagaaaaatgatgggcattgaatcgacggggagtaaatggcttgggttggtggcggcggtgtggatacaagcaatctccggcaacaactacactttctcgaattactcggacgctctgaaatccctcatgagcctaacccaaatcgagctcaacaatctgtccgtggccaaggatgttggcaaggcttttgggcttctggctgggctggcctcagacaaattcccgacttgggccattctcctcattgggtccctccaaggccttatcggctatggcgtccagtggctcgtcgtcagccagagaatccaacccctcccatactggcagatgtgcgtattcctctgcattggtggcaacagcactacctggatgaacaccgccgttctagtcacatgcatccgcaacttccgccgcaacagaggccccgtttccggcattctcaaaggctttgtcggtttgagcaccgccatattcaccgacctctgttccgctctcttcgccgacgaccctgcttcctttctcctcatgctcgccctcatccctttcgccgtttgcctctccggaatgtttttcctccgtgagattcctgccgccgccaccaacgaccaggaagagtctacttatttcgcggttttcaacgcggttgccgtggtcgtcgccgtttacctcttggctttcgggttcgtgccgaaccctagcgctctggtgtctcgggcattcgccgtggttttgctgctgctgttggtggcgccgatgggaatcccggtccactcttacttgaaggcacgaaggcaggacgagcggttcaaaccgaatttggaggagcgggttgacgaaccgttgattcgcggaaaagagaaggggagtgaaagtgaggtggagagagggaatgtattagcggaag

SEQ ID NO: 11609 - DNA, 712 bp, Glycine max
tccttcctaagtggctctacagcattgacaattatcaaacagggtgaatatcttactatagcaaacataggtgattgtagggctgtcttagcaactacttcagatgatggcatattaactccacatcagcttaccactgacttcaagccaaatttacctcaggaggcagaacgcataacacaatccagagggagggtattttgtatggaagatgaaccaggagtgtacagggtctggatgccaaatggtaaaacaccaggactagcaatatctagagcttttggagaccactgcatgaaggactttggactaatctccgtgcctgatgtcacacacagaaaaattaccaccagggatcaatttgtcatcttggcaacagatggggtatgggatgttatatccaaccaggaagcagtgaagattgtttcagcaacgtcacataaagaaaaagctgctcaaaggcttgtgaaatgtgccatacatgaatggaaacggaaaaaaagtggcattgcgatggatgatatgtcagctatttgcctcttctttcactcttccccctctcatcaactccccccagccatcaaaattgttgattaagaatgttgggtggttaaacagttcattacagcttccttgtaagttgtaacacagaaatacatatagacttgtatataaacttatcaattaaaatgacatttgtggttaagtgtat

SEQ ID NO: 11610 - DNA, 533 bp, Glycine max
ttccggtcgaccaccgtccgatgatacaaaaaagtgacttctgcatgtcgggtgtgcccttttggaagtaaagcaattgtagggtacaacaatggagagctcttcatttggagcatccgttctctaaatatatgaaatggttcatcatctgaacatagttatcaaaatactcctttgctcaaacttaacttatgatacaagtctgacagcatttccataggatcaataaaatgggctcatgctggaggaaaggctagtcgactatatattatggcagcctatgactgtgcaacttcaaacttgttgcacgtagtgacgctgaatgagcatacagaaactcgcacaattaatctcggacttcatttgtctgaatgttgtattgacatggagatcatatcaacttcaactgagcaaagcaagaataaacaagattctttcattttgcttgggaagtcaggccatctatatctgtatgacgatattttgattgaaaggtatctgctacaatgccaatctaagtccacaccatcact

SEQ ID NO: 11611 - DNA, 608 bp, Glycine max
aatcactcatagtggtcctaatgtgaatggtagtttgcttgggatgggaaggccagttctgaggccaatgtctgatatgtggataccccatggagacccccatatgtcagcattgcagccaatgttttcaggatgaccaaggggagcacccagactaatgggcatgatgggggcacatagaggtataagtattccttcaatgcatagactcccattggggcctaatgcaccagggagtagtcctaatgcaatgccacaaaaaccaagaagttttgatgatgatatgaaggatcttgaggcattgttgaataagaaatcatttagggagatgcaaaaatcgaaaactggtgaggagcttttggacctaattcaccgaccaactgcaaaggagactgctgtagccgctaagttcaaaacaaaaggtggttctcaggtgaggcaatactgtgacttactgacaaaagaggattgtcgacgtcaatctggttcctttatagcatgtgaaaaggttcattttagacggatcattgcacctcatactgacatcaatttaggagattgttcttttcttgatacctgccgacacatgaagacatgcaagtatgtgc

SEQ ID NO: 11612 - DNA, 436 bp, Glycine max
  unsure (1)..(436): unsure at all n locations
cccacgcgtccgcccacgcgtccgcgagatataattctaaactttgttattgcggggaaggacacgacggctgccacactttcttggttcatgtacatgctgtgtaagtatcctgaagttcaagaaaaagcagcagaagaagtgaaagaagcaacaaacacaaaaagaattagtagctataatgagtttgtgtacagtgtcacagatgaagctcttgaaaggatgaactatctccatgcagcaattactgaaactctcagactttatcctgcagttcccgtggatgcaaagatttgtttttctgatgatacactacctgatggatatagtgtaaataaaggagatatggtatcttaccaaccttatgcaatgggtcggatgaaatttatatggngtgatgatgcagaggattttagaccagaaagatggcttgatg

SEQ ID NO: 11613 - DNA, 2369 bp, Glycine max
cacaattacaaaacccagtgaaggaagcgcaaaattttccaacagttggcgaaactggtttatgggttgaagtctggttcaggatttgtgggggaagagaagagcactcacaccatatccattatcaatggacttggccgcgaagcttcaccacttagacctgaccggcgtggtcattttggacgcccgaaagccctccgcactccgccaccttccgccacgcgttctcagcagaacaaacaccaacaccaatttgatttacacgaaccggttctcgggcccaccgaggcccaattccgcttcctcaacgggcctgtccatgataaccgtcgaggacgatatcgagtctcttttctccgagacgaactcggaggaggagcggcgcgtgaggaagcaacctagcattggggcgtcggggatttcctccggggtgaagctcgaaaacgtggggaaagcctacaagggcgtgacggtgctgaaggacgtgagctgggaggtgaagaagggggagaaggtgggcctggtcggcgtgaacggcgccgggaagacgacgcagatgaggataatcgcgggccttgaggagccggatttcgggaacgtggtgaaggcgaaggcgaacatgaaaatcgcgtttctgaaccaggagttcgaggtggcgctgagcaggactgtgagggaggagttcaccagcgcattcaaggaggagatggaggtggcagggaagctggagaaggtgcagaaggcgctcgagggtgccgttaatgatttggagctcatggggaggctcttggatgagttcgatttgcttcagaggagggcgcagaatgtgaacttggatgaggttgatgccaagattagtaagttgatgcctgagcttggttttgctcctgaggattctgataggctggtcgcgtctttcagtggaggctggcagatgaggatgtgtctcggcaagattctacttcaggagcctgatttgttgctgttagatgagcctacaaatcaccttgatcttgacaccattgagtggcttgaagactatcttaaccagcaggatgttccaatggttatcatatcccatgatcgagcttttcttgatcagctgtgtacaaaaattgtggaaactgacatgggtgtgtccaggacgtttgaggggaattactctcagtatgtaatttcaaaagcagcatggattgaagcacagtatgctgcatgggagaagcagcagaaagaaattgagcagacaagagacttgataagtagattaggtgctggagcaaattctggccgtgcttcttctgccgagaagaagctggagagacttcaggaagaggaactagtggagaagccatttgaacggaaacaaatgaaaatcaggttccctgagcgtggaaggagtggaagatctgttgtagcaattaataacttggaatttggctttgaggataagacacttttcaaaaaggcaaatcttacaattgaaaggggagaaaaaattgccattattggtccaaatggatgtggcaagagtactttactgaaattgattatgggtttggaaaagccaaccgggggtgaagttttgcttggggagcataatgtattacctaactattttgagcagaatcaggctgaggcacttgatctggaaaaaaccgtgctcgagacagtagaggaagctgcagaggactggaggattgatgatattaaagggctccttgggcgttgtaattttaaagctgatatgcttgaccgaaaagtttcactattgagtggtggtgagaaggcacggctggccttttgcaaattcatggtaaagccatcaactatgcttgtgttggatgaaccaaccaatcacttggatataccttctaaagaaatgctcgaggaagcaataaatgaataccagggcactgttatcacagtatctcatgaccgatactttataaagcaaatagttaatagagtgatagaaattaaagatggcaccatacaggattatgcaggtgattacgattattatttagagaagaattttgatgctagggaaagagaacttgaacgcgaggctgagcttgatagcaaagctcctaaagtgaaagccaaatctaagatgtccaaggctgagaaagaggcacggaagaaacaaaagatgcaggcctttcaggcagcaaaacagaagtccaaaggcgtgaaaaatgccaagagatggaattgagtgaaccatttcattgttacactaatttaccgccagaaggtgatgtagctagcatattgggttaagctacacagcctttgtataatcatgtatctattcactaactcatttacggaaatataaaaggatgattacaccatatgtgattctc

SEQ ID NO: 11614 - DNA, 348 bp, Glycine max
gtatgcacaaaacccagtgaaggatcgcgaacctggtttatgggttgaagtttggttcagcattcgtgggggaagataagagaactcacaccatatccgttctcgctcctctacgaattttcatatccattcatatttttctcatcatggacttggccgcgaacttcaccgtttagacctcaccggcgtggtcattttggacgcacgaaagccctccgtactccgccaccttccgccacgcatcctcaccaaaacaaacaccaatttaatctacacgaaccggttctcgggcccatcgaggcccaattccgcttcctcttccacgataaccgttagagacgacatcga

SEQ ID NO: 11615 - DNA, 799 bp, Glycine max
cccacgcgtccgcccacgcgtccgaaaaaatgtcttctgccctttcgccaacacatagacaacaatatttattgtatatatatattaataatcttttggaactttatatttaatagagccgatttctcttaccaaagaaaacaaataaaacccttttcttcttcgtcctcatctctatatcagaaaaagcgtacacaccacatttcttatgctgtatgaaactgattatacaatgacagaaattgaaattcctcagttttttctttgtcctatttcacttcagatcatgaaggaccctgtgacaaccgttacggggataacatacgacagagaaagcatcgagcaatggttgctaaaagcgaaagattgcacgtgtccaatcacaaagcaacgattgccacgaagcacagagttcttaaccccaaaccacacgcttcggaggctaatccaagcgtggtgctcagcaaacgaagccaatggcgtagaccaaattccaaccccaaaatcccctcttagcatcgccaacgttgagaaactcgtgaaggatctcgaagtatcttcccgttttcaaagggcattggagaagttgcacgatcttgcaatagagaacgggaggaacagaaggtgcatggcttctgcgggtgtagcagaagctatggtgcacgtgatcacaaagagttttatccaaggtaacaaaacgacctcgtgcgttgaagaggctctgagaattcttggtttgctttggagtagtgctaataatatggtcgacaacgacaacatgaagcgcatggtgggtgag

SEQ ID NO: 11616 - DNA, 1144 bp, Glycine max
tgagaggttggaagacttgtgatgtggagtatcaatcttactttgctcttgatgagcgctgggaatcgtttaaggagtggagtgcgtatggagcaggagtccctttggtacttgatcaaagacaatctgttgtgcaatattatgttccgtatttgtcggctattcaagtatatggtcaatcagataagaagtcaaatgctaagccaaggtacaccagtgaagatagtgacggtgattactgccgagattcaagcagcgatggaagcagtgacagtgaatttggaaaaaggactgaactttttacagcacaaagaaatagtcactatcatacaggtgatgcttcgtttcaaatgagcaggctatctgtacatgatcaacacaataacaatacaatgcaagtcggattttctaccgacgatagtgaaacttggaatcctaaagatcttctttttgagtattttgatcatgatcctccttatagccgtgaacctttttctgacaaggtatcctatatatcgaatacccaccggtccaacattaaaagatttagatgcctggtttcttacataccatacactccatacacccttggctggaaatggaagtactcaggccccaattttggtttatccaaatgacatggatggcggtgtgccaaagatttccttaccgactttcgcaatggcttcctacaagttaaagggatcgatctatttggacacaaaatggagttagtgagagtcaagtagtaaattctctcttgcaggctgcagataactggttaaggctgcttcaggtgaatcaccctgattatcagttcttcgtatcgcatggcacattcaacaggtgaatcaaatgagatgccttaaatttctgtgttcattgctctttgcaaacttggtatggtccttctatccatcaatccatccatagagactgatgatggagttcggatttctaatgtggattcttgttactcattgcataagcagcacaaaagatgagcttgtctcaagtgaagaatgacatagagattgctaaagtaaaatacaacagaaaaaaaaaagattgctaaagtgaaaattaaaagaaagacaagaggttttgtatggagaaaaacggtcaataagtggaagaccctaat

SEQ ID NO: 11617 - DNA, 573 bp, Glycine max
cagtgaactgccgagattcaagcagtgagggaaacagtgacagtgaatttggaaaaagatcagaactttttacagcacaaagaaatagtcactatcatacaggtgatgcttcgtttcaaatgagcaggctatctgtacatgataaacacaataacaatacaatgcaagagggattttctagtgacgatagtgaaactgggaatcctaaagatcttctttttgagtattttgatcatgatcctccttatagccgtgaacctttgtctgacaagatacttgatcttgcacgcgactatcctagcctcaagtctctaagaagttgtgatttattaccggccagttggatgtgtgtagcatggtgagaaaacttgatctattgctttagagctgtctcttgtgccaactaacgttgttgtaatggcatctttcaggtatcctatatatcgaatacccaccggtccaacattaaaagatttagatgcctgctttcttacataccatacactccatacacccttgacaggaaatggaggtactcaggccccaattttggtttatccaaatgacattgat

SEQ ID NO: 11618 - DNA, 970 bp, Glycine max
ttccagttttttcactgccatccacaacgttcctaatccaaaaaagtcctcaaatgaaataactcacctcgcaattgaggttctgggaactggcatttggtacataatctgaacattcagcccttgggatgaaattacattctttgtctagtcgctgatccgtatcattgtctccctctttatagtttgacaagctgttagtagattcagtttctgcactttccaagcaatctaaagctagatcctgagctttgtccccattgagaactccattctgaaacgcatcaccaacttctaattaaggaacttcatatgaaccaaacaacttccaaaggttcctccactggttcagcagcttacctcatttggaatttcaacactccttgatttcaacatatcatgtgtggtgtcaacaaagcccggttcactaatctgcatgtcagctacctcagtgcttagtccacttcctgggagtgcatcagatgacttaacttcacaattgccgttagcatccttggttgttgaaccagctaacctaacccctttaatacactcaatactcatttgagctgtaccacctgatttaccagtacaactttcaggagaaacacattctaacctttgtgggcttatagatgcccgcttatctggtttgtctggcttcttatccaccatttcagagtaatttttcctcttgatgcatctttcagacgacccagacccagacccagagtagcactttgtggcatcatcacctgttatttcagcttgatggcttatagtgttgtatccggtgaatagtggtttatcgatgacattgtgaaaggtggggagaaaatgaaagagaaagaaggaagaggcgtggtgatgatgatgattatgattatgggttcattttatttggaagctcactgcttctttgatggacctagcaaagatatgacaataagtgagagagagagagagagag

SEQ ID NO: 11619 - DNA, 688 bp, Glycine max
gccgcttatctggtttgtctggcttcttatccaccatttcagagtaatttttcctcttgatgcatctttcagacaatccaggcccagagtagcagtttgtggcatcatcacctgttatttcagcttgatggcttatatgccttggcattcgagtgcgtttgtaaccatcaggaaaaacaaatgcagggagttgctttcgacgaacatgagaaacaaaaatatccatccctggcttccagtacatgtacatatttatttcttgtctgaattcatcaactgttccacgtatatcaaattgctgcccctcttgacctcttactccctctttcctttgcaagcccatgaaaaatgcagaatgtgcacatggcttggatgtgtctacatactcatgtgggtaaggatggcactgcagcatcccatttgtatctcgctctatcttcagggtaagcattctcaaccgagattctacccatcccctccatgctagtaaatcatccgtgtctgatgcaattatgtccacttgtaaatagtttttgtatgcctcaaaaaaaatataaggctgaaaaagtgcgctccactgggccttattaagctcaatttcatcacaaatcttattgccatagcggaactcggtcccccataacacgaagagtacttgcaaaaacgtaatagcttgaattcatgcaag

SEQ ID NO: 11620 - DNA, 676 bp, Glycine max
  unsure (1)..(676): unsure at all n locations
gcaatatttgaaggttgtgttattctgaaagagaagatagggagggcgggtggtttggtttggtgcaaatcaatggattccttagaagacagcggctattgggattttctcgattactctttcattgatcaagcgccccctgatttcctttggtccaataatactattagtgtgaacaccgaagttgacattccaggtgatgctgctgcgtgtcaagagaacaccaagaagaggggacatgctgattcaagctgccaggtgggatctaaagcttgccgtgagaagttgcggagggagagactcaatgaaaggttctgtgacttgagctctgttttggagccagggagacctgtgagaacagataaaccagctatacttgatgatgctatcagagtcttgagccaacttaaaaccgaagcccaggagctcaaaaaaacaaatgaaaaattactagaggaaataaaatgtttaaaggcagagaaaaacgaactacgcgaagagaaacttgttctgaaagcagataaggaaaggattgagaagcagttgaaggccttgcccgttgcaccagcaaggtttatggctccacctgtaactgctgctgctgcagcatatcaagcaggggtgaacaagatggccgtatattcaaactatggctacatnccaatgtggcaatatt

SEQ ID NO: 11621 - DNA, 353 bp, Glycine max
  unsure (1)..(353): unsure at all n locations
cccacgcgttcgancacgcgtatcnggtttcgtgggcggacgcctttcccgcggtggagaaagccgagagctccgcctccacatcggagccagactccgaccagaaccaccaccgccacccgagcgaaccaccacatcaaccctccctccggcctcaccccgctcgagttcgcctccctcatgccctccgtcgccgagcaccactcctacctcgtcggctccgggcaatgctcctcactcctcgcccagcgcgttcaagcaccggccgacgccgtctggtccgtcgtccgccgctttgacaagccccaaacctacaagcactttatcaagagctgcgccgtcaaaagaccctt

SEQ ID NO: 11622 - DNA, 806 bp, Glycine max
ctgttccaccgaagcactctctgtctttctctgttgttgtctcgaaaaccctgaacccaaagggttcgtttgtagcttcttcctccctaaacataccgagttcgccacctggaacccacaactgagtcgtgactcggttctttcacactgaaccatgcaagttttctctaacgctcgccgagcctcttggcttctcctctttcctcatctccgaacctcggaagctcctcactccaccgcgctctctctcttctcagggctcgcgcaacgtgattcccggcaagtgaacaccgatccggtacactgtttgtcgaaggcttttttctcttccggaatggataccgttgaagcaactccatcagaggatgtgaaggaattatacgataaaatgcttgactctgtaaaagttaaacgatcaatgcctccaaatgcttggttatggtcaatgattgcaaattgcaaacagcagcacgatattagacttctgttcgacattttgcagaaccttcgcagatttaggttgtcgaatcttcgaattcatgacaattttaattgcaatctttgccgagaagttgctaaggcatgtgttcatgcaggagctcttgattttggaatgaaggctttgtggaagcataatgtctatggactgactccaaatattgcatctgttcaccatttactgacgtatgctaagaaccacaatgatactaaactgttggtggaagtaatgaagcttctgaagaagaatgatttaccactgcaaccaggcacagcagatataatttttagcatttgttataatacag

SEQ ID NO: 11623 - DNA, 521 bp, Glycine max
gccttggaactttgccgtgaatttgaggataagtttctacagcacattaccacgagcgagggagtgcttggaaaattgtttcctgttttgaggggagatttcctgatagaatgaagcaattacctttagataggcattttgatatcaacaatgtgaagaggattgtgttagaagcagatggttatcagccgtatcttatttcccctgaaaagggattgagatctctaatcaaaggtgttctagagcttgcgaaagagccgtcacgtctttgtgttgatgaggtgcatcgtgtcctgatagatattgtttcgtctgctgccaatgctacccctggtttgggaagatacccacctttcaagagagaggtcgtggctattgcaaccgccgcgctagaagggtttaagaatgaatccaagaaaatggtggttgcactcgttgatatggagcgtgcttttgtcccacctcaacacttcattcgcttggtacaaaggaggatggaaagggcaacgtcagaggaggag

SEQ ID NO: 11624 - DNA, 908 bp, Glycine max
tgtatcaataatggggagataaataaggaagaatgggagaaagtgatggcattgatgcgatctcgtcatcgacagggtgttcaccacagggatggactgcgaactggcctaaaggcgagtgattctgtggaagatggagggctggtggaatacttttttgataaagatggaaatggatgcctccaacatgataaatttgtaaattttttgagaggcttgcatgatgagattctgaggctggagtttgctcattatgactaccaatcttgccaaaccatatcagccaaggactttgcgctctccatggttgcttctgccgacatgagtcatctaggcaggttgcttgaaagggttgatggactgaatgatgatccacgccttaaggatgcacgaatcacatttgaggacttcaaaaactttgcagagctacggaaaaagttactgccattttcattggcccttttcagttttggagaagtaaatggcctgttgacaagagatgattttcagagagcagcatcacatgtatgtggcatatctctgtcggacactgtggttgaaattgttttccatttgtttgatgcaaatcgggatggaaacctaagttttgacgagtttgtcagagtgctacacaagcgcgaaagggacattgcacaacccgtggagacaggaatacggggttggttgtcttgcggttggaactgtacgcataacttctcatcttcatgattgttttcctgatatagaagatttaatgccacaaacatttcaagaacagacataacagaatggattggaacccttgatgggaagagaaaaacgaaagaaaaacaaaggaagagatgggtagtgatggttggtctgggactggagaagtttcccgtaaaatacatttgtgggtcaaacac

SEQ ID NO: 11625 - DNA, 983 bp, Glycine max
aaagacaagctttcttaatttggcggcgcagacgggcaagacttgaggaaaatgagaatcttgtcctaaccccgtttgagaaaaatcttgatatttggagacaactctggcgggttgttgagcgcagtgatttgctcgttatggttgttgattcccgagatccactattctatcgctgtcctgatcttgaggcatatgcacgagaggtggatgaccataaacgcacattgctcttggttaataaggcagatcttttacccgcttctgtcaggtttaaactttttgtatatggtttattgttatattccgttaaatcaacactcttggttttccatccagctaatattcttatcatttgtcttctcccctgcccttttttcttgcagagagaaatgggtagagtatttttgtgctcataatattctatatatcttctggtcagctaaagctgcttcagcagctgttgaaggtaaaatgcttaggtcaccattggaagctgatgattcagggaagaacaataatccagacacgaagatatatgacagggatgagcttcttgcacggatgcagtcagaggcagaaaagatagtagagatgaggagaaattctagctctgacacagggccgtctaacattcaatcttctggtgaaaatgttggtggtagttcctcatcaaataatgtaattgtgggatttgtcgggtatcctaatgttggcaaaagttcaactattaatgctctggttggtaaaaaaaggacaggtgtcacctctactccagggaagacaaagcatttccaaacgttaattatttccaacaaactgaccgtttgtgactgtcctggattagtttttccatctttctcaagctcaaggtataggatgattgcttgtggagtgttgcctatagataggatgactgaacacagggaggctgtccaagttgtagctgataaagtttcaagacatgtcattgaggagattta

SEQ ID NO: 11626 - DNA, 875 bp, Glycine max
gcgtcacctcttatctttctcttgttaactaattaaaatgactctcagaaaagccgtgttctttgtaatcgctcaatgcttcaccttttccgcatatgctgcaaggtttgaaatcacaaaccgatgcacatacactgtctgggctgcgtctgtgcctgttggcggtggcgtgcaattaaacccgggccagtcatggtccgtggacgtgcctgcaggaacgaaaggggcccgcgtttgggcccgaaccggctgcaacttcgacggttcgggccgcggtggatgccagaccggtgactgcgggggtgtcctcgactgcaaagcttacggtgcgcctcccaacaccctggctgaatacggcctgaacgggttcaacaatttggacttcttcgacatctccctcgtcgacggttttaacgtgcccatggactttagtccaacctcgaatggatgcacacgtggcataagctgcactgcggacattaacggacagtgccctagtgagctaaagactcaaggaggttgcaacaacccttgcactgtcttcaaaaccgaccagtactgttgcaattccggtagctgtgggcccactgattattccagattcttcaagcaaaggtgccccgatgcttatagttaccccaaggatgatccaactagcaccttcacttgtaatggtgggactgactatagggttgtcttttgtccttgaacccaataaccttacataatatataatatatgcactaaaataaagatcaataaaattacataaggcgtgtgcactttgcgtgcccctcctcgtctatgatgtgtgtacttctattctaaatgaaatggggtacttatgaataatatattaaactctttgggcaatg

SEQ ID NO: 11627 - DNA, 334 bp, Glycine max
attctcttatctttctcttgttaactaattaaaatgactctcacaaaggccttgttctttgtgaccgctctatgctgcacctctgccgcatatgctgcaaggtttgacatcacaaaccgatgctcataccctgtttgggccgcggctgtgcctggcggtggcaggaggctgaactcgggccagtcatgggctttagacgtgcctgcaggaacgaaaggggcccgcgtttgggcccgaaccggctgcaacttcgacggcttgggccttggtgtatgccatacctgttgcttgtcgtggattaatgcttccacttctcctatcttggtataggact

SEQ ID NO: 11628 - DNA, 453 bp, Glycine max
tttaacaaatttcatttcacccccttaatatttgcacatatctgcatgcaatggttattcttagagaaattggctaccttatttctgatgggaaggcatctcagaatgaaggtgagggcagaggagcaggtatcaaaaccaggggagtttagtcaccaagagaatgagtcaaagggcagcatagatagtgagaattatcttgagagggatgaggtcaaaatggtgatggctaaacttggattttttttgcagctcagaaagtgaggaacttcaggagaagtatggttccaaggagctttctgaactgtttgaggagcaggagccaagtttggaggaggtgaagcaggcttttgatgtttttgatgagaacaaagatggctttattgatgctgaggagttgcagagagttctttgcattttgggattgaaggaagcagcaaaacttgagaactg

SEQ ID NO: 11629 - DNA, 1116 bp, Glycine max
cgacgaaaccgtgagcgacggggggagtttaaattgctctgtgccgggggagcagatgctgaataggttgataaaatttgaagagaatggcaagtttaaggagtataagtgtgggagggagggtaataagggtatgggtgcgtttgtgagggagttgaaggaggaatttagtgggttggagtatgtatatgtgtggcatgcgttttgtgggtactggggaggggttaggcctaaggtgccggggatgccggaggccacggtggttccgaccaagttgtctcccggagcggagatgactatgacggaccaggcggtggtgaagatcatggagattggggtggggttggtgccaccgcatcgggcgcatgagttgtacgaggggcttcactctcatctggaatcggtgggaattgatggtgtcaagattgatgtcacgcatattctagagatgctatcggaggaatatggtggtcgtgtcgaactcgctaaagcatattacaaagcactcactgcttccgtgaggaagcatttcaaaggcaatggtgtcatttcaagcatgcagcagtgcaatgatttcatgttccttggtacggaaaccatatcacttggacgagtcggtgatgatttttggtgcacggacccagctggagatccaaacggtacctattggctgcaagggtgtcacatggtgcactgtgcttacaacagcttgtggatgggaaatttcatacacccagattgggacatgttccaatctgatcatgcttgtgccgaattccacgctgcttctagagccatttctggtggaccaatttatgtaagcgactctgttggaaaacacaacttcaagttgcttaagaagcttgttctacctgatggctccattttgcggtgtcaacattatgcacttcccacccgagactgcttatttgtagatcctttacatgatgggaaaacaatgctcaaaatttggaacctcaataaatgttccggggttttgggtctgttcaattgccaaggaggaggttggtgccctggtactaggcgagacaagagtagctctgactattcacactccgtgacttgctttgcaagtcctcaagacattgaatgggg

SEQ ID NO: 11630 - DNA, 393 bp, Glycine max
  unsure (1)..(393): unsure at all n locations
accgacgcgtcaacccacgcatccgcggacgcgtgggaaaanaatgtttgcntgatgccattgcccgtatggaaagggcagctgaacaaaggaaaagcaattgcagcagctgttgaaggagttgcaatacactggggaacatcagactccaatacatcagtcattgagactctgccggagcaaatattcaagccatcattgtccacaatcattcccgagaattcaaaacttgtaacagtatcaccaacagattcagttctgacagcaacaaagatgatgggtgaaatttcgtgcaaagttgtgcagttgtgacactttaatgacaaacctcgtggcatctttacttcacatgatattttgttccgggtaagtgcccacatctttctccagaat

SEQ ID NO: 11631 - DNA, 814 bp, Glycine max
atcaattccgaataaaaattaggtttttctcttcgtctttcattttcttattcttcaccaaaccgataagcaggaaatagctagtgagactaatccatcatccaaacctttccgatccaatgacctctaaactaattgcttccaatctccgtcaccaaatcacaaaatcagctcaaaaccttcgccgccagcttctttccacggcggcggcggtcgacggtgcctgaacacgatgggaacaactccaactcgtcgggaatgacgatgaagggcgttcgaatctccggaagacccctttacctggacgtgcaggcaacatctccggtggacccgcgcgtgctcgacgcgatgctccctttctacctctctcgctacggaaaccctcactcccgcacccacttctacggctgggaatccgacgaggccgtggaacacgcgcgcgctcaggtagcgtccctcatcggcgcgtcccccaaggagatagtcttcacctccggcgccaccgagtccaataacatctccgtcaagggcgtcatgcatttctacaaggacaagaagcgccacgtcataaccacgcaaacggagcacaagtgcgtcctcgattcctgccgccacctccagcaggagggtttcgatgtcacttatcttcccgttgagtccgacgggttgattgatttggatgagcttcgggcttcgattaggcctgacaccgggctcgtttcggttatggcggtgaacaatgaaattggagtggttcagcccatggaggaaattgggaggatttgcaaggagtttaatgtgcctttccacactg

SEQ ID NO: 11632 - DNA, 1057 bp, Glycine max
agattgtcaatgaagctgctaaattcagataccggagtggtaaccaatttaattgtggaggtttaacagttagagccccttatggagctgtgggtcatggtgggcattaccactctcagtctcctgaggctttcttctgtcatgttcctggtatcaaagtggtcatccctcgaagtccacgggaagcaaaagggttattgctatcttgcgtacgagatccaaatcctgtagtattttttgaaccgaagtggctttatcgtttggctgttgaagaagtaccagaggatgactacatgctgcctttatctgaggccgaggtaattcggcaaggaagtgatgtaacacttgttggatggggagctcaattagctataatggaacaagcttgtcttgatgctgaaaaagagggaatttcttgtgaattgattgatctgaagacactaattccttgggataaggaaacagtagagtcctcagttaacaagacaggaagattgcttgttagtcatgaagctcctataactggaggttttggtgctgaaatttcagcttctattgttgagcgttgcttctcaaggttagaggcccctgtagcaagaatttgtggtctggacactccttttcctttggtttttgaacctttctacatgccaaccaaaaataagatattggatgcaattaaatcaactgtgaagtactagtgagcttaatcaccattttttggtcatctataaggtcctgatgccattgagtgatgcattagtatattgcaccatggagttggaaggttatacaaaaatgaaatataaatgatcagcaaaaaaagaacaatgggcatgcacatgtaacactattaattttctcttacgaggccctgtgtactgagaaacatcaaatatttgaagggagtgatccccattagtaaatctcctacaataaatggacgttttccctttaaatgtgaagttgataactcaaatcagtcaaatgtctacgtcctgccaattgtagcttgcacgatatatatatatatatataaatttcataattttagata

SEQ ID NO: 11633 - DNA, 1794 bp, Glycine max
ctggacgacagaagggggagggcaaaaagtcggaaccaccggagaggagggcttcacacagagaattacgcggttgcagcagtcaacgcccgggattcccacgtccataccaaccacaacaggcggagagagagtttaggccttagtgagaaggataacgccatttggttttggcttggaatacgtcatccactatcaatcaactgggctttgaaatggtgaaggagaccgaatactatgacgtgctgggtgtcagccctacggcatccgaagccgagattaagaaagcttattacattaaggcacggcaagtgcatccagataaaaacccaaatgaccctcttgctgcacaaaattttcaggttttaggtgaggcttaccaagttctgagtgacccagctcaaagacaagcttatgatgctcatggaaaatcaggaatttcaactgaagcaattattgatcctgcagcaatctttgccatgctttttggtagtgagctttttgaggaatatataggtcagttagccatggcatcaatggcttcaatggacatctttactgaaggagaacaatttgatagtaaaaagttgcaagagaaaatgagggttgttcagaaggagagagaagaaaagcttgcagagatactgaaaaatagactcaaccaatatgttcaaggaaacaaagagggttttgttaatgatgcagaagctgaagtagcccggctatctaatgcagcttatggggttgatatgttgaataccattggctacatatacgcaaggcaggcagcaaaagagctagggaagaaagcaatttatttgggtgtgccttttattgctgagtggtttagaaacaaagggcactctattaaatctcaagttacagcagcaacaggggcaattgctttaatccaattgcaggaggatatgaaaaagcaactcagttcagaaggggactatactgaagaagagcttgaagaatacatgcaaaatcacaagaaattaatgattgactcattgtggaagcttaatgtggcagacattgaagccactctttcccgcgtttgtcaaatggttcttcaagacaacggtgccaagaaagaagaactccgcgctcgagctaaagggttaaaaactcttggtaaaatcttccagagggttaaatcagccaatggaaacgagaatgaaagtgtaccaaataaggcagtacacaagttgaatggacagtgaaactggcaatgatacttctcctagtacatcacccaaatcttcaagtcctgatttttcgtctcagagcccctatgtggaggccccgcgctttgctggcatgcaatttgattataatttccctaggccaaccgcccccccgggtgcccagagacctacttcaaccagcaaggattgagtttgatatccggtttgtagtttatttgattgtttgttggtttttgagggggtgtattgtatgtatcgctcgtgtggaatgtgcctgtatgtgctggagatcgcatcttgtcggcggggaccgcattgtgcagtgttgttttgcttgtctaataattctacgcatagatgagggaatgataatttaaggtagtgctatcactgccagctggtcgtgattggctgccatgtattttgaattgtgtattttgttggggtgcttgcactaaggttactcttttttcgtaagaggtagtgcgatgtccattttagtagggattcctgtataataactcaatttaacagataacatgatatatatttgggttgatactttcaaaaaaaaaaaaaa

SEQ ID NO: 11634 - DNA, 514 bp, Glycine max
cccacgcgtccgcccacgcgtccgcccacgcgtccgcccacgcgtccggcaaaagtgatatatcgagacttcaaagcttcaaatatcttacttgattcgaattacaatgcaaaactttctgattttggcttggcaaaggatggaccagctggtgataagagccatgtctctacaagggtaatgggcacatatggctatgctgctcctgaatatatggccacaggtcacttgacaaagaagagtgatgtatacagcttcggggttgttctgcttgaaattatgtccggcaaacgtgcacttgacagcaacaggccaagtggggagcacaatttaattgaatgggccaaaccttacctcagcaacaagcgcaggatcttccaagtcatggatgcgcgcattgaaggccaatacacgttgcgcgaatcaatgaaagtagccacccttgccattcaatgcctgtctgtggaaccaagatttagaccaaagatggatgaagtggtgagagcattggagg

SEQ ID NO: 11635 - DNA, 392 bp, Glycine max
  unsure (1)..(392): unsure at all n locations
gaaattaattatctggggcagctgcgtcatctctaatcttgtgaaactgattggttactncgtagaggtcgatcaacggcttttggtgtatgagtttttgaccaaaggaagtttggataatcatttaattaggagagcttcttactttcaaccactttcttggaacttccgtatgaaggttgctcttgatgctgctaagggtcttgcatatcttcatagcgatgaagcaaaagtgatatatcgagacttcaaagcttcaaatatcttacttgattcgaattacaatgcaaaactttctgattttggcttggcaaaggatggaccagctggtgataagagccatgtctctacaagggtaatgggcacatatggctatgctgctcctgaatata

SEQ ID NO: 11636 - DNA, 460 bp, Glycine max
agttactgttgatgttggccacacaccaagggaaaatcaaagcacagggaaaatggtcttgccctttgagccactgtcaatagcatttaaggatgttcagtattttgttgacattcctccggagatgaaaaaacttggttccgttgagaaaaggctacaattgctttgtgatatcacaggagcctttaggccaggaattctcactgcactgatgggggtcagtggagcaggaaagacaactctgatggatgttctttcaggaagaaaaactggaggtatcattgaaggagatataagaatcggaggctaccccaaagtgcaaaagacatttgaaagagtttcaggttactgtgagcagaatgacatacattctccatatataaccgttgaagaatctgtcacatactcagcttggttgcggttgccaacagaaattgattctgtcacgaaagggaaattt

SEQ ID NO: 11637 - DNA, 435 bp, Glycine max
ttgcaaattgagaaacgtttgagaactgatttggaagaggaaaaggcacaagaaattgctaagttacaggaagctttacatgcaatgcaaatacaagtagaagaagcaaataccaaggtcatcaaagagcgcgaggcagcacgaaaggccattgaagaagcacctccagttgttaaggagactcctattataattcaagatactgaaaagattaattcattattggctgaagtcaatagtttgaaggaatcactcctattggaaaaagaggctaaagaagaggccagaaaagctcaggctgaggctgaagctagaaataaagagatggttaaaaaggttgaagattctgaccgcaaagtggatcaacttcaagaattggttcagagattggaggaaaagatttccaatgcagagtcagaaaatcaagttcttcgc

SEQ ID NO: 11638 - DNA, 436 bp, Glycine max
gaagcatcaagatttagccccaagcctgatataattttgcagaggtgtgatccaacataccaagcaacaaaattgcattttgaagacctagctaagagatatggcaatccaattattgttctgaatttgattaagacagttgagaagcggcctcgagaaatgatgttgaggcgtgaatttgcaaatgctgttgggtatctgaaccaaattctaccagtggagaaccatcttagatttattcactgggattttcacaagtttgcaaagagcaagtctgccaatgttttggcagttttaggagctgtagcaagtgaagcgcttgatttaactggtttttactacagtggtaaacccagcatcattaagagagccaacaagagcaatcaaacaagcacagggagggatacttcactgagagatctgaaagctagttctg

SEQ ID NO: 11639 - DNA, 1225 bp, Glycine max
aaaaaagtttccatatacacaaagagagtgacgagaaagaaaaatggtgtggaatttgtcgctgtcagcaactagggtagggttccctccgccaaacccaaagaaagagtagaagaaacctacaaaactcatctctataaacaactccgtttgtcactccggcggctttagcaatcactccctccgttttgcgttttggattcatttatctgctgctttatcttaaaggccaagcgataaataacctctctctctctctctctctgtgagattgagaatccgatccttcgtttccgaaattctcgcgagatggacgagaacctgctcgacgatattatccggaggctcgtcgcggcgaagaacggtagaacgacgaagcaggtgcagcttacggaggcagaaattcgacaactctgtgtttcctccaaagagatctttctcagtcaacctaatcttctcgaactcgaggctcctattaagatttgtggagatgttcatggccaatactcagatcttttaaggttgttcgaatatgggggatacccacctgaagcaaattatttatttctcggagattatgttgatcgtggtaagcagagcatagagacaatatgtttactcctcgcctacaagatcaaatacaaggagaatttctttcttctcaggggcaaccatgagtgtgcatccatcaatcgtatatatggtttctatgatgagtgtaagaggaggtttaatgttcgcctctggaagacatttactgattgctttaattgccttcctgtcgctgctctgatagatgagaagatcctttgcatgcatggtggactatcgcctgatcttaaacacttggatcagattcgaagtattgctcgtcctattgatgtgccagatcatggccttctctgtgaccttctatgggctgatcccgataaagatcttgatgggtggggagaaaatgaccgaggtggtcatttacatttggggctgacaccgttgctgagtttcttgaacatcatgatctcgatctgatttgccgagctcaccaggttgtagaggatggatatgagttttttgccaagcgtcagctggtgacgatattctccgcaccaaattactgtggtgaatttgataatgctggtgctatgatgagtgtggatgacaccttgacatgctctttccaaatacttaaatcttctgaaaagaaagggaaaggtggatttggcat

SEQ ID NO: 11640 - DNA, 388 bp, Glycine max
gtataatttgtccttgtcagcaactagggtagggttcttactaatggccattccctccgccaaacccaaagagtagaagaaacctacaaaaggaatcctctataaacaactccgtttgtcactcgtgtcttgcgagcgggaaacggcggctttagcaatcactccctcgtcgttttcccccgttttctctcccttttccccgttttgcgttttggattcatttctctctatcttctgctgatttatctacaaataaccgctctctctctctctctctctgagactgagaatccgatccttcgtttctgaaattctcccgagatggacgagaacgtgctcgacgatattatccggaggctcctcgcggcgaagaacggtagaacgacga

SEQ ID NO: 11641 - DNA, 547 bp, Glycine max
gtcgacctctgtcaatcagcatgggaaatgcaattagatttctcaaaagtcggatagccaagctacctttgaccttgtctgaatcagaagcaaaagcttctctcgagtcagatattgagtgttttataagtgaaaagattatacttgccaacaaggtgatagtgaagcatgctgtcaccaaaataagagatggtgatgttcttctaacttttgggtcttcatctgctgttgaaatgatactattgcatgcacatgagttgggaagacagtttcgtgttgtggtagttgactctcgtccgaagcttagagggcaactcttacttcgccggcttgtggagaacggtcttagctgtacatacactcatataaatgctgtttcctacataatgcacgaagttactcgggtttttctgggtgcttcagcagttttgtctaatggaacagtatattcaagagtggggactgcatgtgttgcaatggttgctcatgcattccgtgtacctgtcatagtatgttgtgaggcctataaatttcatgaacgggtaca

SEQ ID NO: 11642 - DNA, 554 bp, Glycine max
  unsure (1)..(554): unsure at all n locations
gcaagcgcaagagggaggaggaatggtggatcatctgttcacgcatcggattaatagcagtgtattacatgctagtaactatatcaagcaatttccttcgcctatcatatctatcattgcaaaattcatctcatttgtatcgggtggctttgctgcaattctgatcatcattgcttttctagaggagtctctgctggagggtcatatatttggtcggaacttgttctggtatgctgctgtttttggaactataactgctattagacgggcttcaattacagatgagcttctagtcatagaccccgaaggagcaatgtcaatggtagttgagcatacacattatatgcccaagagatggcggtgaaaagaaagtactgaaatggtccggattgagtttgaaaccttattccagtatactggaatgatgttacttgaggagatggcctcgattttcctcactccatacttacttctgtgggttgtcccaaagcgggttgatgatattttgcaagtcattgctgatttcactgtaaatattganagtgttggccatg

SEQ ID NO: 11643 - DNA, 584 bp, Glycine max
ttcttgcgtccgcccacgcgtgcggggttttcattttctaatctctctctctcccacctttcacactctgtttttcctctccctttctcatccttctcaacacaaaatacacccttctacatggcgactgaagctgagttcgaatatgaagaggcgagtgaagctgagatcaaatatgatgaggaatacgtacagaattctcgaggcttgaagctttttgcatgccgatggcttccggcgaatggaagtccaaaagcgttaatcttcctgtgccatggctacgccatggaatgcagcatcacaatgaaaagcacaggaacaaggctcgcaaaagcgggttttgcagtgtatgggattgattatgaagggcatggaaaatcagaaggggttcctggccttgctatgaattttgattttgtcatcgacgattgctcccaacatttcactagaatttgtgaaaaagcagagaacaagaaaaagatgaggtacttgatgggggaatccatgggaggagctgtggctttacttttgcataggaaaaagccagaatactgggatggggcaattttggtcgcacccatgtg

SEQ ID NO: 11644 - DNA, 454 bp, Glycine max
actcggctcgaggcgtttttctcttcttcttcttcttcgcataatagcagcaacaatggtgaagcactacagacccccggggaagaaaaaggagggaaatgctgccaaatttgtcattaggtcacaagcaatcaagcagcttcaaatcagtctaccccttttcaggaaactatgtattttgaaaggtgtaactccaagggagcctaagaaaaagttcaagggaactcatcagacttattaccatgtcaaggatgtttccttccttcatcacgagcctttggttgaaatacatagagcgataagagtgcatgagagaaaaattaagaaagccgaggcaaagaaaaaccttgaacgtgctaacaggcttcgcgagaaaacacccaaacccaagatcgataggattattcggcagaggtacccgagatttgtggatgcacttggagaattggatgac

SEQ ID NO: 11645 - DNA, 1592 bp, Glycine max
gattagaggtgggccatgccttcggacggttggagaagactacggaggggggtaacagaagaggaaggcagagaggaaagactttaccgagtccttacgcgttgtttgtgtttgcgtcggaaggaagagaagatgagtgagaatttgatggagaaagtgagcgcactgggagagcgcctgaaaatcggaggcgtggaagtggggagaaagatgagcgaggggatgagctccatgagtttcaagctcaaggagttcttccagcctgggcccaatcaggccgacaagcttgtggaggacgctacttccgaggccctggacgagcccgaatgggccctcaatctcgatctctgcgacctcgtcaacaccgacaagctcaactgcgtcgaactcgtccgcggaatcaagaagcggatcattctcaagagccctagggttcagtacctcgcccttgtcctcctcgaaaccctagtcaagaactgcgagaaggccttctccgaggtcgccgccgagcgtgtcctcgacgagatggtcaagctcatcgacgacccccagaccgtcgttaataaccgcaacaaggccctcatgatgatcgaagcctggggtgagtccaccggcgagttgcgctatctccctgtctatgaggaaacttacaagagtctgagatcgaggggtattcggttccctggccgtgacaatgaaagcttggctccaattttcactcctcctcgttcagtgtcttctgctccggaggctgatgtcaaccttcaacagcagtttgagcatgatattcctgagcagtttcatcatgatgttcccgtgcttagttttacgcctgaacagacaaaggaggcccttgatgttgcaaggaatagcattgagcttctttccactgtgttgtcgtcttcaccacaacaagatgctttacaggatgatttgaccaccacacttgtgcagcagtgtcgtcggtcacagactactgtccagcgaattgttgaaacggctggggataatgaagcagtgctttttgaggccttgaatgttaacgatgagattcagaaggtcctcaccaaatacgaagagttgaagcagcctgcaactactccacttcatcctgaaccagctatgatacctgttgctgttgaaccagacgagtcaccctatcatagtaaagaagatgctttgattcgaaagccagctggatcaaggactggtgtcgagggagggagcaatgatgacatgatggatgatctcgatgagatgatttttgggaagaaaggtggggaagcatcagatgggggacacgagacaaagaagcagccgtcatcgaaagatgatctcatctctttctaagccgcaatatagtctatgctgaatataaaacagagtgcctttaatttcatgccactacttttatatctagatgttgatgttgactctgaactttgttcagacttcagattgcttggtccattatttttttgcacattgtgtgcaacttatgtttgaattatggtatataagttcttgcagggtatacatgggaactctatggagaatttcaatgaggttgtctacttagattattcttcgtt

SEQ ID NO: 11646 - DNA, 602 bp, Glycine max
cggtcgcgtgggaaaagactttacggagtccttgggcgttgtttgggaaacctctggatttgcataaagaaagacggagattagagaagatggagagcgtctgaaaatcggaggcgtggaagtggggaggaagatgagctcgatgagtttcaaggtcaaggacttcttcaatggtgggcccaatcaggccgacaagcttgtggaggacgctacttccgaggccctggacgagcccgactgggccctaaatctcgatctctgcgatctcatcaacgccgacaagctcagtagcgtcgaactcgtccgcggaatcaagaagaggatcgtcctcaagagccctagggttcagtacctcgcccttgtcctcctcgaaacccttgtcaagaactgcgacaaggccttctccgaagtcgccgccgagcgtgtcctcgacgagatggtcaggctcatcgatgaccctcagaccgtcgtcaacaaccgcaacaaggccctcatgatgatcgaacgcctgggctgagtccaccggcgagttgcgctatctccctgtctacgaggaaacttacaagttttaggtctgaacagaccaaggaagcctttgatgt

SEQ ID NO: 11647 - DNA, 838 bp, Glycine max
tttttatgtcctttgagtgtgagaaagaatatcatgttggatgtttgaaggatcataacatggagaacctagaggaattgcctgtaggaaattggttctgtagtggaaattgcagtcaaattcatactgctctgatggatctggtggcttctaaggagaaggatgtcccagatccccttctaaatttgattaaaaagaagcatgaagagaaaagtttagacattggagctggtcttgatgttaaatggagggttataaactggaagttagattccgattctgttgaaactaggaaattgctttcaaaagctgttgccattttccatgagaggtttgatcctatagttgattcaacatctggccgtgatttcattccaaccatgttgtttggaaggaacattcgtggtcaggattttagtggaatatactgtgcagttcttactgtcaatggggatatcgtgtctgctggagtatttcgtgtctttgggtcagaaatagctgagcttccattggttgcgacaactgctgatcatcaaggacagggttattttcagtgcctgttttcttgtattgagacgctacttggatctttaaatgtgaaaaaccttgtcctaccagctgccgatgaagctgagtcaatatggactggtgaatttgggtttacaaagctaccccaagatgagataaacaaatataagaaattttatcgcatgatgatatttcaagggacctcagtggtacagaatcctgtttctgaaacactctgagctactttctagctggagtttgtgtaaagtttttttgtatgccccttatgcaatatactattttcttggtt

SEQ ID NO: 11648 - DNA, 499 bp, Glycine max
gtgctttcagatgcagttgcaacttctgaagacaaaggcattagctggagtaaacggggagaatgtgctcttaatgattcagactgtgtgataactattgatgacatttataaatggcttgcggctactttctttctctggtttgttctggccatttactttgacaatataatcccaaatgcatcaggtgtgaggaaatcaatattgtactttctaaatcccagttattggatgggaaaaggaggtcaaaaagtgaaagagggtggggtttgtagctgtatagggtcagccccacgtcaagaacaaagtacaccagatgatgaggatgtccttgaagaagaaaacaaagtgaaacagcaactaacagaaggtcttcttgatgcaaatgttgctgttcagatacgtggccttgcaaagacatatcctggcacacgtagcattgggtgctgctttaaatgtagaagaacttcaccttacaatgcagttaaggggttgtggg

SEQ ID NO: 11649 - DNA, 853 bp, Glycine max
cgaccaacgtgttggcactgcaaagtgcaaacaagctcgatcacttgaataactcagtcgaagattagattcagattcacggcgaaagaacaaaaccctaaaaaaatggatttccacggcggaggaccactccgttcccgcagttcccagtccccttctccctctcactccgcctccgcctccgccacctcctccatccacaagcgcaagctcgtgtccgaggaccacgcgcctcccttccccccctcctccttctccgccgacacccgcgacggtgccctcacctccaacgacgacctcgagagcatctccgcccgcggcgccgactccgactccgactccgaatccgaggacgccgtcgtcgacgacgacgaggacgactacgacaacgacaacgacaacgactcctccatgcgcaccttcaccgcctccaggctcagcaaccctccctccgctccccgcaacaccaagctcaagaccgaaaactccaccgtcaaaattgagaattctgacggcgccaaagacgccggagccgtcggatctggcgccgccgccgccgcgggaccggtccccgggattgtggttaaggaggacccgactaagatttttactgataatttgcaaaccagtggggcttacactgccagggaggagagtctcatgaaagaggaggaagcaggaaagctcaaatttgtatgcctttcaaacgatggtgttgatgaacatatggtttggttgattggattgaagaatatatttgctaggcaacttcccaatatgcccaaggagtacattgtccgacttgttatggataggagccataagtctgtaatggttataaggcgcaatcacg

SEQ ID NO: 11650 - DNA, 702 bp, Glycine max
caaagatggaagacgcaagtcaggtttattaggggaagcgtggctagcagagactagagagatagaattagaattaaaaagcgtgaaggacagtgataggtttggtttggaaggaagaagaaaatgaaggccatagtgataacgaggccaggaggtcccgaagtgctccaacttgaggaagtggaagatcccctagtcggagacgacgagcttctcatcggagtccacgccacttcccttaacagagccgatacctttcagaggaaaggctcctaccctccccctaagggcgccagcccttacctcggtctcgaatgttccggaactgtcctttccctgggtaaaaacgtttccagctggaaaatcggtgatcaggtgtgtgctcttctcgccggaggcggatatgccgagaaagttgcagttccggtaggacaagttcttccggttccagccggtgtttctctcacggatgcagctagttttcctgaggttgcttgcactgtctggtcaactgttttcatgatgagtcgcttatctcaaggggaaaccttgttggttcatggaggttccagtgggattggtacatttgcaattcagatagccaagtatcgagggtcacgagtgtttgttactgcaggaagtgaggagaagctagctttttgcaagagtatcggagctgatgtgggcatcaattataaaaca

SEQ ID NO: 11651 - DNA, 1902 bp, Glycine max
cctcgagaggttgagttggttcttgcccagttcagacgagctaaagggagggttgatgaaccagatgtcaggttgtatgaggatatgttgtctgtttacaacaacagcagtgatgcagctacagatccatctgttctaagtcaattagctgaaaagttgaaattgatgggaatagctgatcttactcaagaatcacttgctttgcatgagatggtggcatcaagtggtggggatccaggggcacgcattgagaaaatgtcaatgttattgaagaagataaaggatttcgtgcaaatagaaaatctagtcaaggatgataatttaggaggaaaaggcattttctcaaaagtctatggacttgggacaaatgaaaagagtcatcaggctcctgttatccctgatgattttcgatgtccgatttccctggaattaatgaaggaccctgtcattgtttcaacgggacagacttatgagcgtacttgtattgagaagtggttgcaagcagggcatggaacctgccccaaaacacagcagactctcactagtactgttctcacgcctaactatgtattgcggagcctcatagcacaatggtgtgaagccaatggcatagagccaccaaaacgacctagtggttcacaacctagtaaatcagcatcagcctactcacccgctgagcaaagtaagattggaagtcttctccaaaagctcacatctgtgagtcctgaagaccagagatcagctgctggcgagatccgccttcttgcaaagcgcaacgcagataaccgcgttgccattgctgaagctggtgcaatacctctccttgttggtcttttgtctgtgcctgactcccgcactcaagaacatgctgtgacagcgctcctgaatctttccatatacgaaaataacaaaggaagtattgtttcttcaggagcagttccaggtatagttcatgtgctgaagaagggaagcatggaagctcgggaaaatgcagctgcaacacttttcagcctttcagttatagatgaaaacaaggttacaattgggtctttaggagccataccaccactggtgacactgctaagtgagggtagccaaaggggtaagaaagatgctgcaacagcactcttcaatttgtgcatttaccagggcaacaagggaaaggcagtgagggctggcgttattcccacactgatgcgactactgaccgaacctagcgggggaatggtggatgaagcattagctattttggcaatattggccagccatcctgaagggaaggctactattagagcttcagaggcagtgccggtgttagtagagtttattgggaatggctcaccaaggaacaaagagaatgcagctgccgttttagttcacctctgttctggagatcaacaatatcttgcacaggcacaagagctgggggtgatgggtccactgttagaattggctcaaaatggtacagacagaggcaaaagaaaggctggacaattgctagaacgtatgagcaggttagttgagcaacagcaggaagttccaatacaaactgaaactcaagctcagaacgaggatacccaaccacctttgattactaaccccgatgattcctaagatgtcttattatactttgttcattttgtctttttgttctctttaaagtgttgaaagaagcatctgtttggaggaaagggtggaagatcaccttcctactccataagttatttgtttgtttgtgtgatattcagcagagatgtaatgcaaaaaacttgtgaaagtgggcaagaagaaatcgaagcaaatgggcaagcttgaagtggaaaatgtataatttgtaacatgcactgtattctaatcatcctcagattttaatgaagagatgttttgtttattcgtcccgcc

SEQ ID NO: 11652 - DNA, 1939 bp, Glycine max
aaattatggattgcaatggggaagttgttgatcttcctgaagaccgggcaaataatgtctctgctgttataaatgcctttgcctctgaagctttgagaactatttgcttggcctttaaagagataaatgaaacccatgaacccaacatttcagatagtggctatactttcatagccttagtaggaatcaaggatcctgtacgccctggggttaaggaagcaattcaaacttgtatagctgctggaataactatccgcatggttactggtgataacataaatacagctaaagctatagctaaagaatgtggtttacttaccgagggtggtctagccatagaaggtccagattttcgtgacttgtctcctgagcaaatgaaggatgtcataccaagaatccaggtgatggcacgatccttaccgctcgacaagctcagattagttaccactttgaggaaattgtttggtgaggttgttgctgttactggtgatggaactaatgatgcccctgcactgtgcgaggcagacattggacttgcaatgggcatagcaggaactgaggttgccaaagaaaatgccgatgtcattataatggatgataacttcacgactattgtcaatgttgtcaaatggggacgtgcagtatacataaacattcaaaaatttgtgcagtttcaattgacagttaatgttgttgctctggttatcaacttcttttctgcgtgcatcactggatctgctccactcaccgctgttcagttgctttgggtcaacttgatcatggacactcttggtgcattagccctggctactgaacctcctaacgatggacttttgaaaagacccccagttgcaaggggagcaaactttatcaccaaacctatgtggaggaatatcataggtcaaagcatatatcaattaatcatcctagggattctaaattttgacgggaagaggctactcggacttagtggttcagatgcaacgaaagtgctcaacactttgatattcaactcctttgtattttgccaggttttcaatgagataaacagccgagaaatcgaaaagataaacatattcaaaggcatgtttgagagctggatatttttgacggtgattttctccacagtggtgtttcaagtactcatagttgagttcctgggaacatttgccagcacagtgcctctaagctggcaattctgggtgctcagtgtcgtaatcggagcagttagcatgcctatagctgctattcctcaagtgcatcccagttgaaagagatactagtaagcagcaccatgatggttatgaagcactgccatctggtcccgagctggcatataatattataagaggcattaccctggttgctctgctgatttctcctactagtgtagtgtgcttttaatgctgtcattccttacggcattgcaaatttatgtaattttgtaaagacttgataccatacggaatttccaggcatgacaaaacatatatgggtgttgagtaaagaaatgattgaaggcaaatatgccaacaacagtcctctttgcgcactgaacataactagtttatatctgtttatgtcagaaccagctgtttgaggagcatttttatttgagaacagttccaaaacttttgcaattcgttacttaccataaattcatttaagagtcttgttgtgcaaaactcaaaaaataaacacctttcatgacaagggggatgctcatgctatctgatactccacatattttgcactcctgcatttgagcagtgtgtggaccatttggattgtaatacaaagatctcagcacttgctacatttataatgacgttcatttttgttgtacagaaactagttagtcatcgaacttcatagttcactggtgcatttttgtaatgtacaatatatttttttgtaatatacttttttacatgtttat

SEQ ID NO: 11653 - DNA, 413 bp, Glycine max
gagaaatcgaaaagataaacatattcaaaggcatgtttgagagctggatattttttacggtgatcttctccacagtggtgttccaagtactcatagttgagttcctgggaacatttgccagtacagtgcctctaagctggcaattctgggtgctcagtgtcgtaatcggagcatttagcatgcctatatctgctatactcaagtgcatcccagttgaaagaggagatgctacaacgccccatgatggttacgaggcgctaccttctggtcccgagctggcataaaatacgggaaggaaaaacataacttttcccttctaagattttctttagtgcaaatgtggctgaaattttggcctctgtggcatactacaaatcttgtcttttggcttcgtttttaagaaattttctccc

SEQ ID NO: 11654 - DNA, 627 bp, Glycine max
atatttatggcgataattgtcgccaccgctgcatttcaagtggtgatagttgaattccttggaacgtttgccagcactgtgcctttaaactggcaattctggttactaagtgtggtaatcggagcatttagcatgcctatagctgctatcctcaagtgcatcccagttgaaagagatgctagtaagcagcaccgtgatggttatgaggcactgccatctggtcccgagctggcataaaatattagaagagtatggtttcgttttccttttcttttgtttttgggtcatgaacatttttgtttacgtattttgatttttaggacactaaccttacgaaaaacaactagatagatgaacattgacaagaatgcctaaccaagctacttttttacattaaggcattaccctggttgctctgctgatttctcctactagtgtagtgtgcttttaatgctggcattccttacggcattgcaaatttatgtaatttcgtaaagacttgataccatacggaatttacaggcatgacaaaacatatatgggtgttggaaaagaaatgattgaaggcaataccaacaacagtcctatcctctctgcgcactgaacgcaactagtgtatgtttatct

SEQ ID NO: 11655 - DNA, 438 bp, Glycine max
cccacgcgtacgcccacgcgtccgcccacgcgtccggctttgttgtacgtgtgaaactgtacctttcaagccttatacccaccgttaccatgttccttataaagcatctcacagtacttcacccttctggtattctatcaagagagcttcagctcacatcattgttttggcctcatattcagcgtatggtaatgctagatatgtcttttgcatgatacatacttatgtagagagcactggctgattctatgatttcagacgaacacgattctgtatgtaataattacaccttactgattacctatatgacttggaaaagatcaaatttgactgaataatttcagttcttagatctatatatatctatctgtatgtatgtatgttaccattaaatgtggaatgttaaatatcacagacaaacacttgccttaaatgatc

SEQ ID NO: 11656 - DNA, 1358 bp, Glycine max
atcattataaagatcagacagtgccttggcataataaattcgcgagtgttgcgaccctggatcactagaatcacgggttttgagcaaaatgggtgttgtggagggtctcttggcattgggtttgattctgaatgtgtgtgttgtgtgcaatggaggcacaagcagccccttcgtcaggaaagttgagaaggctgtagatatgccacttgacagcgatgtctttgctattcctcctggttataatgccccccagcaggttcatataacgcaaggtgacctagtggggaaagcagtgatcgtgtcatgggtgactgtggatgagccggggtcgagcgaagtgcgttactggagtgagaacagtgaccagaagaagatagttgaaggaaaacttgttacttataggttcttcaattacacatctggttttattcatcacaccaccatcagaaatttggagtacaacaccaaatactactatgaggttggacttgggaacacaacacggcagttttggtgtgtgactcctcctgaaatcggtcccgatgtgccatatacatttggtctcataggggatcttggtcagagttttgattcaaataaaactctttctcactatgaattgaacccaagaaaaggacaaactgtactattcgttggagacctctcttatgcggataactacccaaatcatgataacattaggtgggattcttggggaaggtttacagaaaggagtgttgcttatcaaccatggatatggactgcaggaaaccatgaaattgattttgctccagaaattggtgaaactgtacctttcaagccttatacccaccgttaccatgttccttataaagcatctcaaagtacttcacccttctggtattctatcaagagagcttcagcacacatcattgttttggcctcatattcagcgtatggaaaatatacaccacaatataaatggcttgaaaaggacctaccgaaggttaacaggacagagactccttgggggatggttctcatgcattcaccttggtataatagctacaattatcactattatggaaggggaaacaatgagagtcatgtatgagccctggtttgtgcagtacaaggttgatgttgcgtttgctggtcatgtacatgcctatgaacgatctgagcgtgtttacaatgttgcatacaatattgtaaatggtctttgagctcctgtaaatgataaatcagatcctgtatatataaccattgtggatggaggaaaccttgaaggtttagcatccaacatgacggaaccacagtcaaagtattctgcattccgagaggccatctttggacatgccatttttgacataactaac

SEQ ID NO: 11657 - DNA, 592 bp, Glycine max
  unsure (1)..(592): unsure at all n locations
tcgagcgaatcggcgagagagctagaggagaaaggaggaaagatgagtagttcatcaaggccggtgccgaggagagagagtccatggggagtcaccggagagaatcatcctgaacccaaagctcaccgctgcaatgaccgtgtcgaggacgttattcaggcttgctttgagggaaacccattcaagactgttccgggacctttcaagctcttctggcagtgcatgcgttccaaacccggtgaggaaccaacagccccatttacttatctggatttggagcctctaaagagagaaacggaacctgtgaaacctgagtagtgtcacttttacttacaaatgccttaacagctttggcactgcatggtcctttagtggtttctaaatttccctccgtgtggattttttttttttgagaaaaatatgtaactaaattgtttttgttgctttgctacataaaacagacgtcctatgccgctttgttctgttctttggtggtacttgctcaataaaacatggctaggtgcgttcttgaataacttatattantaatgttgatgttataacaaaacattaattaatgttctgctggatt

SEQ ID NO: 11658 - DNA, 921 bp, Glycine max
gacccacgcatcagaaaaataacaattaaccacacgactcacgacccagtaaccgggttctgcaaatttcgccacttgcagatgaaaagttccaaactttccactccaatccccggttaaatcctaaccccttgttcctttcactggttcttagaactactaggaccttgccaccaccatggctgccaaaaaggcatgtgagacattctcaaagtcattgattgaggaagtgaatagatggggttgcttgaagcagacaggggtgagtctcaggtacatgatggaattcgggtccaaacccactaacaagaatttgctgatctctgcccagtttcttcacaaggaacttgccatcagaattgccagaagggccgttgaacttgagaatcttccctatggtttgtctcaaaaacctgctgttctgaaggttagggattggtatgtggattctttccgtgatctcagagccttccccgacatcaagaatgtgaatgatgaaagagagttcactgaaatgattaaggccatcaaagtgaggcacaacaatgtggtacccacaatggccatgggagttcagcaattgaagaaaggtatggatccaaagattgtttatgaagatcttgttgagattcatcagttccttgaccgcttctacatgtcaagaattggaatccgtatgcttatcgggcagcatgttgagttgcacaatcccaatcctcctccccacgtcgtgggttacatacacacgaaaatgtctcctgtggaggtggcaaggaatgccagtgaagatgcacgttctatatgttgtcgtgaatatgtaagtgccccttatgaacttatttagggagatcctaattttactttaccgtatgttccagctcacttgcatcctatggtatttgaattggctaagaacttact

SEQ ID NO: 11659 - DNA, 624 bp, Glycine max
  unsure (1)..(624): unsure at all n locations
aatcaatcaataaaaataacaattaaccacacgactcacgacccagtaaccgggttctgcaaatttcgccacttgcagatgaaaagttccaaactttccactccaatccccggttaaatcctaaccccttgttcctttcactgtaagcattcctcaatttgacaattttctcctctctccacaaaatgatgtgtgtgccactttctctctcctcaattggggtgtgaaagtttccacctttttctttctttctttctttctttctttccattatctatgttagttttgcattgtttgttgtttggcttgcaatcttgttgcatgctggtgttggtgttggtgtcccaattcactctcaaatttcagggttcttagaactactaggaccttgccaccaccatggctgccaaaaaggcatgtgagacattctcaaagtcattgattgaggaagtgaatagatggggttgcttgaagcagacaggggtgagtctcaggtacatgatggaattcgggtccaaacccactaacaagaatttgctgatctctgcccagtttcttcacaaggaacttgccatcagaattgccagaanggccgttgaacnttgagatcntcccctatggttg

SEQ ID NO: 11660 - DNA, 401 bp, Glycine max
ggaatccatccgtcacctagtaaccaggttctgccgagctcgccacttgcagaggagaaagttctaaactttcccctggttaaatcctaaccccagttttcttcctctcactttaagcactccccaatttgacaattttcccctctctcctcaaaaggggtgtgagccactttctctctcctcaattggggtgtgaaagtttctaccttttttcctttctatttttccattatctatgttagttttgcattgtgtgttgtttggcttgcaatcttgttgcatgctggttgttggtgttggtgtcccaattcactctcaaatttcagggttcttagaactagtaggaccttgcgaccatggctgccaaaaaagcatgtgagacattctcaaagtccttgatt

SEQ ID NO: 11661 - DNA, 551 bp, Glycine max
gagctatgacggcagcacgcacgcaagcgtaggccaattcttattctttttctctctttctctctgcttgcggtgcttcacaagccaaatctaacttgtctctgttttctccgatctagtactactatcaatggccggaaaaggagatggtcctgctatcggaatcgatctcggcaccacctactcctgcgtcggagtgtggcagcacgaccgtgtcgaaatcatcgccaatgaccagggtaacagaaccacgccgtcttacgtcgctttcactgattccgagcgtttgatcggtgacgccgccaagaaccaggtcgccatgaaccccgtcaacaccgtcttcgatgctaagcgtttgattggaaggagattttctgatgcctccgttcagagtgacatgaagctatggccatttaaggtcatccctggtcctgctgacaaacctatgattgtggtcaactacaagggtgaggacaagcagttctccgctgaggaaatttcttccatggttctcatgaagatgcgtgagattgccgaggcttatctcggtt

SEQ ID NO: 11662 - DNA, 379 bp, Glycine max
tttttcaattcttattcttttctctctctcttgcgccgcttcacaagccaaacctaacttgtctctagattctctctgcattctctctgcattgtccgatcaatggccggaaaaggagatggtcctgctattggaatcgatctcggcaccacatactcctgcgtcggagtgtggcagcacgaccgtgtcgaaatcatcgccaatgaccagggtaacagaaccacgccctcttatgttggtttcaccgattcagagcgtttgatcggtgatgccgccaagaatcaggtcgccatgaaccccgtcaacaccgtcttcgatgctaagcgtttgattggaaggagaatttctgatgcctccgttcagagtgatatgaagctat

SEQ ID NO: 11663 - DNA, 544 bp, Glycine max
ctcctcagaatgctgtagagccgatcatgacaagccgggattcattgcctttaaagcataactgtcctggtcatagagatacacagacccgactactgattcctcgcaaaccaactagagagttttcccttgatatggaggatttggacggaccgtggactgatcttgctttgaaagggagaattggatcaggttcttttggaactgtacatcatgcagagtggaatggctcggaggttgctgttaaaattctgatggaacaagacttcaaaggtgaacgcttcaaggaattcctgagggaggttgcaataatgaaaggcttacggcatccaaacattgttttacttatgggtgcagtcactaagcctcctaatctatcaattgtcacggaatatttgtcaaggggtagcttgtacaggctgttgcataaacctggcgccacagagatgttggatgagagacgtaggcttagtatggcttatgatgtggctaaggggatgaattatcttcataaacgcaatccttccattgttcatagagatct

SEQ ID NO: 11664 - DNA, 299 bp, Glycine max
caatgatgggagacagacaaagaaacatgaattagggggtatagaagactggagaggtataacagaatagtgggacagtgggagtgaattggtggcattatggcataggcctgggaaggttcttttggaactgtacatcatgcagagtggaatggctcggaggttgctgtgaaaattctgatggaacaagacttcaaaggtgaacgcttcaaggaattcctgagggaggttgcaataatgaaaggcttacggcatccaaacgattgtttacttatgggtgcagtcactaagcctcctaa

SEQ ID NO: 11665 - DNA, 1931 bp, Glycine max
tggacgcgtgggtcgcccacgcgtccgctacaacattcactccctctctcttgtcttttcctctacgttcctgcattgctcgtctcaaacgctaaccatggccggcggaggtttcaccagcggcggcggcgccggagatttcgaggccaaaatcactcccatcgtcatcatttcatgtatcatggctgccaccggaggtctcatgttcggctacgacgtcggcgtttcaggtggtgtgacgtctatgcccccgttcttgaagaagttttttccgacggtatacagaaagacagtggaagagaaaggactggacagtaattactgcaaatacgacaaccaaggattacagcttttcacgtcgtctctgtatctggctggtttgacttcgacgttctttgcttcatacacgactcgtaggttgggaagaaggctgaccatgttgattgctggggtattcttcatctgtggagttgtccttaatgctgctgctcaagaccttgccatgctcatcgttggcagaatcttacttggctgtggtgttggctttgctaatcaggccgtgccagtgttcctctctgagatagcaccttcaagaatacgaggagcattgaatatattgttccagctcaatgtcacaattggcattctatttgctaaccttgtcaactatggcaccaacagaatcaaaggtgggtggggttggaggctatctcttgggttggctggtatcccagcagttctgctaactttgggagccttgttcgtggtggacacccccaacagtttgattgaacgtggccgcttggaagaaggaaaaacagtgcttaaaaagattcgtggcactgacaacattgaacttgagttccaggaattgcttgaggccagtcgtgtggctaaagaggtcaagcatccattcaggaatcttctcaagcgcaggaaccgaccccaacttgtcatttccgttgccctacagatattccagcaattcacaggcatcaacgcaatcatgttttatgccccggtgctgttcaacacgttaggattcaagaacgatgcatccctgtattctgctgtgataactggggctgtgaacgtgctctccactgttgtatcgatctactcagtggacaaagtgggacgtcgcattctgttgctggaagctggtgtgcagatgttcttgtctcaagtggtgattgcaatcatactgggaataaaggtgacggaccattctgatgacctttcaaaaggcattgcaattctggtggttgtgatggtctgcactttcgtgtcttcctttgcatggtcttggggtcctcttgggtggcttatccccagtgagactttcccattggagactcgttccgctggtcagagtgtcaccgtttgtgttaacctgctcttcaccttcgtcattgcacaagccttcctctctatgctctgccacttcaagtttggtatcttcttgttcttctctggctgggtcctcgtcatgtctgtcttcgtgcttttcctgttgcccgagactaagaatgtccccatcgaagagatgaccgagagagtgtggaagcagcattggttctggaagaggtttatcgatgatgccgcggatgagaaagtagcccatgtctctaatggtaatggatttgatccaacctccaggttgtaaatcatttgcattgagtattttagactctagagtaagtacagtacatgcttatgtgggttagtaacaaattaagcaagttatttttttatttcccccaccccatccatgttggtggcctaggcctgcaacaacattctaatcagttaatccaacattgattatcctgttttgcaagccatataagatacagttttttccacccacccttttctttttgtaaattgtttctttgaaaggaataatatatattgatttccgatttaaa

SEQ ID NO: 11666 - DNA, 467 bp, Glycine max
acaacattcactcgctctctctcttatctcctctgttcccgcattttattgctccatggccgtcggaggtttcaccaacgccgccggtggcgccgatttcgaggcctaaatcactcccatcgtcatcatttcatgtatcatggctgccaccggaggtctcatgtttggctacgacgtcggcctttcacgtggtgtgacgtctatgcccccgttcttgaagaagttttttccgacggtatacagatagacagtggaagagaaaggactggatagtaattactgcaaatacgacaaccaaggattacagcttttcacgtcgtctctgtatctggctggtttgacttcaacgttcttcgcttcgtacacgactcgtaggttgggaagaaggctgaccatgttgattgctgggttcttcttcatcggtggagttgtcctaaatgctgctgctcaagacctcgccatgctca

SEQ ID NO: 11667 - DNA, 671 bp, Glycine max
gcatgtattaaaacctattttctgttcatatcacttaaatctgacatttttcatgtgattcccctttcctcgtgcagcttgtcgttgatcccttgccatttgggggagttggggagagtggaatgggtgcataccatgggaagttctcttttgatgcttttacacacaaaaaagcagttctttatcgcagttttgctggggattcagcaataaggtacccaccatacacggatacaaaactgagattgatgaaggctctcgtcggtggtcgtatcctcggaataattcgtgctcttttcggatggtcctaagcttaacttgttttgaaacctagctattttttatgtatctttcgttctggtttttttgtacttcatcatgctgtgtagctttattattatttttgtttttttagaagaaaaccaataggcgagagttgcgcatgaaaaaagcaaaataaattaaataatcattgctacttttcttcgtgattgtgttagatgtcttgcggttgtaaattgtaatgtggctaatgccttttagaggctatgcaggctgtgatactataaaatactgtgtatatatgcacatattaacatgcctttcacggaaggacaaggcatgcatgctcttatgtatgtcataaatttataatccagattttgctagcg

SEQ ID NO: 11668 - DNA, 481 bp, Glycine max
tattgccccaaaaatttcagaaggattgctcccactattttattggatgttccgcaagagtcttcgataatgggtgaggagatatttggtccattgcttcccatcatcacggtatgaataaaggcacatgaagaactgtttgtatgatgcatattttcttcttcaaatttcatttatgttctttgattgcttttccaatagtctaataggtacaatgttcacatagttttgcaacatgttttcaacctgcaagagtaattgatatgtgcttcttcaggtgtgataagagtcacaagtcccaactagaaaagcagcaataagatatattggggaaaacttcaattgattatgtgttacttagagatgctagtctttttgtggacatttacaaaaggtttatgctaaatgttaaactatataacgtggaaagaggtgatataatttaaatagttctcagcaatgaactaaagcaaaggaagat

SEQ ID NO: 11669 - DNA, 585 bp, Glycine max
ctacagtctaaagtatcaatgggtgtttaaaaggttagaattaaagtatcaatgagtgtttgaaaatgcttgtaggatttaagtgattgatatgaggattttcttgtatattttaagaaacacctaccttaaagtcataggaaacattgtgcttagttttaggttaaaggcaccaaggattaacttttgatgcttttacacacaaaaaagcagttctttatcgcagttttgctggggattcagcaataaggtacccaccatacacggatacaaaactgagattgatgaaggctctcgtcggtggtcgtatcctcggaataattcgtgctcttttcggatggtcctaagcttaacttgttttgaaacctagctattttttatgtatctttcgttctggtttttttgtacttcatcatgctgtgtagctttattattatttttgtttttttagaagaaaaccaataggcgagagttgcgcatgaaaaaagcaaaataaattaaataatcaatgctacttttcttcgtgatcgtgttacatgtcttgtggttgtaaattgtaatgtggctaatgccttttaaaggcta

SEQ ID NO: 11670 - DNA, 798 bp, Glycine max
cgaataattgctggcaagtggggattgaacaatggacaagcctgcatttctcccgattatgttataacaacagaagactatgctcccaagttggtggataccctaaagactgaattggagtcattttatggaaggaacccgttggaatctgaagatttgtctcgaattgtgagttccaaccactttgctcgcttgtcaaagctcttgaatgatgataaggtttctggcaagattgtttatggaggcgaaaaggatgaaaagaaattaaggattgctcccactattttattggatgttccgcaagattcttcgataatgggtgaggagatatttggtccattgcttcccatcatcacggtcaataagctcgaagaaagtatagatgtgatcaactcaggagcaaagcccctcgctgcatatgtatttacaaccgacaacaagttcaaggagcagttcgtaaagaatgtttctgccgggggtttgctcgtcaatgacactgccttacatcttggggttgataccttgccatttgggggaattggggagagtggaatgggtgcataccatgggaagttctcttttgatgcttttacacacaaaaaagcagttctttatcgcagttttgctggggattcaaccataagggtcccaccataccacgatacaaaactgagattgatgaaggctcttcgcggtggtcgtatcctcggaataattcgtgctcttttcggatggtcctaagcttaacttggtttgaaacctaactattttttatggattcttcggtccgggtttttt

SEQ ID NO: 11671 - DNA, 1753 bp, Glycine max
cggacgcgtgggggctggatttcttcttcttggcttcattggtgttcttatatggtgcatgagagggcataagagaaagctgcctgtgagtggtggttatgtcatgccatccactcttgcctcatctcctgaatcagattcatccttttttaagacacactcctcagctcctcttgtacaaagtggctctggcagtgatgttgtgtacacaccatctgaccctggtggactaggcaactcaaggtcatggttttcatatgaagaactaatcaaggtcacaaatggtttctcaactcaaaatcttttgggcgaaggtggatttggttgtgtggataaagggtgccttcctgatgggagagacatagcagtcaaacagctgaagattggtggaggtcagggagagagagagttcaaggccgaagtggaaattattggtcgcatacatcatcgccatttggtttctctggtgggatactgcattgaagacagcagaagactacttgtctatgactatgtccctaacaataacctttattttcatctacatggggaaggccagcctgtgctagaatgggcaaaccgtgttaaaattgcagctggtgcagcccgaggactagcttatctccatgaagactgcaaccctaggatcattcacagggatatcaagtcatcaaacattctcttagatttcaattttgaagccaaggtctcagattttgggctggccaaattagctcttgatgcaaatacgcatataaccacccgtgtcatgggaacttttgggtatatggcccctgaatatgcgtcaagtggcaaattgactgagaagtccgatgtatattcttttggagtcgtgcttttggagctaattaccggacggaagccagtagatgcatcccaacctttgggagatgagagcttagttgaatgggctcgacctttactgagtcatgcactcgacactgaggaatttgatagtttggcagatccaaggctagaaaagaattatgttgagagtgaattgtattgcatgattgaagttgctgctgcttgtgtgcggcattcagctgcaaagagacctcgcatgggacaggttgttagagctttcgatagcttaggaggttctgatctaactaatggaatgagacttggggaaagccaggtgtttgactctgcacagcaatctgaagaaataagattatttcggaggatggcatttggtagtcaaaattatagcacagatttctttagccgtgctagtttgaatccatgaaaggccactgtacatattggaagagcttgttttggaccaaaaaacttgtgaagctaagccaaggagaggccctggttgagttttgttggttgcagatatggctaaggtgcactgttggttttgattttggaatttgactgcatcaggttcagatcctcattcttgtgccggaatttcattattcttttcattagctggttttttggcagcaattttgcttttgtaattagaatttgtaaagttaatttttacactcacgatgacaaagattaacatattagttgatttgttatgtaatgatagaataggatgtgtgactccttttttcatgtcttccacattttcttatgaatttctaatgagagagcgagagcaagcaagaagctatatgatttttcatttgagagtcttggtatgccttataaagagatttagggagaagaaagagagagaggaaagtgtttctgtattgatgaggat

SEQ ID NO: 11672 - DNA, 688 bp, Glycine max
  unsure (1)..(688): unsure at all n locations
cccgaatctcccggntcggccgccgcgtacggccacgcgtccgctgaggattgcccatagtcttacaagcctgattgtggtcagaatggccgtgtgtttgttatcatgattgagaatgataagatgtctgtccaagaattcagtgcaaactcaacagtattggatttgttgaaaagatctgggagagcaagctctaggttgacaacatataggttcccattgaaggaagagttgaggccaaggctgaatcacaaacctgttagtgaccccaatagcaagttgaagatgggagatgtgattgaacttacgccagccatacctgacaagtctcttacagaatatagggaagaaatccagcgtatgtatgatcgcgggctaactgtgtcaagcatgggaaccgccgcaagcaccatggctggctcaagaagttgacccgtgcttttggatttcacttgccattccaacatgaaattatttagtgactgttatgtatatagaaatatttgtacagaacaactgtgttactactttgaacttggctaacttgattcaattatgtgctgaatgattgattttatgttgttcatccaatggtcctgataaattatttacatcccacccactttggttctggagttctagttttatcctgagtcttgccgtcgtcaaatagttttatctataatgt

SEQ ID NO: 11673 - DNA, 1353 bp, Glycine max
gtttggagactgccgtgttgctggctttgattggtgccaattccactgttgtggcggcggggctcttgcatgactctctggatgatgcttttctgacttatgattatatagttgggatgtttggcgctggtgttgctgatttggttgaaggggtttctaaactgagtcacttaagcaagctggctcgagaaaataatacggctagcaagtcagttgaagcagaccgcttgcatactatgttccttggcatggcagatgcaagagctggcctcgttaaattggcagatcggttgcataatatgatgacactagatgcattgccaggggccaagcggcagaggtttgctaaggagactttggagatttttgcacctttggccaatcgcttgggaatttctacttggaaggaacaattggaaaatttatgttttaagcatctcaacccaagccaccatgaggagctttcatccaagcttgtggaatcgtatgatgatgcaatgattacttctgcaatagagagattagagcaagcacttaaagatgaaggcatttcttataatgtcatttctgggcgacataagagcttgtatagcatttattgcaaaatgttaaagaagaaactaaccatagatgatatccatgacatttatgggctgcgcttgattgttgacaaggaagaagactgttacaaagctttgacagttgttcatcgattatggtctgaggtgcctggaaagctgaaagattacatatgtcgtcccaagttcaatggatatcaatctctgcatactgttgtgatgggtgaaggcaaggttccccttgaagtacaaattcggaccaaagatatgcatttacaagcagaatttggatttgctgctcattggagatacaaggaagatgattgtcagcattcttcatttgtgcttcagatggttgagtgggctcgatgggttgtcacctggcagtgcgaagcaatgagtagagattgttcatctgttggatatgctgattcagtcaatcccccatgcaagttcccttcccatgctgatgattgcccatattcttacaagcctgattgtggtcagaatgggcctgtgtttgttatcatgattgagaatgatcagatgtctgtccaatagttcaagccgcactcaacattttgggagcggttgaaaagatctgggagagcgctgctctatgatgccaacatatatgttcccattgatagcagagccgaggccatagctggatcatgctcccgctcttgagccaaccagcggtgcttggatcacatacatgattgaacttacgccacgcataccttacaactgtcttacagcatatagggtagaa

SEQ ID NO: 11674 - DNA, 912 bp, Glycine max
cccacgcgtccccaattacttctggaatcataattaataatccaacttattttgtctcattactatagtttctctagatggaagctaaaactaagtcatgcgtagttctaccttttcttctattggttgcaattttcatgcaacaatgtgtccatggagaatcgcaagtgccctgcctttttgtctttggggactctctgtctgataacggaaataataacaaccttccaagcactacaaagtccaattacaaaccatatggcatcgacttcccaaccggcccaacaggacgatttacgaatggacaaacatctattgacctaattgctcaactactgggatttgagaatttcatcccaccctttgcaaacactagtggctcagacacacttaagggtgtgaactatgcatccggagcagctgggattctaccagagagtggtacacatatgggtgccaacatcaatttgagggtacaaatgttaaatcacctattcatgtactccacaattgctggcaagcttggaggttttgtcaaagctaaacagtacctcaacaagtgtttgtactacgttaatataggaagcaatgattacataaacaattacttccttccccagttttacctaacaagccgcatctatacccctgatcaatatgccaacattcttattgcccagctatctcagtatatgcagacactgcatgacgaagttggggccagaaaattcgtgctagttgggatgggtcttataggttgcactccaaatgccatctctacccataatacaaatggatcttgcgttgaggagatgaataatgctacgttcatgttcaatgcaaagcttaaatctaaagtggaccaattcaacaacaagttctttgctgattccaaattcatcttttataaca

SEQ ID NO: 11675 - DNA, 590 bp, Glycine max
tttcccccaaaaaataaaaagcacaccttcattcgttcctctttctttcttccaactctataaatatcaatcaaaattcccctccacactcattctcccatcgttttccctttctctctctcattctcttctccatcgcgcgtaagaaacacattttagttgctactaatgggaactgttgaagctgcaaacaaggatgcaaatggaagtctcctagagaaaaatccttcagttgtttttgtgttaggtggcccaggaagtggaaagggtacccaatgtgcaaatattgtccaaaattttgggtatactcatctcagcgctggtgatcttctgcgagcagaaatcaaatctggttctgaaaatggtacaatgattcagaatatgattaaagaaggaaaaattgttccctctgaggtaacaattaagctcttacaaaaagcaatgcaggaaagtggcaatgacaaatttcttattgatggttttccccgcaatgaggaaaaccgggcagcatttgagaaagtgacaggaatagaaccagcatttgtcctattttttgagtgccctgaggaagagatggagaggcgactact

SEQ ID NO: 11676 - DNA, 938 bp, Glycine max
  unsure (1)..(938): unsure at all n locations
tctccaatcaactctcccagcaaaggtgttggttaggttgaatctctcatagcaagagatgctcaaacccaaattcacctacttcgatgcttcccccaccttataaattcttgcattaatttaccactttcatcacccaatccacttcctctaatatgacacccacctaaaccatggcttcccacttcctcaaatccctccttctcctctccacctatgccctcaccatctcagcagaatacacaggcttcgtgggaacactagacccaaagtccataggcataacaccacaagaaaaccctaagccacttcagattctactggcacgaagtcttcagcggagaaaaccccacatcggttagaatcattcccgcactccccaaatacaacacaaccacaacctttggttcggttgggatcttcgacaacgctttaactgtgggacccgaggtttactccaaggttgtcggaaaagccgagggcttgtttgcctccacgtcgcaaacgcagttggatcttttgctgattttcaacttcgcattgacacaagggaagtacaacggcagcaccatcacgttcactgggaggagccccctctcggagaaggtgagggagttgcccattgttggtggaagtggggtcttcaaatttgccactgggtatgttgagtccaggactctcagttttgatccccaaacgaggaataacacggttcagttcgacgtgtatatttactattgatgattgtttgaatgtgtttttccatgttggagcgtatcggcttgggctgtctcacctagtttctacataagtttcctcttttgagaggccatgtgtgtcatggaaataagtcatctttggggcaaaaataaaggttgatcatgataatatttatccatttcattttcnnnnnnnnnnnnnnnnnnnnnnnnnnnnnn

SEQ ID NO: 11677 - DNA, 660 bp, Glycine max
agattctactggcacgaagtcttcagcggagaaaaccccacatcggttagaatcattcccgcactccccaaatacaacacaaccacaacctttggttcggttgggatcttcgacaacgctttaactgtgggacccgaggtttactccaaggttgtcggaaaagccgagggcttgtttgcctccacgtcgcaaacgcagttggatcttttgctgattttcaacttcgcattgacacaagggaagtacaacggcagcaccatcacgttcactgggaggagccccctctcggagaaggtgagggagttgcccattgttggtggaagtggggtcttcaaatttgccactgggtatattgagtccaggactctcagttttgatccccaaacgaggaataacacggttcagttcgacgtgtatatttactattgatgaatgtttaatgtgttttttttttcttttctttttttcacattgatgtgctgtcacgactttgatgtttgtcactttgtttctatttaagtttcctcttttcatgggggcacgtggtgtcatggaataaagtcatgtttgggcacatttaatgagttggatcatgattcttacttttatttcttattaataatgtcatggactcacattatgtacttattaaaaaaaaaa

SEQ ID NO: 11678 - DNA, 484 bp, Glycine max
tcggagttccgggctccgacattacgcgttcgacgcaaagcgtccgcccacgcgttcggctatcgaaccgggcgagggggtgggccatcccagggcgaatccggatatggatccccagcagcgtccgttaatgtcggaccgggtcaccgttaacggctccgtcacgccgcttgctcttctcgccgacggccgtctatggtggtctgagggaatccaacggtgtttgtcgatcgaaaaggacgtcctcgggatcgttgccagtgggccctacataaaaatcaagagcctcgtggagacccgagacggatgctgcatcaccagcgcccctgcaagactcgttagaaacgacgtcgtctttatgccttcctccgaggaatctcacaggctctggtgccataaacttcgtgaattcattgattctctcggtcgtcctaagaggttgttggttgatgctaatcccgttggtgggaagaaatccgctacg

SEQ ID NO: 11679 - DNA, 300 bp, Glycine max
  unsure (1)..(300): unsure at all n locations
attgtaatccttggcttatagcatttccctctctctcaaacgccaaaacccggttttaattatcgtcactgtttggcggttcgctatcgaaccgggcgagggggtgggccatcccagagcgaagccggatatggatccccagcagcgtccgttaatgtcggaccgggtcaccgttaacggctccgtcacgccgcttgctcttctcgccgacggccgtctatggtggtctgagggaatccaacggtgtttgtcgatcgaaaaggcgtncctcggatcgttngcagtgggccctacataaaa

SEQ ID NO: 11680 - DNA, 479 bp, Glycine max
ggattccaggtacgcgctcacgcgtacgtacacgcgttcgatcggtgctcccagagcagcgacgggacccttcaccagctgagacgcataagtgcccacctgaaactgctagtgatttgtctatgccacctgctgaaatgaaaccgatatgcaagtcgattttgagaagaaagtccgggagagcttttagctttttctggaaaaacaagagctattctgtataccagtgttaagttccattggttgctgcaaatctgcgttagcatctcttatttgtgcggccctgcttttatcctcctcctctacttcttggtcccatggggtgctctgcttattgttggttcaaagcgacgacgagatgtacaggcctgtgtaatagatggattctgttatgttctaatacattgcgtgtgtttatagtgaagttatatggcgtgtgttgagaacttaattgctgattattctctttgtgtgtctgt

SEQ ID NO: 11681 - DNA, 431 bp, Glycine max
  unsure (1)..(431): unsure at all n locations
aaaagctcagaaactcttaatgttgttccgagagcagcgacgggacccttcaccaggtaagacacataagtgcccacctgaaactgctagtgatttgtctatgccacctgctgaaatgaaaccgatatgcaagtcgattttgagaagaaagtccgggagagcttttagctttttctggaaaaacaagagctattctgtataccagtgttaagttccattggttgttgtaaatctgtgttagcatcttttatttttgtggccctgcttttatcctcctcctctacttcttggtcccatggggtgctctgcttatttttggttcaaagcgaagaagagatgtacaggccctgtgtaatttatggattttggtttcttctttcgctttcctctttgtgaatatcaaatttccaagtgttttttcaaaannnaaa

SEQ ID NO: 11682 - DNA, 483 bp, Glycine max
cccacgcgtccgaaaaaaaaaaaaagtccaaacagagaattaggcaataagataattaaagatgtctgacgattgcaaaggtaagagctcatggcctgagctagttggagtgcaagggacagttgcggaggctacaattgagagagagaaccctttggtggatgctatcattgtgcccgaaggaaacatggtcatcactgatttccgctgtgatagggtttgggtttggatcgataaagatggaattgtcaaggaagttccccacattggatagaaactgctccccactagctagggatcaaataattgtttccagttttatgttattttattcagaataaagtttcagaaatgtcaaaagattaatgtaataaaccaactagagttggccttgtataatgttttagactcaaaatctgttcttgtcattctatatatataaaaaaaagttaatataatcatcttttataaaacatactgttc

SEQ ID NO: 11683 - DNA, 819 bp, Glycine max
actcactgcagtggatcacaaatcgcaagcacgcagccagagaagaccgccagagttctggtcagagacgacggagaaaacaaaacttcgaaaattcaattcaacttccaaccattatttaatccgcaactataaattcaagtcagagtcctaccgaaaaaaaaaaggtggcgaatcggaatcgagttacaatgaaatcaaatgatgttacacgttggttatgttcgatactattttgcatagttttagtttgtgttcaatttgaaggatgtgtgggatccaagactaagaaaacggacgaggcatacgtcactcttttgtacggggatgaattcttgttgggtgttcgagttctgggcaaatcaatacggaacactggatccaacaaggacatggtcgtgttggtctccgatggtgtgtctgattatgccaaaagcctactccgggctgatgggtggatagtggagatgattagtttactggctaatcctaatcgagtgcgtccaaagagattttggggtgtctacacaaagctcaaaatatttaacatgactgactacaagaaagttgtttaccttgatgcggacactattgtggttaaaaatattgatgatcttttcaagtgtgggaaattctgtgctaattttaagcattctgagaggttgaattcgggagtcatggttgtggagccatctgcaactctttttaatgacatgatgagcaaaataaaaactactgcatcttacactggaagcgatcaaggatttctcaattcatattactctggatttcccaatgcacatgtttttgagccaaatt

SEQ ID NO: 11684 - DNA, 1397 bp, Glycine max
ctttgattcaacaagtctactttctctcaactcttttgatgagacaattactaatacctacagaagtctgggctcttttgaggagttcgtgttacccacttctgggtctcggagtttgccggctggggatccattctcatacacaaaggatttgcatgcaagggtttcttttactgatgatggctcccttggaaaagtgaaatatactgtaacttgctactatgcaaaaagatttgaggctttaagaagaacttgttgcccttctgagttagattttgtgcggtcccttagtcgttgtaagaagtggggagctcagggaggaaagagcaatgttttctttgcaaaaaccctggacgatagatttatcatcaaacaggttacaaaaacagagcttgagtcgtttactaagtttgcaccagcttattttaagtatttatctgagtcaatcagtacagggagtccaacttgtcttgcaaagatcttgggcatttatcaggtaacatcaaagcacctcaaaggagggaaggaaacaaagatggatgttttggttatggaaaaccttctttacaggcgtaacattagacgactttatgacctcaaaggttcttcccgatcacggtacaatccagatacaagtgggagcaataaagtgctgctggatcagaatctcattgaagctatgccaacctctccaatatttgttgggaacaaggcaaagcggttgcttgagagggccgtgtggaatgacactgccttccttgcatcaatatatgtgatggactactcattgctggttggagtggatgaggaaaagcatgagctggttttaggtatcattgattttatgaggcagtatacatgggacaaacaccttgaaacttgggtgaagacctcaggcatccttggtggacccaagaacacttctccaactgttatatcaccacagcagtacaagaaacggtttaggaaagccatgagcttgtattttcttatggtgccagatcaatggtcccctccagagttacaccccagtgggtcccaatctgacatttgcgacgaaaatgcgtgaggcatgggacccatttcattgatgtggtcaaagtttgaatcttgtaaatgtcagtaccattccattggcacgggtctctccttccttccttatgtccattatatttgtctgctgcataatgcagctgctgttgatttgtgttaccacagattgttgaaagggtaactaagtgtacagtgattcccctctttatatatatatatatatatatatatatatatatatatatatatatatatattatatcttgtattaaatctcttgatctgtcgtaattttgatctaaagttcacaacctatcgaatggtgtttgaattgtgcaaaaaaa

SEQ ID NO: 11685 - DNA, 624 bp, Glycine max
gggtaacaaacaaactaattacattattccaacctttttttctcttttcctatttccattttctcggcaaccaaacattccaatcaattaactcgtattttatattattatttttaattcgcggtaggaattcgttttctctgatcgggatctggaagggaagcgaatcgacatgggtttcttggtgacgacgctgatcttcgtagtgatcggaatcatcgcgtgcctctgcaccagaatttgctgcaacagaggaccttctgccaatctatttcaccttactttggtaattactgcaacaatttgctgctggatgatgtgggcgattgtatatctggcacagatgaaaccactcattgtgcctatactgaacgagggtgaataagtctctgaacagatgtaactccttgtaagttagagaatatggatcgcagattggctgctggatagaatttaattttggctatcatgagttgttcagtattttttcagggtggaactgtatttatttcttgttggataatggcattccagttggcatttctattgctacgtggcattggtcgtgttacggatgttgtattcagcattcattcatttcatatgtccgtggataatgatacc

SEQ ID NO: 11686 - DNA, 397 bp, Glycine max
cggctcgagattaggataggagattttcgtaaatcccataagatgggcccatatgcgtgattgctcagaagcttcagatcactaatacgacgacgcattacggaactaagggttgtgttgtgtcgtttcgttttcactctcacgttctcaaattttgtttgtgtatcgcaggaattaggatccgttatggggttctctgtaaccacgctaattttcgcagtgattggaattgtggcgtccctttgtaccagaatttgtttcaacagaggaccttccgctaatctatttcacctaactttggttcttactgcaacaacatgctgctggatgatgtgggcgattgtatatctggcacagatgaaaccgctcatagtacctatcttgagtgagggtgaat

SEQ ID NO: 11687 - DNA, 887 bp, Glycine max
caagtgacatccacactcaactcaaagaccaattccaataatggcggccttatctatgtcatcttgatcgtaatccccgtcatcaaactctttctctattctacgattcacaatcaaaacccaacaacttcaactctccaatctctatcctcaattcaacccttttggtggcaacttctatttatgctacaaaaaatgctgcgattgcacttcaccaccgcactctctcactttgcttccaaggcctcaccttttcctctcacacccgtttccgttaccgtttccagagctattgtttgcaacaaccccaccaggttcagatcgcaaatgggttctttctccacttcctcttcctcttcctccaaactcttgttccgccagctttttgagaaggaatcttccacctacacttaccttctcgctgatgcctcgcacccagaaaaacctgcacttctgattgacccagttgataggacagtagacagggacttgtcgatcattgagcaactggggttgaagcttgtgtatgccatgaacacacatgtgcatgcggatcatgtcactgggactggccttatcaagagcaaagttccttctgtaaaatctgttatttcaaaagcaagtggtgcaacggcagatctttatgtggagccaggtgataaggtccaaattggtgatctttttctagaggttcgtgcaactcctggtcataccaaaggttgtgttacctatgttactggagatgcacctgatcaaacctcaccctaggatggcattcactggagataccctattaataccgggatgtggtaggacagattttcagggttggcagtcagagccagctttacagatcaatccattcacagattataacactggccaag

SEQ ID NO: 11688 - DNA, 2211 bp, Glycine max
gcggtggcggccgctctagaactagtggatcccccgcgcccctgtctcccacaatggacctccatcgccggccgccgcccgccgctgacgacggagcaatccaccccaagaagaggagggacacttcctctcccaaggcctccgacgctctccctctccctctctacctcaccaacgcgatcttcttcacgctcttcttctccgttgcttacttcctcctccaccgctggcgcgacaagatccgcagccacacccctctccacgtcgtcactctctccgagatcgccgccattttctccctcatcgcctccttcatctacctcctcggcttcttcggcatcgacttcgtccagtccttcatctcacgcgcctccaacgacgcctgggacctcgacgacgccgttacagattctccctcttcctctccctctccctctccctcgcccgcaattaccaaaatgccctcacgggatgcctcgattatattatcctccgaggatgacgaggagattgtaaactccgtcgtggaaggcgtcacgccctcctacgcgctcgagtcccgcctgggcgactgtcgccgcgccgcggggattcgacgcgcggcgctgcagcgcctgacggggcagtcgcttgagggcctgccgctggaggggttcgactacgactccattttagggcagtgctgcgaaatgccggtagggtatgtgcagattccggtaggggtggcggggccgttgttgttggatggattcgaatacactgtgccgatggccaccacggaagggtgccttgtggcgagtaccaacagagggtgcaaggccatctatgcttctggtggggccagcagtgtggttttgcgggattgcatgtcgagggcacctgttgttagattctccactgccaaaagagctgctcagttgaagtttttccttgaggatcctctcaattttgataccttgtcacttgttttcaacaggtcgagtagatttgccaggctccaaggtattcagtgtgctatggctgggaagaatgcttatttgagattcacttgtagcacgggtgatgccatggggatgaacatggtttccaaaggggtgcaaaacgttcttgattttcttctagaatgatttccctgacatggatgttattggcatttctggaaattattgttcggacaagaaacctgctgcagtaaattggatcgagggacgtgggaaatcagttgtttgtgaagcaattatcaaagaagaagtggtgcagaaggtattgaaaaccaacgtgtctgccctggtggagcttaacatgctcaaaaaccttgctggttctgctgtcgccggtgctcttggtggatttaatgcccatgctagtaacattgtttctgccatctttatagccactggccaagatccagctcaaaatgttgagagttcccattgcataaccatgatggaagccgtcaatgacgggagggaccttcacatctcagtgaccatgccttccattgaggtgggtactgttgggggtgggactcaacttgcatcccaatctgcttgcttgaatttacttggtgtgaagggtgctagcaaggagtcaccaggatcaaactcaagactcttggccaccattgttgctggatctgttttagcaggagagctgtctctgatgtctgccattgcagcagggcagctagtgaacagccacatgaaatacaacagatcaagcaaagatgtaaccaaaatatcatcatcttgaggtcagggacgtggttgcagtcattaattctggactctagaataaaaaaattgagggtaagcggatttagggaaggaaaatggagaaacattagattagattgttggcatccacgtttggctctgcattgctgtctgtttagatcttttattatttggagagaggaaagtagagttatactctagatcttccctgtccccttctggatcatttcttcttttcattgcttcttctgccgagccattcagtgggtgttaacactttttttctcctcaaccaagacatttgacgtgttatattctaattcttttccccctatataatatgcttagcatatctatcattgtagccgaatgggttgatgaatattctcttgtccgctagtgcccgtcaattaagcttgagatcccattgtctcaagtctttatctaattaatgaatgtatttctgtttaagggt

SEQ ID NO: 11689 - DNA, 784 bp, Glycine max
agagagagaaagaaaggaaggaatgaggctctatttctctcgagagtaagtgaaaaaaaaatatcaaaatagaagaagaaaaagaagatggtgatgatcacgctgatggtgatgagagagaaagggtcagcaacaagaacagaagaaaagagattcatcacagtaacatagattttatctggttcgagcaaggttgtcttctaaaacctaggtcttcagttgtggctaccacaaggcggttcccttcagattccggtgcctttgcagactggtcggcccctccgtctgccgtctccggccgcggcgacgacctctccctcggcttcaatgcttcatccgccgccactgcgcacggcggcggagccatgtggccgggggtatcgaggtcgttcaactacaacctggcgcctcaccatgacatcttcgtggtggcgcctgcttcctccttctaccaccaccacaacgacgtcgtcttatccgatccaaacaacaacaacggttccaacaattccaacaaccctgcaacggcacacggagtcaacgttttccctctcctaaccgccacgccatgcctcgagagcgagggcataatgggaaacatcagtcaccaccgtaacagaattcagttatggcaggagcacgagtcttctccgccgcagcagcaacagggtcacatggagcgtgacacgtgtggggatgggggcgggactagcacgtgccaggactgtgggaaccaggcgaagaaggattgtagtcacaggaggtgcaggacgtgttgcaggag

SEQ ID NO: 11690 - DNA, 540 bp, Glycine max
atgtctgccattgcagcagggcagctagtgaacagccatatgaaatacaacagatcaagcaaagatgtaaccaaaatatcataatcttgaggtcaaggacgtggttgcagtcattaattgtggactccagaataaataaaaaattgagggtaagcgaaatttgggaaggaaaatggagaaacattagattagattgttgtcatccacgtttggctttgcattgctgtctgtgtagatctttaattatttggagagaggaaagaagagttctactccacatgttccctgtccccttctggatccttcctttctttcctgtatacttttcgttgcttgttctgccgagccattgagtgggtgttaacgctcttttttctcctcaaccaagacatttgacgtgttgtattgtaattcttttcccctatataatatgcttagcatatctatcattgtcttttcttgtagccgaatgagttgatgaatgttctcttcatgtccgctagtgcccatcaatttaacttgaccgtgtctttttcatta

SEQ ID NO: 11691 - DNA, 769 bp, Glycine max
ccacgtccctctctcccacaatggacctccatcgccggccgccccacgccgccgctgacgacggagccatccaccacaagaagaggagggactcctccacttcctctcccaaggcctccgacgcgctccctctccctctttacctcaccaacgccatcttcttcacgctcttcttctccgtcgcctacttcctcctccaccgctggcgcgacaagatccgcagccacacccctctccacgttgtcactctgtccgagatcgccgccattttctccctcatcgcctccttcatctacctcctcggcttcttcggcatcgacttcgtccagtccttcatctcacgcgcctcccacgactcctgggacctagacgacgccgtaacagctccctcccccgcaattaccaaattgccctcgcgggatacctcaattattttctccgaggacgacgaggagattgtgaactccgtcgtcgagggcgtcacgcccttctacgcgcttgagttccgcctttgctactggtgccgggccgctgggaatttgtgcggggcgcttcaactgctatccgggcggtcgttttgggggctttccctggaggggtttgataattaccttcatttttgggtatttctttcatatttcccgggggtgtgtttgttataatatttaggttagtatttttgataaatttccttatatttttttttttttatttttattattttcacttgttttatttattttttaatatatctattttttccttaatt

SEQ ID NO: 11692 - DNA, 561 bp, Glycine max
gattcccgtagttatttttgaagacgaaggttgaatgtgaaaaagcaaagaagcgttagagaagtgaacagaaaagtgtaaaataaattaagaggaaccctcgatttgtgcttttcaattttctgccccttctcttgcgttgcgttgatttgattaatactatcaactaagcccttttctgtttgcaatctggagctatgagttcgtcttcggcagatgtttttccagcaattcaggaagttatgctggagttccgtgctggcaaaatgtttcttgaggaaaaaagggttgttcccgatacacggaaaggacttgttcgaattgctaggggtgaggagggattagtacattttcagtggcttgatcgcacacaaaatgttgttgaagatgatcagataatatttcccaatgaggctatttttgagaaggttaatcaaacatctggaagggtttacatactgaagtttaatagcgatgacaggaagttcttcttctggatgcaggaatcaaatgctgatggtgattcacaactgtgtagctcagtgaatgattacattaata

SEQ ID NO: 11693 - DNA, 1024 bp, Glycine max
ctgaaatttgacgagtgacgttccaaccggccacgcccaccgaaagggaaagcgctggaaaatgctgcgttccaccgcgttttctggtttcgggaagattaacttcaaaggcttaaaccaagcaacagagcacccagatatagagatttgactagtcatatccacgtgctgcatacacatacatacttttgttgtgctcagcttctattgtgaattgaagaacccatttgcattcaggcttagatcgcttaccacaccacaccatatggctgttgctgtggccatgttacctcgttggtcggtgtttcttctttttctgtttgtcttgtgtagctcaggagcaaaggttgtcgccattgatgtacatgcagcaaagcgtctcatccagaccggttccatttatcttgatgttaggacggtggaagagttcaagaaagggcatgtggatgcagataatgtccttaacattccatacatgttgaatacacccaagggcaaggtaaagaatccagactttctgaaggaggtttcatcagcttgcaacaaagaagatcatctcattgtgggttgtcaaagtggggtgagatctctgtatgcaactgctgatcttctatctgaaggttttaagaatgtgaaagacatgggaggaggttatgtggactgggttaaaaacaagtttccagtgattataccagtggccaaagaggagctataataagtaatggataggaacattcatctttctttctaaatggttttatcagggagataccacatcccttcatatgtactacttcagagtgttcattagttcaactttcgacacttcatttcaatcctgcggctatgcttacaattatatttgtatctattccaactatgtaacacaagcattatcaggggaagactttcagagaccactctcattaattagtcttcttcatgtgcatataagatggactcatgatctgatgattgtcttgttattttgatatttattctgaaaaacaagcaattggattca

SEQ ID NO: 11694 - DNA, 431 bp, Glycine max
gattttagtacgatcagaatcaaacaacacccttattaccaaacttcgcttagccaaagacacttacttctcttcatgggttctattggaattgagagctcgggacctgaggttgtcaccgttgatgtacatgcaaccaaggatctgatccagaccagtcatgtttatctggatgtcaggacggtggaagagtttcagaaagggcatgtggatgcagagaagatcattaacgttgcatacatgtttaatacaccagaaggcagagtgaagaatccacaatttctgtaggaggtttcatatgcttgcaagaaagaagatcatatcatcgtgggttgtcaaagtggagtgagatctctgtatgcaactgctgatcttctaacggaaggatttaaggatgtgagcaacatgggagggagttatctggactgggt

SEQ ID NO: 11695 - DNA, 622 bp, Glycine max
ttcttttttttctgtttgtcttgtgtagctcaggagcaaaggttgtcgccattgatgtacatgcagcaaagcgtctcatccagaccggttccatttatcttgatgttaggtaacgcatccattcactttagaggatacaaagttaataatctaagtgattaatgagcgaaaatcagctttctttcaacaacaaaaatgacaaacatgttataatattaacgggtttttttttttcattaacttaatgacatttcttattactttatcttttcttattttagaggagtaattaaaattcatttaaaggaatttttttaggtatttttcttctctcttttaaacctaaatcatttggtaggacggtggaagagttcaagaaagggcatgtggatgcagttaatgtccttaacattccatacatgttgaatacacccaagggtaagaaacttttttaatccctattaattactcaaactagttttcgatccatacacatctctatatttattatttagcacatgacagtatcagtatgttgtgttacaaattttctatggttaaaatttaagatgcttgtgattttggagagcaggcaaggtaaagaatccagactttctgaagg

SEQ ID NO: 11696 - DNA, 475 bp, Glycine max
ggagagcaaacaaacacagacagacagagagagagaaagagaaccaaaccaaataaagctcttggttggttcacccttgtgcttattttttgttgctgagaaagagcaaagaagaagaataagaagaaggttttgatcggatgcgatgagcacacaaggacaagtgattgatgaggcggttctggatgacataatccggcgcctaacggaggtccgattggcccgacccggaaagcaggttcagctctccgagtctgagatcaagcaactctgcgtcgcttccagagacatcttcattaaccagcccaatttgcttgaactcgaagcccccatcaagatttgtggtgacattcatgggcagtacagtgatttgttaaggctatttgaatatgggggtttgcctcctactgccaattatctctttttgggggactacgtggaccgtgggaagcagagcttagaaaccatatgtctt

SEQ ID NO: 11697 - DNA, 1380 bp, Glycine max
ccctcgagccgctcgagccgctcgagccgctactccgcccccaagaataaaccctctcttcaatacctcggcgaccccctcaacgagcagaagcgcctcgccaacgtcgccgtcgacgccgtcctcgacagcgtctccatcgcctccacgcaccgcaaaaccctagaaaaggccggcgttatattctgctccatctccgaggccattaaggagtatcctgatttggtgagaaagcatttgggaagagttgtcccctccgacgacaactactacgccgcgttgaacgccgccgtcttcagcgacgggtcgttttgctacattccgaaggacaccaagtgtcctatgcagatttcgacttacttcagaatcaacgcgttggagacagggcagtttgagaggactttgattgtcgccgatgatcggagctctgtggagtatctggaagggtgcactgcgccttcctatgaccggaatcagctccatgccgcggtggtggagttgtattgcggcgagggggcggagattaagtactccacggtgcagaattggtacgctggggatgaagaagggaagggtggggtttacaatttcgtgacgaagagagggctgtgtgctggtgccgggtcgaagatatcgtggacgcaggtggagacgggttcggcgatcacgtggaagtacccgagcgttgtgttggagggagatggcagtgtgggggagttttattctgtggctttgacgaataactatcagcaggcggataccgggaccaagatgatacacaaagggaagaacacgaggagtaggattatatccaaaggaatatcggttgggcattccaggaactgttatagagggctggttcaggttctgtccaaggccgagaatgcccgaaactcctcgcagtgtgactctatgctcattggtgacaatgcagctgcaaatacctatccttacattcaggtgaaaaatccaacagcaagaatcgaacatgaagctagtacgtccaaaattggtgaagatcaattgttttattttcagcaaaggggaatagactatgaaaaagcaatggctgctatgatctctggattttgccgtgatgtctttaatgagcttcctgatgaatttggttctgaggtgaaccaactcatgagcttgaagcttgagggatcagtaggttaaacttaaacagcttgttaagcatatcattatatggaatttgctcaggccatttgttcctgaaattgtcaaagtccttataggtagtgtattcggaaggatgtgtatatgtttgtatatagatgctgtcttcaactgcaccctgcaaaagtggcctgaaacatagccagttttgaaccttaataaatgatcattgcaatccta

SEQ ID NO: 11698 - DNA, 836 bp, Glycine max
accaggaggttatcaagcttgaaaacatgggctactatagggacgacatgagtatacctggtgatgttttcctcttgcaactttgcagtggagtggatgagcatgcggttggcaccagtgcagaacttgtttttgctccaattgacgcatctttctctgatgatgcacccattttaccttctggttttcgcatcatacctctagattctggcacagatgctgctagtccaaaccgtacacttgatttggcttctgcacttgaggttggcacaacagcaaacaaagcagctagtgacaactcaggtcattccgggagcacaaagtctgtgatgacaatagcattccagtttgcgtttgaagtccaccttcaggagaacatagcaaccatggccagacaatatgttcgtagtatcattgcatctgttcaaagggtttcattagcactttctccttcgcgctttggttctcacaatgctttccacttaccacctggcactcctgaggcacaaacacttgctcgatggatctgtaacagctaccggttctatcttggggtagaacttctaaaatgtgaaggcagtgaatccattctcaagtctctttggcatcactcagatgcagttttgtgctgctctttaaaggcattacccgttttcacgtttgcaaatcaagctggacttgacatgcttgagacaactttggttgcacttcaagacatcactctggaaaagatttttgatgacaatggaaagaaaactctgtgcaccgagttcccccagataatgcagcagggtttcatgtgtattcaaggtggtatctgtttatccagcatggga

SEQ ID NO: 11699 - DNA, 673 bp, Glycine max
cggacgcgtgggtgctgaaacacttgaggattatttacgccgtgaatgtccagagcctttaaaggaaattcttgttttgtgtgacaatcgttgcgtactttttgataacaagactaaggatgaagggaagcgctttggacaagttcaacaacttctctcttttgtaaacacagttctatcacgtaatggtggacgaccttatacagatgagttatttacacaactgaagaagggagcaatggagctgcataaccaacaaagagaggttgattctttaaaaggatattcaaaaggagagatattgaagtttaaaaagcaaatgcagcaaacatatgatgaccaattaaagcgaattactgagatggttgaatcaaagttgagggaggcaactatgaggcttgagcaacaattggcagaagagcaagctgcaagacttaaggcagaggagaatgcaatgttagctcaaatgagatcagatgatgaaatacgaaaactcagagaacatcttgagaaggcacatgaagaacttcgcaagcgaggtggaggtcgttgtgccattctttgatagtagctacttcaaacttcagaagagtttatttatgttatttttctcttggagatcgtgacatcaaatagctgttgcatttgcagggttaatacctgaataagtgcc

SEQ ID NO: 11700 - DNA, 677 bp, Glycine max
  unsure (1)..(677): unsure at all n locations
cccggnccggaattcccgggtcgacccacgcctccctaccggttgcaaaaaccgccaaaggggggttggaaacagacaaaggtgaagctcaggctcaggattggagaggcagaccctccaaccctgccaaacacggtggaatgattcccgctgcttttgttcttgggttgcaagcttttgagataatggcaatagccgcagtggggaacaatctgataacctacgtgacgagtgagatgcacttccctttgtccaaggctgccaacctagtcactaactttgttgggaccatctttctcctcgccctcctcggcggctatctttccgactcttacctcggcagcttctggaccatgctcatctttggtttcgttgaactttccggtttcatattgctttctgtccaagctcatgttcctcagttgaagccacccccatgcaatatcaacgatttaggagaacagtgctcagaagccaagggcatgaagaccatgatattcttcgtagccctgtacttggtggcattaggtagtggttgtgtcaagccaaacatggttgcttacggaggcgaccaattcgaccaagacaaccccaagcaattaaagaagctctctacctacttcaacgctgcatattttgcattctctttgggagaacttgtgagcctgaccattctt

SEQ ID NO: 11701 - DNA, 535 bp, Glycine max
ataggtgccacaagaatacttgtggtgcgaagaaagagaaaaggagtatatctccattggtgagtagctataaaatagttgggagtgggtgagagtgattcattctctctaactgagaccatcaagaaattaatggaggcatcacccagtgctctggattggggaggcaggccctccaaccctgccaaacacggtggaatgattccggctgcttttgttcttgggctgcaagcttttgagataatggccaatagccgtagtggggaacaatctgataacctacgtgacgagtgagatgcacttccctttgtccaaggctgccaacctagtaactaactttgttgggaccatgtttctactcaccctcctcggcggctatgtttccgactcttacctcggcagcttctggaccatgctcatctttggatttgttgaacttttcgcactctctctttttctactcattctattactttttatttactatttagacagccttcacacatatatatacaaataatattatgtttacagg

SEQ ID NO: 11702 - DNA, 636 bp, Glycine max
ctttgctgatgatgccccccttttaccttctggatttcgcatacttcctcttgaatctggaaaggaagcttccagccccaatcgcacccttgaccttgcatcttcccttgacgttggtcccagtggaaaccgagcttcagatgaatgtgctggaaattccagctatatgagatctgtgatgacaatagcatttgaatttgcatttgaaagccatatgcaagagcatgtagcatctatggcacgtcaatatgttcggagcattatatcatcggtccaaagggtagcattagcactttctccttctcatttgagttcacatgcagggcttaggtcaccattgggtactcctgaagcgcaaacccttgctcattggatctgcaacagttataggtgctacttgggtgtggagctacttaaatctaataacgaggggactgaatctttgctcaagtccttgtggcatcactcagatgcaatattatgctgcactctaaaggcattgccagtgtttactttctcgaaccaggctgggcttgacatgctggagaccaccctagttgcattacaagatatacctttggagaaaatatttgatgatcatgaacgaaaaattctcttttcagagtttccccagat

SEQ ID NO: 11703 - DNA, 1100 bp, Glycine max
ggatcacattttaggttgttttgagaaagcaaaaagaaaatcagtaggcgtagagaacagcaaagaaagaggaataatggagcaggaagagcacgaagtgtacggtgcagacattcccgacgaggagattgacatggacgcagacgccgagcaacaagatgagcaacttgcccccaatcacacaaacaaggaactggaggacatgaagaagaggctgaaggagatcgaggaggaagctagcgcccttcgcgaaatgcaggccaaggtcgagaaagagatgggcgctgttcaagattcgtcgggcacttccgcaactcaagctgaaaaggaggaagtggatgctcggtcaatctatgttggtaatgttgactatgcatgtacgcctgaagaagtccagcagcattttcagtcctgtggaactgtgaacagggtgacaatactgacagacaaatttggtcaaccaaaagggtttgcttatgtagagtttgttgagattgatgctgtgcagaatgctctcctgttaaatgaatcagaattacatggtcgacaactgaaggtgtctgccaagcgtacaaatgttcctggaatgaagcagtattttggaagaagacctgctggtttccgatctaggaggcctttcatgcctgctccattctttccaccatatggatatggaagggttccaaggtatagaagacccactcgatacaggccatactagtgcacattctctgtttaataggtgatcacatattaattatgatgagacagggcgttgttaatttgccattgtaataattttcgttggtggagcaagaacataagctttcgtttacacagaagttagatgtccttgcctgttaacgctgtagaatgtatgatgcgaacaaatgtagttttgatcacttggctacccatcttgaatgttgatagcactcggcactccggtttttacttatacagtgatggaggcaactatgcaggggggaatttcaatagtttgttagtttgaacatcaaaattagactattcagtgcaatgttggattttttaaagaattgatattaacagtgttggaattggttacgtgcttgctaccg

SEQ ID NO: 11704 - DNA, 1147 bp, Glycine max
caaaaccgttggccataattggggcaatggcccttgccactgaaccaccaacggcaaggtttggtaaacctggtgtcattgcaccaacaggattaataacggttgcaattttccttcccattgaaatcactcaaaaaagcatagctgtccataacccaacaaaagtggctcggtttgtggtcaggccattggcattggctttccctggtgttgtatcctgtaggaagaattgttacttacctttcaatggggatgctgaaattgcttggcctaaaaggaagaagtgagccatatgtaactgaagatgagctaaaattgatgctaagaggtgcagaattaagtggggcaatagaggaggaagaacaggatatgattgaaaatgtgttagagataaaagacacacatgtcagagaggttatgacacctcttgttgatgttgttgcaattgatgcaagttcaagcctggtagactttcatcacttgtgggtcacacatcagtactcaagggtacctgtttttgagcaacgtgttgataatataatgggtatagcatatgcaatggatctgctggattatgttcaaaagggtgagttgctagaaagtactacggttggagatatggctcacaagcctgcttattttgtacctgattcaatgtctgtttggaatcttcttagagagttcagaatcaggaaggttcacatggcggttgttcttaacgagtatggtggaactgtggggattgtaacactcgaagatgttgttgaggaaattgttggtgaaatatttgatgaaaatgactcaaaggaggagatacagaaaaaaactggttacattgtaatgcgagctgagggtgtttttgatgtggatgcaaacacatccattgatcagctctctgaagatttgaacatcaagatgccagagggtcaccaatatgagacggtatcaggctttgtgtgtgaagcatttggatacattccaaggacaggtgagtgcatcaaagtagttcttgaaagggaagatgaagatgataacaatgagtccaatgctgaccagcaggatcagaaggagaagaaccagagtttcaaacttgagatactaactggaaatgccagaaagaaaatggaagagtgatgcaaactcagac

SEQ ID NO: 11705 - DNA, 1391 bp, Glycine max
  unsure (1)..(1391): unsure at all n locations
cccagcgtccgcgcagaggaacgggatcgggtctcaataaaaagggtcacagcttggtgtttccagtgataatagaaatatcgaggcactgtttttgtattctagaagtagaaggagagagagcccctagttcgcgttctcgtcacacacgaatgcttctttgaccatggcttccacagcctcttcgctcctccgagcttctaggtccaaactttcttcttcctcctccgcttctctatctagaaccttcgctcgctccgctcctcgccgatcccccggctcctccgccgccgccacccgctccttcggctccgccgtcccgcgatggagccgcggcgtcgactggcgctctccgctcggcctccgccctcagatcagagccgccgctcccctcatcgaacgcttccaccgcaggatcgccactagcgctactgagaatcctttcaagggaaacctgacgagtctccctaagcctggtggtggcgagtttggaaagttctacagccttccgtcgctcaacgatccgagaatcgataggttaccatactctatcagaattctccttgaatctgccattcgtaattgtgacaatttccaagtaaaaaaggaagatgttgagaagattattgactgggaaaactcttctgtgaagcaagttgagattcctttcaagcctgctcgtgttctactgcaggattttactggagtccctgctgttgttgacctggcttgcatgcgtgatgctatgaataagcttggcagtgattctaataagattaatcctctggttcctgttgatcttgtcattgatcattcagttcaagttgatgtagcaaggtcagagaatgcagtgcaggccaatatggagcttgagttccagagaaacaaggagagatttgcttttctgaaatgggggtcaaatgctttccgtaatatgcttgttgtccctcctggttcgggtatagtacatcaggttaatcttgaatatcttggacgtgttgttttcaacactgagggcttgctctatcctgacagtgtggttggaactgattcacatacaacaatgatagatgggcttggagttgctggatggggtgttggtggtattgaagcagaggcagcaatgcttggtcagcctatgagcatggtgttacctggtgttgttgggttcaagttatctggaaaactgcgcaatggtgttacagcaactgacttggttctaactgtgacacaaatgcttaggaaacatggtgttgtggggaaatttgttgaattttatggtgatggtatgggtgaattatctttggctgacanggccactattgccaatatgtctcctgaatatggtgccaccatgggcttcctccctgtggatcatgttacactacaag

SEQ ID NO: 11706 - DNA, 1135 bp, Glycine max
atgagactgacaaaaagttcagtgtcggcatgaggctcaagatgagattcgagggggatgattctgctgagactgacaaaagattttcgggtaccatagttggagtggaagatatttctcctcattgggtaaattcaaaatggcgatcactcaaggttcaatgggatgaacctgcagctgttcccagacctgatagggtctcaccatgggagatagaaccctttgttgcttctgcttctacaccctcagttcaacctactatggtaaagactaaaaggccccggccacccagcgaaactccagatgttgacacaacatctgctgcttctgttttctgggatgctggtcttcaacaggctgacatggcacaaaaaaatgttttggcggaaagcaaacggaatgacagtactggtacatggcatcatatgcaaactgacatgaatagtaaaagcaacagcggcaatgctatgttaaggaatcagacagaaggaagttggctatcttctccgcattctagttgtccgtctcatttgtttcaggacgcaacagatgatagcaagagtgtctcagcctggcctgtttcaaagcctcactcatccagattgaacaatgatcacgtgcttgaccaagttgacaaggagagcaaagttgagactgctacaagttatcggttgtttggaattgatcttattgatcattctaggaactctccttcagtagagaaggcatctgcacaagcaggaaatgcacccaaagttactactgaaggctgcaccagtaccttgacccgaactgatgctggccatctgtcggatgtaccaatggcttcttccaaggagaggaaacaagaacagcagcaagtatcaccaaaggagactcagagcaagcaaatttgtagaagtcgaaccaaggttcaaatgcagggtgttgcagtgggtcgtgctgtcgatttgaccatgttggatggatatgatcaacttataaatgaattggaggagatgtttaacatcaagggacagcttcaacacaggaataagtgggaaattgtcttcactgatgatgaaggtgacatgatgcttgtgggagatgatccatggcccgaattctgtaatatggtgagaagaatcttcatttg

SEQ ID NO: 11707 - DNA, 547 bp, Glycine max
gaacccaatccactattataattttttttatctcttctcttctctttccccccacccaatacacgccatttttcatttctcagagagtcttcccgtctcttcctcttcacttcttataccgtcgcccccaaacgacgccgttttctgttctcttatgtaaacgccgttcgagaacaaaccaaaaaaagaaaagaaaatcagttattgccgttgttgttttgtttccggttcggtttatttcaatggatcgggcggcgttgacggttggaccgggcatggacatgccgatcatgcacgacagcgaccgttacgatctggtacgcgacatcgggtccggaaatttcggcgtggcgaggctgatgcaggataaacaaaccaaggaactggtcgccgtcaagtacatcgaaaggggtgataagattgatgaaaatgtaaagagggaaatcattaatcacaggtctctgaggcatcctaacattgttagatttaaagaggtaattttaacacctactcatcttgctattgtaatggaatatgcatctggggg

SEQ ID NO: 11708 - DNA, 444 bp, Glycine max
gaacccaatccactattataattttttttatctcttctcttctctttcccctcaccaacacgtcatttcatttctttcaaagtcttcccttctctcctcttcctcttcacttcttaaaccgtcgccccttaacgacgccgtttcctgttctctcatgtaagcgcggttcgagaaaaaaaaaaagaaaatccgttattggcgttgctttatttttgcttccggttcggattatttgaatggatcgggcggcgttgacggtcggaccgggcatggacatgccgataatgcacgacagcgaccgttacgatctggtccgcgacatcgggtccggaaatttcggcgtggcgaggctgatgcaggataaacaaaccaaggaactcgtcgccgtcaagtacatcgaaaggggtgataagattgatgaaaatgtgaagagggaaattatca

SEQ ID NO: 11709 - DNA, 954 bp, Glycine max
cttccttccaactcatagaaacaattctaacatacttttctttcttttttttcccctctttaaaagtctggcttttggtcctttgattcccaacttcacttgtcacatatcatattatgaagctcacaggtttcctgcaagcggtgactcttgctttggtgttagccaccgtctctgcatcagatcctgatcctcttcaagacctctgtgtcgcagaccttgcttcagcggttaaagtgaatggattcacatgcaaagatgctgccaaggtaaatgcgagtgatttcttctcagacatactagccaaaccaggtgccacaaacaacacctatggctccctagtgactggagccaacgttcagaaaatcccaggactcaacacccttggcgtgtctttatcacgcattgactatgccccaggtggcatcaacccacctcacacgcacccacgtgccaccgaggtagtgtttgtgcttgaaggaacactagatgttgggttcataaccacagccaacgtgctcatatcaaagagcataagcaagggtgaaatatttgtgttcccaaaagggttggttcacttccaaaagaacaatggaaaggaacaagcttcagtgattgcagcattcaacagtcaattgcctggcacacagtccattgctctaacgttgtttgcagcgacgccaccggttccagacaatgtgttaaccaaggcgttccaggtgggtaccaaggaggttgagaaaattaagtctaggcttgctcctaagaaataattaatactaatgtgggatgtggttgtaatgtctctctcattgttcttacttcttacaccttcctctcttgtccttgttcttgttgctttacaattcatgtttgttgggaactcataaattcaaagatttggaatgagagtataaaatggagcatattcatttctttgatgattggaatttg

SEQ ID NO: 11710 - DNA, 445 bp, Glycine max
  unsure (1)..(445): unsure at all n locations
gattcattagaaagtcctctccagatattgntttgttctttgaacggcttgattttatcaatgctggttatgttgacttcccacttttgaaacttgtaactgaagtgtttggctcggcaatttggttcaacaccatcatagtcatgactcattcttcctctgccattccagaaggacctgatggttatacttttaattatgagtcatatatttcttattgtactaatatagtacagcaccatatacaacaggcagtgtttgattctaaggttggaaaccctgtacttttggtggagaaccattctcgatgcccacaaaatattatgggagagaaaattctcccaaatggacaagtttggagatctcaactcttgttattttgcatttgtaccaaagttttgggtgatgtaaattctcttctaaagtttcagaacagtgtagagct

SEQ ID NO: 11711 - DNA, 485 bp, Glycine max
  unsure (1)..(485): unsure at all n locations
cagaaatctcgtcttctccgaaaacgtcctgcgcgtaacaaactcttatataacaacacgccttctggttctcttttcagtttacgtttacgtttacgcattcactcgcttatatcgtcttcctccgtttttctctctctctcgccaaacgcttcttccactatgccttcccaatcggttctggttaccggaggagccggttatatcggtagccacaccgtccttcagcttctcctcagcggttaccatgtcttcgccgtcgacaacttcgacaattcttccgaaaccgccatcaacagagtcaaggaactcgccggagaattcgcaaataacctttccttttccaagctagacttgcgggacagagctgccctcgagaaaatattttcaaccgaaaagtttgatgctgtgatacattttgctgggctaaggcantgggtagaagcgtggataaaccactgctctactttgacaacaacttgata

SEQ ID NO: 11712 - DNA, 1423 bp, Glycine max
ctgttggctgtctccacaaatgacaatggagttaaaattctagctaacgcaggagggattaggctgcttcgaacggtggaaaatcgtacatttgatgcttctagagttgcttctgcacctgttgtgaaggcacctactattggagcttttccttctaccaatgtaactgttggaacaagccttgctgatagagctcctccagtagcagccatggttgggattaataatgatactcggaatttagctgatgtgaaacccagaattgttgatgaagctgtggaaaaatctaggatatggaagctgacagaaattaatgaaccatcacaatgccgctccctgaaacttcctgatagtttatcatctatgagggtttctaggttaatttatacaaatcagggggttgcgattttggctttggcagcaaatgctgttcacaagctttggaaatggcagagaaatgagcggaacactactgggaaggccactgcaagtattcaaccacaactatggcaaccatctagtggaatactgatgactaatgatataagtgatactaacccagaggatgctgtgtcatgttttgcactgtcaaagaatgactcatatgttatgtctgcttcaggggggaaaatttctctattcaatatgatgacatttaagacaatgacaactttcatgccacctccaccagctgcgacatttcttgcatttcatcctcaagacaataatattattgctattggcatggaggactcttccatacaaatctataatgttagagtggacgaggtcaaaaccaagctaaaaggtcatcagaagagaattactggtcttgccttttctcatgttctaaatgtgcttgtctcatctggagctgactctcagttgtgtgtttggagcacagatggatgggaaaagcaagcaagtaaattcctacaaatgcccagtggacgaccacctgcgcctcttgcagatactcgggtccaatttcatctagaccagacacatttactggctgttcatgaaacccaaatagccttgtacgaggcaccaaagttggaatgtataaagcagttttcacctcgggaagccaatccaatcacacatgctacatattcatgtgatagtcagtcaatatatgtaagctttgaagatggaagtattggcattcttactgtccctgcgctcagattaagatgtagaataaatcaatctgcttatctccatcccaacccaagcttgagagtgcatcctcttgtgattgctgcacatccctccgaacccaatcaatttgcattaggactcaccgatggtggagtacatgtacttgaaccactagaggcagaaggaaaatggggtactccacctccgaacgagaatggtgccgggcctagcactgcttcaggtgctgctgtttcagagc

SEQ ID NO: 11713 - DNA, 428 bp, Glycine max
aggatgtcgaggatcattgtcagagaaaataatgaaaaagtacaacctaagagagaagggaggttctgaacatcagacatatgctttgggaattaaagaggtttgggaaattgatgagaaaaagcatcaacctggtgctgtaatccacacattgggatggcccttggatcataaaacatacggaggatcttttctgtatcacatgaaagataaacaaatatctataggccttgtggttgctttaaactatcagaaccctttcatgaatccttatgaggaattccagaaactaaagcatcatcctgcaattaaatcatttctggaaggtggaacagttatccagtatggagctcgcactttaaatgaaagtggttttcagtttttcctggaggagcaattattggatgttcagctggcttcatgaatgt

SEQ ID NO: 11714 - DNA, 1560 bp, Glycine max
agacctttttgctgatgctgaacaggatcagaggacccgaggggatgaaagtgatttgcatgttataatctttgatgaaattgatgctatttgcaagtcaagaggttcaactcgagatggtactggagttcatgatagtattgtaaatcagcttcttactaagatagatggtgtggagtcactaaataatgttttacttattggaatgactaacagaaaggacatgcttgatgaagctctcttaagaccagggaggttggaagtccaggttgagataagccttcctgatgaaaatggtcgattgcaaattcttcaaattcatactaacaaaatgaaagagaattcttttctagctgctgatgtgaaccttcaagagcttgctgctcgaacgaaaaactacagtggtgcagaacttgaaggtgttgtgaaaagtgctgtctcatatgctttaaatagacaattgagtctagaggatctcactaagccagtggaggaagagaacattaaggttacaatggatgactttttgaatgcactccacgaagttacttccgcatttggagcttcaactgatgatcttgaaagatgcagactccatggcatggttgagtgtggtgatcgacataagcacatttatcaaagagcaatgctacttgtggagcaagttaaagtgagtaaaggaagcccacttgtcacttgtctccttgaaggttcccgtggaagtggtaaaactgcactttcagctactgttggtgttgacagtgacttcccatatgtcaagatagtttcagctgaatcaatgattggtctacatgagagcaccaaatgtgcacagattattaaggtttttgaggatgcatacaaatcaccattgagtgtcatcattcttgatgacattgagagattattggagtatgtgcccattggtcctcgattttcaaacttgatttctcagacactgctggttctgctcaaacggcttcctccaaaggggaaaaaactcatggttattggcacaacaagtgaactagatttcttggaatcaattggattttgtgataccttctctgttacttaccatattcctaccttgaacacaacggatgcaaagaaggtcctagaacagttgaatgtgtttactgatgaagatattgattctgctgcagaggcgttgaatgatatgcctatcaggaaactatacatgttgatcgagatggcagcgcaaggggagcatggtggatctgcagaagccatcttttctggcaaagagaagattagtatcgctcacttctatgattgcctccaggatgttgttaggttataagttgttgtattaagcgctttctaagttagagtgcatataatccttattgagttgaaatctttttttaacagttcattacattgcttgttacggttcagttacagagatttttttgaatcagtgtttgtttggttgtgctgatagtaattttgagacgaggcaggggtttcgtagtctcatgttttatctttagggctacgacttagttggacattggaattgtgacctttattcgg

SEQ ID NO: 11715 - DNA, 492 bp, Glycine max
attcggcgtcgacccacgcgaccaccaaacccataaatcctctcaccaaataaacctcaatttattgcattgcataataccatgtcaatgaagttgtatgcttccctcacccttacggtgtggcttttcatggccacattttcgcgagcccaatacgttattgacacaaatggcgaacccgttgacaatgatgatgagtattacatcaggccagccataaccgacaacggagggcgtttcaccttgatcaaccgaaacgggtcgtgccctctctacgtgggtcttgaaaacaccgatacgccactgggttatccagtgaaatttacccattttgccctcaacgttcaagatgaggatataagggtgaacagcgacttgagaatcgaattcgtggaagtttccacaacgtgtgtgcaatccacggaatggagggtgggtgagaacgacacgaggagtggaaggaggctcatcatcactggcctagatgataat

SEQ ID NO: 11716 - DNA, 860 bp, Glycine max
gaataaacatgttctggttgtcggatctggcaattccggcatggagattgcgctggacttgtccaattttggtgccaaaccttccatcattgttcgcagcccggttcattttctttcgagggatatgatgtattatgcgtcgcttatgctgaattacttgtcgctgagtacggtggagaaggtgttggtgatggttagcaaggttgtgtatggagatctgagtgagtatgggataccgtatccgagtgaggggcctttcaccatgaagatgaagtatgccaagttcccaatcatcgatgtaggaactgtcaagaaaattaaatctcgagagatacaggtgttgccagctgaaataaagagtataagaggtaatgaagttttgttccaggatggcaaatcgtacacattcgactcaattgttttctgtacaggcttcaagagatcaactcaaaagtggcttaaggggggtgatgatcttctaaatgaggatggctttccaaaaaacagtttcccaaatcattggaaaggtcgaaatggtttgtattgtgttgggctgtcaagaaggggtttctttggagctaacatggatgcccaattagtagcaaatgatattgcctcgttaattcctcaagaagaaagagaaggaatttgtgtcatgtaatgatctattatctattattggttgcagaaacagtatgtacatgacactttcttcttttggggatatgaattaggtatgttgttttaaattacttgttgtgattctcgtaatgtgatattattatggtaagaaattcatatataattttgtttcaataataaattttttactattgtagaaacttacactttgaggcgcc

SEQ ID NO: 11717 - DNA, 644 bp, Glycine max
cttcaccaatttccccaggaagcagtgggatctcagctggaacgattgttgcaattgtggttccaattacggtcgctgtgcttatatttatagtcggaatttgtttcttgagtagaagagcaaggaagaagcagcagggttctgtaaaggaaggaaaaactgcgtatgacatccccaccgtggactccttgcaattcgatttcagcacaattgaagcggccacaaacaagttctctgccgataacaagttgggggaaggtggatttggtgaggtttacaagggcactctttcaagtggacaagtagtagctgtcaagagactctccaaaagctctggacaaggtggagaagaatttaagaatgaagtggtggtggttgccaagcttcaacatagaaatttagtcaggcttcttgggttttgcttgcaaggagaagagaagatacttgtttatgaatatgtgcccaacaaaagtctcgactatattctctttgatcctgaaaagcaaagggagttggattgggggagacgttacaagattattggagggattgctcgaggcattcaataccttcatgaagattctaggcttagaattatacatcgtgatcttaaagctagtaacatattgttggatggagatatg

SEQ ID NO: 11718 - DNA, 600 bp, Glycine max
ccgggcccggaattcatggccgggtcgacccacgtcctcacgcacgtctctctctctctctcgccatggctatggctatgcaaagcggaatcggagtctccaagatcctcatcatagcaggagcaggttacaccggcaccgtcctcatcaaaaacggaaaactctcggatttaatcggcgagcttcagttgctggtgaagggattggaaaaatctggggagcatgctgaaggtgaaggtgaatatgctgatgccatagctgctcaggtgcgtcgcctggcgaatgaagttcggcagctagcatcaaacaggccaatcacagtactgaatgggggttctgaacaaagtaatttatcatcccttgtcgttccagctgctgccttgggcgctctgggttatggctacatgtggtggaagggaatttcattctcagatcttatgtatgtgactagacggaatatggaaaaagctgttgcagatttaaccaaaaagttgcagcatgcctcagatgtcattgctgataccaagaagcatttgacccagagaattcagaatttgaatgacaaaatgctcaagctgaatgagttgcaaaggtcaacta

SEQ ID NO: 11719 - DNA, 627 bp, Glycine max
gtgatagtgagggtcaacagaggaggaacaatctctataaatagtagtagatacccaggcaacctcagattatactctcaacttgtttcgttccgtgtgaatttgtgcaaacacaataaacagatggatcagttcaaaggacagcctcgccttccgaaattcgtcgttccgaaacgctatgacattaggctcaagcccgacctcgtcgcgcaccgttttgcaggttccgtcgccgtcaacctcgacatcgtcgccgccacctctttcatcgttctcaatgccgccgaactcgacgttagcaacgacgccgtttcattcaccaaccaagattcctccaaggttattaaaccttctcgagttgagttgtttgaaaatgatgagattctggttttggagttcccagaggaattacctattggcttcggtgtcttgtccattcgctttgaaggaatcttgaatgatagaatgaaaggcttctaccgaagtacctatgagcacaatggtgagaagaagactatggcagttacacagtttgaaccagctgatgccaggcgatgctttccttgttgggatgaacctgcttgcaaggctactttcaagatcacattggatgtgccttcagagctc

SEQ ID NO: 11720 - DNA, 441 bp, Glycine max
ggtaaaggtccaggggtcgagggacgcgtccggtcgataaactcatctgtcacaatccattctcgcgccctctaacagaagaacaaaagaataaataaataaataaattctccactcttcctcttctttcagtttcagatctctcagaggtgtgatatgtgatgtgattcaggtttgtaaaaatatggagtgtttgaattcggtggaggaggtggtggaggagataatgaggattcacagatcccttccagcccggccagggatagacgaagtcgaagtggctagaggtttgatcgggaatgttgaaaaagaagaccaggcgaggctccaagccatagcgcggcagagcaagggcgttcatgtgccccaagagctcttcatggtgctccacgagatgcagaggaacttcctttggtcaccagagcaaggagcagataagag

SEQ ID NO: 11721 - DNA, 795 bp, Glycine max
gtctaggggaagcttatatgactttctgcacaaacaaagaggtgtatttaagcttccatctttgctaaaagtagcaattgatgtttccaagggaatgaactatttgcaccaaaataatataattcacagggacctcaagactgccaatcttctgatggatgacaatgaagtggtcaaggttgctgattttggggttgccacggtgcaaactcagtctggagtgatgacagctgaaactggaacataccgttggatggctcctgaggtcattgaacacaaaccatatgaccagaacgcagatgttttcagttttggaatagctctttgggagcttttaacgcgagaactgccttactcttgcctgaccccattacaagcagcagttggcgtggtgcagaagggcctgcggcctacaattcccaaaaatacgcacccaagactttctgaacttcttcagcggtgctggcaacaagatccaacgcagagaccaaatttctctgaagtaatagaaattcttcagcagatagcaaaagaggtcaatgatcacaaagataaagcatcccatggctttctctcagctcttagacgggcccatcattgatattgatataagagtattacgcgacagtatagcctttttgtcctgtatagtagtcagactctgactaaatatctattgagttcgttgtttataatactcttgaaagattccgttgtattgtgtttgccttaaatttctgttacaatctgcgtctttctcccatttgtctgtcaacttattcgcctgtgaatagg

SEQ ID NO: 11722 - DNA, 677 bp, Glycine max
ggaaacaaaacacagtgaaaatcaaggtaaatccgacgagatgtgagtcctctgtaaagaagtgcgtttcttggtgcttggtataaagcgcaagcgctttttgggttcgggaaaagaaggaatgaagagaagggtctagaacaacacaacactacggattgaatattgaattaaacaacgcgaatggctacggcgctggagaagaaagcgaaggaggcattcttcgacgacgaattcggtctggccgtcgatctctactctgaagccatacgattggatccgaacgacgccaatctcttcgcggacagagcccaagcccatatcaaactcaacgctttcactgaagccgtttccgatgccaacaaatccatccaattaaacccttccttgcccaaggcctatcttcgtaaagccaccgcttgtatcaaactccaagaatatcacaccgccaaggtagcgcttcaaaacggtgccgcttttgcccaagacgattcaagattcgccaacttgattcaacaatgtgatcgctgcattgcagaggaatcaagtggccttactagcaccttgtcttcccatttgagcaatagaaatcatgggatgactaaagaagaagctgaaggagacagtttgctttcccaaaagaatgaagccacactaaacagaccaaaatacaggca

SEQ ID NO: 11723 - DNA, 275 bp, Glycine max
ataaagcaaagcgtgtttgggtacgggggaaagcaagggatgatttgaagagaagagtctagaaacaacacaacacaacgcgaatggctacggcgctggagaagaaagcgaaggaggcattcttcgacgacgaattcggtctggccgtcgatctctactctgaagccatacgattggatccgaacgacgccaatctcttcgcggacagagcccaagcccatatcaaactcaacgctttcactgaagccgtttccgatgccaacaaatccatccaa

SEQ ID NO: 11724 - DNA, 761 bp, Glycine max
cgtccgaccacacgtccgcccacgcgtccgcccacgcgtccggccttggccgacaggtccgggtaatctttgaaatttcatcgtgatggccggaccaatcttgcattcatcacttgtgtcttcgactgattctcaccctgctaaaaagacatcaacatcaagggcaagtaaaggaaaacttgcgcctgctggtggtggaaggctgggtaagattgatgaagaaaaagctttcagtggaaatccactgaaatcaacatctgaaaacactgagcctcgtagatccattcgcaggattcagccgacgtcaagactattagaaggattgcagagctctttaattatctcaaagattccttctgcttcacatgaaaagggtcacaaaaaccagaatcggaaaacttctagggggtaaaaccaaggttgaacgaggaattacagtgtgcgcggttctggtcagttgaaagaccaacacacttggcatagatgtgtatatttatttataattttataatagggaacataggaatggaaattcttgtttccttcggtttaggcagactagtccagtagatgttaatattgattttatgttgtttccaatatgatttaatttaatcctgtaggctgtatatggaatttatccatgttgacttgtttataaaaaggtttgttgatatgatcaaatggtaaagtcatgttcctcttcgttggaaatcatttcccgttccacttcaatttgtcctttgccacacatttgcaat

SEQ ID NO: 11725 - DNA, 863 bp, Glycine max
gttactgcatatgggtttgacattgttcgtggaacaaagacccttgatttgataaagcaaggatttccatctggaaaatttctttttgctggtgttgttgatggaagaaatatttgggccaataattttgcatcttctctgaacacccttcaggcacttggagacattgttggaaatgacaaggttgtggtttccacgtcgtgttctcttcttcacactgcagttgatctggtgaatgagaccaaattggaccaagagattaagtcttggcttgcatttgcagcacaaaaagttgttgaagtaaatgccttggccaaggcattgtctggacagaaggatgaggttttcttttctgctaatgctgctgccttggcttcaaggaagtcctccccaagggtgataaatgaggctgtccaaaaagccgctgctgctctgaagggctctgatcatcggagggccacaaatgttagtgccaggttggatgctcaacagaagaaattgaatctttctgttcttccaacaactacaattggatctttccctcaaactgccgatcttagaagagttcgtcgtgaattcaaggctaacaagatctccgaggaagattatatccgtttcattaaggaggaaatttacaatgttgtaaagctccacgaagaacttgacattgatgtcttggtgcatggaaagcccgagaggaatgacatggttgagtactttggagagcaattatctggctttgcatttactgccaatgggtgggtgcaatcatatggatcccgctgtgtcaaaccttccatcatctatggtgatgtgagccgttccaagcccatgacaagtttctggtcttcaactgctcaaag

SEQ ID NO: 11726 - DNA, 510 bp, Glycine max
atcatcactatgataaagagggaactaaagatgcacagaagcctaaaaattgggccaaaaagatccaggaggaatggaaaattttagaggaaaatctgccagagacaatctttgtgagagttagtgaatcaaggatggagcttctaagggctgttataattggacctcaaggcaccccataccatgatggtcttttctttttcgattgcctctttccttctacctaccctgcaggtccaccgaaagttcactaccattcaggtggcctaaggctaaatccaaatttatataattgtggaaaagtctgccttagtctcttgggcacttggcatggtagtaatagtgaaaattggataccagaaaaatcaaccatgctacaagtgttggtttcgatacaagctctaattctaaatgagaagcctttttttaatgagcctgggtatacgtcaacatatcctggtgctgaggggcaaagaagatctaaggagtacaacgagagtacatttattt

SEQ ID NO: 11727 - DNA, 758 bp, Glycine max
ggaaggatgagtactccaaatggctggtgggaagtcagagaagtctccttgaggtaatggctgagtttccgtcagcaaaaccaccgcttggtgtgttttttgctgcagtagcccctcacttacaacctcgttattattctatttcatcctcgcctaggttttccccgcaaaaggtgcatgtaacttgtgccttggtatgtggtccaactcctactggaagaattcacaaaggagtatgttcaacctggatgaagaatgccattcccttagagaaaagccgtgactgtagttgggctcctatttttatcagaacatcaaacttcaagttaccagctgatcattccattcctattattatggttggtcctggtacaggcctggcacctttcaggggatttttacaggaaagattggccctcaaagaggatgccgttcaacttggtcctgcattactcttctttggatgtaggaatcgacaaatggattttatttatgaggatgagctaaagaattttatggaacaaggtgctctgtcagagttgatagtcacattctcgagagagggacctgaaaaggagtatgttcaacacaagatgatggataaagctgcacatctgtggaatttgatttctcagggaggttatctttatgtttgtggtgatgctaagggcatggcccgagatgttcatcgagtcttcataccattttcctgctgctggacaatggtatgaagagtccgatgaacatgtcgggccatg

SEQ ID NO: 11728 - DNA, 591 bp, Glycine max
cccacgcgtccggtggaatttgatttctcagggaggttatctttatgtttgtggtgatgctaggggcatggcccgagatgttcatcggactcttcataccattgtccagcagcaggaaaatgtggactcttcaaaggcagaggctatagttaaaaaactccagatggatggacgttatcttagagatgtctggtaaattttctgattattcatctttctgggttgtgccttccttgctatttggtctgttaagttcaagattggttgaaggatatttgatactcttctatcacggagttttgggacaccaatgatggaggctgaaatttccttgagaaagcaaatcgttttcgtggacatttgtgtggttttcttatatttttcgccgccttgatattctctcttgtcatgatatttgaactaggattatttttagggggactgatagatagcttcatagatgatttaatacgtataggtcgcactagtttatttccaatggccatgtatcaaattgtaggaattggcaatgaataagcactcgattaatgaaataattcttctagttgatgaaaaaaaaaaaaaaaagga

SEQ ID NO: 11729 - DNA, 730 bp, Glycine max
cgtaagcccacacgtccgcccacgcgtccgggaatatgttcaacacaagatgatggatcaagctgcattctctagagagggggccgaaaaggaatatgttcaacacaagatgatggatcaagctgcacagctgtggagtttgatttctcaaagaggttatctttacgtctgtggtgatgccaacggtatggccagagatgttcatcgaactcttcataccattgtccagcagcaggaaaatgtggactcgacaaaggctgaggctatagtgaaaaaacttcagatggatggacgttacctaagggatgtgtggtgatttttctgatcattcttctgcccagattgtggtatccttgctatttgatatgctaaattcaggattggctgaaggatattcttgagattagtcactgcctttccggaaatttaggacaccaacagtggaggttaaacaggtttccttgagaagaaatgcttttctggacatttacccttttttcttttattttctgttatctttatattctcttattatgataggttggatccctctgaagtgggattatttatcgggggactctgtgatagttagtctcagaaatcggtaaacaaataccggttacagtggatggtcatgtattattaagtgtaggaattggtaacgaataattattttattaatgaaacatgtattttttttaaaaaaaatacagtggatgttctacactgt

SEQ ID NO: 11730 - DNA, 2105 bp, Glycine max
gggaagcaaagacagacactagctattcgaatttgaggtctcccaaataactaggatgatttggatagcactttttttagtttcactggcttttctgcggttatggagaagcaataagaatgcaaagaaattaccacctggtccaaaagggttgccaattttgggaagccttcacaagttgggaccaaatcctcatcgtgacctgcacaaactagcccaaaaatatggacctgtcatgcacttacgtttaggttttgtgccgaccatagttgtttcttcacccaaatctgctgaattgttcctcaagacccatgaccttgtctttgctagtaggccacctctcgtggcggatcaacacatctcttgggggcagaggggaacttaggctttgctgaatatggttcttattggagcaacatgcggaagatcggatccaaaattagtttgcatgtttattgtaagtggccagactcagggctttttagtaatcgatttgggctgaggccgtatgcgtaaattcaatctgtgctatctctctcactgttggttcccatgtctagtctatcttcttgctcttcttctccttcatttgcagcaagttacggcactattacccatccacgcgcggccccactgagtcgaatttcatgcggtggtccgagaccccctaagagcaagaaaagcaacctcaattcagaagcgcaagagcttgttcgcttactcacgagcaagataagaagcaacgacaaagaggttctgctgaagaccttgaacaagtatgtgaagcaggtccgaacccaacattgcttcttgctcttcgaagaactcggcaagcacgacaactggctccaatgccttgaggttttcagatggatgcaaaaacaacgatggtatattgctgataatgggatttactcaaaactgatatccgttatgggaaagaaagggcaaaccagaatggctatgtggcttttctcggagatgcgtaatactggttgtcgtcctgatacttctgtctacaatgcgctaattacagctcaccttcgttcacgggacaaaataaaggctttggctaaagccattggctactttcaaaagatgaaaggaatggagcgctgtaagcccaacattgttacttacaacattcttttgagagcttttgctcaagctcggaacgtggagcaggtcaattctttgtttaaggatcttgatgagagcattgtttcgcccgatatttacacttttaatggtgtgatggatgcatatggtaaaaatgggatgatccgtgaaatggaagcagtgcttgctcggatgaaaagcaaccagtgtaagcctgacctgattacctttaacttgctgattgattcctatgggaagaagcaggcgtttggtaagatggaacaggtgttcaagagtttgttgcactccaaggagagaccatcactgcccacgtttaattcaatgattttaaactatgggaaggcacggcttaaggataaagcagaagatgttttcaagaagatgactgacatgggttacacgctgagctttgttacacacgagagtatgatctatatgtatggcttctgtgattgtgtctccagggctgcacaattgtttgatgagctggttgagtctaaagttcatataaaagtttcaaccctaaatgccatgcttgatgtttactgcttaaatggtttaccgcaggaagcagattcactgtttgaaagagcaattagtataaaaatacatcctgattcatcaacatttaaacttctttataaggcttacactaaagccaaccagaaggagcttcttgataaattgctgaagcatatggataaagatggtattatcccaaataagaggttcttcttggatgctttgggtgctgttgcgtctttaccagcaaattcagaatctgctaatgctgcaactgattcaaacacagcaaattcagaatctgctaatgctgcaactgattcaaacgcatcaaattcagaatctgctaatgctgcaactgattcaaacgcatcaaattcagaatctgcttatgccgctactgactcaaacaacccccaagattttgcaaagttggcaactgg

SEQ ID NO: 11731 - DNA, 707 bp, Glycine max
agacgacagaagggggaagagaaaagaaaagaatcgagtgattttcgtttgcgttgctgttgcgactgagtgagtgaagatggcgtgcttgcacgaccacagttgcgaagaccatgactgttcctctaactggtctctctacaaacacatcgacctctccaaggtaactgctttgaatgaggcaaatccaggaagtgttaagtcagttttcaaagcttgggaagagcgtctggattcttctggggttcacttggaaagcaatgagggtgatcctgagttacttgtcttcattccatttacttcagatgtcaagattaagagcatatccatagttggtggagctgatggaacaagtccttccaagatgagagtgttcatcaatcgagaaggaattgacttttcagatgcgcaaagcatgcaggctattcaggaatgggatttggttgagaatatgcaaggagtattggaataccagacaagatattctggatttcaaagcgtggcaaatattaccttgcactttcctgagaatgttggtggtgacactactaaaatacactatattggctttaaaggcgaagccactcagttgaaaagggatgttgttgccactattgtttatgagcttatgccaaatccttctgaccacaagacacgtgctgaaagtggatggggtctttctcacatagaatgaaatagttacattt

SEQ ID NO: 11732 - DNA, 703 bp, Glycine max
gtttctgcttgcggccaaccaagcagcaataaacgcaaacttacaaactggtttattctcaaacactttctttttctctctcttcaagctctctcccttcttctatacgatacgaagtttcctctatcttctcttctctgagggtagctttgattcattgaaggtttttccttcaccaactttccagaggaagaaagtgacttgatttctgggcctgctcgttctattactgagaaaccaaatacatgatactaaaaactcaaatggaagaaaagcagttagattttaatcagcctcttttatcggtaaggcgaatctcatcaacggcggcctctgaaaatgacaataaaagaaaagctgataaatcagtgcggaaacgacctcctcttccgttttacaaatcagagttaaaatcaggtccagtgactaaccctggaactgttccttttgtatgggagaagactcctggaagacctaagaatgacagcaaactacaaacaagggctgtcgaacggccttccgttgctccaaagcttccacccgggagggttttgaaagttgaacagcaatgttctgataaagttcctaaaggtgcatcagttactcaatccagaacaggaagcagtgtttcagattctccgcgtactgcatctctagataataaagtgacaaaacatgaaagcccccaagaagtaattgagga

SEQ ID NO: 11733 - DNA, 816 bp, Glycine max
aaatttgggatgtaagctataaaattcagttactgaaacttcatccaatcaaagtgcagaataaaacagaccagggtggcagtgcctatgaaacaattttcattttttattttaaaaaacaattttcattttatttattttagaaagcaattttcaaagtgcctatgcaattcttttacttaaagctttccacctttgttttttttcacttccctttattttccaccttgcctcctaagtacactcttaggcgaacattggaagtttgatctttgtggttgactattagctatttgtgatttgacgtgtcatgattaggttcaagtgcattgatttggatggaaatggagttctgacacggaatgaactgcaatttttttatgaggagcaattgcatcgaatggagtgcatggcccgagaacctgtgctttttgaggatatactgtgccagattattgacatgattggacctgaggatgagagctatataactctgcgtgacctgaaaggtggtaaactctcaggaagtgttttcaatatcctgttcaatctgaataagttcatggcctttgaaactcgtgacccatttttgattcgtcaggaacgtgagaatcctacattgacagagtgggatcgctttgctcatagagaatatattatgctttctatggaagaagatgtagaggatgcctctaacggtagtgcagaagtttgggatgaatcactagaggctcccttctgacgtcatttattgtatgaaaagatattaacgccccagatcggatggactggccattgttcagagacacatgactc

SEQ ID NO: 11734 - DNA, 1219 bp, Glycine max
tgaaacagagagttggcccatctaatttgggttctcctttgaaggttgtcagtgagccggttaaagaagtgatacctcagttctactttcaacttgggcgtcctcctccaaatgatctgaaagaacaatgcctgattagaattgaccatttattccatgatcacatggatgggctgcagatacatgaattcaagtcagttactaaggaagtttgcaagctgccatcttttttttccacttcccttttccagaagattgacaatggaactggtgttgtgacaaggaaaacatttattgaatattggattaatggcaacatgctggcgatggatatagcagctctaatattcacaattttaaagcaaccacagctcaagtaccttactcaggatgattttaaacctgtgctacgtgagcttttagcaactcatccagggctggagttcctgcagagcacacctgagtttcaagagagatatgctgaaactgtcatatacagaatatattactacattaatagatcaggaaatggccgtctcaccctgagggagctgaagcgtggaaacataattgatgcaatgctgcatgccgatgaagaagaggacataaacaaggttttgaggtacttctcttacgagcatttttatgttatatactgcaagttttgggagctggatacagatcatgatttcttgatagacaaagagaatctcatcagatatggtaaccatgcgcttacctatcgaattgttgatagaatattttctcaggttcctagaaggtttaccagtaaggttgagggaaagatgggttatgaagattttgtttacttcatactgtcagaagaggataaatcatccgagccaagtcttgagtactggttcaagtgcattgatttggatggaaatggagttctgacacggaatgaaactgcaatttttttatgaggagcaattgcatcggatggaatgcatggcccaagagcctgtgctctttgaggacatattgtgtcagataattgacatgattaaacctgaggatgagagtgttataactttgcgggacctgaaaggtggtaaactttcaggaagtgttttcaacatcctgttcaatctaaataagttcatggcctttgaaactcgtgacccatttttgatccgtcaggaacgtgagaacccaacattgacagagtgtgatcgatgtgctcatcgagaatata

SEQ ID NO: 11735 - DNA, 722 bp, Glycine max
gttaattaaatccgaggaaaaaagtttggtgactgagaaagggaaaatagaaagtgagagagaggaattgctcacacataaggctgtagttgagaaaataagagctaacaatgaagaagagtcgttgaggataaatgaagagattgatcgacttaaagtgactgaggaggagaggtctgaatatctgcgcttgcagtctcaattgaagcatgaagttgatcagtacagacaccagaaagagctacttctgaaggaagctgaagacttaaggcaacagaaagagacttttgaaagagaatgggatgagctagatctgaagagaacagatgttgagaaagagctgaaaagtgtgattcaacagaaggaagaaatattaaaactacaacaatatgaagaagaaaagttaaagaatgagaagcaggacacacaggcatatgtgcaaagggagttagaaactcttaagttggctaaagagtcatttgctgcagaaatggagttggagaagtcaagcctagctgaaaaagctcaaagtgagaggaaccaaatacttctggattttgagctgcagaaaaaggaacttgaagctgatatgcagaatcagttagagcagaaggaaaaagatttgatagagaggaagaagttatttgaggaaaaaagagagagtgaattaaacaatattaacttcttgagagaagtagctaataaagaaatggatgaaatga

SEQ ID NO: 11736 - DNA, 687 bp, Glycine max
aaggtggttaacgaacttgattttaaggaaattgcaactatgacagaagagtcctccttttcttttgccaaaagaaaaggtggacaacgaacttgagtttaaggaaattgcaactatgacagaaggatatactggaagtgatctaaagaacttgtgcacaactgctgcttatcggcctgttagagagctaattcagcaagagaggataaagagtctggataaaaagcagaaagcttccaggggacagaataaagatgtccaagaaagtcgaggacaatccgtagtaggaaatactcaagatgctctagatgaagaagaggaagttaaacaggaaagagttattattacccttaggccattgaatatgcaggatttcaaagaggccaaaaatcaggttgctgcaagctttgcagctgaaggggctggaatgggtgagttgaaacagtggaacgatttgtacggagaaggcggttcaaggaagcagcagcagttgtcttacttcctgtgaattttactgaggatttcaatgaaactgtgtgggaacattttcgtggctacaccatttttcaatgatagtgtggggaaacattttccactgaataggcacctatcaagcaatatctctatattttccaagaatatcttgatgctttttcattcattcccttaagcttaggaactaagcta

SEQ ID NO: 11737 - DNA, 674 bp, Glycine max
actcgagccgaatcggctcgagtgttcgtgctttattcacacttgacagccaaggtctcccacactataatattcctggaagaggttgatagcatgcttgggcaacggaccagagttggggaacatgaagccatgaggaaaataaagaatgaatttatgacccattgggatggacttttgacaaagcaaggggagcggatccttgttcttgctgcaaccaataggcctttcgacttggatgaagctattattaggcgatttgaaagaaggattatggtaggactaccatctgtggagttcagggaaaagattttgaggactcttttggcaaaagaaaaggtggacaacgaacttgagtttaaggaaattgcaactatgacagaaggatatactggaagtgatctaaagaacttgtgcacaactgctgcttatcggcctgttagagagctaattcagcaagagaggataaagagtctggtaagtggcaattgtataatttattttgagtttaatggcgatgcactcatcattcaatcacaaatcacagtgaacataactctttaagataatggcgatgccctcatcattcaatcacaaatcactcatcattcaatcacaatttattttgagtttaacggcaatgcactcatcattcaatcaaaatcccagttaat

SEQ ID NO: 11738 - DNA, 730 bp, Glycine max
cgttccggaattcccgggtcgactccacgcgtcggcccccacgcgtccgcggacgcgtgggggtttttgtggataagagtgagctataatggctgccaggagaccgggtttaattgctttgtttgatgttgacgggactcttacagctcccaggaaggtggtcacaccggaaatgttgacattcatgcaagaactacgaaaggttgtaacggttggagttgttgggggttctgaccttataaagatatcagagcaacttggcagcacagttaccaatgagtatgattacgtattttctgagaatggtcttgtggctcacaaggaaggaaagctcattggaactcagagcttgaagtcattccttggtgaagaaaagctcaaggagtttattaactttacacttcattatattgctgatttggacatccccattaagaggggaacatttatggagttccgtagtgggatgctgaatgtgtcacctattggccgaaattgtagccaagaagaaagagatgagtttgagaaatatgacaaggttcacaatatacgcccgaaaatggtttctgtacttcgtgagaagtttgctcatcttaacttgacattctccattggaggacagataagttttgatgttttccctcaaggttgggacaaaacatactgcctgagatatcttgatggtttcaatgaaattcacttcttcggtgacaaaacttacaagggtgga

SEQ ID NO: 11739 - DNA, 518 bp, Glycine max
gatgacagaaaagtaaacagcatcgacttgaatttgagtgatgaatttgttgttgaagcttcactttggaaattttgaatgttacgagacacaagtttctccaacttgctgggtcccacacagtttcttcctctgtctatttccctcgcagatctcaaccaattcttatatataaacccctttcgagatctgcttcaagctctgtccccttcttccacttccaccctcctctcaggtttttgtggataagagtgagctataatggctgccaggagaccgggtttgattgctttgtttgatgttgatggaactcttacagctcccaggaaggtggtcacaccggagatgttgacattcatgcaagaactgcggaaggttgtaacggttggagttgttgggggttctgaccttataaagatatcagagcaacttggcagcacagttaccaatgactatgattacgtattttctgagaatgggtcttgtggctcacacggaaggaaagctcattggaactc

SEQ ID NO: 11740 - DNA, 534 bp, Glycine max
cccacgcgtccgcccacgcgtccgcccacgcgtccgagaatatattacattaagaaagcccaaagaaagaagaagatggcgtccgagtgcaaaggtaagagctcatggcctgagttggttggagtggaaggaacggtggcggtggctacaattgagagggagaatcctttggtggatgctaacactgtgcttaaaggatccatcgtcaccgctgattttcgatgtgatagggttcgggtttgggtcaccaaacatggaattgtttatcaggctccaagaattggataagaagtgtttacactaaagcacttcatatatatgttatgagtcatgaatataatagtatttaaataaggagttattcttccaattatgttatttgattgaaaataaaaacatgactataagaaatttgttttttcttatttttaattatgttatgcactgcaaataaatatacaaattgtgtgtttcattttctttttgtacgcaataattaaaccatttatatatctccatttacaaaacaacaat

SEQ ID NO: 11741 - DNA, 644 bp, Glycine max
acaaaattgatcatcatgggtttcaattgaacggaaagatctcacttttcagttgctgttcatgcatgtatatttttggataaattcaaaaattgaagatgtggatttagtgtcagaaaattaatgaattgtgtgctgttttcaaccggtgtcaataacatggaccaaatgggaatgttagccacagattgaggtccatgttttgtaacaaaagcttgcagggaagtatcatttagcctaaccttgtaaaaggggcaaactaaattatggatctgatgaattggtgagcaagtgtaaggaaaaaatatatgcagtgagaacaataattgcatacgggacaaaacgcaccaagcatcattgtttacttctctagcattgaagtcattgatcaatgtgaaatgggattagaattcgatggcatcaatatggttaagtagctgtccgtgttcaagataactacgcttgcatgtcgcatgtattttccagctttcacatgatttcattcaaatatagttttaacatttacgagtctattatttttagtttttcaaatttgtaaaatgtttttcaagtctcttctgcaataaaagatcttcacaaaaacaatgtattcaagttagacttctgcaataaaagagcgtcac

SEQ ID NO: 11742 - DNA, 898 bp, Glycine max
ctcgtagccgcgctttggattcactcactcacgagtctcacgcttttcacgatgggcttcattttcggagtggtggtcggaataattgtgggcctggccatcatagtgggcttcgtccgcggcgagaactcccgggccgcccaacgctcccagctcgccaccaccgttgccgccttcgctcggatgaccgtcgaagattccagaaagatcttgccgcctcagttctacccttcctgggtcgttttctcttccagccagaagttaacttggcttaactcgcatctcaccaagatctggccctatgttaacgaggctgcttctgagctcataaaagcgtcggtggaacctattctggaagaatatagacccgtggttttggcggctcttaaattttccaagtttactcttggtactgtagctccacagtttacaggcgtgtctataattgaggatggaggggatggtgttacaatggagttagaaatgcaatgggatgggaacccaagtattatacttgatattaaaactcttcttggtgttgcactaccggtgcaggtaaaaaatattggatttacgggtgtttttaggttgatcttcaagccgttagttgatgaatttcctggttttggagctgttagctattcattaaggcaaaagaaaaagttggattttactctaaaagtcattggtggcgacatatcagcaattcctggattatatgatgcaatagagggggcaattcgggatgctgttgaagattctattacatggcccgtgagaaaagttgtacccattttgcctggagattacagtgatttggagttgaagcccgaggggatattagaagtaaagcttgtgcaagcaaaggaattaacaaacaaggatatcattggaaaat

SEQ ID NO: 11743 - DNA, 613 bp, Glycine max
aataaccaaaattgatcatcaatgggtttcaattgaacggaaagatctcacttttcagttgctgttcatgcatgtatatttttggataaaattcaaaaattgaagatgtggatttagtgtcagaaaattaatgaattgtgtgctgttttcaatctgtggctaacattcccatttggtccatgttattgacaccggtctcactcacgagtctcacgcttttcacgatgggcttcattttcggagtggtggtcggaataattgtgggcctggccatcatagtgggcttcgtccgcggcgagaactcccgggccgcccaacgctcccagctcgccaccaccgttgccgccttcgctcggatgaccgtcgaagattccagaaagatcttgccgcctcagttctacccttcctgggtcgttttctcttccagccagaagttaacttggcttaactcgcatctcaccaagatctggccctatgttaacaaacaaggatatcattggaaaatcagatccatatgccgttgtatacatacggcctttacgcgaaagaatgaagaaaagcaaaacaattaacaatgatttgaatccgatttggaatgaacactttgaatttg

SEQ ID NO: 11744 - DNA, 544 bp, Glycine max
ttcggccgccgacccacgtccagtattatctggttcataattatatatgtttatcctcatttttgactcagtcgtatgcttgtgattaaagatgggatttgctgtctgggaaccaccacatggtcattacaaaatgcttaagtatccatggaagaattatgtgaaattaagtggggctctaaggcactgtgcgtttatggtcatggctatgcatgggtgcatactttctgaaatacaggccccagctgagaagagacaagttttccgcagtgagcttcagagggtaggttctgaaggagcaaaagtgttgcgtgaacttggaaacaaagttaaaaagatggagaaactaggtcgtggagacttgctgtatgaagtgcacgaggcagcagaggaattgcaacagaagatcgattaaaaatcttaccttcttgtcaactccgagaactgggaaattggaaaccgcccaagagaggatcaggagactgctcttcaacaacaaggcctctttaacatggatgaagaaagaaaaattctgagtcaagtc

SEQ ID NO: 11745 - DNA, 530 bp, Glycine max
ggggaatttgttgatacagctataaatagatttgttctcattgcacttggtgctgctgtatctttgggagtcaatatctgcatatatccaatctgggctggtgaggatctgcatgatcttgtcacaaaaaatttcatgggtgttgcaacatctttggaaggtgttgtcaatcactaccttcattgtgttgaatataagaaggtgccatctaaaattcttacttaccaagctgctgatgacccaatttacagtggctacagatcggctgttgaatctacaagtaaagaagattcattgatgggatttgctgtctgggaaccaccacatggtcattacaaaatgcttaagtatccatggaagaattatgtgaaattaagtggggctctaatgcactgtgcgtttatggtcatggctatgcatgggtgcatactttctgaaatacaggccccagctgagaagagacaagttttccgcagtgagcttcagagggtaagttctgaaggagcaaaaatgttgcgtgaacttggaaa

SEQ ID NO: 11746 - DNA, 1722 bp, Glycine max
gggaagaagaggttttcgtttggttaagcaagatggatttggaagcagagaaagagcatgaagctgcatttgcagtggcctcactctccctctctctccccaccattttccccttcgtccaacccaagaatatcccatcaaccacccttcaaccaaccaagctcaaagtcccaacccaagcctcatccctcacacacctttctctctccaccaccactcctcctccttccaaaacctccttcaaatccaccgtctccgccaaccccctccacgcccctctctccctcgctccccaccgcccccgcgacccttccaacgccgccgccctccgccgcgccgccgtcgtctggttccgcaacgacctccgcctcctcgacaatgagtgcctcaccgccgccaacaacgactccctctccgtcctccccgtctactgcttcgaccccgccgactacggcaagtcggcctccggcttcgacaagaccggcccctaccgcgccgccttcctcatcgactccgtctccgacctccgccgcagcctccaggcgcgcggctccgatctcgtcgtgcgcgttgggaagcccgaggcggtgctggtggagctcgccaaggccgtcggggccgacgccgtgtacgcccaccgagaggtctcgcacgacgaggcgaaggcggaggagagggtggaggcggccatgaaggaggagaatgtggaggtgaagtacttctggggaagcacgttgtatcacgtggacgatttgccttttcaattggaggacatgccttccaattacggagggtttagggatagggttcagaaattggaggtaaggaagacaattgaggcattagatcagcttaagggaatgccttctcgcggtgatgttgagcctggggagattccttctttaatggacctaggccttaatccatctgcaacaatgtcacagaatggaaagtgcgttgctaatgcttctatggtaggaggggagactgaggcactgcagaagcttaaaaaatttgcagctgagtgtgcagctcagccacacaaggggtttaaggatggaacacagagtatatatggtgccaacttctcctgcaagatttctccgtggttggcaatgggatgcctttcccctcgcacaatgtatgaagaactgaagaagactgccggcagagtcatttctgcttcggccgaccggaacgatggtggtaatggctcgtccagaactggaacaaattggttgatgtttgagttgctatggagggacttctttaggtttataacaaaaaaatacagttctgcaaagaaacagctggaagctgctccggtcactgcatgtgctggagcatatgcttaagctggaagttctagtgggcattaaagagtttgtttcagggtgtgggttggttccctacgcagacatggcagtagggtgctcgatgaacaagatttggttccccttctgaagttctgttgtaactgacagatacattatatttcaatatggaagctttacattattttctcgaaggcaagtgttggtattcttagagtagcatttcgtctgcatcgggcatcttttgagtagatctttgagtccaaagttcatggctctgtctctcccccagtaactcgatattgtgggtgaaatttgaaacttaaaaatggatgtaattactacggcatctatatttttaataataccaggatgaattctctgggtt

SEQ ID NO: 11747 - DNA, 482 bp, Glycine max
caaaaataccagctagcaggaaaattgggtccatgaggctggatgactgggtcttgtgcaggatctataagaagaagagcatggtaaaagcattggagcacaaagaggcacacccagaagtccaaattgctaatcttgcgcctgcaaatcatgatgttgaacagaaaatgatgaaccttcctaggacttggtcccttacttaccttttggatatgaattacttgggtccaattttatctgatggctcttattgctcaaccttggattttcaaattaacaatggggattagacccttttgtgaaatctcaaccggttgaaatgaacaattatgtagcagattcagggaagtaccaagtgaaacagagtagcaccattggaccagcccatatatgtgaaacaaatgtatgatttgctaggataaaaccaataggaaaaaaaaaaagagcttggattgttgtctagtcatgacgataggtatcat

SEQ ID NO: 11748 - DNA, 772 bp, Glycine max
tcgccctcgcgtccgcccacgcgtccgcccacgcgtccgcccacgcgttcgaccaagcacaaactccttctagcccttctccagccggtgctgtcactcctcccccacagaactctggtgctgcatctcttggagttgttggagtatttgccaccctgctttcagttgccgaacccaggtatcaaactggttcattaatgccagggttcggttgtggaaacccatggtggaagaaatgtaccaacaagaacttaaagaagcagagagtgcagaagacagagaaaacaacagcagcaacattagtggcaaccaagcacaaccccccaccactccttctagcccttctccagccggtgctgtcactcctcccccacagaactctggtgctgcatctcttggagttgttggagtatttgccaccctgctttcagttgccgccacttttttctattagatactccacgagattattctagtcaggagcttgcgagtcatcatcatcgctctttgattgtgtttcatgaattcagtttttttcttatttttttgaggatgacaataaagttagctttaatttaatttctcttcatcggctacagttttggttttttgttatgtttttgagtaaaaataaattggtacggtgtgaatatgttaacaagtgtatttctttgatagttaacatcgttgtattacagtgcatatatttgcaattggagataaaaaatatttgtgacacctttcgcaatcaaaaaaaaaaaaaaagggcggc

SEQ ID NO: 11749 - DNA, 1257 bp, Glycine max
cggctcgagctcgagccgctttcactggaaggagaacaagaagaaaaaaccgacacaaagatctagtcctagctagaatcaaacaggggcgatctcaccttcaagaacacatcgccatggcaaggaacttgcttcttgtgctttttgcagtagccaccctcctccatggctcagcagcccaaaccagacacatggtcggtgatgccacgggctggatcatccctgctggcggcgctgccacctacaccgcctgggcttccaacaaaaccttcaccgtaaacgacactctcgtgttcaacttcgccaccggccaacacaacgtggccaaggtaacgaaatcggctttcgacgcgtgcaacggcgggagcgccgttttcaccctgacctccggtccagcgaccgtgaccctgaacgaaacaggggagcaatactacatttgctccgttggatcacactgttccgctggccagaaactggcaattaacgttaacagagcttcttctaccggtccttcccctgcacctcaacccagaggaagtggttctccaccaagggctagccctgtccccacacaagcaccacaagccagtagccccactcctccaccaaggtctgcaccagcacctgcttttggtccatcctctgaaccagctactttcattgttggagaaaccgctggctggattgttcctggcaacgcttccttttacacagcttgggcctctggcaaaaacttcagggttggagacgtccttgtgttcaactacgcatcaaatacacacaacgtagaggaggttacaaaggccaacttcgatgcttgcagctcagcctctcctattgccactttcaccactccacctgcgagagtgaccctcaacaaatctggtcaacatttcttcatctgtggaattccagggcactgtttgggaggtcaaaagcttgccatcaacgtcaccggcagcagcaccgccaccccaccttccgccgcggccccccccaccactccttctagcccttctccagccggtgctgtcactcctcccccacagaactctggtgctgcatctcttggagttgttggagtatttgccaccctgctttcagttgccgccacttttttctattagatactccacgagattattctagtcaggagcttgcgagtcatcatcatcgctctttgattgtgtttcatgaattcagtttttttcttatttttttgaggatgacaataaagttagctttaatttaatttct

SEQ ID NO: 11750 - DNA, 971 bp, Glycine max
cgtacgcgtgggcggacgcgtgggggagaacaagaagataaaaccaacaaaaaagatctagtcctagaatccaacaggggcgacctcacctccaagaacacatagccatgtcaagaaacttgcttcttgttctttttgcagtagccaccttcctccatggctcagaagcacaagcaccagcaccaaaagccactagccccatttctccaccaaggtctacaccagcacctggcccttcctctggatcagttacttacactgttggagagactgcaggctggattgttcctggcaacgcttccttttacccagcttgggcctctgccaaaaacttcaaggttggagacatcctagttttcaactacccatcaaatgcacacaacgtagaggaggtgacaaaggccaactacgattcttgcagctcagcctctcctatcgccactttcaccactccaccggccagagtcccccttagcaaatccggtgaacattactacatctgtggaattccggggcactgtttgggaggacaaaagctttccatcaacgtcaccggcggtagcaccgccaccgcccccaccactccttctagcccttctccatcaggtgctgtcagtcctcccccacagaactctgctgctgcatctctcggtcttgttggagtatccgccacccttctttcagttgccgcggcttttttctattattctatttattaggattcttcgctctttgatttatctttagtgaattcagtttttctttttcttttgtttttgagggtgacaataaagttagcttctatttcatctcccttcatcggctacagttttctgtactgtattctagtacatacatttggaatcgcagatatatatttgtgtggtgaacaaattcgcaacgcctttcgcaatcaaaaaaaaattggagacctttgggtttgattatttaattattacggacgaggtttg

SEQ ID NO: 11751 - DNA, 531 bp, Glycine max
cggcgggaacgccgttttgaccctgacctccggtccagccaccgtaaccctgaacgaaacaggggaacaatactacatttgctcctttggatcacactgttccggcggtcagaagctggcaattaacgttaacagagcttcttctagcactccttcccctgctcctgaagcacaagcaccagcaccaaaagccactagccccatttctccaccaaggtgggcaccagcacctggcccttcctctggatcacccacttacactgttggagagactgcaggctggattgttcctggcaacgcttccttttacccagcttgggcctctgccaaaaacttcaaggttggagacatcctaggtaagtcatcatcatctacacttattaactaaatcaagtcccacgtggtacagattaaagtaaagactcgaaccatcattggtgtgttttgcagttttcaactacccatcaaatgcacacaacgtagaggaggtgacaaaggccaactacgattcttgcagctcagcctctccta

SEQ ID NO: 11752 - DNA, 1188 bp, Glycine max
ggaatacaaaccataactcacacccacccatccgattacaacgtcttctggttctttgaagaagaacccttctctttgcgcgtgtcccgttctcttctccaatcctcctccatccccactgtgtgatctgatcctaaaccctatagccatgactaccatggaggttaagctatggaatgacaagcgcgagagagaaatgtatgacaactttggggagctttatgccattatcaaagccactgagaggcttgagaaggcctatgttagagatataatctcaccccaggaatatgagttggagtgccagaagctcatagctcatttcaaaaccttagcttccacccttaaagacactgtgcctagcattgagcgatttgcagatacttacaagatggagtgccctgcagcgattaaccgtctcgtggtttctggtgtgcctgccaccgtggagcatcgtgcaactgcggctgcctctgcttccacctcggccgctattgtggccgagtgcgtccagaattttattacttctatggattctttgaaacttaacatggtggctgtggatcaggtgcacccgttgctctcggacctttatgcttcactcaataagttgactatcctgccacctgattttgaggggaaaacaaaaatgaaggagtggattgcgaggttatccaagatgggtgcagctgatgagttgactgaacaacaggcgcggcagcttcactttgatcttgagtcttcttacaattcctttatggcagccctgcccaatgctggtacatgactgagtggccagtgcttgtacattaaatcagaatttccttttttttcatgtttttttttctttggatactaatctgatgattggaaaggaattttctatttggtcacagctcatacatttttaatgctggatcctggatatttacaaatgatggctatgtgctgatcattgaagctttattttatattgtgaatgtgctttcagctttggttttcttacctgcagttgtttggtttgagtttctctgcccacctagcaagggtgaaatcttacagaaacttaattattgagtttatagctgtttatctttgtcctttgtaccaataaatgtgtttcagcaccactcctacatagagtggtagatccttcaaataattgacataattaatagcttttggtgt

SEQ ID NO: 11753 - DNA, 1931 bp, Glycine max
ctcgagcgctcgagccgcttcttcttattctttctttttctccttctaattctttgttacccttcacctattacaagccactcacactaacacaaaaacatggaactaagcaccatgttttgcttgtgtgcttcgtttctcttcattgttctcttcagggcactcatcaaaccttattatgtctccaaacgccgtgacttgccactcccacctggctccatgggttggccttacataggagaaacctttcaaatgtattctcaagatccaaatgtcttctttgcctcaaaaataaaaaggtttggctctatgttcaagtcccacattctaggttgtccctgcgtgatgatttccagccccgaggctgcaaagtttgtgctcaacaaagctcaactcttcaagccaacattcccagcaagcaaagagaggatgttgggaaaacaagctatcttctttcaccaaggagagtaccatgctaacttgagaaggcttgttcttcgcaccttcatgcccgaagccataaaaaacatcgtacctgacattgaatccattgcccaagattgcttaaagtcttgggaaggccgtctgatcaccactttccttgaaatgaaaacgttcaccttcaacgttgctctgctttcaattttcgggaaagaagagattctgtacagagatgctctgaaacggtgctactacactctggagcaagggtataactcaatgcccattaacgttccgggaacactgttccacaaggcgatgaaggcaaggaaggagcttgcacaaatcgtggcccaaataatctggagcaggaggcagaggaagatgattgattacaaggacttgttgggttcattcatggatgagaaatcagggctcaccgacgaccagatagcggataatgttattggcgtcattttcgcagctcgtgacaccaccgccagtgtgctgacgtggatcgtcaagtaccttggtgaaaaccccagtgtcctagaagctgttactgaggaacaagagtgcatattgaagagcaaggaagaaagtggagaagataagggtctaaattgggaagatgcaaaaaagatgccaataacttcaagggtcattcaggagactctaagagttgcttcaattttgtcttttactttcagagaagcagtagaggatgttgaataccaagggtatcttattccaaaagggtggaaagtgctacctctatttaggaacatacaccacagtccagacaacttcaaggagccagaaaaatttgatccctcaagatttgaggctgctccaaagcccaacacttttatgccatttggcagtgggatccacatgtgtccagggaatgaattagccaagttggagattttggtcctcctacatcatctgaccacaaagtacaggtggtctgttgtgggtgcaaagaatgggattcaatatggcccttttgctcttccccaaaacggcttacccatcacattatttcccaagagcaagtagataatcaatcacacatccaatacaaccctggcttcatagtagctttctaaatatggaaagaattgcttcatagctctcaaaattggtttccacagataatgatacagacacagaccatattgcaattggataaccaaacaaagggagatcaacttttcccttcttttttgtccaagagaaacctaaaggggtaatcttgacaaatagcatacaaacaggaatgtcaagtgtatatagaggaggtttcacagcctgagcagatagtattaagttcttttcattttcttattttttttatctttcaaatatgaggaaaagtcctcataagattgtattgatgcattcaactaattagttctgtatccataagaatgccgcaaggccaaaataaagtgaaacattggttctgggatgaaaaaaaaaaatat

SEQ ID NO: 11754 - DNA, 443 bp, Glycine max
gcctataaatacctcaaatgttcaactccttttgtcacacacaccctcttctccttcttcttcttctttgtgttatccttcacacacctattacaagtcaagccactcaactcacactaacataaaaacatggaactaagcaccatgtttttcctgtgtgcttctcttctcttcattgttctcttcttcaggacactcatcaaaccttactatgtctccaaacgccgtgacttgccactcccacctggctccatgggttggccttacataggagaaacctttcaaatgtattctcaagacccaaatgtcttctttgcctcaaaaataaaaaggttcaactcactcttcatgccaacaactctttcactttctttaacggacagacatacagaaatttcatattttttttttggtatctaggtttggctctatgtttaagttcc

SEQ ID NO: 11755 - DNA, 380 bp, Glycine max
tctcctttttctttttttttgtgttatccttgcacacacctattacaagtcaagccactcaactcacactaacataaaaacatggaactaagcaccatgtttttcctgtgtgcttctcttctcttcattggtctcttcttcaggacactcatcaaaccttactatgtctccaaacgccgtgacttgccactcccacctggctccatgggttggccttacataggagaaacctttcaaatgtattctcaagacccaaatgtcttctttgcctcaaaaataaaaaggtttggctctatgtttaagtcccacattctaggttgtccctgcgtgatgatttccagccccgaggctgccaagtttgtgcttgaacaaagctcaac

SEQ ID NO: 11756 - DNA, 415 bp, Glycine max
tactcgagccgattcggctcgagaaagtgtcaattgggtgtatgcagtgttcatacttcatacatgcatatatcattcttcaacgttgtttggacccttagccttgccttacactttcttctttttaatttttggacttcacaggaggaacaagagtgcatattgaagagcaaggaagaaagtggagaagataagggtctaaattgggaagatgcaaaaaagatgccaataacttcaagggtcattcaggagactctaagagttgcttcaattttgtcttttactttcagagaagcagtagaggatgttgaataccaaggtcaattaccaaatctgatatgataccttatttttaatttttaacacaaggtctcctttccttttctcacttaagctcacagattctatgttggtt

SEQ ID NO: 11757 - DNA, 628 bp, Glycine max
attacccatttcatgtctaattcctcgttggttttttttaacaaaatagaataagaagggcttttacggtttttgattttggggtctcctgtcctgctgttcaccttcaacgttgctctgctttcaattttcggaaaagaagagattctgtacagagatgctctgaaacggtgctactacactctggtgcaagggtataactcaatgccaattaacgttccgggaacactgttccacaaggcgatgaaggcaaggaaggagcttgcacaaatcgtggcccaaataatctggagcaggaggcagaggaagatgattgattacaaggacttgttgggttcattcatggatgagaaatcagggctcaccgacgaccagatagcggataatgttattggcgtcattttcgcagctcgtgacaccaccgccagtgtgctgacgtggatcgtcaagtacctcggtgaaaaccccagtgtcctagaagctgttaatgtaagtgtctcttgttttttctttctcaaagaaaattgaggctgagggcataaaaatagtaaaaagtagttcaaaaatgattcttcgacacctcaaaagagaaagcactgagggtagatatgataggtaacatgacgta

SEQ ID NO: 11758 - DNA, 651 bp, Glycine max
  unsure (1)..(651): unsure at all n locations
ctgaccacaaagtacaggttggtaaaccttaatcatcagtaacaacagtgtctctcattgcaacaacccttttttagccataggctttgaatagagacattttccaaattagggggtttagaatgttgtttctaacgtagtgttgcttcttttcttttttctttttttctggtgcaggtggtctgttgtgggtgcaaagaatgggattcaatatggcacttttgctcttccccanaacggcttacccatcacattatttcccaagagcaagtagatatcactcaaacaatggcttcatagtagctttctaaatatggaaagaattgcttcatagctctcaaaattggtttccatattgcaattggataaccaaacaagggagatcaacttttcccttctttttggccaagagaaacccaaaggggtagtcttgtcaatagcatacaaacaggaagaatgtcaagtgtatatagaggaggaggtttcccagcctgagcaaatagtattaagttcttttcattttcttattttttttatccttcaaatgtgaagaaaagtcctcataagattgtattgatgcattcaactaattagttctgtatccataagaatgccgcaaggccaaaataaaagttaaattttggttttgag

SEQ ID NO: 11759 - DNA, 520 bp, Glycine max
gccttcttaccgaacatgacttgagctttccatggaagaagaacacgccgcaaaggcgccactgccggacgctttccttcagttcctggagaccaacgggctcgacccttccatttacactgctattgattccaccccacgatacattcggttgaaacccggtttcgaatcatgtattgaagaggttgaagcagaggtgaaatgcaaactcgaaaaattagagtggttaccgggattttactctcttccacctcacgttcaaattgctggttctagggcataccgagaagggaagatatatggaattgatgcagcttctggagctgcagttatggctttaaatatatcacctggggatcatgttctcgacctgtgtgctgctcctggtgccaaactttgtatgattttggaccttcttggtgattcaggctctgtggctggagtggatgttgcaaggcatcgtttggcagcgtgtaggacaatgctgcagaaatatatgattggtggtcggtgccggctt

SEQ ID NO: 11760 - DNA, 720 bp, Glycine max
gtttctttcttggtgcctatgcaggcattgttgcttatcaggagtcttctttcttagtttggcctttcgtacgttgttgcagctttggccatttatgatgaatacagcaatgatattcttgacatgccagaaggatcctgcttccctaggcctcagtttcgaaaagaggttgatacatcacaaagaacttctaattcaaattccgtattaagacccagctccttccgaaaggctccttctcgcacatcttcaatgaagaacaacaacattgctgagttgaaatcatttgagctgttggatgccttattcaaggaatgtttccgtgttggagaaaaattggtttctgaaggtataattacaagaaaagacataaaagaagccaattctggtaacgggagtagagttattagtattggtttgccagcatattgcttagtccagggactcttgcgctctgcaaaattaaattccgttggtataatgattagtgatgaaactgaactaactacctcaaacagaccaagggagacattttttgactggttcgttaatccccttttgatcattaaggagcaaatcaaagctgaaaatctttctgcctcagaagaggactacctctgcaaattagttctcttgagtggtgatgcagacagactgaaaaattctagcgttggccctgcaccagaatccgaggtcaaacgtgcggaacttgaggcattg

SEQ ID NO: 11761 - DNA, 526 bp, Glycine max
cccacgcgtccgaaagaaaatggccaactcgaagaacaatttaattctagtttccactctccttatgttgcttcaactccacttcaccccatcaaaagccgccatcaaaggaggctactggtactccgaaagtggccttgcagtttccaacattaacccctctcatttcacccacctcttctgtgcatttgcccacctcgaccccaacaccaacaaagtcaccatttcctcgtcagactcatctcagttctcaaccttcactcaaaccctccaagcaaagaacccttcagtgaagacccttttgtccataggcggcggtttcggtccttctttggctgcaaatttctccagaatggcaagacaagccaacaccagaaaatcattcatagactcttcgatccaacaagccagatcgaacaacttcctcggacttgacctagattgggagtacccttcctcggacacagacaagaccaactttgcatcactcatcaaggagtggaaagaagctgtgaccaaagagtct

SEQ ID NO: 11762 - DNA, 792 bp, Glycine max
tacacacaaaacaaggtcattgagaaaccccaaaacaatcaacaatagcttgctagctactcctgttgctgtgagaaccgttgatgtagatgctttgcaagcaagatttagagactccaacaataaaagccatgcttaacacctaccatgcctccaaactctcatcaaaccagtgtggttctagccttgtgcaaacaatagatgcacctttacctctcgtatggtccctcataaggcgctttgagtatccacaagggtacaagctctttgtgaagaagtgcaaccttcttgatggggatggtggcattggaagcgtgcgtgaggtcatgatcacatctgggttacccgctggtgttagtgtggagaggttggacaagctcgatgatgacaagcatgtcttgaagtttagcatcattggtggtgatcacaggcttgtcaattatagttcaacgattactttgcatgaggaggaagaggaatacggtgggaagacggtggcgatagagtcgtacgcggtggatgtcccggcggggagtaacggcgacgatacgtgctcttttgctaatactatcatagcttgcaaccttaggtccttggctaagatcacagaagaaaaggtttgtaaggttaatcaaattaagctttaatacttaagtaggttcttcttgttgttttttttttcaattagaaatctaacctttaaaaaaaattgtaattgagtttttaatcttctatccaattattgtaattgggttcttggagttaatgaaatcgtcatattgttatttttgg

SEQ ID NO: 11763 - DNA, 1205 bp, Glycine max
ttcggttttcgcgatttcggaagggtcgtgtttccctgcttcagtttcagcttcggcttcgagaagcgtcgattgggtccccaagctgtttcttctctgtttctgacaaactttataacccttatcaaacatgagtggtcgcttttctcgcacaatttatgttggcaacctgccctctgatataagagagtcagaaattgaagatctattctacaagtatggccgtataatggatattgaattgaaggttcctccccgccctccatgttattgctttgttgagtttgataatgctcgagatgccgaagatgcaattcggggtcgagatggatacaactttgatggttgtcggttaagagtggagcttgctcatggtggtagagggccatcatcaagtgatcgacgtggatatggaggaggaggtggtaatggtggagcaggcgggggtcgttttggcatctcacgccattctgaatttcgagttattgttcgcggactcccatcttctgcatcttggcaagatttgaaggatcatatgcgaaaagctggtgatgtgtgttttgctgaggtttcccgtgatagtgaagggacttttggcattgttgattacactaattatgacgacatgaagtatgctattcggaaactagatgacactgagtttagaaatccttgggcgagagcttatattcgggtgaggaagtatgagagtagtcgttctaggagccacagcagaagtcccagcaggagcagaagtccaaaaagagttagaagtagatctttggagcgttctgtgtctaggtctcgatctagatcgcgatcagtatcaccaatcaaatcttctaggccaagatcacgttcacgatctggatctcctcgtcaggtgctgtcaggtagtggttgagtttctgaaaaagcctgtggttctctggtgatattctcccattctggtgggcagtatcggaattatatttgagttggactaaattgttttagggaaaattattgttgtacctaggctgtttcttggtaaattgttaccagtttggtgattgtgttgtttcttttaaatctaaaatgttggacattggccttgccctttgtaccttttaactagtttctatcacaagaatatctttagtcctcgcaaactgtgaatccaatttgaatggttttaaacagatttataaaaaaaatctctacat

SEQ ID NO: 11764 - DNA, 453 bp, Glycine max
gccccagcaggagcagaagtccaaaaagagttagaagtagatctctgcagcgttctgtgtctaggtcacgatctagatctcaatcagcatcaccaatcaaatcttctaggccaagatcacgatcccgatcacgatcacgatctggatctggatctcctcatcaggtcctgtcaggtagtggttgaatttctgacaaagctggtggttctctggtgatattgttccattctggtgggcagtatcggaattatattggagttggactaaattgttttaagggaaaattattgatgtgcctaggctgtttggtgattgtcttatttcttttaaattaaaatgttggacattggccttgccctttgtaccttagcaaacacaagaatatctttagtcctcgcaaactgtgaatccaatttgaatggttttaaacagatttataaaaaaagaaagaaa

SEQ ID NO: 11765 - DNA, 408 bp, Glycine max
tcgcgctatttcggaagggtcgtgtttccctgcttcagtttcagcttcggcttcgagaagcgtcgattgggtccttaagctgttccttctctgtttctgctttggagcatcttggagcaaatgagcaatggagcttgtggagcacggctcacctcaaggattgctctcttgacaaactgtataactcctatcaaacatgagcggtcgcttttctcgcacaatttatgtcggcaacctgccctctgatataagagagtcagaaattgaagatctattctacaagtatggccgtataatggatattgaattgaaggttcctccccgccctccatgttattgctttgttgagtttgataatgctcgagatgccgaagatgccattcggggtcgagatggatacaactttga

SEQ ID NO: 11766 - DNA, 483 bp, Glycine max
tcgcgatttcggaagggtcgtgtttccctgcttcagtttcagcttcggcttcgagaagcgtcgattgggtccttaagctgttccttctctgtttctgatgacaagcgcttggacaaatatgagctttgcaatcaaacatagggatatagagagggaatgggagaatcggggtggagttatggttatttttttaaaattattggagattcttgctcactctcagaagatgtatgcctgctaatatactggaatggatgaggagatcaaatttaatttcaatattgttatagctttggagcatcttggagcaaatgagcaatggagcttgtggagcacggctcacctcaaggattgctctcttggtttgcttcatagttttggttttatttatttttgtgtaatcattagagtaatgatgatgataattagacattttagatttaggcatggcttaaaaaagtgagagaaatcttctctactgac

SEQ ID NO: 11767 - DNA, 935 bp, Glycine max
tccaaaccacaatctgaatacaagaacgaataatagacaacaaaagataggactgagttttcttttattcgttcttgtattcagattgtggtttggagatttcttcagaggtcaaaaggttcagatgtactagcaacaaagcaggccttgttgttcattatcttgcttcagtatgttcctagatttctccgaatggtaccgttgacttcagagcttaagagaacagccggtgtctttgctgaaactgcatgggcaggggctgcatattatttgctgctatacatgcttgccagtcatatagttggtgctttttggtacttgttagctattgaacgcaatgacacatgctggcagaaggcttgcagtgacattgggtgcaaagaaaatttcctatattgtgggaaccggcacatggaaggttatagtgcttggaataaaacaagtgaagatattcagtcaaggtgctctgcagatggtgatcctgcacattttgattatggaattttcgggcaagtcttgtcttctggcatcatttcatctaagaagttcatctccaaatactgttactgtttatggtgggggctccagaatttgagtacacttggccagggacttcaaactagcacctatcctggggaggttatcttttcaatagcactagctataagtggcctcatcctttttgcccttctgattggcaacatgcagacatatcttcagtctctcaccattaggcttgaggaaatgagagtcaaaaggcgtgattcagaacagtggatgcaccatcgcttactcccacaagatcttaaaaaaccttttaaaccgtattacccatattagtggcttgccacacctggtgtaaaatgaagaaaatttagttcaaagtttaccaaaggatcttcgaaaagatattaaccgtaatctttgttgggcct

SEQ ID NO: 11768 - DNA, 461 bp, Glycine max
cggacgcgtgggcaaaaccaaatcaaatctctcacaagtcaaaactcaagctccatatttccttattctctttacacctctgaattcattttcttctcacatggacgagatcgacgtgcctcctttcttcgtatgccctatctcattagagctcatgaaggaccccgtgacggtctccaccggcatcacctacgaccgccacagcatcgagaagtggctcttcgccgccgtgccgaagaacaacacgtgtcccgtcacgaagcagcccctcctcccggacctcactccgaaccacacgctccgcagactcatccaagcctggtgcaccgtcaacgcctcccacggcgtccagagaatccccacaccaaaaccaccggtcgacaaaaccctcatcgagaaactccttcgcgacgccttggcttccgattccccgagccttcaacttcggtcccttcgaaccc

SEQ ID NO: 11769 - DNA, 675 bp, Glycine max
gcaacaggggcttccccacaccatcctctcccaacaagagccccctgcttaaattgtgcactccttctttatcccattctttcctcagattcgcgccaccattggaaaaaaaaaggtttccggtgttggggagcctagggttagggtttctgagagatatgggatgttccatgcattcgtgagccttatcgcacgcggttggaagctgtttgggcacggtgatgacgccggtaatgtcgccgccgccaccggaagagaatgcaaggacggcctcctctggttccgcgacatcggaaagttcgccgccggcgatttctccatggccgtcgtccaggccaaccaggtcctcgaggtccagagccagatcgagtccggcgccttcggcaccttcgtcggcgtctacgacggccacggcggccccgattgctcccgctatgtctgcgataacttgttccgcaatctccaagcgatattggccgagtcacagagtgttgtgacatctgaggccattcatcaggcgttccggcggccagaggaggggtttacggcgcttgtttcggagctgtggagctctcggccgcagattgcgactactgggacgtgttgtttggttggggttatttgtcggcagacactctttgtggcaagtcttggagattcccgtgctgtgttggg

SEQ ID NO: 11770 - DNA, 384 bp, Glycine max
  unsure (1)..(384): unsure at all n locations
gccatcctctctcccaacaagagagcgaacgagcccattcctgtttctccaccaccgaacacacacacgccctttgcttccttcctcacctcgcgctaacctgcaccccccttcttatcctgcgcaccccttctttatccaattctttcctcagattcggagcaccgcgcgcgccaccattgggaaaagaggttccggtgctgggggcctagggttagggtttctgagagatgtgggatgctccatgcattgatgagccttatcgcgcgctgttggaagccgttcgggcacggtgacgatgccggtaatgccgccgccggaagagaatgcaaggacggcctnctctggttccgcgacatcggaaagtttgcagccggcgatttc

SEQ ID NO: 11771 - DNA, 588 bp, Glycine max
gggtgcttgcatgataatttgtgttggtgcactcatgcctgccatttcagtgcgttcatctggtgaaggcctgaaaattgaagcaaagattacaaataaaagtatggtgtctcttatttcttgtgttctactgattggactctttgttatgcaacaccgtggctcctacaaggttgcattcgtgtttccccccataatcatcctatggctactgactattttcatgattggtatttacaatgtcatcaagtggaatccaagagtgtgtcaggctctttctccatattatacatacaagttctttaggcttacaggaaaagatggttggactaatcttggacgagtatttctgtgtgttacaggaactgatgctatgtttgcagaccttgggtactacagacaaacacctgttagggttgcatttttttgtatcatttacccatgtctagatcttcaatacatggggcaagctgcttttctttcaaagaatttatctgcagtgcctataagctgttatgcttctattccagatattctattttggccagtatttgtggtggctgctttggcagaaatagtggcaagtca

SEQ ID NO: 11772 - DNA, 1148 bp, Glycine max
ctcttcctgtaatttcgggctatccgcacgaaaccttgcagtaacaaaaaatgcggagtttcactttctttgaacgagtttctagagctttccgcgatcatgggtccaacttcaagcttgtactcctctgcaccaccgtaagtggtggagggattgtagcttacggagaggctgctgccgcatctgaagcagcggcggcggcgacggagaagaaaaaggtggtggtgctgggaactgggtgggctggcacgagtttcttgaggaacctggacaaccccaaatatgaggttcatgtggtctcccctcgcaattactttgcattcactcctttgctgcctagtgttacctgtggcaccgtggaagctcgcagcattgtcgaacccgtccgcaatattttcaggaagaaaaagatggacatgcaatttagtgaagcagaatgtctcaagattgacgcagcaaacaggaaggtttactgtcgatctaatataagtgataatttgaacgagaaagaagagtttgtggtggactatgactacctaatcatagccgtgggagcaaatgtcaacacatttaatactcctggagtgatggagaattgccatttcttgaaggaagttgaagatgcacaaaagattagaagaaccgttattgactgctttgagagagcaagtttgcctagtgtaagtgaagaagaaaagaagagaattcttcattttgctattgttggaggtggtccaactggagtggagtttgcagcctcactacatgactatgtcactgaggatttggtcaacatatatcctgggataaaagatctagttaaaattacccttctggaggctggagatcatattttgagcatgtttgataaaagaattactgcttttgctgaagagaagttcggaagagatggtattgatgtgaaaactggatccatggttgtgaaggtatccgagaaagaaatttctactaaagaaatgaaaaatggaggagcaattactacaattccatatggaatggctgtctggtcaactggtattggcactcgtccatttataagagattttatggcacaaattggtcaggctagcaggcgtgccctagctacagacgaatggttgagagttgaggggtgcaacaatgtctac

SEQ ID NO: 11773 - DNA, 736 bp, Glycine max
ctaggggtgaacgtggacgtcatcgtgatggatcgaaggcaaaccagaagccaacaaagaccctttttgtgattaactttgacccaatccgtactagagttcgtgatatagaaaaacactttgaaccttatgggaatgttcttcatgttcgaattcggcggaactttgcatttgtgcagtttgagacacaagaagatgctaccaaagctatagagtgtacaaatatgagtaagatcctggacagggtggtgtctgtggagtatgctctgagggatgatggtgagaggggggacaattatgacagtcctagaagaggtggttatgagagatcacccagtccttatcacaggcgaccaagtcctgactatggtcgtccacgcagccctgtctatgataggtacaatggtggtggaccagacaggcggaggagtcctgattatggcaggcacaggagtcctgactatggcaggcgcaggagtcctgattatgggaagcccaggagtcctgaatacggtagatatcgcagctgttcacgttcgccggtgcgaaggtcgagaacataggtgatttctggttttagggtaagaagcaatgctccagtggctgttactttctagttgttagaatagcaagtggtacattatttagtaagggttacttctcagtttaatgtggtttgcgtataggacctaaatatcccaccctgtttagtgtttgaattgatgcatatttttgc

SEQ ID NO: 11774 - DNA, 1898 bp, Glycine max
gtggttgataaaaatcttggacctctggtgaagactgtgatgactcggtgcattcaatgtacaagatgtgttagatttgcaacagaggttgctggggttcaggatcttggcatgttaggtcgtggaagtggagaggagattggaacatatgttgaaaaacttttgacaagtgagctttctggaaatgtcatagatatctggcccgtgggagctctcacgtcaaaacctttggcatttaaggcccggaattgggagttgaagggcacacagaccattgatgttactgatgcagttggatccaatattcgaattgatagcacaggacctgaattgatgcgcattgttcctcgtctaaatgaggacataaatgaagaatggatttcagacaaaacccgcttttgttatgatggtttgaaaaggcagaggttaaatgaccccatgattcgtggttctgatggacgctttaagcctgttaactggcgtgatgctcttgctgtggtagcagaggttgcccaccaagtcaaaccggaagaaattgttggcatagctggcaaactttctgatgctgagtccatgattgcactaaaagatttcataaataggatggggtcaaatgatgtatggggtgaaggcattggtgtaaatactaatgctgatttcagatcaggatatattatgaatactagcattgctggtcttgaaaaagcggatgcgttcctgttggttggcacccagccacgggtggaagctgccatggttaatgccagaatacgcaaaactgtcagagcaaaccaagccaaagttgggtacattgggcctgccactgatttcaactacgatcacagacatcttggtactggccctcaaacactccttgaaattgctgagggttgccacccatttttcaagacactctcaaatgccaaaaaccctgttatcattgtcggtgctggggtttttgagaggaaggatcaggatgcaatttttgctgctgttgaaaccattgcacaaaaagcaaatgttgtcagacctgactggaatggccttaatgtattgcttctccatgctgcccaggctgctgcgcttgaccttggacttgttccacaatctgagaaaagccttgagtctgcaaaatttgtatatttgatgggtgctgatgatgtaaacttagacaagatcccagatgatgcttttgttgtttatcaaggtcaccatggtgacaagagtgtttatcgagcaaattttattttgccagcagcagcattcagtgagaaggaaggaacctatgaaaataccgacggatgcacgcaacaaacattgcctgcagttccaacagttggtgactccagagatgattggaagataattcgagctctatctgaggtggcaggagtgcctttgccctatgatacaattggggccgttcgtgcccgaatcagtactgtagccccaaaccttgtgaacatggatgagagagaaccggccacattgccatcttcactcagaccaaccttctctgagaaggtggacaccaccccattcgggactgtagttgagaatttctatatgactgatgccattacaagggcatcaaagataatggcacaatgcagtgccatgctgttgaagaagtgaaacatggattttttattttttggtttcaataaagaagattcacgtttttcccttcctggccatgcaagattgcttgccaaaaacttattggatgttggaagtatccaataaattaaaactaggatttatctgtttccatttgtaatatgcggtgtggaagcaccactttttagaactgttgtcatgtacaatttgagttatccaactgattgtgaaggtttactcgtctcatcaattttccatagccaggaaattgcaaaaaa

SEQ ID NO: 11775 - DNA, 841 bp, Glycine max
ttaaggatgctgctatggggaagaggagcaagattacgcgcgatagggatcgtgatatcagtgaaaaagttgctcttggtatggcttctaccaagccgggtactgaggttatgtatgatgagaggctgtttaaccaggataagggaattgcgtctgggtttgccactgatgatcagtacaatgtgtatgagcatgggttgtttactgcgcacccacactttccacattgtataggccgaagaagaatattgatgatgagacttatggaggtgcggatgagcagttggagaagattatgaagactgataggtttaagcccgataaagggtttgctggggcttctgagagggctggtccgagggataggccggtcgagtttgagaatgaagaggctgatccgtttggtttggatcagttcttgactgaggtgaagaagggtaagaaggccatggagaaagtgggtggtggagggactatgagggcaagtgctggatcatctatgcgggatggtaacgagggaggttcaggtaggactcgcattggatttgaaagagggcattaggtaccacaatgtttaatgttgcctgacctatttctagtgcgtaatgttgactgttgaatatccaccgtaatggcttaggttgctatgtctgaaaatgggtggttagaacaatgtgcttgtgttagcattttggtttttctccaaccccctgccctgccgccctgcttaggtggtgaaataaactgtttttgtacactatttcaattctgttaaaactgcttatggatgttacaccaatctctttccagtaaattatatattgaatgaaatgtattgttt

SEQ ID NO: 11776 - DNA, 807 bp, Glycine max
cagaaccttctcaaaaatgagacggtcatctctagtgagtgcccttcttatagcaaacattctcatggcaacacgccttaccctcactcttcctttctctcgctccatctctccactcttatctcgttccctttcacaactcaaacaattcccaaaatcccacccttgtcccctctggtcctcctccttctccttctgcctccacacactccgcaagtccacttcccctattcgcgcctcttcttctttttctccctccatggctgcttcttctccgctaaacgacgccgtcgaaggcaatcctcttctgcagaacttcgacttcccacccttcgatgtcgtcgagcccaaacacgtgcgacccggcattcgcgccctcctcggcaagctggaaagtgaattggaggagctcgaacggaacgtggaaccgtcgtggccaaagttggtggaaccgttggagaagatcgttgaccggttatctgtagtttggggcatgatcaatcatctaaagtctgttaaggatagttcggagctacgttctgctattgaagatgtacaggcagaaaaagttaagtttcagcttagactgggtcaaagcaaacctatttataatgcattcaaagccattcaggagtctcctgattggcagacactcagtgatgctcgaaaacgtattgttgaaagccaaataaaggaggcggttcttaatggagtttctcttgaagatgataaaagagaaagttttaacaaaattgaacaggagctggaaaagttatcacaaaagtttggggagaatgttctggatgc

SEQ ID NO: 11777 - DNA, 809 bp, Glycine max
gggctcggagttggtcttatgttgaacgtccgggtttgttacttgttgcagcttttgttatcgcccagctgatagctaccttaattgcagtttatgcaaattggagtttcgctgctattgaagggattggatggggttgggctggtgttgtttggctttacaacctcatcttttatatcccacttgactttatcaagttcataattcgatatgccttgagtggaagggcttgggatcttgttattgaacaaaggattgcttttacaaggaaaaaagattttggaaaggaagaacgtgaacttaaatgggcacatgcacagaggacgcttcacggccttcacccaccagagactaagatgttcaatgaacgtacaagttacacagaacttaatcagatggctgaagaggctagaagacgagcagaaattgcaaggctgagagaactgcatacacttaagggtcgtgttgagtctgtggttagactgaagggtcttaacattgacacaatacagcaagcatacactgtctagaatgttgagtttcatgcatgaatcgtgtatgtataatgtgtgtataatgccgttagaagagtgtgatcatagagcagcaaaaaatatatactttataaatgtttgttcaaagcagttttggtggacttttgtagacatgaaactattggtgcattaatacttaaatgttaaaagagttccatttatgcttccaaaaaaaaaaaaagtataaaagtacacatgaaaaacaatacaatgattatgaggttagtaaaataagctgtattctgtggtattatt

SEQ ID NO: 11778 - DNA, 577 bp, Glycine max
gatgtttttgtcgtgtattctattcctattgcattcagctcactgatttcaattacaaagtcaattttgtaaatcagaggcagagagagttgtaaagagcctctgaattttgatcacaccacacccttcttctcatctccaccagaaatggctaccggagctgctgtgccaactacgttttctaccctcaagacatgggattccagtttggggtttgcaaaaaacatagattttgtgagagtttccgatatgaagagcatgaaatcttctgcgaggaaaagggtgtcaattatcaggaactcaaatcctggccaagatattgctgaacttcaacctgcatccccaggaagccctcttttggttcctaggcaaaagtattgtgaatcattgcacaaacccatcaggagaaaaacaagcacagtaatggttggtaacgtggctattggtagcgagcatcctataagaattcagaccatgactacaactgacactaaggatgttgctgggacagttgaaccggtgatgagaatagcagataaaggagctgatattgtacggataacagttcaagggaaga

SEQ ID NO: 11779 - DNA, 270 bp, Glycine max
gtcgtgtattcctatttcctagtttcattcagctcactgatttcaattacattgcataggcaattttgtaaatcagaggctaagagacttgtagtaatttgtaaagacgcctctgaattttggtccaccaccacacccttcttctcatctccaccacaccaggtgttgttgcgcttcagaaatggcttccggagctgtgccaactacgttttctaccctcaagacatgggattccagtttggggtttgcaaaaagcatggattttgtgag

SEQ ID NO: 11780 - DNA, 385 bp, Glycine max
gtaattttcttgggaattgggtcctcctctactttggttatacctcatccccggatcttgggccagagcaagtccaaattatggccaacgcaattgatatattagaatcaaaacagaatctcaagattctaccagtatttgtttccattgatcctcaacgtgatactccctcacaacttcgtgcttaccttaaagagtttgattcaagaatcataggattaactggacctgttgcagctattaggcagatggctcaagaatatcgtgtttactttaaaaaggtagaagaggatggcaatgattatcttgttgactgttcccacaacatgtatttgctgaatcctaaattggaggttacgagatgctttggagtcgagtatagtgc

SEQ ID NO: 11781 - DNA, 657 bp, Glycine max
gttccatataaaagcaaggctagaacacttgcaagttcgaaagagccatttttatttatcagtcaccgaaacaactatggatacaatcaagtccttcaagggctacggcaaagttgacgagttggagcagcaagcctatcagaagaagacacgtaagcgcctcataataatcacagtctcttcaatcgttctaattgcggtgatcatcgccgctatcgcaggggttgtcatacacaagcgcaacacctcatcatctccctcatccgactcgcccccgcaaactgagttaaccccggccgcgtcactcaaagcggtttgcgacgtgactcagtaccctaactcgtgcttctccgcaatctcctcgttaccggattccaacactactgatccggagctcctcttcaagctctctctccgcgtcgccattgacgaattatccaagctctcgagctttccttcgaagctccgcgctaatgcggaacacgacgcacgtctccagaaggcgatcgatgtctgcgggaacatttttggcgacgcgctggaccggctcaacgactccatctccgcgctcggaagcagcggcggcgccgggaagattatctccccggcgagtgttagcgacgtggagacgtggatcagcgccgcgctcacggacca

SEQ ID NO: 11782 - DNA, 428 bp, Glycine max
aggttggaaagagccatttaattacttttttcagtactgggtggacattggcaccaaccaagcatggatacaatcaagtccttcaagggctacggcaaagtagacgagttggagcagcaagcctatcagaagaagacacgtaagcgcctgataatcatcgcagtctcttccatcgttctatttgcggtgatcatcgccgcggtcgcaagggttgtgatacacaagcgcaacacctcatcatcgccctcctctgactcgcccccgcaaactgagttaaccccggccgcgtcactcaaagcggtttgccacgtgactcagtaccctaacctcgtgcttctccgcaatctactcgttaccggaatccaacaccactgattccgagctcctcttcaagctctctctccgcgtcgccattgacgagctctcga

SEQ ID NO: 11783 - DNA, 909 bp, Glycine max
tttttaacacttttctccaaaaccatccaacaagggaaacagaatattattccattttttcacttccacactttcttgcattcattccccattttcaactatggcctcttcagctcaattttccaccactttggtcgtactatgtctcttccaattcctagcaggttcatattcaacgacattcacaattgtgaacaagtgcagctacacagtttggcccggcattttaaccggcgccggaacctcaccgctctccaccaccggcttcgtcttacaacccggcgagtccaacgtgatcaccgtgccggccgcctggtccggccgcctctgggggcggaccgtctgcacccaagacgccaccggaaaattctcctgcgtcacaggcgactgcggctcctccgccgtggaatgcaacggcgcaggagccgccccgccggccacgctcgccgagttcacactgaacggcgccggcgggcttgatttcttcgacgtgagcctcgtcgacggttacaatctccccatgatcgtggagccacagggcggaaccggcgccggaaactgcaccgccacggggtgcgtggtggatttaaacacgccgtgcccggcggagctgatggtgatgagcagcggagagggcgtggcgtgcaaaagcgcgtgcgaagctttcgacgatccacagtactgctgtagtggcgcttacgcgacgcctgacacatgcaaacccagttcatactcgcagttctttaagagcgcgtgcccacgcgcttatagttacgcttatgacgatggctccagcaccttcacttgcgccacagcggattataccatcactttctgcccacaaccatccactagttcgattaaatcgggaaatgggaaatacccaatggcggtggacaattcgggtgc

SEQ ID NO: 11784 - DNA, 256 bp, Glycine max
cagcttttctccaaaaccatccgaccacggtcccagtatattattccatttttcaattatggcatcctcaactcaattctccaccactcttgttaccctatgtctcttccaattcctagcaggttcctctccaacgacattcacgattgtgaacaagtgcagctacacagtttggcccggaaactgcaccgccacggggtgcgtggtggatttaaacacgccgtgcccggcggaggtgatgtgtgatgagcagcgg

SEQ ID NO: 11785 - DNA, 757 bp, Glycine max
aaagcattaaaggtcacactgccacctttcagatttgacttcctctccggcgctgccattctcttccacggcagtgtttctctttctctctctctatcttcaatttcgagaagtagctccagtattatatggcctccttcagagcattctggaacagtccagttggtcccaaaacaactcacttttggggacctattgccaactggggatttgtagcagctggattggctgacctgaacaaacctccagaaatgatctctggcaacatgacaggagcaatgtgtgtctattcagcattgttcatgagatttgcatggatggttcagccacgcaactatctactttttgcttgccatgcctcaaatgagactgttcaactctatcatttttcccgatgggcaaaggcacaggggcttctgtcggaaaagaaggaggaagcttcatcccagtgatttgatgatgctaacacattcttgagtggagcgattttaaagattttgcatttgaacttggtgatgtatgaataattgattactgattgtaagaaacggctcgtggaaactgtaaaagattgtggctgtaccagagtattcggattagaaaggatttctcagaagtctaaactatttgttgaaggcatatgggtggttttaatatgtctaacatctgactgacccaaaagtctttaaacttatagcacaggcaaaggatttgtctatatctcacactgaaattccgttcaattactctacatagt

SEQ ID NO: 11786 - DNA, 443 bp, Glycine max
aagaaaaggaaaatgaacacacattggaaaaaattaggttagagaaagataaggagccgccaaagcctgagtataaagaaatacagcacaccgatcaaaaccatacagagaaacctgaagataagattactgtcgaaaatctagaaaatagagcacaaggaggggctgagccaatggagatctcccagagccccatgtcgtcgcctgatgatactccatgtggttatgtaaaacttttgaaaggtcatacatcagaggtttttgcttgtgcatggaatccatcagctccacttcttgcatctgggtctggagattcaacagctcgaatttgggaaattgctgatggagcttgtgactctagtgtgcaaaatgaaccagttaatgttgtggtgctgcagcacttcaaagaaagcaccaatgaaaaaagcacggatgtgacaaca

SEQ ID NO: 11787 - DNA, 552 bp, Glycine max
gaaaatactataatatatatcattgtctgtcttttgttttgaaccattttctgcctataagtactcatacattcgacgtttttcaaaggtgagagccaccctttttctcttacaagctactagaacaccgtttgctttgctctcccttcattttgcaaaacctctgggtatctaactctgcagccatgggaagtttggaagttgaatcaacaaatggtcacacctcaagtcctcacaaaaaaactgaaaaatcggagagagagaggagaattgatgagtggcttccaattacttctaaaaggaatggaaaatggtggtattcagctttccacaatgttactgccatggttggagctggtgttctcggtcttccctatgccatgtcagagcttggatggggtccaggtgtaactatacttatcctctcatggatcatcaccctgtacacactatggcaaatggttgagatgcatgaaatggttccaggaaaacggtttgatagataccacgaactgggccagtatgcctttggtgaaaagctaggcctttata

SEQ ID NO: 11788 - DNA, 446 bp, Glycine max
ccgggcaaaacacgattctctgatttcattttttctcactacaaaaccacactcactctcctcctctcgcctctttccttgtttctttcgcgcattctcctaaattcctccaaaaaccctaacactctctcattctcagtttttctcaatcttatgattaatggaagaccacgcgcatgctgcactacctcccggttaccggttctacccttccgaagaggttctcgtcggttactacttaaccaagaagaacgagaaccgggaggagggtttctacggttctgatttgatcagagaacttgacctctacgatcacgatcccttcgaattaccggacgctgctgcttgcttttcgtacggttacaaagggaggaagaagcattggttctgttacgctaaagagaccaaacgcagaaacagaagaaaggtgaaaagcgggttctggc

SEQ ID NO: 11789 - DNA, 1070 bp, Glycine max
gactctgcggagatatgggcaccccattgatgcgttgcttgatgttttgagttaacatagggataagtaccatgagctgcttttgtctgactgtaggaagcagattgcggaggcggttgtggctgataatttgagcagatgttgatgaagaaggagtatgggtattccatgcgggtgctttctttccagatacagacctcggatatcatacctgcttttccctatgtggcgccattttcgtccactgtgccagattgttgtaggattgtgcggtccttcattgaggattctgtgagtttcatgtcatatggagggcagcttgagttctatgaagttgttaagaagtatttagacaggcttttgagtgaggttttggatgaagctttagtgaagcttatcaatacatcaattaatggggtttcccaggcaatgcagatggcagcgaatatggctgtcttggagcgtgcttgtgatttcttctttcgccatgctgcacagctttcaggtgttcccttgagaatggtggagagaagcagaaggaagttccctcttagaaaagcccgtgatgctgcagaagacatgctctctgggctactcaaagccaaggttgatggattcatgacattgatcgagaatgtaaattggatgggtgacgaggcacctcagagtggaaatgaatatgtaaacgaggtcataatttatttggaaattttggtttcaactgctcaacagatattgccatctcaagtccttaagagagttttacaggaggtttttgctcacatatcggagaagatagttgggactttagttagtgattctgttaagaggtttaatgtgaatgctattaatggaattgaagtagacatccggctcttagagtcattttctgataatcaggcttcccttttctctgatggggatgttgatgttctgaaagcatcacttgccagctcaaaacaactgattaatttgctgttaagcaatcatccggagaatttcttgaatccagtgatcagggagaggagctacaatactttggaccacaagaaagtggtgattgtttcaga

SEQ ID NO: 11790 - DNA, 332 bp, Glycine max
accatgttgggcaagtggagtcaacttatagatcacgggacaagccatatgggcattggcgatgctgatagaaatgctgtatcactaacaacaactgttaactatcattttggagccgggtttcgctctacttctactggtatcttgggcaacaatgagatggatgacttctctactcccactgatatatccccggataaactacctcccgctccagcaaattttattgaaccaaacagaagaccattgtcttccatgactcctcttatcatcacaaaggatgaccagttagttgcggtacttggatggagctgtggaatgaacattattgc

SEQ ID NO: 11791 - DNA, 658 bp, Glycine max
atccactggaatgattggtctagtttcatccaattccaaggacaagaagaagacacagccggtcaagcaatctgatacaaagagaacgagaagagataggggagagctggaggatataatgttcaagctatttgaaagacagcctaattgggccttgaaacagctcgttcaagagacagatcagcctgcacaattcttgaaagagattctgaacgaactttgtgtttacaataaaagaggtgccaatcaaggaacttacgagctgatgcctgagtacaagaaatctgttgaagatacgagcgccgaataagtgctatgttctttacattatactcttaactccaccgaggcacagaccctccataaatatacgctgatggaagaaagaatcttgggacatcaaacaagatgcaaactttgtatctgaaccgtgaagaataccttgtttatgactttttttaccgataaattatcatacatgcagttgtatacgttcaaaaggctttttagcaaccgctagaattaatctcgagaccatgttgcctggttacgcgtagaatatctctgccactgtacatggagttgttctgttgtaaagacctacctagtaatatgatgctcttctcctagtttataaaaaaaaaaaaaaagggcggcc

SEQ ID NO: 11792 - DNA, 1064 bp, Glycine max
attctgtccttgtccttgtacaggttactagatatagttgaataatgatgctaacaaaacagtgacttgttcttaaaaccaatttttttatgcagtgccacgtcgggcacacactttgttcaacttgcaagacaagggtacacaaccgatgcccaacttgcaggcaggaacttggcgatataaggtgtttggcattagagaagatagcagaatcacttgaactgccttgcagatacatttctcttgggtgtccagagatatttccctattacagcaaacttaaacatgaggctatttgtaacttcagaccatacaactgcccttatgccgggtcagactgctcggtggttggggatattccatgccttgtcgctcatttaagggacgaccacagggttgatatgcattctggatgcacttttaaccatcgctatgtcaagtccaatcccatggaagtagaaaatgctacatggatgctaacggttttccactgttttggtcagtatttttgcctccattttgaggccttccagctgggcatggctccagtttacatggcattcctccgattcatgggtgatgaaagagaggcgcggaactacagctacagcttggaggtgggaggaaatggacgtaaactaacttttgaggggagtccaagaagcattagagatagccataagaaggtaagagacagccatgatggtctcatcatttaccgcaacatggcgcttttcttctcgggtggagacaggaaagagttgaagctacgagtaacaggaaggatatggaaagaacagcaaaaccctgaaggtggagtgtgcatacccaacctgtgtagctaggttgattgcatattctcttgattgctatttcttgctgtagataatttgagaagtgttaatctttgactggtgaatggttatggggatatttcaacttccaaacaaaataaaaaaactgggttctaaccaagatactgtcaaaaatttggtctccgacgtggatcaaatgctaaatcccttgagattctcaaaaaaatttaagggggtggttacttttcc

SEQ ID NO: 11793 - DNA, 601 bp, Glycine max
cccccgcccgcaagctcggaattcggttcgaggagagagaagctgcgcaccttttcatactagtgctgattgctgaaactgccatcgctcgccatttgcacaaagatcccaacaacacttgaaagttgaaacagaaaaacaccaatccctcatcgtactgttccgttatcaattctcgtgtttaaggacacaatttgcttgatacattttcaagttttcatctccatgttttgattttgaagaataaggagtatgcaattgactactacagatatggttttactataagtggcctgtatatggttttgggtcttgcaagtgtaagcagtatggaggatattcaattggatatcagttgggacgatgctgtctgtcccatatgcttggattttcctcataacagtgttctccttcggtgttcattttatgataaaggatgtcgtgcttttgtttgtgacacaaatcaattgcactctaattgtttggatcgctttaaaaattcatgtggcatgccatcctctccaacgtctaatgcaatttccactgaaagtactgaaaatagtgatgatcctgaggtatcaaatggtcaatgcaatctgac

SEQ ID NO: 11794 - DNA, 419 bp, Glycine max
aagacgacagaagggggcgaagggtaagaaaggagagagagaagctgcgcaccgtttcatactagtgctgattgctgaaactgccatcgctcgccatttgcacaaagatcccaacaacacttgaaagttgaaacagaaaaacaccaatccctcatcgtactgttccgttatcaattctcgtgtttaagtctgcctacgttccgcttcctttgccatcagagcaagtccacgctttgaaccccgtcgggtcacacatggctacaccaccacaatgggaatttagctgtgacatggaaatgtattttggatcggaggagaatgcttccattgtgtatgctgccttagcagttgacaaagagttacagtctgataaagtaaaacgacttatgacagtgtctgatggaaagctatcaatgcac

SEQ ID NO: 11795 - DNA, 460 bp, Glycine max
  unsure (1)..(460): unsure at all n locations
agagagaagctgcgcaccttttcacactagtgctgattgctgaaactggcatcgctcgccatttgcgcaaagatcccaacaacaacaccattcgaaagttgaaactgaaaaacaccaatccctcctcgtacgacgtttccttgttccgtcatcaattctcgtgtttaaggtcttgtgagtgtaagcagcatggaggatattcaattggatattagttgggacgatgtcgcctgtcccatatgcttggattttcctcataacagtgttctccttcattgttcatcttatgataaaggatgtcgtgcttttgtgtgtgacacaaatcaattgcactctaattgtttggatcgctttaaaaattcatgtggcatgccatcctctccagtgtctaatgcaacttccactgaaactactgnaaatagtgatgatcatgaggtatcaaatggtcaatgcaatctga

SEQ ID NO: 11796 - DNA, 944 bp, Glycine max
ccgttccggaattcccgggtcgacttaaggcaaacacgctgttcctacaatcattccaaatgtgcccttccggtcgcaccctcctcccttcctccgtctccgatttccgaccggcattcgacgtcctcgatgccgaccgcgacggcaaaatcagccgcgacgacctccgcgccttctacgccggagtcggcggcggaggagatgacgtgatcggggcaatgatgacagtggctgacaccaataaggacgggttcgtggagtacgaggagttcgagcgcgtggtctcggcggagagaaagcccgtggggtactgtggggccatggaggacgtgttcagggtcatggacaaggacggcgacggcaagctcagccaccatgatctgaagacttacatggcctgcgctggttttccggccaccgacaacgacatcaacgccatgatccgattcggcggcggcgaccaaaacggcggcgttacgttcgatggtttgcttcgtatattggcgcttgattgttcccccgctaattaattaaacctctcgggtattggctgcgcgcgtttcgttacattaattaaacaagtgttgggttttgtactttgtccaagtttgagaaattacagtgattaattgaatccaaaacaaaccaccggtgtaatcaaataccacccgttcttatattcttacgttcacaatttcttctatctcattatttctctgtctagattctttttatgcatacaccaaaaaatggtgagtaattctaaaaaaaaaacaagggttgtagtgagccatgccaaaatggtcgttcatattccaatgtttgtttgtccaaatatggagtaagggaccatttatttttgtttggcttggctcgtgagatttattggcaaattagtgcaagtatttttggggaactatcaaatattaattactaaatattta

SEQ ID NO: 11797 - DNA, 751 bp, Glycine max
  unsure (1)..(751): unsure at all n locations
ttattattccaaatgtgcccttccggtcgcaggggggtctttttctacgtctgggggggccgaccggcattcgacgtcctcgatgctgaccgcgacggcaaaatcagccgcgacgacctccgcgccttctacgccggagtcggcggcggaggagatgacgtgatcggggcaatgatgacagtggctgacaccaataaggacgggttcgtggagtacgaggagttcgagcgcgtggtctcggcggagagaaagcccgtggggtactgtggggccatggaggacgtgttcagggtcatggacaaggacggcgacggcaagctcagccaccatgacctgaagacttacatggcctgcgctggttttccggccaccgacaacgacatcaacgccatgatccgattcggcggcggcgaccaaaacggcggcgttacgttcgatggtttgcttcgtgtattggcgcttgaatgttccgccgctaattaaattaattaacccccccccccccnannnnnnnntnnnntnttggncccnntcnttttcttaatttaaccaatggatgaccttgtttatctgcgcagcacatagagagaggcttatggaaggagtacctcacccaataccaagaactgtcgaagatgatgttaccaattttaatggccgacgctctggtttgattaatgccctcactactgacgttgaaaagatttaccaggactgcgatctccaaaaggagaatttgggaatatatggg

SEQ ID NO: 11798 - DNA, 1860 bp, Glycine max
  unsure (1)..(1860): unsure at all n locations
gcatcttcatttccgtcaactcccagctggaattaatgccattgtagccattgcctgttactctggttataatcaagtagattccgtcatcatgaaccaatcgtcaatagaccgtggattctttcggtctctgtttttccgttcatatagagatgaagagaagaagatgggaaccctggtcaaagaagattttggccgtcctgatagagctaacaccatgggaatgagacatggttcttatgataagctggatgatgatggtcttgccccaccaggcacacgagtatctggtgaggatgttatcattggaaagaccaccccaatatctcaggaggaggcacagggacaagctttacgttacacaaggcgtgatcacagcataagcttacgtcacagtgaaactggaattgttgatcaagttttgctgaccacaaatgctgatggattgagatttgtgaaagtaagagtgagatctgttcgtataccacagattggtgataaattcagtagtagacatggtcagaaggggacagttggtatgacttatacacaagaagacatgccctggactgtggaaggcattacccctgatattattgtcaatccacatgctattccttctcgaatgacaattggtcagcttattgagtgtatcatggggaaggtggcagcccacatgggaaaagaaggagatgcaactccttttacagatgttactgtggacaatatcagtaaagctctacacaaatgtgggtaccaaatgcgtggttttgagactatgtacaatggtcatacagggagacgtctaagtgcaatgattttccttggccctacatattaccaaagactgaagcatatggttgacgacaagatccattctcgtggaaggggtcctgtgcagatcctcactaggcaacctgctgagggacgctcacgagatggaggtctccgatttggagagatggaacgagattgcatgatagctcatggagctgctcacttcttaaaggaaaggttgtttgatcaaagtgatgcttacagggtccatgtatgtgagcgttgtgggttgatagctattgcaaatctcaaaaagaattcttttgagtgcagggggtgcaagaacaaaactgacattgttcaggtttatattccttatgcttgtaagctcctcttccaagagttaatggctatggccatagctccaagaatgcttacaaaggaggtcaaaactacaaaccagaagaagaagggagcctgataaacatgtttgaccaaagccacttgtcttatattctgattaaaagctctcgagaatatggaacaaacatggtatctanatatacaaatttgatttgataatgtttttcaagtctcagattacaggaacctttcaagtgttgggtaattcacaagcaaaaatagctttgataccttcattattgatgtttcccgctgcgttttctctattcaagggtgctcattccaagcgactaatgttaccgaccgagcactgtatatataatggaagtttttcaattccgagagcttgtttcttattcactaagcagagatgggttagcagaagtttctgtcgcgtaattctagtgagccccgtcttaaatgctgtgaaaggtcttatacccaatcaaccgagaattccagctccaattttggaaatccttttgttggtttagggggaggtcacccgaattggattatttaaatttagttgcaatgcttgagagctatggtatatggtacttgtaactcgagactctggcaattttaagttcaattcttgtacaatatagtgaaatgagagaatttatttgacaaagttgatttgtgagttttccattt

SEQ ID NO: 11799 - DNA, 607 bp, Glycine max
attctctctgtctctctctctctctcatccaccagctggtgatattgatgtccatggctccatccataaatactactaagtgaaccacaccatgcagattccaactccaaccttggaataaaaggtgaaaaaaaacagcaactttaacctaagacaagagagtagtatctaggaagtttcaccttccttggagattccaactcacatcaaaatttgaggaagatctcaaccacttcactttccaagaggaggtgaggcatcatggctcaaaatggaagtggggatagagtagtggtggacaatggttttgaatccattgatgatgcatacgatcatgaacacaagctgagtcaaaagggtagcaccaaggtcaaggaggaagaggtttctgtggagagggtgttccagcaccttctggtgccatcatggaggaaccaattgacagtgagagcctttgtggtcagctttgcactcagcatactcttcagcttcattgtgatgaagctcaacctcaccactggtattattccttcactcaatgtctctgctggccttatggggttcttctttgtgaagacatggaccaagttcttggaaaaatctaaca

SEQ ID NO: 11800 - DNA, 392 bp, Glycine max
gaagagctatgacggcgcatgcaccccgtcctaaagctcggtacccccttcggggcgtttcatcatcagaattccaaggtggatttgctgcatcttttactccggcttcatgctgcatgagtaaaggccgttatgttatgctcatggtggatttttgtgcaactgggactaggggaattgatgatgtggtggtggtgagaatgatgtatggggagtagaactaccaggagggttgttggtgttgaagatgacaagggagctgaaagaggaatgccgagctccaattctgagttacccatttccaattcatgctatacagaggagagcacaattgattcttttcatgtttctgactttggaggcattgatcagtcatatcgaataggggatgc

SEQ ID NO: 11801 - DNA, 528 bp, Glycine max
ggtggaagatttgagcagaagaagacatgtagagattggaatcatccgtgtccctctctctcatctctctttctctctcttcccttggtttccttactaattactttaacccaataatccaataactacatacaaagttgaacaataccaccatcatagcgcatcatcatcagaattccaaggggaattgttgatgtggtggtgagaatgatgtatggggagtagaactacctggagggttgttggtgttgaagatgacaagggagctgaaagaggaatgccgagcttcaattctgagttacccaattccaattcatgctatacagaggggaacacagttgattcttttcgtgtttctgactttggagcatttgatcagtcatatcacatagaggatgctgttgacctcagtggaaacccagtttacaattcactaaaggtaatagccaaacaatttctccgggttctgttcacattagtagccttggtcaggtgagtttttctagttattttcatccaatgaacttc

SEQ ID NO: 11802 - DNA, 320 bp, Glycine max
gatttgagcagaacaagacatttagagattggaatcatccgtgttcctctctctcatctctctttctctctgttccctcggtttccttactttgaagtttaatccaatccaataatccaataactacatacaaagttgaacaataccaccatcatagcgtatcatcatcagaattccaaggtggatttgcttcatcttttactccggcttcatgctgcatgagtaaaggccgttatgttatgctcatggtggatttttgtgcaactgggactaggggaattgatgatgtggtggtggtgagaatgatgtatggggagtag

SEQ ID NO: 11803 - DNA, 444 bp, Glycine max
ccttatgcacatcttcatgcttgttttgttacatatttattatttatatacttatatatggatgatccatagaaataatataaaaaattatgtgatcaataattttatttaccattttttccctttctctttgtgccacacttctacctcttcaaatggctcagaaggttgtgttaaaggttatgactatgactgatgacaaaacaaagcaaaaggctatagaagcagctgcagatatctatggggttgattcaattgttgctgatgtgaaggagcagaagttgactgtgattggtcaaatggacacagtgaaaatagtgaagaagctgaagaaagtaggaaaagtggatatagtatcagttggacctgccaaggaagagaagaaggaagaaaagaaagaggagaaaaaggaagaaaaaaaaagaagagaaaaaggaggagaag

SEQ ID NO: 11804 - DNA, 729 bp, Glycine max
cccgcttctgtttctttgttctctccttctcttacagagcacacgccgcttgcaaaaccgattcttgacgctactcacgacttttgacagaagatggcttcaagattctggactcagggtggaagtgattccgaggaggaggagagtgattatggtgaggaagatgaacactcggcgggtgaacaagctccgaatcaagacgtgacaagcaagtactttgtggacaatgcaagtgacagtgatgattccgatggccaaaagcgcgttgtgaggtcggcgaaagataagcgattcgaggagatggtatccactgttgaccagatgaagaatgccatcaagatcaatgactgggtgagtttgcaagagagctttgacaagattaacaaacagcttgagaaggtcatgcgtgtcaccgagtctgagaaggttccgaatctgtacatcaaggcgcttgtgatgctggacgatttcttggttcaggctttggctaataaggatgccaagaagaagatgagtagtagcaatgccaaggccttgaactccatgaagcagaagttgacagtgattggtcaaatggacacagtgaaaatagtgaagaagctgaagaaagtaggaaaagtggatataatatcagttggacctgccaaggaagagaagaaagaagaaaagaaagaggagaaaaaggaagaaaaaaaggaagagaaaaaggaggagaagaaaggggagaag

SEQ ID NO: 11805 - DNA, 942 bp, Glycine max
cggccccgctgctggggtcgtccgacgcgcccgcacgtttctgtttcagttattctcttcgttcgcgacgccattttgtttcgctgaaaagattcccgacgcatctcataacttttgacaaaggatggcttcaagattctggacccagggtggaagtgattccgaggaggaggagagtgattatgatgaggaggttgataccacggtgggtgaatctggtagtcaagcagtgacaagcaggtacctgcaggataatgcaagtgacagtgatgactctgatggccaaaagcgcattgtgaggtcagcaaaggataaacgtttcgaggagatggcttccactgtcgaccagatgaagaatgccctgaagatcaatgactgggtgagcttgcaagagagttttgacaagattaacaaacagcttgagaaggtcatgcgtgtcactgagtctgagaaggtccccaatctttacatcaaggcactcgtgatgttggacgatttcttggttcaggctatggctaataaggatgccaagaagaagatgagtagtagcaatgccaaggccttgaactccatgaagcagaagttgaaggagactaataagcagtatgaggagttgattaccaaatgcagggagaatcctgagagtgaggaggaaaaggaagaggaggagagtcgaggacgagtatgagagtgatgatattgagccggagcagcttccggaagcaaaatctgattctgaagcctctcagtatgacaatgaaaagcaagatgctggtgatggtccttgggaccaaaagcttagcaagaaggaccggcttttggataaacagtttatgaaggaccctagtgagatcacgtgggacactgtcaacaagaagttcaaagacgttgtggctgctaggggccggaagggcactggcagatttgaacaggttgagcagc

SEQ ID NO: 11806 - DNA, 524 bp, Glycine max
gaagcagaagctgaagaagaataataagcagtatgaggacttgattaataagtgcagggagaaccctgagagcgaggaggaaaaagaagaagaggagagcgatgaagagtatgacagtgatggtgagattattgatccggatcagcttcaaaaacccgaagcaaaatctgattcggaggcctctcaatatgaagatgaaaagccagatgctggtgaaggtccttgggaccaaaagcttagcaagaaggacaggcttttggatagacagttcatgaaaaaccctagtgagatcacgtgggacgcggttaacaagaagtttaaagaggttgtggctgccaggggaagaaagggaactggtaggttcgaacaggttgagcagctcactttcttaacaaaagttgctaagacacctgcacagaagttggaaattctgttcagtgtggtttctgctcagtttgatgttaatccgggcctcaatgggcatgtgcccataaatgtatggaaaaaatgtgtgcagaacatgc

SEQ ID NO: 11807 - DNA, 996 bp, Glycine max
cgagttatagattccggtaatgactatgaagaggtggatgagaaacttaattcgctcttcccatacaacatagaaatcaggcccccagaagatgaatcacatcttgtcagctggaagtctcaattggaagaggatatgaagatgatacaagttcaggataacaaaaaccatatcatggaagtgcttgcagccaatgatcttgattgtgatgacctggattccatttgtgtctcagacacaatggttctcagtaactatatagaagagattattgtgtcagcaatttcgtatcatttgatgaaaaacaaagacactgaatacagaaatgggaagctcgttatttcttccaatagtttgtcccatgcattgaatatattccacaaggggaaatccagtagaagagatacatcaaaattggaagatcaagctgtaaaatctgagaagcaaatagaggagggaactgctatgaaaccagaagcaaagtctgaaaatgccgctcctgtaaaaaaggctgaagcagaaacattaagttcagtgggaaagacagatggtgaaaaatcagttcctgcacccaaagccgctgaagttcctcctgataatgagtttgagaagcgaataaggcccgaggtaatactagcaaatgagattgatgtcacattctctgatattggtgccttagatgagaccaaagaatcccttcaagaactagtaatgcttcctcttagaaggccagaccttttcactggaggccttctaaagccttgtagaggaatattgctgtttggacctcctggaactgggaagacaatgctggcaaaggccattgcaaaggaggccggagcaagtttcatcaatgtgtccatgtctaccatcacttctaagtggtttggtgacgatgagaagaatgttcgcgctttattcacacttgcagccaaggtctccccaactataatattcgtggatgaggttgatagcatgcttgggcaacggaccaga

SEQ ID NO: 11808 - DNA, 801 bp, Glycine max
gtgggggagggggcagagactgatatatggtatggtcgtctctgagtctgaagatctgtgagttaattgcatttgcagagagagagagagagagagagggaagacggttgtggggattcgatgggggccaccgttcactcgccgctagtcacttatgcttccgtcatatctctgcttacactctgtcctccgtttgtcatacttctatggtacaccatgactcttgctgacggatctgtttccgagacattccattatttaaggcagaatgggttgcagggtttgctacatatatggcccacccccactcccaccgcctgcaaaatcattgcagtctatgctgcatttgaggcagcacttcagcttcttcttcccgggaaaaccgtttacggccctatttctccaaccggccaccgacctgtctacaaggcaaatggtctgcaagcctattttgtcaccttgattacttattttgctctctggtggtttgggatattcaaccctacgattgtttatcatcatttgggagaaatttattcagctctcatcttcggcagctttctcttctgtgttttcttgtacatcaagggtcatttggcaccgtcttctacagattctggctcatctggaaacttaatcattgatttttactgggggatggaactttatccacgcattggaaaacattttgacataaaagtcttcacaaactgcagatttggaatgatgtcatgggctgttcttgcactgacctactgcataaagcagtatgaagaaaatggaaaagtagcggactcattg

SEQ ID NO: 11809 - DNA, 413 bp, Glycine max
cccacgcgtccggagagggaagacggttgtggggattcgatgggggccaccgttcactcgccgctagtcacttatgcttccgtcatatctctgcttacactctgtcctccgtttgtcatacttctgtaagtaataatctcatttactctctctctgatctgaaatctgaatgattgaattgcgttgcagatggtacaccatgactcttgctgacggatctgtttccgagacattccattatttaaggcagaatgggttgcagggtttgctacatatatggcccacccccactcccaccgcctgcaaaatcattgcagtctatgctgcatttgaggcagcacttcagcttcttcttcccgggaaaaccgtttacggccctatttctccaaccggccaccgacctgtctacaagg

SEQ ID NO: 11810 - DNA, 554 bp, Glycine max
gatacaaaaacattagacgctataatgcgtgaaaattgcgaggatctttcttctctccaccatcgttgtgttgtgtttgcgtgtctctccgtaaattgccttcgactgtgacaacacgcaccgatcgccatgaacatcttcaccaagaaacccaccgccaaagaggctcttcgtgagagtaaacgtgaaatgacaaacgccagtagaggtatagagaaggaaattggagctctacaatcggaagaaaaaaagcttgttgctgagataaagagaactgctaagacgggaaatgaggcagcaactaaaattctagctcgccagttgatcaggcttaggcaacaaattgctaatcttcaaggtagtcgagctcagatgagaggcatagcaactcacactcaggccatgcatgcacattcttctgttgctgctggcttgaaaggtgctactaaggcaatggcagctatgaataagaaaatggaaccggcaaagcaagctaaaattatacaagacttccagaaacaatcagcgcagatggatatgactactgaaatgat

SEQ ID NO: 11811 - DNA, 962 bp, Glycine max
ctacactcattgcaacgaattgctaacgtcccacacgctacagagaagatacgacagagtgagagagaaagaagcacaacaaggatgtcttcgtcgtcatcgtcgtcgtcgtcgtcggaagatgaatctatgtcggaacagagcaatgaattaggacttgatttcatcttgagcttggacaatgttccatcaaagctccctccacacctcgaactctttaaaacacgtgttctttgcaacaacgatgctcctgtgcacactgatactgttcaatattccggtgcctatgctattttgggagttgataatagtgtgcggttggatagcttctgcgaaaacttcaaggttgaagtgaagcggctgacggatagcgatattgaatttgatatgattggaatcgatccggcaattgccaatgcatttcgaagaatccttatagcagaggttccaacaatggctattgaaagagtatatatcgcaaacaatacatcagttgtacaagatgaagttctttcccatagattgggtctcattccaattcgtgctgatcccaggctatttgaatatccagaaaatgcaggagatgacaagaatgaaaagaacaccattgtcttcaagctacatgttcgttgtcaagtgggtcaacctcgtattactgtaaaatcagataaactgaagtggttacctaatgggagtgagcttccctgtgaagatgtcaaaccaaatgcaggttcaaaaccaaaaacatttacatctttcacttgcagccaagattcacttcctgaattttccaacaattcaattggtcttacatattcggatattatattggctaaacttggacctggtcaggaaattgaacttgaagcacatgcagttaaaggcattggtaagacacatgcaaaatggtccccagttgccactgcttggtaccggatgcttccggaggttgtactcttgga

SEQ ID NO: 11812 - DNA, 345 bp, Glycine max
cgcctaaacggctaaacccctccatgttgctttctgtgctcattgcaacgaattgctaacgacacacagaccacagagaagctacgacagagaccaaggatgtcgtcgtcttcgtcggaagatgaatctatgtcggaacagagcaatgaattaggacttgatttcatcctgagcttggacaatgttccatcaaagctccctccacacctcgaactcttcaaaacacgcgttctttgcaacaatgatgctcctgtgcatacagatactgtacaatattctggtgcttatgctattttaggagttgataatagtgtgcgtttggatagctactgcgaaaactttaag

SEQ ID NO: 11813 - DNA, 455 bp, Glycine max
cccacgcgtccgcccacgcgtccgcccacgcgtccgtttgcacagtaacatattccctcacaacacaacaatgagtcgcaagagagacaggtcagcttacttttcccgccacgacgccgccaagcgccgcctccccttgccggagcccgcggaggaggagacgcctacgatgagaccggcgccgccgtccgcggtggtcgtgatgggcctcccccaggactgctccgtcctcgatctcaagtcccgattcgagatctacggcgccatctcccgcatccgcatcgaccgcgacgccgtcggatacatcacctaccggaccaaggactccgccgacgctgccatcgccgccggcctcgaccccaccttcggaatcaccgttaactctaaaatggtgcttactttttcccctttctctctctcacatttagggtttcagaactcatgttttgatattg

SEQ ID NO: 11814 - DNA, 462 bp, Glycine max
cccacgcgtccggtcgcaagagagacaggtcagcctacttttcccgccacgacgccgccaagcgccgcctccccttgccggagcccgcggaggaggagacgcctacgatgagaccggcgccgccgtccgcggtggtcgtgatgggcctcccccaggactgctccgtcctcgatctcaagtcccgattcgagatctacggcgccatctcccgcatccgcatcgaccgcgacgccgtcggatacatcacctaccggaccaaggactccgccgacgctgccatcgccgccggcctcgaccccaccttcggaatcaccgttaactctaaaatggttcaagtgttgtgggcaacggaccctctagccatgtggagggaaaggagtgggtaatagcaggaacaaaggttctatgtcaaagcttgtgcgtgctgaggtacctttgagcaagcatggaagaggtaacaga

SEQ ID NO: 11815 - DNA, 544 bp, Glycine max
ggacagaccaaactgaaactgatacacacaacacagcgttagcagtaagcaaagcaataaatagcgaataagtgaaaaaaaaaagagagagagaagaaaagaacgcagaaactgaaataaaaaatggcagaacccaaggttaaatacgatcgtcaactcagaatatggggtgaacaaggacaggcagcccttgagaagtctagtatttgcttacttaactgtggtcctactggttctgaaacacttaagaatcttgttcttggtggggttggaagcatcactgtagttgatggatctaaagttgaagcgggagacctcggaaacaattttttggtggatgaagcaagtcttgggaagtcaaaggcaaaatgtgtatgctcatttcttcaagagctgaatgatgcagttaaagcaaaatttgtagaagagtcttcagaaacattgattgagacaaatccatcattcttttctcaatttactttgggtgttgcactcagctcatggaaaattcaatgataaagcttgaccaaatctgcagggaggt

SEQ ID NO: 11816 - DNA, 1177 bp, Glycine max
ggttggccagctataattgactgctgtccagtattcattggcattggaggaggaagagcaggccgaatagatggcatcatgggtctaggtggaggcattggaagggcaccactatggggagcagaatattggacaggaacacgaggaagattcaatgccagtccaggtggtggtggaagaggacgaactgaaggcataccaggtcttggaggaggtgcagcaggacccagaaggttcttggcttcattattagaagcatcattttgatcctcgcttccaatagtttgtgacatggcttggtttgcagtacgtccaatgctaccagtgtgaccatcccatataacctgctttggttgctcatcatttatcttctcaatctctgccttgacagcattggagacctcttcttctgtagtaccgaatatatcaggacgggtccgagcaagtccaacaatgtttcttgaaatttcatcatccgcagccaaagttgtctctcgaattttggcaaacattctttccttttgttctttgtacttgggatcaatgagagaaatccgcatatgttctgacatctcactaataggaattaactcgccagtgataggagaaacaacaaacttggttgaatctctttccacagaaatcctttcctctggtctcttccagttcttaacaattctcatcggtggttcagggtcttcagtaaccctgacttcattctgcttcctgtcatctcggtcttccaaactagcagctctcatgccctcctcaacaagctgggcctcttcctcatccatttccatttcgacctcctttccaggctcaacaatatcttcttccatggctgtcaccttgcttctccttataacctcctcaatagtcattggaggaggtaactcttgatcctcatcatcagcaaaatctattgtttcaaccaccacaaaatcatgccaatcaatcatagccatttgtattctttcctgttctatctcatcctcagccttttgcctagcttgctcttgcgaacgctcccactccagcctattcacacacctttcaaggacagtagtcatatcagacacgctcttctttagcttctccgtcaaacccttcggtggcatcaaaacctttgaatatgcatcggcaagggaagcggacgcgtgggcggacgcgtggg

SEQ ID NO: 11817 - DNA, 545 bp, Glycine max
tcctaaccaagcctatattgtctgtcgacttttctttctctctctggtctcaggcaaacaacaacactctttctctctcttcaattcagcttcttcagcttcagcgaaatcctgttctaaccgtagatcgtgccttttcttttgtgcctgagaagccacttctctacttgcggttcttcttcttcttcttcttcaattttattcgattcgcttgctggaaaattctttgagtgagggagaggatgtctggtggcacacagaagagtctgagaaaagcacttggagcccttaaggacaccacaacagtctcgttggctaaggtcaacagtgattacaaggaattggacattgctatagttagagccacaaatcatgttgaacgtccggctaaggaaaaacatataagagctatattttcagctatctcagctacaagacccagggctgatgttgcctattgtatccacgcacttgccaggcggttatcaaagacacataactgggcagttgcattgaaaactttaattgtcattcaccgtgctcta

SEQ ID NO: 11818 - DNA, 429 bp, Glycine max
tcgggcaaacaacaacactctttctctctcttcaattcagcttcttcagcttcagcgaaatcctgttctaaccgtagatcgtgccttttcttttgtgcctgagaagccacttctctacttgcgttgagtgagggagaggatgtctggtggcacacagaagagtctgagaaaagcacttggagcccttaaggacaccacaacagtctcgttggctaaggtcaacagtgattacaaggaattggacattgctatagttagagccacaaatcatgttgaacgtccggctaaggaaaaacatataagagctatattttcagctatctcagctacaagacccagggctgatgttgcctattgtatccacgcacttgccaggcggttatcaaagacacataactgggcggttgctttgaaaactttaattggtat

SEQ ID NO: 11819 - DNA, 635 bp, Glycine max
cggacgcgtgggtttttacttcctttctttcagtatcaattttgtatgttcctaacattgggattctttacctgaaagtgatttgattttggtcattggtgttgtccttgattttcaatgttttatcttggtttttgaaattgacatgggcttgtgtttaggaatcattgagccaataaaatctggaattagagatccaaggctggggattggtgagcaagaagaagatgatttcttcactgcagacgaaaatatccagcgaaaaaaacttgatgttgagttggaggagacagacgaacatgtgaagaaacgggagaaggcagcatatagcatatatgcatgtctcttgaccggattggtatgtcatatggaatcatcaactttggaaggtcttgagaatttcctgcaggttttattacctggtggcttcttctgcctgcttcgtgcacattatgaaaattcaggtgttagctgaacgtgagcaaaaaattcaaactgaagtgcaagaaatccgaaaggtgttctattgtgatctctgcaacaagcaatacaaattggcaatggaatttgaagcacacttgagctcttatgatcacaatcacagaaagcgtttcatacaaatgaaagaaatgcat

SEQ ID NO: 11820 - DNA, 677 bp, Glycine max
cctcgagccgaatcggctcgagatcacatctgaatatctcacgccgaagaccgtgcgttgaaatcttgcaaggacgagatccaagcatcgttgttttccttcccagaatttacgctcttcttactatcatcaagatacaaaatggaatatcgacggaccagtggtaggcaggaaaccggtggccgtgacagaagacaatctaaaagggaacaggcatatcaggactctcttattgaggatttgtcacaggattttcgtttgccaatcaaccacaggccaacagaaaatgttgatctggacaacgtagagcaagcatctttggacacacagataacatcatctaatattggctttaagctcctccaaaagatgggatggaaaggaaagggtcttgggaaggatgaacaaggaatcattgagccaataaaatctggaattagagatccaaggctggggattggtaagcaagaagaagatgatttctttactgcagaagaaaatatccagcgaaaaaaacttgatgttgagttggaggagacagaggaacatgtgaagaaacgggaggtgttagctgaacgtgagcaaaaaattcaaactgaagtgcaagaaatccgaaaggtgttctattgtgatctctgcaacaagcaatacaaattggcaatggaaattgaagcaca

SEQ ID NO: 11821 - DNA, 584 bp, Glycine max
cccacgcgtcgtctgtctttttttctctttctctctctagattttctttcttcttcttctttatgagccctaactcggggccccatagtcgtcgctgctagctagccatgtcgctgaggaaggtcttccgctcccgcaagttctccaaatcgttcaaagaggtgctgccggcggagggcgccgccgtcgagggcggggtcgccggcaccgtcgaggaggcggcgaatgggaataataatgggtggtctagcatgctgccggagatcctcggcgagatcgtgcggcgcgtggacgccgccgaggagcagtggccgaaccgccaaaacgtcgtcgcctgcgcgtgcgtctgcaagaggtggcgtgacatcacgcgcgaggtcgtgcgtgtgccctcgcataccgggaaaatcactttcccttcgtgccttaaacagccaggaccacgtgacgttccccaccaatgtcttataaagcggaacaagaaaacttcaactttttatttatatcttgcccttacacccattcacagataaagggaagtttctgctagcagctaggagatataggtgtggtactcataccga

SEQ ID NO: 11822 - DNA, 447 bp, Glycine max
ttctttctctctctttctctgtttttctttttgtccctctctctagattttatttgttgttcttcttctttatgagccctaactcggggacccatcgtcgtcgtcgtctttagccatgtcgctgaggaaggtcttccgctcccgcaagttctccagatcgttcaaggaggtgctgccggcggagggcgccgcaattgtcggcggcgaggacggggtcgccggcgccggtgaggagtcgtcgaatgggaataatggttggtccaacatgcttccagagatcctcggcgagatcgtgcggcgcgtggatgccgccgaggaacagtggccgaaccgccagaacgtcgtcgcatgcgcgtgcgtctgcaagcgttggcgtgacatcacgcgcgaggtcgtgcgcgtgcccttccacaccgggaaaataaccttccctgcgtgccttaagca

SEQ ID NO: 11823 - DNA, 793 bp, Glycine max
gaagtctatctcaatggaatctttttttacagaagtcacggctgactctcctgcacatgtggtacatgaaaaattaagcgagatgaaaatggataacaataatgcagatgataaaatgcctattgctgaacctgtcaaatatgatgaacctgctaatttagctaggcctgaaaatataaaaactgagaaagaaactggacaagacaggaaagaaaatgttgtgcagacatctgaaaatgcagctggaaccaagtctggcaagccaaaaataaaaggagtctcattaactgaattatttactccagagcaagtcagggaacatatcactggcctcaggcaatgggttggccagagcaagtcaaaagcagagaagaatcaagcaatggagcattcaatgagtgagaactcctgccaattgtgtgctgtagagaagcttacctttgaaccaccgcctatttattgcacaacttgtggggttcgcattaaacgaaataatatgtattataccacgggcaccggtgacacacggcattatttttgtcttccatgctataatgatgctcgtacagagaacatcattgttgatgggactcccattgccaaatcaagattggaaaagaagaagaatgatgaggaaactgaggaatggtgggttcaatgtgataaatgtgaagcatggcaacatcaaatttgtgctttatttaatggcagaagaaatgatggtggacaagctgaatatacttgccctaactgctatattcaagaggtagaaagaagagagcgcaagccctta

SEQ ID NO: 11824 - DNA, 837 bp, Glycine max
tctcgagcccatccggctctcgtaactttcggttcctcccattttccggttcaataaattaaattaaaaaaaccgaaccggcggatctcggtggtttcatggaggctcatggcggagggctccgtcgcatccttgtgctcgccttctgcgtcgccggaatctggtccgcgtacatctaccaaggcgttcttcaggaaaatgtgtcgacgaagcgattcaacggtgaaaggttcgagcaccttgcgtttctgaacttggcgcagaatgtggtgtgtttaatctggtcttttataatgataaagatgtggtctagtggaaattctggtggtgctccttggtggagttattggagcgctggaattaccaacaccattggtcctgctatgggaattgaagctttgaagtatattagttaccctgctcaggtgctggcgaagtcctctaaaatgattccagttatgctgatgggtactctggtatatggtataagatacacttttccagaatacctttgtacttttcttgttgctggaggggtatcaacatttgcacttctaaagactagctcaaagactatcagcaagctggcacatccaaatgctccccttggatatgggttgtgtttcctgaaccttgcttttgatggatttaccaatgcaactcaggattctttaaaagcaaggtatccaaaaacaagtgcttgggatattatgctgggcatgaatttatggggaaccatatacaatatgatttacatgtttggatggccccgtgccagtggatttgaggcagttcgcttttgccagcagcatccagaagcagcatgggatatttttc

SEQ ID NO: 11825 - DNA, 299 bp, Glycine max
acttgagctcgggattcgagctcgagcgcttcttgcttcgatctactctacgtaagttccgttcctcccagtttccggttcaaccaataagtaaataaataaatacataaccgaaccgaaccgaaccggcggatctcggttgttccatggaggctcacggcggcgggctccgccgagtccttgttctcgccttctgcgtcgctggaatctggtcggcatacatctaccaaggcgttctgcaggaaaatgtgtcgacgaagcgattcgacggtgaaaggttcgagcaccttgcgtttctg

SEQ ID NO: 11826 - DNA, 485 bp, Glycine max
  unsure (1)..(485): unsure at all n locations
ccaaaacaaacttcaaacataacttctttgtgaaccaaattgatattatggcagaccctcagaaaattcaccctgtgcaccatgatgttgaggcacaaaaccacccttcagcaccattggtgccaaggagcatgtccaaatctgatgcaggtgatccacaacgagtagtagtacaacaacaacaacaaaacattcctctgaagcaaaccaagccaccaccgaagaaaagaagaagctgctgctgcaggttcttctgttggctaataagcatattgctgattctgatagtggcaattggcatcactgttggaatactctaccttgtcttcaggccaaagcttccaaagtactcggtggacgaacttagagtcacacactttgatcttgcagacaacaacagcttatcagtgacattcaacttgacaataaccgccagaaaccccaacaaaaaaattggaatagactatangggtggcagccacata

SEQ ID NO: 11827 - DNA, 286 bp, Glycine max
caaaacaaaacttcaaacgtaacagcttctgtgtgagattaattgtcctaaaccaaattgatattatggcagaccctcagaaaattcaccctgtgcaccatgatgttgaggcacaaaaccacccttcagcaccattggtgccaaggagcatgtcaaaatctgatgctggtgatccacaaagagtagtagtagtacaacaacaacaacaacagcagcagcaacacattcctgtgaagcacaccaagccaccaacaaagaaaagaagaagctgctgctgaaggttctc

SEQ ID NO: 11828 - DNA, 1398 bp, Glycine max
agacgacagaagggagaaggaggagacggcgacgcaattagaagaaaccgcgaaggaacgcgacgcgctgcgatcggagattgggaattcgagccacatgatggtcaccggcatggagaagatctcggcgaaggtcagcagcttcgccggcaacgcgctgccgctgccgcggtcacagaaatacacaggcatggcggcggtggcgtacggcgtaatcaagcgcgcgaacgagatcgtggaggagcttttgaagcagaacgaggcgaccgcgaaggcgaggaacgaggctcgggagcagatggagcagcggaattacgagattgccattgaggtttctcagcttgaggccacgatcagtggcttgagggatgatgttgcaaagaacgcttcgattgttgaggatttggagagggacttagctgttagggatcagaggctgaacgaggtttcggagaatttgagtaaggagcaaagcgaggctttgcagttgaaggagttcgttgctgagtgtgaggagaagttgagtaacttggaatctcggatggaatcgcagaggcctttgttgattgatcagttgagttttgtttccaaaattcacaaccagatttgcaatgttgttaggatacttgaccacggtggcaccgcggagctgtctgaatcgttgtttgtcccgcaagaaacggatgttgaggagaatattcgtgcctctttggctgggatggagtccatatatgagttgaccaagattgttgttcagaaagctaacgatgtgcttgacgagaaggatcgtgagattaagagtttacatgagacgttggctcggttagttagggagaaggatcaaattggttcttttcttaggagtgctttgtctaagagggtggcagttgatccgtcttctagaaagagtgagctgtttcaagctgcagagaaatgggttgagagaggctggaatagatttcaaattcagtaagcttcttggagatgggaaagttgcagcttcaaatgacaagtctgatacaacggaaaaagaagaggatgaaatatactccctggccggtgctttggaggatgttgttagggcatctcagcttgagatcatcgagctgaagcatactgtgggtgaattaagggcagagttgagcttacttaagcagcatgtagaagctcaggccaaggagcttgaccatagaatgcatcgggtagaggaacttgaagagaaggagagagtggcaaatgaaaatattgagggactaatgatggacattgctgccgctgaagaagaaattaacagatggaaagtggcagcagagcaagaagctgctgcaggcagaggcgtcgaacaggaatttgtggcacagttgtcagcacttaagcaggaatttgaagaggcaaagc

SEQ ID NO: 11829 - DNA, 514 bp, Glycine max
  unsure (1)..(514): unsure at all n locations
tggtacgcgtgggcggcgaccttgatgccgatgcggtactcagcgacgtcgaggacgacggcggcgatccgattccgctcgagacgaaggctccctcgccggaagacgtctccgtcgagaaactccgggatgttctcgccgaactcgatagggagcggcaagcgcgcatcgccgcggagaatacgaagtcggaattgcaggtttcgttcaacagattgaaggcgctagcacacgaggcaataaagaagcgcgatgagttcggtcgccagcgagacgacgccgttcgggagaaggaggagacggcgaagcaattagaagaaaccgcgaaggaacgcgacgcgctgcgatcggagattgggaattcgagccacatgctggtcacgggtatggagaaaatctcggcgaatgtcagcagcttcgccggcaacgcgctgccgctgccgcggtcacagaaatacatatagacttgtatataaaaaaaaaaaaatnttttattaaaaaaaaaaaggggggc

SEQ ID NO: 11830 - DNA, 530 bp, Glycine max
ctcgagccgggaaaaaatagcaatattgttgcctctggtggccttggcggggagggttttatatgggatatcgaggctgccctcactccggtctctaagtgcaatgatgctacagttgatgaatcttcaaatggtatcaatggttctggcaacttactaccattgacatgcttgcgtcctattaactcaagcgacaatatgtccatgcacaccactcaaactcagggatacattccaattgctgccaaaggccataaagattctgtttatgcactggctatgaatgaaagtggaacaattcttgtctctggtggcacagaaaaggttgtgcgtgtctgggacacaagatcaggatcaaagactctcaagctaagagggcatacagataacatcagggctctgcttctggattctagcggcagatactgactatcaggatcattagactctatgatcaggcttcgggatataggtcatcaaaaatgtgtgcattcttatgcagttcatacacattctgactgggcactcgc

SEQ ID NO: 11831 - DNA, 491 bp, Glycine max
caaagtacatcagaaagtggaccaaaagggccactgtgggaggagatctcagcgttgatgaggaaaatggggtacaaccggaacgccaaaaggtgcaaagagaagtgggagaacatcaacaagtacttcaagaaggtcaaggaaagcaacaagaagaggcctgaagattcaaagacatgtccctattttcaccagttggaggctctatacagggagaagaacaagggagaggggcagatgaagccggagagcatgatggcgccgctcatggtgcagccggagcaacaatggcctcctcaaacaacgcttgtggtaccgccagaagtaaccatgggagacacccagaatgaccccatggaccggcagtaccatgaggagaatgaggatgacgaggacgacaaggaaattggagatgaagacgaggatgaggacgacgaaggaggtgataattatgagatagttgcgagcaaaccagccacagctgatgcttc

SEQ ID NO: 11832 - DNA, 1068 bp, Glycine max
gttctggataagagttgatcatttcttgatcaacattttttcctgctcttatgtttttcatagttttatattgaaaatccttaaacgtacgccattcctataataataataagcgacactataagaataggtacattgtcaaggtttcattcaccgactccttttggttgctacagagacagggagacaagacagagtagtacagattactaccaatggctaccaaggtttacattgtttattattctacgtatggacatgttgagaagctagctagagagatagaaaaaggggctgcttctgtggagggagtagaagcaaaactgtggcaggtacctgaaacattgcctgaagaagtccttgctaagttgggagcacctccaaagagtgatgttccaattattactcccaatgagcttcctgaggctgatggctttttgtttggttttcccacaagatttggatctatggccgctcaatttaaagcattttttgatgcaactggaggcctttggcgtacacaggcactagcaggaaaggccgcagggttcttctatagcactagttctcaaggaggaggccaagaaactaccccgttgacatctattactcagcttgttcaccatggattgatctttgtccccattggatacacatttggcggtggcatgtttgagttggagaaggtgaaaggtggctccccatatggtgcaggaacttatgctggagatggctcaaggcagcctagtgaattggaattggctcaagctttccatcagggaaagtactttgcgggcattgcaaagaagctcaagggatctcaatgatttttatcctccatatatctcccaccccatattttgtgtcaaataaaatgagatgttagaagcaaaaataaaataaaagtgtgagagaataaagtaatacttcatatatcttcgatacaagtgttgtcaccacttgtcatcgtcgtatcctgtaacccagttttcattgtcaataacaagaatttggtaattaatcctggaaactcggtgctaataaaattgatcactatcagccatctaa

SEQ ID NO: 11833 - DNA, 748 bp, Glycine max
tatctctctatttctttgttcttcaactatcccaagggaactgagagagagagagagagagagaagtcatggacgctgttcttcaaaccagaggccttctctctctccccgcaaaccccgttaacagaatctcactctttaacccttcacaaggtttaaagcacagatttttctctccaaagccaaaaaacctttctgggtcttctctttcctccaatgggttcccaaaactctcaccaagacccaacaatgtctttgcccaaagggaccaaaacaaaaacttgttcttgtgcagggctgaggctgctgcagcctcctttggggaaccagaaagtgagaaacaaaagtttttgggtattgaagttgccaccttgaagaagattgtgcctctggggatgatgttcttttgcatcctcttcaactatacaatcttaagggacacaaaagatgtgttggttgtgacggccagaggaagcagtgctgagattataccgtttctcaaaacctgggtgaaccttcccatggccattgggttcatgttattgtacacaaagttggctaatgtgttgtccaagcaggctctcttctactctattattcttcccttcattgccttctttggggcctttggttttgttttgtaccctctcagcaactatattcaccctgaggcttttgcggataagcttctcaacatccttggcacgcggttccttggcactcttgcaattatgagaatatggagctt

SEQ ID NO: 11834 - DNA, 740 bp, Glycine max
gattattaatcgtatcagtgaaagaagtaagaagagagagaagtgaagttagtagtataaatgtacaaactctcctccattcagtgtgtggcgccgtttacgatctcactctgcactctctccttctcatcctcttctcttcgcttctctgttcgtgccacttcttctcgagcaatggcatctcatattgttggttatccacgcatgggacccaagagagaacttaagtttgctttggaatctttttgggatggaaagagtagtgctgatgatctgcagaaggttgctgctgaccttaggtcagccatctggaagcagatggctgatgctggaataaagtatattcctagcaacactttctcatactatgatcaagtactggacacaacagccatgcttggggcagttccatctagatataattggaatggtggggagattgggtttgatgtttacttctcgatggcaagagggaattcatctgtaccagctatggaaatgaccaagtggtttgacacaaactaccattacattgttcctgaattgggtcctgatgttaagttctcctatgcatcacacaaggctgtcgatgaatttaaagaggccaaagttctgggagttaatactgtacctgtgcttgtgggacctgtatcctacttgttgctgtcaaaaccagctaagggtgttgagaagtcattttcccttctttccctaattgacaagatccttcctgtctacag

SEQ ID NO: 11835 - DNA, 757 bp, Glycine max
gcgtacgtaagctcggaattcggctcgagcagaaacccaacttctgttcatatggaaaccagtgcggccatggatgtcgaggaccaaccttcacccaactccaacaacgttaaacgcttcggccttaaaaactctatccaaaccaatttcggtgatgactatgttttccaaatcgtcccaaaggaagattggagtgcaatggcggtgtcactgtcaacgaacgcagtgaaactctattcacctgtggcgggtcagtattttggagagttcaagggtcactctgaaaccgtcaatcagatttcgttttcgggtccttcaaatccccatattttgtgttcgtgttcttctgatggcaccattagagcttgggacgctcggacatttcagcaggtttcttctatcaatgctggtccttctcaagaggttttcagcttctgtatggcagggactggtggaaatttagtagccgccgggtgtaaatcgcagatactgttctgggattggagaaatatgaagcaagttgcatgcctggaggactctcatgtggatgatgtcactcaggttcattttgtccctaatgaacaaggcaagctgatttctgcttcagtagatgggttgatctgcacatttgatgctactggagatatcaatgatgatgatcatctagaatcagtgattaacatggggacttcaattgcaaaggtggggatttttggagagaattatcagaagctttggtgcttaacacatattgaaa

SEQ ID NO: 11836 - DNA, 1075 bp, Glycine max
gtgctccttctccattttctatctatcgtcaacgttagtgctttgtttaggtgaactaattcggagaccttgcaagacttcatcaatggctgtcaaagtttatattgtgtactactccatgtatgggcatgttgagaaactagcagaagaaataaagaaaggggcttcctctgtggaaggtgttgaggccaagttatggcaggtacctgagacactgctggatgaggtgcttggtaagatgagtgcaccacccaagagtgacgtaccagtcattacccccaatgaactatccgaggctgatggctttgtattcggcttcccaacaaggtttggaatgatggctgctcagtttaaagcctttctagatgctactggaggcttatggagagcacaacagcttgcaggcaagcctgctggcctcttctacagcaccggttcacaaggtggtggacaagagactacagcactcactgctatcactcaactggttcatcatggaatgatattcgttccaatcggttacacattcggtgccggcatgtttgagatggagaaagtgaaaggtggaagtccatatggtgctggaacttacgccggtgatggctcaagacagccaagtgagcttgagttacaacaagcattccaccaagggaagtacattgctggcatcacaaagaagctcaagcaagctgcataatgttgccttgccttcatattagatcatactattattattaaaccataccacaatattgcttgaaaatcattgtccaatttttagtcttgaaatatattgagttttgttttcctgtgcttgcaagtattttttttttctttctaatcttcgtgaaggaaatgctttgtaagagtgttacatgttgcagtggatgttgcaatttgttgaatgaggaaagtttgtgtgtggtcctttcgtgttaggcggaaacagtacttgttcctatcttttgtattgccccgttacgcacataaacattgcaacgtttgcaacgaacaatttgagttgagaattggctttattattctctcgtatacaataaagattgcgtgtttgaag

SEQ ID NO: 11837 - DNA, 443 bp, Glycine max
ggctccttccattttctatgtatcgtcaacgttagtgctttatttaggtgacaaaactactcacagagaaagacactcggagaccttgcaagacttcatcaatggctgtcaaagtttatattgtgtactactccatgtatgggcatgttgagaaactagcagaagaaataaagaaaggggcttcctctgtggaaggtgttgaggccaaattatggcaggtacctgagacgctgcaggatgaggtgctcggtaagatgagtgcaccacccaagagcgatgtaccagtcattaccccgaatgaactatccgaggctgatggctttgtattcggcttcccaacaaggtttggaatgatggctgctcagtttaaagcttttctagatgctactggaggcttatggagagcacaacagcttgcaggctagcctgctggcatactctac

SEQ ID NO: 11838 - DNA, 860 bp, Glycine max
ttggcattcgtcaatgacaagtctttccagaatgcattgaattcctcatttgaatatttcatcaacttgaaccctcgttctccagagttcatttcactatttgtagatgataaactccggaaaggtctaaaggggttagtgaggatgatgtagaagttacccttgacaaggtgatgatgctattccgatacctgcaagaaaaagatgtttttgagaagtactacaaacagcatttggcaaagcggcttttgtctggaaaaacagtttctgatgatgcagagagaagtctcatagttaagctcaagacagaatgtggttaccaatttacatctaaattggagggaatgtttacagacatgaaaacctctcaggacacaatgcagggcttttatggctgccaccctgaactaagtgacgggcctacgcttactgtccaagttcttacaacagggtcttggccaactcagtctagtgttacatgcaacttgccagcagaaatgtctgcgctgtacgagaagtttcggtcattttaccttggcacccatactggcaggagattgtcctggcaaactaatatgggcacggcagacttgaaagcaacctttgggaaggggcagaagcacgagttaaatgtctctacttaccaaatgtgtgttgtcatgctgtttaataatgctgatagactgagctacaaggagattgagcaagcaactgagattcctgcttcggatcttaaaagatgcttgcaatcattggctttagttaagggaagaaatgtccttagaaagagaacctaatgggctaaagatattcggtggacgaatgatagcattactatgttaatgacaagttcagcagca

SEQ ID NO: 11839 - DNA, 989 bp, Glycine max
cccacgcgtccgcgacttttggagagcatggtatgggaaaagggttcttcaaggtatagactctttggcagttgccagaccttccctttctgcagagataaatcgtcttggactgttagctgaaccaatgccatcattggatgaaattgcaatgcatattaacttctcttgtggaggactgccaccagtgcctaccttgcccaagcttgaaagttctccaactcagaatggggatatcagatcaccaaagcgaaatgttttaatggaaagaaattctttcacttcaccagtgaaagatcgccttcttcccttcaacagccttaagtcaaaactacccccacctcctttgcagtcagcatttgccagccccacaaagcccaatccaggaggtggaggggaaacatgtgcagaaactgggatcaacatcttttttggcaagatcatcaagttgggagcagtcagaataagtggcatggttgaaaggctacaattatctcagcaaattagggagaatgtatactctcttttccagcggatccttaatcagtggacatctctctttttcaaccatcatattgaccaaatcatcttgtgttggttctatggagttgcaaagatttcacaactcaacctaacttttaaggagatcgtatacaactacagaaagcaaccacattgcaaaccacaagtttttcgtagtgtatttgttgattggtcattggctcgccgaaatggggtaactgaagagaacaggacaggagcatattgacataattaccttttacaatgaaatattcattccttctgtaaagccactgcttgttgaacttggccctgctggaccaactacaaaaagcgaccgaatacctgaagttaaataaaaatgatggccatttagctcaatgtccagggtctcctaaaatatcacctttcccaacccttcctgatatgtctccaaaaaaagtgtcagtcacacataacgtatatgt

SEQ ID NO: 11840 - DNA, 996 bp, Glycine max
acccacgcgtccgcctcaattggcaaagaagttgaacaagattcttgcacaacacatcaagtctgtgttaccagggctgagagcacgtataagcgcttcactagtcactattgcaaaggaacatgcaagctatggagaaatcacagagtccaaggctggacagggtgctcttctccttaatattctttcaaaatactgtgatgcattctcctccatggtagagggaaagaatgaggagatgtctacatctgagctgtctgggggtgcaagaattcattacatttttcaatccatctttgtgaagagcttagaggaggtggatccatgcgaagatttgactgatgatgatattcgcacagccatacagaatgcaactggacctaaatcagcactgtttgttcctgaagtcccgtttgaagtgcttgtacgcaggcagatatctcgactattggatccaagtcttcagtgcgctaggtttatatatgacgagttaatgaaaatcagccatcactgtatggtcactgaattgcagcggttccctttcttgagaaagcgcatggatgaagttattgggaactttttacgagaaggcctagaaccctcggagactatgataacacacgtcatagaaatggagatggactacatcaacacttcccacccaaattttattggtggaagtaaggcaatagaagctgcagtgcaacaaaccaggtcttctagagttggtttaccagtttctagggtgaaggatgcactggaatctgataagggaccagctactgagagaagtgggaagtctcgatctattcttgcaagacatgcaaatggagtagtggctgatcaggtatttatgtaattttatcctgtttagttgactaaaattttctaatatatatgtatgtagtaccttggtttatacctcagagaaatcaaataagggatattaaattattatcttgttctgatctcttcaattcttatgttatgaatttt

SEQ ID NO: 11841 - DNA, 739 bp, Glycine max
agttaagtggcagaaggaaagaaagatgagcgtgaaggtgaattgcgtgggtggcgacactcataacgtcttcgtgtacggtagtctgttagctgatgaagttgtccataccctattgaagcgcgtccctccaaccgcacctgccatccttcacgactatcacaggtttaagatcaaaggtcgcgtttatcccgctattctccccgtccagaacaacaaagttaatggcagggtgcttcttggtatctccggagtagaactagatattttagatgaatttgaggatgttgaatatactagaactgatgttgaggtttccttgaaggacaagtctgaaaagttacaagtttgcgcttatgtttggagcaacccaaatgatcctaacttatatgcagagtggaattttgaggaatggaaacaagttcacatgaatgatttcgtcaagatgactgatggctttaggcaagagttggagttaccagaatcaaagccaagagtgcagacttatgaaaccttctacaagcaagaaaacgataagccacttgaaccttgatgtttgcagtttgtaaaaattctgcattttgtgcactgtgcagagttgtatggttcaattaagaatcatactattcactgaataattattagttcctctcgaataattcatttgatgatttaataagcatctcaatgctaacggtgacaagttttcagtaatatatttattttacaatatagtatt

SEQ ID NO: 11842 - DNA, 657 bp, Glycine max
cgattacgttctctaaaattcactcccaaaaaactctatttgattccaccgaaaccctaaccccctttcgacgaacgaagggcaatcagttgctcgctccttcgatccattcttgaaattctcgttatcgctcttcgaactcaagctctctcgctcgcgatttctgcttctgcaccaatttctgcggtttctcaagatttagaggttcaaagtggttcattcctttgaagcatgccggggttaacgtgcaacgcttgcaacaccgaattcaaagatgacacagagcaaaagctccattacaaatccgagtggcatcgatacaatctcaagcgcaaggtggctggggttcctggggtgactgaagctctatttctggctagacaatctgtgcttgctcaagagaaaaataaactgggtgaaactcccatgctctactgctgtggtctttgtggaaaggattataaaagttccaaggctcatgctgagcaccttaaatcacgtggtcatatgatgcgggcctctgaaggaactagtcaagcagatgagaaggcaatagttaagccacttccacaacgtgttgtgaataggcctcctcctagaagagaggttgataactctgaaaatgaggaaagtgaagatgaatgggacgaggttgat

SEQ ID NO: 11843 - DNA, 428 bp, Glycine max
cccacgcgtccgcccacgcgtccgccctcgcgtccgcccacgcgtccggcaatcactggctcgctcctttgatccattcttgaaattctcgttatcgctcttcgaactcaagctctctcgctagcgattcctacttctgcaccaatttctacgttttctcaagtcacaggtttaagagcaaaggtcgcatttatcccgttattctccccgtccaaaacaacaaagttaatggcaggtgcttcttggtatctccggagtagaactagatatcttagatgagttcaaggatgttgaatatactagaactgatgttgaggtttccttgaaggacaagtctgaaaggttacaagtttgcgcttatgtttggagcaacccaaatgatcctaacttatatgcagagtgggattttgaggattgaattgtggatt

SEQ ID NO: 11844 - DNA, 458 bp, Glycine max
gtcgagagataatgagcgtgaaggtgaattgcgtgggtggcgacactcataacgtcttcgtgtacggtagtctgttagctgatgaagttgtccataccctattgaagcgcgtccctccaaccgcacctgccatccttcacgactagttcagtactctctctctctctctctgtctctgcaattcattcgtttgtttatgaggatgggttttgtcgctgctctaacttgatgtatttgatttgcagtcacaggtttaagatcaaaggctcgcgtttatcccgctattctccctgtccagaataacaaagtttatggcaggcgtctgtctctcttcttacatatccctcataattctaatatatgcatccatcatttaagactatttttatcaggtgcttcttggtatctccggagtagaactagatattttagatgaatttgaggatgttgaatatact

SEQ ID NO: 11845 - DNA, 423 bp, Glycine max
ctagaatagatagatcctctgatgatgagtccacgggtgatgaaaatgaaactggtgggagccaagggttacggggatatggatgtggatgatgttctcaggacaaatgaagacctggttgtgaagagtggctcaaaattgttgccaggacatcttgaatactcgagacttgtgaatgcaaatattcaggaccctgctaatggtcccataaattcagtccagttccatccgaatgcgcagttgtttcttgcagctggattggaccggaagcttagattttttcaaattgatggcaagcggaacagcacaattcagagcgtcttccttgaagattgccccattcgaaaagcctcttttttgccagatggatctcaggttatagtatcgggaagaagaaagttcttttatagttttgatttagtt

SEQ ID NO: 11846 - DNA, 1327 bp, Glycine max
cgtcgatcatcaagcctaatagagggctaatccttcacttgtttgttttgtggtgtattattacattttgcaccatgccttctctcttcgctagaaaccagaggttctcattggctactctcctgcttcttctggaactattgacaggaaaccttcgcatggcagatgctcaaattggtgtgtgttatggcatgctgggcaacaatctaccgtcagcaaacgatgttataggtctttatagatcaaataacataaagagaatgagactctatgatcctaatcaagctgctctagaagcacttagaaattctggcattgaactcattcttggggtgccaaactctgaccttcaaggccttgccaccaatcctgacacttctcgtcaatgggtgcaaaaaaacgtgttgaacttttggcctagtgtcaaaatcaagtacgtggcagttggaaatgaagtgagtcccgttggaggctcttcttcggtagcccaatatgttctacctgccatccaaaatgtataccaagcaataagagctcaaggccttcatgatcaaatcaaggtttcaacatctattgacatgaccctaataggaaactctttccctccatcgcaaggttccttcaggggtgatgtgagatcatacctagatcccataattgggtacttggtatatgcaaatgcaccattactagtcaatgtgtacccttattttagttacactggtaacccccgtgacatatcacttccctatgctcttttcacagcaccaaatgttgtggtatgggatggtcaatatgggtaccaaaatttgtttgatgctatgttggattcagtacatgcagccattgataacactaagattggttatgtggaggttgttgtatccgagagtgggtggccatcagatggaggatttgctgccacttatgacaacgcacgcgtgtacttagacaatttggttcgtcgtgctaatagaggaagcccaagaaggccttcgaagcccactgagacttatatatttgccatgttcgatgaaaatcaaaaaaatccagagatagagaaacattttgggctcttcaatcccaacaaacaaaaaaaatacccatttgggtttggaggaaagaggctagggaaagttgttattgacgacttcaatgcaacaacttccattaagagtgatgtgtaaggttggaatcctactcctcaaaatctctgttattccacccataaaataagagagaatatgttgtttgtgtgaaatatgtatatatccttcagtcttggatgaataaaatttgtgaaaagttgataaagatgaagctatat

SEQ ID NO: 11847 - DNA, 458 bp, Glycine max
gtatttcgatattcagatccatggcaaattagcgggtcgcatagtcatgggccggtatgggaacacagtaccgaaaactgcacaaaactttcgagcgctttgtacaggagagaaaggagtgggaagaagtgggaagtctcttcattataaagggagcacattccataggattataccgagctttatggtccaagggggtgatttcacccgtggtgatggaagaggtggagaatcaatctatggtgataagtttgccgatgaaaactttaagctgaagcataccgggccgggatacttatccatggcaaatatctggggaagacaccaacggctcccagttcttcataacaacagttaaaaccagctggctggatggacaccatgtcgtattcggcaaggtactttccggtatggacgttttgtacaagattgaagcagaaggaagtgaaaatggctcg

SEQ ID NO: 11848 - DNA, 464 bp, Glycine max
tcgttctcatttcagtctccggcgccattgctattgtggaaaaacaagaacaaaaatgttcggcttatcgtcttcgtcttcctctgcgtccaacatgagagtgaccaacacgcctgccagcgacctcgccctcaccaacctcgccttctgttccccctccgatctccgcaatttcgccgtccccggtcacaacaacctctacctcgccgccgtcgccgattccttcgtcttatctctctctgctcatgacaacataggcagcggccagattgcgttgaatgtcgttcaacgccggtgtgtcaaagtttcttccggcgattccgtgcaagtgagccgatttgtgccccctgaagacttcaacctcgcactgctaactcttgatttggaatttgttaaaaaggggagtaagagtgaacagattgatgctgttctactggctaagcaacttcggaagagatttatga

SEQ ID NO: 11849 - DNA, 470 bp, Glycine max
ctcactcttccgcgccattgctattgtggtgcgatctgcaacaagcaagatctgcgagaagaacaacaaacaaaacaatggcgagtcggttcgggttatcgtcttcgtcttcctctgcgtccagcatgagagttacctacacgcccgcgagcgacctcgccctcaccaacctcgccttctgttccccctccgatctccgcaatttcgccgtccctggccacaataacctctacctcgccgccgtcgccgattccttcgtcttatctctctctgctcatgacaccataggcagcggtcagattgcgttgaatgccgttcaacgccggtgtgccaaagtttcttccggtgattccgtacaagtgagccgatttgtgccgcctgaagatttcaacctcgcactgctaactcttgaattggaatttgttaaaaaggggagttagagtgagcagattgatgctgttctactggct

SEQ ID NO: 11850 - DNA, 430 bp, Glycine max
agatttattccgcgtctataagctttcttgttttgctattgcttgctccgcaatcataatttcatcatcgaatcaaatcaattttgaaggttcattataatggcggaagagataaccaagaacgacgtcggagtaacctccaaaaccaccagaagcagctccaggttctggcctcgttggattcccacttccaccgatcacatcatcgctgccgagaagcgccttctttccgtcgtcaagactggttatgttcaagagcatgttaacattggctctggtcctcctggctccaaagtgaggtggttccgttcatccagcaacgagccgcggtttattaacaccgttacatttgacagtaaaccccattctccaacgcttgtcatgattcatggttatgctgcttcacaggggttcttttttcgcaattttg

SEQ ID NO: 11851 - DNA, 424 bp, Glycine max
cttttgagttttctctctcacaaacacactccacttctcttctcgccgtcgatctcacgcgcggccgcgcatggccgaatcccacagaacccgaccctcccgccggcagcccagccgcctgcagagccgcgccccgtcgtcgctccagataaaccgcaccgtcgagtggaacgtcgcgatcccgctgctgtccccgctggtctcgtcgccccctccgccgccgcagaaggacgagccgccaccgccgcagcaacaacgcccgccggaaaaagttgtcttcaaaaagtggcagcaccccgccgcaccgttttgctacgaaccaccttcgcgggttcctcctttcgttaacgtgtaaataataaataaaaaaatgaagaaaaattatgaatatttcttctaacatcttttgttcattttcattttc

SEQ ID NO: 11852 - DNA, 1137 bp, Glycine max
ctttctctacttctttccctttccccaacccctcatacataactctttaaatacgcaccacatcttcacgtgcctctcggttcttcagtccgcgtccgccgcgaaacaatggcgacggtggagctctggtggatgacgtgctttctctaacaactgctcttagaaaagagagagagaatggcggtggagtacacatgctgctcaacggcgttcttcgttcacatagtggtaatcgtgctgctggtgctgttcgcgggcctcatgtcgggcctcaccttgggcctcatgtcgctcagcctcgttgatcttgaggttctcgctaagtccggcactcctcaggatcgtaaacacgctgagaagatattaccagttgtcaaaaaccaacatttattgctatgtactcttctaatttgcaatgctgcggccatggagacacttcctatttttcttgatggtcttgttactgcttggggcgctatcctgatttcagtgacattaattcttttgtttggtgagattataccccaatcagtttgttctcggtatggtttggctattggtgcatcagtggctccctttgtccgtgtgcttgtatgcatatgtttcccagttgcctttccaattagtaagttgttggattttttgctgggccatcgacatgaagccctattccgtagagctgagttgaaaacactcgtaaatttgcatggtaatgaggctggaaaagggggggaactgacacatgatgaaacaacgatcattgctggggcacttgaactcagtgagaagacagcgagtgatgccatgactcctatatctgaaacatttactgttgatattaattcaaagcttgatagggaactgatgaatgagatattggagaaagggcacagcagagtcccagtctattatgagcagcctacaaacattattggacttgtactggtcaagaatttattgacagttcatccagaagatgaagcacccatgaagagtgtaaccatacgcaggattccaagggttccagaaacgtatgccactttatgacattttgaatgagttccagaagggccatagccacatggctgttgttgtcagacattgtgagaagacagggcaacagtcttccaacaataa

SEQ ID NO: 11853 - DNA, 585 bp, Glycine max
aatccatccattattctctgtgtgtctttctctacttctttccctttccccaacccctcatacgttactctttaaatacgcaccacatcttcacgtgcctctcggttcttcagtccaaacaatggccatggttgagctctggtggattacgtgctttctctaactactgttttccacacttaacgaaccagaacacagtgagaaagacataatggcggtggagtacacatgctgctcaacggccttcttcgttcacatactggtcatcgtgctgctcgtgcttttcgcgggcctcatgtcgggcctcaccttgggcctcatgtcgctcagcctcgttgatcttgaagttcttgctaagtctggtactcctcaggatcgtaaacacgctgagaagatattaccagttgtcaaaaaccaacatttattgctatgtactctgctaatttgcaatgctgcagccatggagacacttcctatttttcttgatggccttgttactgcatggggcgctatcctaatttctgtgacattaattcttttgttaggtgaggctggaaaagggggggaactgacacatgatgaaac

SEQ ID NO: 11854 - DNA, 375 bp, Glycine max
agcacagattttgatcatgtataccgaacaatgtccttcagtcggccaacaaacctcttaaatactacagctgctggcacttcatcttctgttccaacgtttcgtggtacaaattccgcagaagggatgcccgagttatctgaggcagacatggttgtgtttcttggtgattttaattatcgccttgatgacatttcttatgacgaagcaagagattttgtttctcaaagatgctttgattggcttagagaaagggaccaacttcgaccagaaatggaagctgggaatgtcttccaaggaatgcgtgaagcaattataacatttcctcccacatacaagtttgaacgggcacaagttggtttggcacggtatgat

SEQ ID NO: 11855 - DNA, 814 bp, Glycine max
gaaggaaagtcctttcgctttcctgtctttcattgttttgttttaactgtttcgaatccctgcgcttgcttagggaggaaccgttgaagtggattgacccagtactgctttcaatttgctgctgaaggaaagggttgggatgggttgtgacttttccaagtacacagtgtgctgcacgggttacggagcaagatggtccggctgctgaggctcaggttgatggtggaaacgaagacaatgttgttgagggcgttgacttgccgcggtttcatgaattcacaattgaacagcttaagagggctacatccggatttgccattgaaaatatagtttctgaacatggagaaaaggctccaaatgtggtctataaagggaaacttgataatcagatgcgaattgctgtcaaacggttcaacagaaatgcttggcctgaagcgcaaccatttttggaggaggctagggctgttggtcagctaaggaaccaaagattgataaatctgcttggatgttgttgtgaaggtgaagaaaggttacttgttgcagaatatatgcccaatgatactttggcaaagcatttattccattgggaaactcagcccatgagatgggcaatgcgaatgagagttgctctgtgccttgcccaagctctagagtactgtaccagcaaaggacgtgctctatatcatgatctgaatgcttacagagttctttatgatgatgaatacaatcctagactttcatgcttcggtctgatgaaaaatagtagagatgggaaaagttacagtacaaatttggcattcactccacctgaata

SEQ ID NO: 11856 - DNA, 485 bp, Glycine max
tttcgtccgtttcattgttttgttttaactgtttcgaatccctgcgcttgcttaggtgcttcgtcaatgcttcttatcgcttttcttcttcaattactcttcatgcttctttctgatccttgattttggcacaaaacttaccttgcttcattgcttggcgccttaacttcgtgttcatctaatgcatttttaattgttctacacaaataaatgttttggagttcatttttggttgatttgattgctttgtgttagcaattcagggaggaaccgttgaagtggattgaccctgcactgctctcaatttgctgccgaaggaaagggttgggatgggttgtggcttttccaagtacacagtgtgctgcacgggttacggagcaagatggtccggctgctgaggctcaggttgatggtggaaacgaagacaatgttgttgagggtgttgacttgccgcggtttcatgaattcacaattgaacagcttag

SEQ ID NO: 11857 - DNA, 441 bp, Glycine max
gtttgagtctcagaagaaacccgcattggataacgaacccccggttgggccagggccgttgcctagagccgagggacatatcagctatggtggagcgcttaggcccggtgaaggtgatgccattgcacagtatgttcaacaagggaagcgtattccgcgaagaggagaagtgggtctttctgcggaggagattcagaagtttgagagccttggttatgtgatgagtggtagtaggcatcagaggatgaatgccattcgtattaggaaagaaaaccaggtttatagtgctgaggataagcgcgctttggctatgtttaactatgaagagaaggctaaaagggagcacaaggttatggctgatttgcagcgcctcgtgcagcggcacattggccaggatgttggcccaactcatgatccttttgctgcaaaagcctctgatgg

SEQ ID NO: 11858 - DNA, 1607 bp, Glycine max
cattacaacaaagatcgagtcattgaaatcagtgcccgaatggaccctcattctgtggtggacctgactgaggataaagatgttgatgttgagttcatgtacactgcaaaatggaaggaaacagatacatcttttgagaagagaatggataaatactctcagtcttcttctttgccacatcacttggagattcactggttctcaatcataaactcctgtgtaacagttcttcttttgactggttttctggcaaccattctcatgcgtgtattgaagaatgactttatgaagtatgctcaagatgaggaagctgctgatgatcaagaggagacaggatggaaatacattcatggtgatgttttccggtttccaaagcacaagtctttcttttcagcagcccttggttctggtactcagttattcacacttacaatcttcatttttatgcttgcactggttggtgtgttttatccatataaccgaggtgctttatttactgcactggtggtcatatatgctctcacatctggcattgctggctacactgctacttccttctatattcaacttgaagggactaattgggttaggaacttattgctgacaggatgcctcttttgtggccccctattccttatgttctgtttccttaacacagttgcgattgcttatagtgcaactgctgccctgccatttggcacaattgtggtgattgtcctaatatggacattggtaacttcaccattgcttgtgttgggtggtattgctggtaagaatagcaaaactgagttccaagcacctgtccgcactacaaaatatccccgagagattccacctctgccttggtacaggagtaccattccccagatggcaatggcaggatttcttccttttagtgccatctacatagagctgtactacatttttgccagtgtatggggccacagaatttatacgatctacagcatactcttcattgtcttcattattctgttgattgtcactgctttcatcactgtggctttgacatacttccaacttgctgctgaggatcatgaatggtggtggaggtctttcctttgtggtggatcaactggcttgttcatctacggctattgcttgtattactactatgcacgatcagatatgtctggttttatgcaaacttcgttcttctttggttacatggcctgtatctgctatggcttcttcctcatgctcggtagcgtaggattccgtgcctccctgctctttgttcgtcacatataccggtccatcaagtgtgagtagctggggtttgaaggtgttggtaaagttcatattatttctgttaggagaagagaaaagggtctgttattatttttttcttttgctgtcataaggtaggttatatagtgtgtacctggaaactagagaagcttagactctattcatgaattggtgtcatgctatctctataactgcacaggcttgcacttgaggaagtttttggaaccatgggatttaactttgattactgtagtcactgaaatttatttgaagtagcttgtactaattaattgtcttctctgcaaatgaccatttaatatgattagctagttacatat

SEQ ID NO: 11859 - DNA, 588 bp, Glycine max
attgcacgtgcactttaccaagatgctgatatatatctatttgatgaccctttcagtgctgtggatgctcacacaggatctcacctctttaaggaatgcttgctaggccttttatgttcaaagacagtggtttatgtcactcatcaagtggagttcttccctgctgctgaccttatattggtcatgaaagatgggaaaattactcaatgtggaaaatatacagatctgcttaatagtggtgctgattttatggaacttgttggtgcacccaaaaaagctttgtctacactagattcattggatggagcggcggtatctaatgaaataagtgtgttggaacaagatgtaaacctctccgacacgcatggttttaaagaaaaagaggctagcaaagatgagcaaaatggtcaaacagacaataaaagtgaactacaaggccagcttgttcaggaagaagaaagagagaaaggtaaagttgggttttcagtctattggaaatgtatcacaacagcatatggaggagctcttgtaccattcatattgttggctcagattctttttcaagctcttcaaattggaagtaattat

SEQ ID NO: 11860 - DNA, 684 bp, Glycine max
cacacgttcattttcatttcaccttataaggttactagttattgtgaccaaccaccccatgcctaattaagccccactttactctttctatttcttccttttcttttcatcttggttcactctcacacctacaaattaataataatacaaacacatatgggcaagttgtggaccttgatcatccagcttcattctattgctgggccggttgtgacgttattgtaccctttatatgcatcggtggtagcaatagagagtcagtccaagttggatgacgagcagtggctagcttattggatcatctattcgttcctcacccttgcggaaatggttcttcaacctatcttagagtggataccaatttggtacgatgtgaaactattgacggtggcatggctggtgttgccccagttcgcaggagctgcgtacttatatgaaaggttcgtgagagagcatataaggaaatatataacggagagacagtatctctatggcaaccaccagcaacaaagcaaaaagtctcccaataacggtggcaaggccaagaaattcgtcgaattcgtcacgcccaagaaaggggatcaggaggcatattgaattggcaattggacggtgctgagcagtgtattttgagttttttaactgaggatcttcgtattggtctttgaatcaactttcctttaa

SEQ ID NO: 11861 - DNA, 979 bp, Glycine max
cccacgcgtccccggcgctcccctatcctcatattccatattcctggttcacttcatgcgtgattcctattcctctgattttttctcctttttctctctactaatattaatgcatcctacgctctttccttctcagatcaacctggtaactgcgttggtactgaattccttaatcgagtccagtattcataatctttgagttgatatgggcaactggagcagtgaacgtcatcaaaccactcaacaaagtgatctcggtgcagttttgcgtgatggaaaagaagtacttcttcaagcattcaactgggagtccaacaaatacaactggtggaataatttagaaggcaaagtttctgacatagctaaagcaggatttacttcagtctggttgccaccaccaacccactccttctcacctgaaggttatactccgcagaacctttactctcttaatagtaaatatggttctgagcgtcagttaaaagctttacttcaaaagatgaagcaatacaaagtaagagcaatggctgacatagttattaatcatcgtactggcaccacccaaggacgcggagggatgtataatcgttttgatggaattccattaggttgggatgaacgtgctgtgacatcagattctggaggactgggtaatcgaagcacaggagccattttccaagggtttcccaatattgaccatactcaagatttcgtgagaaaggatatcataggatggctccgttggctgcgccacgaggtgggcttccaggattttcgatttgattttgtaaaggggttttcaccaaaatatgtgaaagaatatattgaaggagcaaagccattgttttgtgttggggagtactgggattcttgcaactacaagggttctaccttggactataaccaagatagccatagacagcgaataatcaattggattgatggcactggacaactttcaactgcatttgactttaca

SEQ ID NO: 11862 - DNA, 668 bp, Glycine max
ctgtcatggatcatcaccctgtacactctatggcaaatggttgagatgcatgaaatggtacctggaaaacgttttgataggtatcatgaactggggcagatgctttggggagaagctaggactttatatagtggtgcctcaacaacttgtggtggaaattggggtgaacattgtctatatggttactgggggaaaatccttgcaaaagttccatgacactgtgtgtgccagctgcaaaaagatcaagttgaccttcttcattatgatctttgcctctgttcactttgtactgtctcacctgcccaacttcaactccatttctggtgtatctctggcagcagcagttatgtccttgagttactctacaattgcctgggcagcttctgctcataagggtgttcaagagaatgtagaatatggttacaaagctaagagtacatcaggaacagtctctaacttctttagtgcccttggggatgttgcttttgcctatgcttggacacaatgtggtgttggaaatccaagcaacaattccatctacaccagagaaaccatccaagggtcctatgtggagaggagatgttggtgcttacatagttgtggctttatgctacttcccagttgcccttattggttactggatgttcggcaatacagttgaagataac

SEQ ID NO: 11863 - DNA, 919 bp, Glycine max
gctatttggatctgttcacggacttcatatccgtttacaacaccttcatgaaggtggtgttcattgcaagctccttagccattttttggtgcatgcgttttcatcccatggtcaggagaagctacgatagggacctagacacttttcgccactatttccttgttggggcaagctttgctttggcactcatcttgcatgaaaagttcactgttcaagagattttctgggcattttcaatatacttggaggcagttgcaatattaccccagttggttttgttgcaaaggagtggaaatgtggacaatttgactgggcaatacatattctttcttggtgcatatcgtgcattttacatcctgaactggatataccggtatctgactgagccacattttactagatggatagcttgcgtctcaggtgttgttcacacagctttgtatgcagatttcttctactattacgtcatcagctggacgaacactacgaatctgaaggtgcctgcctgaattatctcgaggtgtttaggaatttggacccgtgtgaccagtcactgctaaatttacagagcgtggtttggatgatgttagttttgagagtgaagggacaaggctaactcctctccctgttcatgagggggtgagtttttgtttttgggttcaagggtaaacagttttaacgtctgatgaatataaccgtctcgtggcaattcaagagtaggttaaaatgcaaatgttatgtgatggtgttttgtatattcacgtctccattgcatattattgtatagtttgtagtgtaaggtatagctgattttggttatgatacgaatgatccctattttaggtatgattagactgtaaaattataccattttttcttttcgcggaggtgactaaatgaaaattcagtgggaatcccc

SEQ ID NO: 11864 - DNA, 763 bp, Glycine max
gttacgcgtccgaccacgcgtccgcccacgcgttcggaacaatccacacccaacattctcacaagtcacagccaaacaccatttcattaattcttgcagaatattgcttagttttgttttatctgaattttgaaacagcttttgaatggctttttcaagagttgcactgctaatatgcacggtcgggtattttgtgattgcctctgccggcaatttccaccaagattttgatatcacatggggagatggtcgggctaagatactcaacaatggagagcttctcactctgtcacttgacaaagcctctggctcgggtttccaatccaagaacgaatacctttttggcaaaattgacatgcaactcaaactagtccctggcaactctgctggcaccgtcactgcctactatttgtcttcaaaaggagcgacatgggatgagattgactttgaattcttgggcaatttgagcggcgacccatacatccttcacaccaacgtgtttagccaaggcaagggaaatagggagcaacaattctacctctggtttgacccaactgcagattttcacacctattccatcctatggaaccctcaacgtattgtgtaagtttctagttattatgcaatcctcaagaatattatcataaaatagaatcgatacgtgttttttttttttttccctaacttgtgctggaagcaactgattaggggtgtgtttgttaattttgtttcatttcagcttctcagtggatggaagtccaat

SEQ ID NO: 11865 - DNA, 447 bp, Glycine max
tctcgagccgaatcggctcgagcttttagcacccaacattctcataatcaaataccatttcattcattcttacatattgcttaattttatctgaattttgaaacaccttctgaatggctttttcaagagttgcattgttaatatgcacggtaattgggtattttgtgattgcctctgcgggcaatttttaccaagattttgatatcacttggggagatgggcgtgctaagatactcaacaatggcgagcttctcactctgtctcttgacaaagcctctggctcgggtttccaatccaagaacgaatacctttttggtaaaattgatatgcaactcaaactagttccaggcaactctgctggcaccgtcacagcctactacgtataatcatattctaccctactactatatttgcatctagtcatacatattgttcataaacttcggt

SEQ ID NO: 11866 - DNA, 921 bp, Glycine max
ccccgagcgctcgaggactagttctagatcgcgagctagaaccctagctcgagccgctcgagctcgaggttccaggcaactctgctggcaccgtcacagcctactacttatcttcaaacggagcaacatgggatgagattgactttgaattcttgggtaatttgagcggcgacccatacatccttcacaccaacgtgtttagccaaggcaagggaaatagggagcaacaattctacctctggtttgacccaactgcagattttcacacctattccatcctatggaaccctcaacgtattgtcttctcagtggatggaagtccaattagggagttcaagaacatggagtcaaagggtgttccattccccaagaaccaggcaatgaggatatactcaagcctgtggaatgcagatgattgggccacaaggggaggtcttgttaagacagattggacacaggctcctttcacagcttcttacagaaacttcaatgccaatgcctgcactatgtcctccggaacttcatcttgcggttcaaacaacccttcctcttctaacaataatgtttggctctcagaagagttggattcaactgatcaggagaggctcaagtgggtgcagaagaattacatgatctacaattactgctctgacactcaaagatttccacagggccttccttcagagtgcaacacagcctaaagatatttagtttccctgtggattgatccagactccaattttcagctctctttgtgagtttcctttttttcttttcttttgtaattttcataatgataaattctttgattcgttgttgaaattcttgttatatagtgttcaattcaaatggttcattctttctccgatttccttaaaaaaaaaaaaaaaaaaaaaaactcgaaccgaatttcgagctttc

SEQ ID NO: 11867 - DNA, 1368 bp, Glycine max
agtgagaacacctctgagattacctgtcaaaccaaaacatgttcttgttaagataatttttgctggtgtcaatgctagtgatgtaaattttagctcaggccgctattttggtggcaacaacaatgatgttgtttctcgtcttccatttgatgcaggatttgaggctgtagggataattgcagcagttggggattctgtcactgacttgaaagttggtatgccttgtgcattcatgacttttggaggctacgctgaattcttaatgattccttcaaaacatgctcttccggtgcctagaccagatcctgaagttgttgccatgcttacatcgggattgactgcctcaattgctctagaaaaggcaggacagatggaatctggaaaagtggtccttgttactgctgcggcaggaggaacggggcaatttgctgttcagctagcaaaattagcaggaaatacagtggttgcaacttgtggaggtggggcaaaagccaagcttctgaaagatttgggagttaacagagtcatagactatcatagtgaagatgtaaaaactgttctaagggaagagttccccaaaggtattgacatcatctatgagtctgttggcggtgacatgttaaacttgtgcttgaatgctttggctgttcatggacgactcattgttattggcatgatttctcagtatcaaggagagaagggttggacgccatcaaaataccctggactattggagaagctcttagcatagagccaaacagtgtctggctttttcctggtgcaatatggtcacttgtggcaagaacatcttgacagactatttaatctttactcttcgggaaagctaaaggttgctattgatccaaagaaatttataggcctgcattctgctgcagacgctgttgaatatctccattcaggcaaaagtgttgggaaggttgtcgtctccgtggacccaagcttccttcctcaagtggccaaattgtgaatcaacccatgtcaaatgacctcacagattatattatagctctttcaaattaaaaaggataagttaaacgtgcagctcttgtgcaagtaattttgtcgaatgtttctgaaatttgctgcatcagctcaatgccaaagctgaaacgttctcaatgctttttcattttttaggttacttatgcaattgtgagtttaaaaaataaaaatctgtaagaaaatggagcaaggtataccacctttacgttcatagtttatactatagaacacctttcatatcatgaacaattgtatattttgactctcggtgaaaactggccactctttcctttatttgcattgtcacttaaaaagttgaaactgttgttcaatcgaataactgct

SEQ ID NO: 11868 - DNA, 438 bp, Glycine max
cttttattctgatgggagtggtcttcccatgccatacactgtgacagttctgaagcatggtagcgtgtagagatctttgccaagcattatgcactgcatgctgcttgaagagtgatgaaatgcttttgcttgcagaggtttatgagcataagatttatcgatatctagagaatccgatggaaccattaaattcaataaaggatgatgaacatattgtggcctatcgaatcaaaagtggagccaggaaaacgaaagttgaaataatgcatcgatggctggataatatgaagggtggagacaggaagctctttgggaccccgttggttacttgtttggtagaagatcctcaatttggagccaacattgaggcatctgtacataaaatgttggcacctttaagaaaaacatattcttcgagtaagtctcatgatgggaagg

SEQ ID NO: 11869 - DNA, 728 bp, Glycine max
cgagatttctgctgctggaatacggagagtgagagaatctgttagaaaattgttgaagaagcttttccatttcgagcattttatttttttaaaattattgtttggttttagggtttgagaatcagcactgtgtcgcgatgtctaatcatcaccgttcttcctccaagaacggtcttccacctcaagaactccttgacgatctctgcagccgatttgtgctaaatgtgccaaaggaagatcttcagtcatttgaaaggatcttgtttcttgtggagtacgcacattggttttatgaagataattccgtagaaaataatccatctctgaagtcattaaatctgaaggagttcacttctttattgttcaatagctgtgatgtttttcagccttatgtggcccatatagatgatattttcaaggacttcacttcctataaggttcgagttcctgtaactggggcaataattcttgatgaaacatatgaaaggtgcttgctagtgaagggatggaaaggtacaagttggagtttccctcgtggaaaaaagagcacagacgaagaagatcatgcatgttccattagagaagtcatggaagaaacagggtttgatgtttcaaaacttcttgacaaggatgaataccttgaagttatttttggacaacagagagtgaggctttacattattgctggagtgaaagatgatacagcatttgctcctcttaccaaaaag

SEQ ID NO: 11870 - DNA, 414 bp, Glycine max
aggttttctttctttctgccgctcaaatacggagagagagaaattgttgaagaagcttttctacttcgagcatttttattatttaattttgtttggttttagggtttgagaatcagcactgtgtcacgatgtccaatcatcaccgttcttcctctaagaacggccttccacctcaagaactccttgacgatctctgcagccgatttgtgctaaatgtgccaaaggaagatcttcagtcatttgaaaggatcttgtttcttgtggagaatgcacattggttttatgaagataattccgtagaaaataatccatctctgaagtcattaaatctgaaggagttcacttctttattgatcaatagctgtgatgtttttcagccttatgtggcccatatagatgatattttcaaggact

SEQ ID NO: 11871 - DNA, 387 bp, Glycine max
aaaagggtggtgcctttaaagggttgaggattaaggtgaagaacccttctcttaggaggttggttagcggtgcctttgctggggcggtttcacggaccactgtggcgcccttggagacgataaggactcatttgatggtggggggtagtggcaattccactggggaggtgttcaggaatatcatgaagactgatgggtggaagggcttgtttaggggtaatttcgttaatgtgattcgggttgctcctggcaaggccattgagctatttgcttatgatactgttaacaagaacctcttgtcaaagccaagggagcagcccaaacttcctatttcagcatcattgatagcaagtgcttgtgctggagtttgtacaactttatgcactt

SEQ ID NO: 11872 - DNA, 609 bp, Glycine max
ggagaacattaccaccgacaagatccttattaccgagagcatcttcttccatcaccaaattcatggattcttcctccaacgccagcagcattggaggatctcagaggctctttgcgttagcacagcaccttcgccagtacaaggcaccgtctttccccgaagatattgtggaacaaagcattgaagagattggtggcaaggttgtttctcaggtgggatttcaagaatcagccatcccaattggccaaaaccctgagaaattcagacccaaaaaagctgctgttttgatctgcctattcgaaggggatgatggggatctaagggtcattctcaccaagcgctcttccaagctttctactcactcgggtgaagtggcattgcctggtgggaaaactgaggagggggataaggatgatggggatactgcaaaaagagaggcaaaggaagaaattgggttggacccggaacttgtcaatgttgttactgtacttgaaccattcttgtctaagcacctcctaagggtagttccagtcattggcatacttcatgacaagaaagcattcaaacctgttctgaatccagctgaagtggaagcagtatttgatgcac

SEQ ID NO: 11873 - DNA, 574 bp, Glycine max
cggctcgagcggttcgagagaaagggaaatttcactacaggacttttaacctatcactgggtgatttgcagcacctccttagagtagctccggtcattggcatacttcatgacaagaaagcattcaaacctgttctaaatccagctgaagtggaagcagtatttgatgcacctttggaaatgtttctcatggataaaaatcgcaggcaggatgagagggagtggatgggagagaagtacttgttgcatttctttgactatgatatcgggcataaaaaatacatcatatggggtttaactgctgggatcttgattagggctgcatcagttgtgtaccaacggcagccagcttttgtggagcagaaccctaaattcaagcttccacaggatgtatccaaggacactacaataccttgagttcattgtttattgtattttgtccttgatacttgtccttaatcgtgcaaaaaaactcgtagcagccagagttctagaattcatagcaagtgtttatatttactgagaaaggaagagggtactatcccatcacttggaattcatattcctacctattg

SEQ ID NO: 11874 - DNA, 326 bp, Glycine max
tgcacctgtgaggtctagcaagcaagaacaaattcacaattccattgtgtctactttgcttgcgttgatggatggccttgactctcgtgggcaagttgttttaattggagctactaacaggattgatgctattgatggagccttacggcgccctggtagatttgaccgtgagtttaactttcctctgcctggttgtgaggcacgtggtgagatattagacattcacactcgtaagtggaagcatcctcctccaaatgagctgaaaaaggaacttgcagctagttgtgtaggttactgtggtgctgacctgaaggctctttgtactg

SEQ ID NO: 11875 - DNA, 809 bp, Glycine max
gtactacttcagtcaaattatagggtatcgatgtaaatatgctgtctcctatttggaatttgtgtgtcatgctgtccaactaatcagaatttagaagaaattgccctttaacgtggttgccgaaattaacagagcaagcacgttttgaacaggtgaagagatgcgatgagggtaagctagtagcaagagtgagaagaataggaggatggagaattgggaaacggaggaggttgaaggtgaaagtccccttccggttctggaggctgttgactacagaggtggagcctcggtgagatcgaaatctgggtcatggagatccgctgggtttatcataggtgtggaagtggcggagaggattgcatattatgggattcaggggaacctcataacctacctcacgggcccactccatcagactactgccaccgccgccgagaatgttaatatctggtcaggaactgcttccttgcttcctctctttggggctttccttgctgattctcttctcggccgctaccgcactataatactcgcttccttcatctatattttgggactaggcttgttaacactatcagctatgcttccctctcccaccggttctgagtgccaagttggcaatgaattcaaatcatgctctcctcagtcgcaaatagttgtgttctttatctctctttatttggtcgccattgggcaaggtgggcataagccctgtgttcaggcttttggagcagatcaattcgatgaaaaacatccaaaggagtacaaagatagaagctctttctttaattggtggtattttactatgt

SEQ ID NO: 11876 - DNA, 1844 bp, Glycine max
cggctcgaggacagaacaaagggtgcgaacaggaataagcgaaaaagggcatcacaagttggaattacaccaagaagtggggttacaagagcgaagaacaaaaacatttgtgttgtattggagttatttatatttatacgctcgtaactcgcacatagtatccctcagtcattccgtgtccatagttgcaagttatctaagcccagtttgtgtttcactcacacaccgtttccagtaacaacaaaacatcatgctttctcgcccctcacatcaatttttctgtttctgagatccgcgccttctcttcactttcagatggttctgtctctgtagctcggaatcagacgacaggagaatttgctgggggagagtttcaatttttcaaatcctgtcgttgattcatttgggggaggaggatggaaagaaagtgaataaccttctggaaatgaatagaggggaaggagcgaatgatggtttttctggacctggaccaaatgattcgcttcttcctggtcttattgatgatgttgccttgaattgtcttgcttgggttagtggatccgattatgccgcactatcgtgtatcaataaaaggttcaataaactgatcaatagtgggtatctatatgggttgaggaaacaattgggggctgtggagcatttggtgtatatggtttgtgatccaagaggatgggtggcctttgaccccaagataaacaggtggatgtcattacctaagataccttgtgatgagtgctttaatcatgcagacaaggagtccttggccgtgggctgcgaactgttggtcttcggtcgagaattgatggagtttgccatttggaagtatagcatgatttgtcgtggttgggtgaagtgccaggagatgaaccaacctcgttgtttgtttggatctagtagtcttggttcgattgctattgttgctgggggaagtgataagtatggaaatgttctaaaatcagctgagttgtatgactcttcaacaggtatgtgggaacttttaccaaacatgcacacatcgcgtagattgtgttctggtttttttatggatggcaaattctacgtgattggtggaatgtcaagtacaactgtttcattaagttgtggagaggagtatgatctcaagacaaggagttggcggaaaatagaggggatgtatccatatgttaacgtgggtgttcaggcacctccacttgtggctgttgtggataatcagctatatgcagttgagcatctgactaacatggtgaaaaaatatgacaaggaaaagaacacctggaatgaattggggaggcttccagtcagggcggattcttctaatggttgggggttggctttcaaggtttgtggagagcaacttttggttgtgggtggacaaaggggtccagagggtgaagctattgtgctgagttcatggtgtcctaagtcagggatcagcaatggcaccatagattggcaggtacttggcgtgaaggagcatgtcggggtgttcgtgtataattgtgctgttatgggttgttgagatgattttagattgactcaacagagaatgttgatatccacaatctgacttagccttgaagggtgcctccatgttcaatcacctcatttactgagagttaattgttgccgggatagctttccctagctcagaatttggtttcgttcttttttaacatggtttatttggatgtatttctcactttcctggtccataatactactaaattgcatttgagattactgagtaggcttacacagagatatgttctattatcttctttagccaaatatgtacaccaataaatgaaggattttcattgttt

SEQ ID NO: 11877 - DNA, 711 bp, Glycine max
cggacgcgtgggcaaaacaaaaacgacagaacaaagggtgcgaacaggaataagcgaaaaaaaggcatcacaaaggggaattaaaacaaataagtggggttacaagagcaaagaaagaacaacattatttggtgttgtgttgtgttggagttattatatttatacgctcgtaactcgcacatagtacccctcagtcattccgtgtccatagttgcaagttatctaagcccagtttgtgtttcactcacacaccgtttccggcaacaacattatgctttcacgcccctcacatcaattcttccatttctgagatccgcaccttctcttcactttcagatggttctgtctctgtagcttggaatcagacgaaaggagaatttgctgggggggagagtttcaattttcaaatcttgtcggtgattcatttggtattgtattgcactcgcgtttctctctttctgttttcgtcaaaggttatggtttttcgtttctagagggaggggtggtttgtttttattaagtataaaggcaactatggaataaatgaatagataagagatcggtggcatgtcgatggtgtgatgaatgaatttgtttttgcgggtagaggcggcacatgaattgaaggggttgttggaataattataataatgggttttgctactgcctttcatgaccgatttcccatctgctatggatttgttggggtgt

SEQ ID NO: 11878 - DNA, 547 bp, Glycine max
gttgttttttccagcatgaaacaggattatgcaagaatttacttcaggaatatgctcagaaagtgaactatgcaatgccaatgtatcagtgcaagaaggatgaaacaccaggtcgagcatcagtattttcatgtacggttgacattggggggattctatatattgggggagcagcaaaaacaaagaaggaagcagagataaaagctgctagaactgctttattagctatccagtcaagtgcatctcatgcttccgaaaaccaggttggccatccacagttgaccgtccttccatgcagaaaaagggcaacaagttctgttgccatagctgatgagaattcaaatcccccaaagcctaagaaagcgcggtttaaaaggaagtcttccaagaggaaaccctctagagataagatgggccaaattcatactgaaaacttgggcattggagaaattatcaatcatgaggtagaaacacatgcaagtgttaatggtgaatctggcctccttgaaaagaaaaccgaaacattcacttcagaagccaccaacaa

SEQ ID NO: 11879 - DNA, 640 bp, Glycine max
gaacctcctcgtcaccctggatttattcttcaaacaaaatggaccggcgtgggggacaggaggaagtctgatgaacctcctcgtcaccctggatttattcttcaaacaaaatggaccaaagattctaaaatacgttctttgtcattgtcactggattcattgctggattatacagataaagatgttgaagaatcaaatcttgagctttcattgtttgccgaatcattttatgaaatgcttcagtttcaaatgggttctagaattttgacatttcttcagaaactgcgcataaaatttgtgatcaaaagaaatcagaagaagaggcagagggatgatgagcaagagaaggatgacgtaaaaaaatcccctgtaaagcgtcaaaagggagatgatccttctgtgaagagtgagcccacaaatatggacacatcaaatccaacccaagtagatgacgagaaagctgttgttgagaatgaaaactctagtaataaggaggatgatgtgaagatggaagatggatcagacgaggaagaagatccagaagaggatcctgaagagtttgaggaaatggaaaatggtagtccccagcatgaggcatcccatgataataatgctgagcaagaagtgaaagcagatacta

SEQ ID NO: 11880 - DNA, 484 bp, Glycine max
aaaaggatgaagggaacgttgtggcagttcaagcacaagatgacacacatgagcatctggcaagcgagacgtgccaatgcagataccacagtgacgccagaggtgaagaaaactgggaaggttgtccctaaaaaacaatcaaagacccccacgcctgaaaagcgagacaatgcagctgattccagtaaaacagaaacaaagtctgacaaagatgacaaaaaggaagaaagaggtggaactggtgaaaaaagtggggcaaagacagacaagctgaaagcctctgataaagatgttaccaatgtaaaggggaaagtgaaagatggggacaagtcaaaagatgagaaagtaacccaagatagggatggaaaggactagtccaaaagcaaatctagtaaggaagtgaaagacatgaggaagtctaatgaacctcctcgacaccctggatttattcttcaaacaaaatggaccaaagattctaaaatac

SEQ ID NO: 11881 - DNA, 889 bp, Glycine max
ctcgctttcttcttttcctttgtcaattgagaattgttcctctcttctcttccattcgtgtacgcgcaaaagaatcatgacgagttcctctgctgccgctcgcaagaatctgagtaagattgcctgcaataggctccagaaagagctcgtggagtggcaggtcaatccccccacttggtttcaagcacaaagtcacagacaatctccagaggtgggtggttgaagtcactggagctcctgggacactttacgctaatgagacctaccagcttcaggttgattttcctgagaattacccaatggaggctcctcaggtgatattcttgcatccggctccgctgcatccccatatctacagtaacggccacatttgtttagatatattgtatgattcatggtccccggcgatgacagttagttctatctgcatcagtattctctcaatgctttcaagctcaaccacaaagcaacgccctgaagataatgaccgctatgtaaagaactgcagaaatggcagatcacccaaggagacaaggtggtggttccatgatgacaaagtataataaaccagtttctctaataagtccacaaaagtagagtagaggattatccttttgaaaacaaaatgaagacatgggaaaatgcattttgagaaaccaggatccctttaaattaaatggataataactctgctgtaaattggcattgcctggcatttgtaaagcaaggggaaactatgtgtcttaagcaacttaaggagcaaacaaactcaaaccattgtggttaatctcacaggtatttggatgtggatatagatggtttgattaacccctttattgacaacctgtgtttcatacttcttttaagaattgcccattatatctcataa

SEQ ID NO: 11882 - DNA, 1109 bp, Glycine max
cacgccatcgagcatcaacgcaattcgatgatggcggcgatgggttccctcgcaaaactcatcatcgttcactgatgaaaccaaaacataaaccctactccttcctccctctcacccgacactttcgcgcgctacaatcttgtcccctcatggcccaaaccccaacttctctcgatgcagagcacccctccgacaacgaccagcacatgggctttcgggcgcggagcctgagcggagagtcttgggcggagcgggcgtgggcccattgggccaagctgggccggcccaggttcatagtggccccgatggtcgacaactcggagctgccgtttcgcatgctgtgccgcaagtacggtgcccagggcgcgtacacgcccatgctccattcccgcattttcaccgagaccgaaaagtataggaacgaagagttcaccacttgcaaggaggatcgaccgttgtttgttcaattctgtgccaacgatccggatgtgttgttggaagctgcacgcaaggtggaacgtttttgcgattatgttgatattaatcttgggtgtcctcagcgcattgctaaacggggatactatggcgccttcttgatggataaccttcctctggtgaaatctctggtagaaaaattggctgttaaccttcaggttcctgtttcatgcaagattaggctctttccaaatttagaggacactttgaagtatgctaggatgcttgaggaggctggttgtatgcttttagctgttcatggcaggacaagagatgagaaggatgggaagaaatttcgagcagactggaacgctatcagggccgtgaagaatgcagtcagaatccctgtccttgcgaatgggaacataaggcatattgatgatgttagagactgcttagaagagactggggtcgaaggggttctttccgctgagaccctgctagaaaatccagctctctttgctggatttcgaactgctgagtgggtgtctgaaagtgaaggtaccaatgtggatggaaagctggaccaggcagatctgctaatagagtatttgaagctttgtgaaaaataccctgttccgtggagaatgattcgttccatgttcataaattgt

SEQ ID NO: 11883 - DNA, 1136 bp, Glycine max
gattaatttccccctccaaattcccacctctgtctcctctccctaactacagcatcacatgcacccgcgatccctacgatcccttcccatggtttcttccctgcacccgcacccgcaccctcgccgcgccttctagaaccttctctcagatctcaattccccttccccttttcactttcatggaaatgacttcgactccccgcacagtcgaagagatcttcaaggactacaccgcccgcagaactgccatcgttcgcgctctctctcaagatgtggatgaattctacggactctgcgatccagataaggagaacttgtgcctctatggacatccaaatgaaacatgggaggtgactttgccggcagaggaagttccaccagagcttccggagcctgcactcggaatcaattttgctagggatggcatgaaccgcagggactggctttctctggttgctgtgcacagtgattcgtggttgctctctgtggccttctatcttggagctcgtcttaaccgcaacgaaaggaaacgtttatttagcttgatcaatgatcttcctactgtttttgaagttgtgacagagaggaagccagtaaaggacaagcccactgcagatagtggaagcaagtctaggggcagcaccaagagatcaagtgatgggcaagttaaaagcaacccaaaattcgcagatgaaggttatgaagaggaggatgagcacagtgaaaccctttgtggtagctgcggcggaaactacaatgccgatgaattttggattggctgtgatatatgtgagaggtggttccatgggaaatgtgtgaagattactcctgcaaaagctgaaagcataaagcaatacaaatgtccttcgtgcagcttgaggcggggcaggccctaagccgaaggcaaaatgtgaagtgaataatgctgtttcatggccgacaaagatactgtaatattgttgtatcttttatagaagttcttgtaaacggtatagtatctatgtctgatcataatctttcagattaagttaatttcttctaccaagattaatcatcagtgtatgttatataattttatagaatagaattctatacattttatttttgtctattaatctatattttgcttgggcggc

SEQ ID NO: 11884 - DNA, 549 bp, Glycine max
aacaagggttagaggtgggaaacagaggactagaggaagcaatttagcctcattgagttgagtgagtactactacttatacacattctattcttcaacaaacattgtgatcaaattcccttcccatggtctctctctcttcaattaattccatttagctttccccaaatcccaaaccctttttcgcttagatcccaatccaattgggttatggacatggcttccagtccccgcaccgtagaagagatcttcaaggattacagcgccagaagaacctctgttattcgcgctctcactcacgacgttgatgaattttacggcctctgtgatccagataaggataacctgtgcctctatggacatccaatctggttttattttttatttctcggctctatttttttttttagtttcgtttatatttttttgtggggttcgttttgttttgcgaatttttaatttctttttccttctctggtgtgtgagtgtgaattgtgcgtggttgttggaataaacaaggttggttttcttttttttttctcaaatgagt

SEQ ID NO: 11885 - DNA, 479 bp, Glycine max
ctcgagccgcagacacagtccttcagtctgtctgtcgttctatttaattcccctctccaaatttcaacctctgtctcctctccttaacagcatcatcacatgcacccgcgattcctacgatcccttcccatggtctcttctctgcaccctcgccgtaccttctagaaccttccctcagatctcaattccccttccgctttctcctttcatggaaatggcttccactccccgcaccgtcgaagagatcttcaaggactacaccgcccgcagaaccgccatcgttcgcgctctctctcaagatgtggatgaattctacggactctgcgatccagataaggagaacttgtgcctctatggacatccgaatgaaacatgggaggtgactttgccggcagaggaagttcctccggagcttccggagcctgcactcggaatcaattttgctagggatggcatgaaccgcagggactggctttctc

SEQ ID NO: 11886 - DNA, 792 bp, Glycine max
gcaattttgcctcattgagtgaatactacttacttatatacacattcattcttcaacaaacattttagtttattttttctctctttgatcaaattcccttcccatggtctctctctcttcaattaattccatttagctttccccaaatcccaaaccctttttcgcttagatcccaatccaattgggttatggacatggcttccagtccccgcaccgtagaagagatcttcaaggattacagcgccagaagaacctctgttattcgcgctctcactcacgacgttgatgaattttacggcctctgtgatccagataaggataacctgtgcctctatggacatccaaatgaggcctgggaagtaactctgccagcggaggaagttccgccagagctcccggagccggctcttggaatcaattttgctagggatggcatgaaccgcagggactggctttctctggttgctgtccacagtgattcggcggtcgcgtcggtggccttttacctcggggctcgtcttaaccgcaatgaaaggaaacgtttatttagcttgatcaatgatcttccatctgtttttgaagttgtgactgacaggaaaccagttaaggacaagccaactgcagatagtggaagcaagtctaggggaagtgccaagagatctagtgatgagcaagttaaaagcaacccaaagtttgtagatgagggttatgaggaggatgaagatgagcataatgaaacactttgtggaagctgtggcggaaattacaatgctgatgagttttggatttgct

SEQ ID NO: 11887 - DNA, 673 bp, Glycine max
ggacaatacaataagagtatggaaccttgaaaccttgcagtgtttacagacactaacagagcacacatctgttgtgatgtctgttctctgctgggaccaattccttttatcttgttcattggataaaacagtgaaggtatggtatgctactgaaagcggaaacttggaagtgacatatactcacaacgaagaaaatggtatacttaccctatgtgggatgcatgattcacaaggcaaacccattttgctgtgcgcttgcaatgataatactgtgcacctctatgatctgccatcatttgcagagagaggcaagatattgacaaaaaaagaggtacgagcaattcagatagggcctaacggcatattcttcactggtgacggtactggtgaagtaagagtgtggaattggatagcggaggcaactactaccacccaataaagtggcacttacaatgtgttccatttaattgttttactagtttttttttctggtcttcctttttgtaattttttagctgcaagaagggaattcgggctgaggttgggattgggaaaagcagataaagacaggtaacgggagtgtgtaatttaagtttgcagaaaaagagaggggaatctgagctgtggaagtatccttggcacaaagctgtgctcaagtaggcgtgcctattaa

SEQ ID NO: 11888 - DNA, 389 bp, Glycine max
cccacgcgtccggtttaagtctgcttgatcctacttatgcaagcaagtatataccaatcatggctagtgttagtgagcatcagccacctacttggccttcatactttatggatatcaatgtcttggcattcctcgttccagctggcattattgcttgcttttctcccctatctgatgcaagctcctttgtggtactttattttgttacgtcggtatacttttctggagtcatggttcgcttgatgcttgtacttgctccagcagcatgtatcttgtctgggattgctctttctcaggcttttgatgttttcacaagatctattaagttgcagttgcccagcctatcaggtcattctcacgttgatgcaggggaaaccagttctgaaagt

SEQ ID NO: 11889 - DNA, 1515 bp, Glycine max
cccacgcgtccgcccttccatttcaactccttctcgcgcgatagattgctctttctcctctgctcctccctttcctattcctcctttccctctcctctccgctcctccaattctcccccaaactttctccctccgccgcttcgccgccgcctctctcgcttgccctccaccgccgccgccgcccctcgacgccatggcccagaaaatcggaaagtccacgcgccgccccggctcgtcctccaaggcccgcgtctacgccgatgtcaacgtcgttcgccccaaggaatattgggactacgagtccctcaacgtccagtggggggagcaagatgattatgaggtggtgaggaaggtgggtagggggaaatacagtgaggtgttcgaaggtgttcactgcaccgacggtgagaaatgtgtcattaagatcctgaaacccgtgaagaagaagaagatcaagagggaaatcaaaatattacagaatctttgtggagggcctaatattgtacagttgcttgacattgttagagaccagcaatcgaagaccccaagtcttatatttgaatatgtcaataacactgattttaaagtgctctatcctacattgtcagactacgacatacgatattatatttttgaacttctgaaggcactggattattgccattcacaaggaatcatgcatcgtgatgtgaaaccacataatgtaatgattgatcatgagcagcgtaagcttcgccttatagattgggggcttgcagagttctatcatcctgggaaagaatataatgttcgcgtggcatcaagatatttcaaaggtcctgagcttcttgttgatcttcaagactatgattactctctagatttatggagtcttggttgtatgtttgctgggatgatattccgtaaggagccattcttttatggacatgataactatgatcaactggtcaaaatagctaaggtacttgggacagacggattaagtgcatatttagataagtatcgaatagagttggacccacatcttgcagcacttatcgggaggcatagccgcaagccatgggcaaagttcattaatgtagaaaatcatcacatggctgttcctgaggctgttgactttgttgacaagttattacgctatgatcaccaagaacgtcccacagcaaaagaagccatggcccatccatacttcaatccagttagaaatgcagaaagtagtagaactcgtgcacattgagttgctggtgcttgttgtgatatggtgttcgttcttgtcagggggccttcaacagtctgaactgttatttctagtggaacttgcttttagtagattcccctgttctgttgtgaaactcatttcaattagttctttatctaatcgttttgtttctggtttttaaaattatttttgggtggaaaattcagctctcaacaattttatttgattgtgtgccaaaatttggaaatgaaatgttgattcaatttcagaaaaattattcgcgggttttttatgtt

SEQ ID NO: 11890 - DNA, 446 bp, Glycine max
ctctttctctcttcatcatcgtcccctctctctcttcctttgccttgtctccgtgtgaaagatcacaactccaccgtcaccgatttccaaggtttcttggtgctgctggtgtattatacatgcttacatctgcatgtgctggtgagatgtgcttgcgttggaaattctccttcattctctctattccccacttttctgtagcactttacccttcacggatcttttcaagcattttttggttatggaagtgaatgaattccttcatttggtttcttcaattatgttgtctgaatcacagatgacgtatcaggaattttgagtcttgggttaatggggtgactatagaaatgatgactttgtcatgagcatttatgtcaggatttattaacatgatatgccgctgttatggattggtatatgccaactttcatataggaagaagaaag

SEQ ID NO: 11891 - DNA, 468 bp, Glycine max
cttctcacgacaaattcacatcctccttctttcatctctctctctctctctctctctctgtcttttcctttgcctgtgcgtgtgaaagatcgcagcaactccaccaccatcacaacaggaccgtaaccgatttccaaggttgagttatttgctggtctaacttaaccatactgtctattttgactcctgagattgctagtgagtcatggggcatagacatttatatagctcatctccaatatttgagggtgaacctgaccagaactggaatcatatgcatatggatcaacaatatgtgaaccatggtaggagtaccacttcagacaatggttcttttatttatcctttggaaaatatgtccatagatagcatttcttttccatctcattggaacactgccccagggtcaaccggttttccttcaacaggtctcaacattgaagcaccccctcatcaaacagatgtatc

SEQ ID NO: 11892 - DNA, 420 bp, Glycine max
cgctcgagcgaatcggctcatcacattctctttctctcttcatcatcttcccctctctctcttcctttgccttgtctccgtgtgaaagatcacaactccaccgtcaccgatttccaaggttgagttatttgctggtctaacttaaccatactgtctattttgactcctgagattgctagtgagtcatggggcatagacatttatatagctcatctccaatgtttgacggtgaacctgaccagaactggaatcatatgcatatggatcaacaatatgtgaaccttggtaggagtagcacttcagacaatggttcttttatttatccttcggaaaatatgtccatagataacatttcttttccatctcattggaacactgcaccaaggtcaaacggatatgcatccacaagtctcaacattg

SEQ ID NO: 11893 - DNA, 443 bp, Glycine max
atataaatgggttttggaggaaggaagagatccttgtgttgtgggttgaggtgagaagggaagggatgtggagttcaacttcaagcacagcagcgattccctccgacgaggaacctagcgaatcctcctcctcgtcctccttctccacctctctcttcaatttctcttctggaaacccgagaatcgaggagacccgtggcctcatgcatctcttcccagacgacactccttctactctacccgttggacggaagcctctcgtttgcgttgtcggcgtcccaaatcacatgacctatgcggatttctgccagttctgtggttccttcattcagcacatgctagagatgcgcatagtcaggatggatgggatggaggatcagtacagtgttttagttcgctttgacgatcaagactccaccgacagcttctacaagcactacaat

SEQ ID NO: 11894 - DNA, 920 bp, Glycine max
cccaaatattggaaatgaaggctttctaagctattgcaaggctatgcaccaagctggggtcagtctctctcaaggattgccctcttgttggggatcatggagtgtctagtctgttggcgtcggcttcgaacttgtcgagggttaagcttcagactttgaaaatcacagatttctctctggctgtgatttgccattatggaaaggcgataacaaatctggtcctctctggtctaaaaaatgtcactgaaagagggttctgggtcatgggggctgctcaaggtctgcagaaactggtgtcacttactgttacttcctgcaggggaataactgatacaagcatagaagccattggtaagggttgcatcaacctgaagcagttgtgccttcaccggtgttgctttgtttctgacagtggattggtagcatttgccaaagctgcagtatctcttgagagcttgcagctggaggagtgcaacaggttcactcagtctgggattattgttgcccttgcagacatcaaaacgaagttgaaatctcttgcccttgtgaagtgcatgggagtcaaagatatcgatatggaagtgtctatgctttctccttgcgagtctcttcaatctttagccattcaaaagtgccctggttttggtagtgctagcctggccacgattggaaaattgtgtccccaacttcagcatcttaatctgactggactctatggcataactgatgctggccttctcccccttttggagaattgtgaggctggacttgtcaatgtaaacctcactggttgctggaacttgacagataatatagtttcagccttggccaggctacatggtggaaccctcgaagtactaaatcttgatggatgctggaaaattactgatgcaagcttggttgcaattgcaaacaacttc

SEQ ID NO: 11895 - DNA, 1028 bp, Glycine max
gagctactgttgtcattgctgggttgtactccatagttgagcgtccagagaagatagatgagatcatataccctgaaatatcttcatttctgatgcttatcaaggataacgataggcatgttaggcgagctgctgttttggctctcagcacatttgcacacaataagccgaatctcatcaaggggcttcttcctgatctgctgcctcttctatatgatcaaactattgttaagcaagagctcataaggacagttgatcttggtcctttcaagcatattgtggatgatggacttgaattgaggaaggcggcttttgaatgtgtagacacattgctggatagttgccttgatcaagtgaacccgtcatcattcattgttccttatcttaaatctggtttggatgatcattatgatgttaaaatgccatgccacctgatactctccaaactagctgacaagtgtccttctgcagtcttggcagcgctagattcattggttgatcctctccagaagactattaattttaagccaaagcaagacgctgtcaagcaagaagtagatcgcaatgaagacatgattcgaagtgcactccgagctattgcatccttgaaccgcataagtggaggagattgcagtgtcaagttcaagaatcttatgaacgaaatatcaaaatcacaaactctctgggataaatattattcaatccgcaatgaatgattcacatacagttttaatttttttctcagttctggaaggagtgttaaaatattacctgccaagacatctccgctagttgatgcaaggggtctggaaaactagttaatttcattgtaacataggagatttcgattcaagcaatcggaatactagtggtgatttcttgtataggatgaaagattttgcctttttctgtatttatttttcttttagctacattatcttattgccggcccctattggccagggaaaaaattggacccaaaaagaaaagaaattaacatattaaggaatcatttgaatatttctgtc

SEQ ID NO: 11896 - DNA, 457 bp, Glycine max
  unsure (1)..(457): unsure at all n locations
atgactatgaatattaattagatggattaacacaacagagaatgttgaattgaattgagaagatgacaaacccattagagagataccaaaaacttgggctaagcgagtctctaccgaaaacctacagatacccaattgcgtgcagagagctaagctttattctgagggaagcttttcatcaattccccaaaaatttgcaatccatcgtcttccaagacaccctctccgccttccgtctcctcccagaaatacagactcagagtgctgtttcagcagtccacttcctccttcagagtgtagaagcagcactaccaaagcaaaaaaagaatgtggctgtaacagaatttaagcatgcaatggttgctcataagaggcgctgtaaagctcaccaggtagagaaaggttcattgccattgccacaagatattcctgtgctcactttcagttttcntgatat

SEQ ID NO: 11897 - DNA, 507 bp, Glycine max
gattactttaggcatttgcgagaaattgggggacaggatgctgatagagaagatgaaggggacagaaatggtgctcgaattgctagaaggcctcctggacaagttaatcgtaacatcaacaatggtgaggggaatggtgaagatgctggtggagtgcaaggaattgctggggcaggtcaagtaattagaagaaatgctgaaaatgttgctgcaaggtgggagatgcaagcagcacgacttgaggcacatgtcgagcagatgttcgatggtctggatgatgctgatggagcagaagatgttccctttgatgaacttgttggcatgcagggtccagtttttcatttggttgaaaatgcatttactgtgctggcaagcaatatgattttccttggtgttgtaatctttgtgccattttcattgggccgtatcatactccattatctatcctggctcttctcaactgctagtggccctttgttgtcagctgtggccccacttgcagacaca

SEQ ID NO: 11898 - DNA, 804 bp, Glycine max
ctcgagccgctcgagcccaatcgggtcgatgcttgcttgagttgccaactttaagtttgtcaatttccgtgctgcttggttggttgcaattgcaagtgaacaattggctagtgtgtactagttttgaatcacaatggcagaggatgatggttacacgaaagatggaacagtcgattactgtggaaatccagctaataaaaaggaaactggaacctggaaagcctgcccctatatcttaggaaacgaatgttgtgagagattggcttattatgggatgagcacaaacctggtgctttatttcaagaaccggctaaatcagcatagtgctactgcttccaagaatgtctctaattggagtggaacttgctatatcacaccattgattggggcatatttggctgattcctaccttggaagatattggacaattgctgttttttcaataatttatgctattggaatgacactgttgacattgtctgcgtcagttcctggcataaaaccaacatgtcatggacatggagatgaaaactgtcatgctactactctagagagtgcagtgtgcttcctagctctttaccttattgctcttggcaccggtggcattaagccttgtgtctcatcctatggagcagatcagtttgatgacactgactcggctgagaaggaacgcaagagttctttcttcaattggttctatttttcaatcaacattggcgctcttattgcatcttctctattggtttggatacaagataatgtgggttggggatggggctttggtattcctgctgtagccatggc

SEQ ID NO: 11899 - DNA, 773 bp, Glycine max
accacgcgtccggtccgtagtgaagtgttcccattatcatccggtgcattccacgtgtgtccgtgagtccccaccggcgccgtaaccactctccgccgtggcctccaccattaatggaccaaatcccctaaacatccttctcccaattccgaatccatggctcgctcttctctccacgcgctctccaccattctcttcctactacgcttgttgttatctccttccacacacgcccttaaactccccttccgagtcaacgatgttctccccgttctcccccacggaatctcctggcccctcctcaacaacctccacagcgccgtcgacttgctcccttccttcgtcggcgccgtcacgcccgacaacggttcccttcagtggaagggcgcctgcttttacgataatcaagcctccctcgagttcaccgcccccggcggcgccgtgctccatctcaagacagaagctgcacacagttggacctgcatggatctgtatgtttttgcaacaccttataggattacatgggactactatttctctgcgcgagaacatactttgcagtttgattcatgggaagagcctgcagagttggaatatgtaaagcggcatggggtttctgtgtttctcatgccatcggggatgctgggaacgctcctttctctggttgatgttttgcctctattctcgaacactgcatggggtcagaatgccaacttagatttcctaaagaaacacatgggagctacatttgagaagcgcattcagccttggcg

SEQ ID NO: 11900 - DNA, 613 bp, Glycine max
tggaatgcaagtcatagttgtagttgtacaacaagagaactggtggtgcaactgcaatgcaaggcatcggcggttgaattaatgaatcagttccatttgaatacgtaactagccagatattcccctgtataatcctctaattactaactaccaccaccaccaccactctcccacttcaaaattcatgtctccctcttccctccacgcgctcctcatcattctcttcctaggttccgcacacgcgctcaaggtccccttccgagtcaacgatgttctccccgttctcccccacggaatctcctggccgctcctcaacaacctccacagcgccgtcgacttgctcccttccttcgtcgccgccgtccctcccgataacgattccgttcagtggagagccgcatgcttttacgataatcaagcctccctcgaattcaccgcccccggccacgacgacgccgacggcttgggcggtgccgtgctccgtctcaagacagaagctgcacacagttggacctgcatggatctgtatgtatttgcaacgccttataggattacatgggattactatgtctctgcgcgagaacatactttgaagtttgattcatgggaagat

SEQ ID NO: 11901 - DNA, 571 bp, Glycine max
cccacgcgtccgccactaatgtgccaagctcgagagtctaaaattcaaatcctagcttgggttaacttagatatgagttctctatttttaattttccttatccttcttgttgccgatggggtccttgtccgaggaagtataaatattacagaaataagcttcgatcaaaactatgaggttacgtggggtgataatcatgttgtctccttaaaccaagggaaagaaattcagctcacaatggataactcttcaggatccggttttggatccaagatgtcatatggctctggactattccatttgaggatcaaagtaccagataggaattctgctggagttgtcacagcttactacttaacttcacaaggaagaagtcatgacgagttagactttgaattcttgggcaatagagaagggaagccatatagattacaaaccaatgtgtttgtagacggccaagggaatagagagcaaagaattctcctttggtttgatcctactgcagattttcacaattatagaattctttggaatcaacaccaaattgtattttatgtggataacatcccta

SEQ ID NO: 11902 - DNA, 1812 bp, Glycine max
ctggcattccatagttctcagatagggcacgtctctcgcggcctcttctctccctcgcgccgcccacactaaaaggttattgctctattattgtttgacgatggctgatgctcatgggactgataagaacattgaggtgtggaaaatcaagaaattgatcaaagctcttgaggctgccagaggaaatgggacaagtatgatttcccttatcatgcctccacgtgatcaaatatctcgtgtcaccaagatgcttggtgatgagtttggaactgcatcaaacatcaaaagcagggtgaatcgacagtcagttcttggtgcaatcacttctgctcagcagaggcttaaactctataacaaggttcctccaaatggtcttgttctgtatactggcacaatcgtgactgatgatgggaaggaaaagaaggtgactattgattttgagcctttcagacctattaatgcatccctttatctttgtgacaataagtttcatactgaagctttgaatgaactcctagagtctgatgacaagtttggatttattgtcatggatggcaatggtactttgtttgggaccttgagtggtaatacgagagaagtgcttcataaattcagtgtggatctcccaaagaaacatggaagaggagggcaatcagctctgcgttttgcccgtcttcggatggagaagcgtcataactatgtgaggaagacagcggagcatgctacccaattctatatcaatgctgccaccagccaacccaatgtttctggattaatattggctggttcagctgatttcaaaactgagcttagtcagtcagatatgtttgatcctcgtcttcaggcaaaaatactgaatgttgttgacgtctcctatggaggtgagaatgggtttaatcaggctattgaactatctgctgaaattctgtccaatgtgaagtttatccaggagaagcgattgattggaaaatactttgaggaaatcagccaggatactggaaagtatgtttttggagttgatgatactctaaaggctttggagatgggagctgtcgagacacttattgtctgggaaaatctggatatgaataggtatgtcttgaaaaatagtgctactggtgaggttgtcattaagcacttcaacaaggaacaggatgccaaccaaagcaattttcgggatcctgagagcaatgctgattttgaggttcaggagaagttgtctctgctggagtggtttgcaaatgaatacaaacggtttggttgcactcttgagtttgttaccaataaatcacaagaaggttcacagttttgcagaggtttcggtgggataggtgggatcttgcgttaccagcttgatatgcgatcatttgatgatttttctgatgatggaggcgtgtatgatgattctgaatagcaatcactgaaaaacttcctaccactggtgcaggaaaggggagccaagatacctgcaccaatatgggaggtggaggtggttgcacctgctgcagctcctcctcctccatgtctgtctctggtgttgcagagagtgtttgattgtgaatcgagatgctctgcccccaaggtgctcctttctgatacgagttaccttgtccttctaacatgcacactctggcaccacaaattcctgcaaagcttctggcagcacctgctcccctgctctctactacttacacccagaaaagcaagaacaaaaacatgtttattagagaaacactatgcagaaacagtgatgggtaatccagatgatttgtcacatgcaatgttttctaggatgctccagcatataccctg

SEQ ID NO: 11903 - DNA, 434 bp, Glycine max
gctcctttctgatacgagttaccttgtccttctaacatgcacactctggcaccacaaattcctgcaaagcttctggcagcacctgctcccctgctctctactacttacacccagaaaagcaagaacaaaaacatgttctattagagaaacactatgcagaagcagtgatgtatttgttgaacctgtctgtgtatgtagctctccaaagtcttgatgaagatgctcacagtcaataggttattctgcttaaaggttaatccagatgatttgtcacatgcagtgttttctaggatgctccagcatatacctggacagcatatactggcacacgagtgctagagtctacgactaaatctttcatgtgttaaatctatctttcaaaactttggaaacttacccgtgatgaaataatgttcattttgttttcttgataa

SEQ ID NO: 11904 - DNA, 257 bp, Glycine max
gccgcgctttagaatccccacgcactctccctgaagaaagaacaaacaaatcaagcattccatagttcttagatagggcacgcttctctcccttgcgccgcctcacaaaaggttattggcctattattgtctgaagatggttgatggccatgagactgataagaacattgaggtgtggaaaatcaagaaattgatcaaagctcttgaggctgctagaggaaatgggacaagtatgatttcccttatcatgcctccac

SEQ ID NO: 11905 - DNA, 663 bp, Glycine max
gaaggcataatgagggagcttctacttgatttctatacaagttctggaaatagggagcccgagaatataatcatattcagggatggtgttagtgagtcccagttcaatcaagttttgaacattgaacttgatcaaattatcgaggcttgcaagtttttagatgaaaagtggaatcccaagtttttggtgattgttgctcaaaagaaccatcatactaaattctttcaacctggagctcctgacaatgttcctcctggaacggtaattgataacaaaatttgtcatcctcggaattatgatttctacatgtgtgcacatgctggaatgattggtactagcaggcctacacactaccatgttctgttagacgagattggcttttcacctgatgatctacaggagcttgtgcattcattatcatatgtgtatcagaggagcacaactgccatttctgtcgttgctccaatatgctatgctcatctggctgcaactcagatgggtcaatttatgaaatttgaggacaaatctgagacatcttcaagtcatggtggttctggtatacctgctcctcccgtccctcagttgccaagattgcaggacaaagtttcgagctcaatgttcttttgttgaaggatctgtttctagggataggcgatgactgat

SEQ ID NO: 11906 - DNA, 490 bp, Glycine max
tttggaatgtagttggatataatggacagaggtactgatgctcggaatctgttactaggaaaagttattcctcttcgacttggttatgtaggtgttgtaaatcgcagtcaggaggatattcaaattaaccggagtataaaggatgctcttgttgctgaagagaattttttccgcaatcgtcctgtatacaatggtctagcagatagttgtggtgttcctcaactagcaaagaagttgaaccagattctagcacaacatataaaggctgtgctacctgggctgagagcacgtataagcacttcactagttgctgttgcgaaggagcatgcaagctatggagaaatcactgagtccaaggctggtcagggtgcacttctcctgaatattctttcaaaatattgtgaagctttctcctccatgcttgagggatagaatgaggagatgtctacatccgagctatctggtggagcacgaatccattacatttttc

SEQ ID NO: 11907 - DNA, 1202 bp, Glycine max
cccacgcgtccgggtaatcgtgagtggtactattcccgaatagcagcaagcaaggcaaggcgtgtgtccgagcagagcaggagtgaaggagaaaaggacccttgtccgtccagtccttattctcttttctcctccctccctcacgcaaccgccaattcctgaaccctaagctagcgccatggctgtcgtttcgcgaagtgcgacgacctatacgcgccactacttaatacgacacgagtttgataggaaaacgaaaacctgcgttgccaataatagtttgtgttactctgctaagaaggctcctccaccgcagaggattgttggtggccgtagagtgattgttgctgcaagccctcccaccgaagacgctgtagttgccactgaccctctcacgaagcaggatctcgtcgattatcttgcctccggttgcaagcccaaggataaatggagaataggtactgaacatgagaagtttggttttgagtttggaaccttgcgtcctatgaagtatgaccaaatagcagaattgctgaatggcattgctgagagatttgactgggataaagtaatggaaggtgacaaaattattggactcaaacaggggaagcagagcatatcattggagcctggtggtcagtttgaacttagtggagctcctcttgaaaccttgcatcagacttgtgctgaagttaattcccacctttatcaggttaaagctgttgctgaggaaatgggaattggatttttggggattggtttccagccaaagtggggaatcaaagacatacctataatgccaaagggaagatacgacatcatgaggaactacatgcctaaagttggctctcttgggcttgacatgatgttcaggacatgcactgtgcaggtcaatctggactttagttctgaagctgacatgatcaagaaatttcgtgcaggccttgctttgcagccgatagcaacggctctttttgcaaattcaccctttaaagagggaaagccaaatggttttgtcagtatgagaagccatatttggactgatactgataaggaccgcacaggcatgctgccttttgtttttgatgactcttttgggtttcagcagtatgttgattatgcacttgatgttcctaggtattttgtctatcggaaacacagatatatcgactgcactggaaagaccttcagggactttttggctg

SEQ ID NO: 11908 - DNA, 444 bp, Glycine max
gacaagtttggtgattgacgatgtcgggcttgaagcttggcacgactgcttccatctacgttcgaacagcgagaaccagaagcaaacccctcttatcatggagaagcccaccccaacacccccgcagcccgcaggtacatgctttccccttccgaaaatcaaatcctagggttcacacctagaaacaaattcccatgctattctttgggaagggctggtcttgtcacagattttggttcgtcagtgccccaacctcaacctcaacctcagccaaagccagagccagaaccagaacctgaaccttgcaaattgcttacgttgccaacaattgtgactctaggccgtgtcgccgatgtcccacttattgatgctactatctacatggacggttggcgtggaactgctgctactaccagcattttcgtcgctgcatcaatcactgat

SEQ ID NO: 11909 - DNA, 796 bp, Glycine max
gtcttttatcacattgaattcatccttctgtgttctgtttctttccttttcttcttgggcgaaaccctaatctccccccttcacccttcgtacaccgcgtcgcatctacttccatcttctctcagatccaatctccgattcttgcttcactatcacaagcaaacatgtctgcggctttggatatgaccctcgaagatataattaagaacaacaagaaatcttccctcgccaacaccaggggccgaggccgagcctcgggacccggacccgctcgccgcctccccaaccgtgccgccaatcgcgccgcaccgtatgccgctgccaaggcgccggagacagcttggaaacacgatatgtacgcgaaccagccagtggccgcggcgtatccaggtggtcgagcgtcttccatcgaaacagggactaagctctacatttccaatttggattatggcgtttccaatgatgatattaaggagttgtttcttgaagttggcgacgtgaaacggcatactgttcattatgacaggagtgggagatccaagggtacggcagaagtagtcttctcgcgccgagctgatgctgtagctgcagtgaagaggtacaacaatgttcagctggatgggaaaccaatgaaggtagagattgtggggacgaacatcgctacacatgctgcaccacccgctgtgaatggaacttttggaaacccaactggagttcctagaagtggacaagggagaagtgggtcattaggaaggccacgtggtgggagtagaggtcgtggcagcattcaacgggg

SEQ ID NO: 11910 - DNA, 923 bp, Glycine max
  unsure (1)..(923): unsure at all n locations
cccccgcctccgctctcacacaaaacactagtccctcccttcttccttgtctctttctcttctcaacaacatgcagatcttcgtcaagactttgactggcaagaccatcaccctcgaggtcgagagtagcgacaccatcgacaacgtcaaggccaagatccaggacaaggaaggtatccctcctgaccagcagaggttgatttttgctggtaagcagctggaagatggtcgcactcttgctgattataacatacaaaaggaatcaacacttcacttggtcttgaggctcaggggaggaaccatgattaaagtgaagactctaactggaaaagaaattgaaattgacattgagccaactgatacaatcgaccggatcaaggaacgtgtagaagaaaaagagggaattccacctgtgcagcagagactcatatatgccggtaagcagcttgctgatgacaaaacagctaaagagtacaacattgagggtggttctgtacttcacttggtgcttgcattgaggggtggtacttattagtgtagatgcatatcagaacccaaagacatgaaaggaagctctatacctgtcccgtctctgaagacatcattgttcttatgtgcttggttgtaattgaggctgctattggtggtcagtaactcagtatctttaagttgtatgctatttgaaaccctaagttggcctttataaagaatatctgaaaaccaatgatttaaaaccatagtttaggtacatattttgctttcttctgcttttcaagggagcaccaatgttaaccttcaaacgcttctgcccctgtcagagaagtttatcttctgtagccttgtttgtgggtgtcttccgcttgaaaagagggaaatggaaggttgattgttcgtgttttnnnnnnnnnnnnnnnnnnnnnnnn

SEQ ID NO: 11911 - DNA, 364 bp, Glycine max
tgcgcatccaatcccttcactgttgttttcccccaattcccagtcccacatagcttagaacttacgatctacaattttacaaatacaaatacccttctccctcgctcaaaacacaaacaagctcgcttcttccttctctcatcaacaacatgcagatcttcgtcaagactttgaccggcaagaccatcaccctcgaggtcgagagcagcgacaccatcgacaacgtcaaggccaagatccaggacaaggaaggtatccctcctgaccagcagaggttgatttttgctggtaagcagctggaagatggtcgcactcttgctgattataacatacaaaaggaatcaacacttcacttggtcttgag

SEQ ID NO: 11912 - DNA, 318 bp, Glycine max
gtcctagatcgcgagcggccgcgcgcgatctaggactagttctacgtcgcgatctagacctcatatcactgaaggattggctctgagggctgggcacgggggtcccagtcccgaacccgtcggctgtcggtggactgctcgagctgcttccgcggcgagagcgggtcgtcgcgtgccggtcgggggacggattgggaacgggcccttcggggcctcttccccgggcgtcgaacagtcaactcagatctggtaccgactagggatcgactgtgtatagacaacatgcgatgtcctcgatgtgacgcatgtgatctgcag

SEQ ID NO: 11913 - DNA, 249 bp, Glycine max
ggtcgatggaataatgtaggcaagggaagtcggcaaaatggatccgcaacctcgggaaaaggattggctctgagggctgggcacgggggtcccagtcccgaacccgtcggctgtcggtggactgctcgagctgcttccgcggcgagagcgggtcgtcgcgtgccggtcgggggacggattgggaacgggcccttcggggcctcttccccgggcgtcgaacagtcaactcagaactggtacggacaaggg

SEQ ID NO: 11914 - DNA, 2032 bp, Glycine max
tccacgcgtccgcccacgcgtccgcttttgtttccaactactcttgggtgaggaattggacacccagaagaattgaatggccatggaaaataaaaaaattatagagtattgggttgtgtctatactttgcatgcttttgtcgggtcattggatctctgttcaagctgcccctgcaccctctctcatcacacaactccctggctttaacgccaatttcccatccaagcactattccggatatataagtattgatggaaatactgaaagtgggaagaacctgttctactacttcgttagttcagaaagaagtccagagaaggacccagttgtgctatggctgaatggtggacctgggtgctccagctttgatggctttgtttatgagcatggaccattcaactttgaggctgcaaattcgaaagggaatctacccactttgcatatcaatccttacagctggtctaaggtttccagcgttatatatttggattcccctgctggtgttgggttctcttactccaagaacacgagcaaatatgctactggggaccttgaaactgcgtctgatacccatcttttcctcttaaagtggtttcagcaatttccggaattccaggctaatccattttatattgctggggagtcttatgccggagtttatgtgcctactctagcttttgaagttgctaaaggaatccggagtggtacaaagcccgtgatcaattttaagggttacatggttggaaatggtgtcacggacgaaatatttgacggcaatgctcttatcccatttgtgcacgggatgggcctcatatccgacactatctatgagaatttacaatcttcctgcaaaggaaactactacgatgcttactctttggacgaaaatgatgtgtgttacaagaacattgaaaaatttgacagggccattgatgggcttaacgtgtacaacatactagagccatgctaccatttccctggtgatgccacagccaaagaaaatggaagcttaccaaagagtttcaagcaattgggggttactgagaggcctcttccagtgaggaatagaatgtttggtagagcttggccttttagagcaccagtcaaacctggccttgttacattatggccccaattgacagaaaccagtcatgtcgcctgtgttagcgatgaagtagcaagttcatggctaaacaacgttgcagtcaggaaagcaattcatgctgaatcggaaaaagtggcgggtccgtgggaattatgtacgggaaggatagagtaccatcacaatgctggaagcatgattccttaccacaagaacctaaccaggctgggctataaggcacttattttcagtggcgaccatgatatgtgcgtgccatttaccggaagtgaggcttggacacgatctttgagatataagattgtggatgaatggaggccatggaactcaaataaccaagttgctgggtacttgcaagcgtacgagaacaacctcaccttcctcacaatcaagggagctgggcacaccgtgccggaatataagccgcgggaagcgttggatttttacagccgttggttggaaggaaagcaaatataattaattaaggaaatgcatcatgtggcgtaaaataaaacttacatggattaatgaatacaagttacagcagtgcattgtagctttttcgttagtgatttatcctttacattaaatcatatatgcatgggatttcgcaaaaaggaaacaaaaagaaatcatatgtaagggattattattatttaactgtaatttgattgatatatcaatcctttcgaagagaggatgttggaagcttgtaatctgataagtgataagtataagcctttcgtttttgtaagtgcgggccagtcagccaggcattctagcaccttataaccaatcatccatgaacacatttattagctagcttctcgatttaggttccatttaattagaagacgagtgcttgactacaaattatttgaacttatttaatgacgcaagtattttgtgtat

SEQ ID NO: 11915 - DNA, 605 bp, Glycine max
cccacgcgtccgcccacgcgtccggcgatgcggatgaggcgccactcgatgtttccatttgcctgcatgcctttggtattgtggggtgtggttcgtttagtggtgtcaagtcttgcgaacgtgagggtgcatgagtggtaatcgggatgtttttgttgcacggctccatgcttgcgcatgcaacgtgtgacatgcatccttttcattgtcaccttagccttcgtggcttaggtgctgacgattggttcctgtgttgcctacctaccaaacggtattcgtgtggctagtcagacccattccatccaggcctctttgttggggacgctggaggatttcaaagtcccacacgtgaaccacgttagtcgtccatcataacggcttcctgtggcacacgtgtggtgattgttctctcggatgcggtgcatgcagtgaacgtgggtggtctagtgcccccacattgttccttaaaatcggttgtctcggatgacgcttgccctggcgcttgccttgttcaacgcgatgctactactcttagttagctagcgctggcaatgctcgtggcaggtgcttggtcattaacggatgctacctggttgatcctgcca

SEQ ID NO: 11916 - DNA, 403 bp, Glycine max
gtaaccagctatagttattttttgagtgaaggttagaagtgctacaaacaatggcaactaatcaggaagaggtgtctcttttgggagttgttggaagcccatttgtgtgcagggtgcagattgccctcaagttgaagggaattcaatacaagttttttgaagaaaatttggtcaacaagagtgaactgcttctcaaatacaaccctgttcacaagaaggttccggtgtttgttcacaatgagaagcccatagcagagtctcttgtgattgttgaatacattgatgagacatggaagaacaaccccatcttgccttctgatccttaccaaagagccttggctcgtttctggtccaaattcattgatgacaagaatgggggtgctgtatggaaatctgttttcac

SEQ ID NO: 11917 - DNA, 1211 bp, Glycine max
gattactatagtcaacagcagcagcaaaatcctgcaccttcatccgatgggactgcttacaattacagccaaccaccttcctctggttatagccaaccggggcagggctatgctcaggatggctatggtggatatcatgcgccacctcaatcagggtatggtcagccaccatcatatgatcagcagcaaggttatagctcagctgctagctatggtagcaacccagccccagagggccacactgccaattacggatcccaaggggattcaacccaagctccacctgcccagcctccaagtcaaggttatgggactggccaacaacctagcccaaatgctgccaactatgcaccacaagctcaaccaggttatggggtgcccccaacctcccagccggctacttatggcagtcaacctccagcacagtctggttatggatctggctatggaccccctcagacccaaaagcctagtggcacacctcctgtgtatggacaatcccaatcacctaacacagcaggaggatatggtcaatctggtcatttgcaatctggatatcccccttctcagcccccaccttctggaggatatgcccaaccagagtcaggttctcaaaaagctccaccatctggttatggtggtgcagtgcagccagggtatggtcccccgtcatatggtggtgccccagcaggtggtcaacctggttatggccaggctcctccatcgtacagcaacagttcttatggtgctgctggttacgctcagcctccagtatattccagcgatggtaatgtaggtgggactactcgtggagcctatgatggagcacctgcacagcctgttcaacaggctgctaaaacgtctcctcagagttgatatagtataggttgtcaaatttggatctttctgaattgtctgttttaattttattgtagtagtgacgcatttacatagctttgcagtgttgagatggatgcattatatacactttattctgttgtcttaaattacgaattccttagtatgcgtgttactattccgagaaaattaaagcatgagttggaataccaactaaagtcacaaaatagaatatggtgcctacaatttttgttttatctgcaacattctattttgtgcgaaggtgaacggttctatgcttgggcgagcggtcgttaggtattgattgatattaactttataaatttgttttt

SEQ ID NO: 11918 - DNA, 958 bp, Glycine max
cttatgggttctcctgatgctattgccacagctgagaagctcataaacgaagttctcgctgaggctgaaactggaggttctggcattgttgctcgacgagtggctgggcaagctgggtctgatgagtatgtgtcgaagatcccaaataacaaggttggtcttgtaattggtaaaggaggagaaacaataaagaacatgcaagcttcaactggagcaagaattcaggtgattcctcttcatcttccaccaggtgacacatctactgaaagaacattaaaaattgaagggacccctgaacaaattgagtctgcaaaacaaatggttaaccaagtcatcagtggcgagaatcgtcatagaaatccagcaatgtctggtggttattctcagcaaggttaccaagctcggccacccactagctggggtccccctgctgctccaatgcaacaatctggttatggctatgtgcagccaggagcatactctggtccaccccagtataacatgcctcagcaacaatatgcaggctatcctccccagtcatctggtggatattctgccaccaactgggatcagtccactgccccacagcagcagtctacccatgcagggtatgattactatagtcaacagcagcagcagcaaaatcctgcaccttcatctgatgggactgcttacaattacagccaaccaccttcctctggttatagccaaccgggagcagggctatgctcaggatggctatggtggatatcatgcgccacctcaatcagggtatggtcagccaccatcatatgatcagcagcaaggttatagctcagctgctagctatggtagcaacccagccccagagggccacactgccaattacggatcccaaggggattcaacccaagctccacctgcccagcctccaagtcaaggttatggtacaagccaacaacctagcccaaatgctgcc

SEQ ID NO: 11919 - DNA, 763 bp, Glycine max
  unsure (1)..(763): unsure at all n locations
gttgacttttagtgatgtatgttttagttgtctatttgtttgtgtatcttgtgctgcggtatgtactgtcatcgtaggtgagttcacttgtttttatttggggttacaacttttctttttgcagaatcgtcatagaaatccagcaatgtctggtggttattctcagcaaggttaccaaacttgggcaaccaatagctgggggtccccttgttgttctattgcacaatcttgttatgggtatgtgcaggcaggaacatactctggtacaccccagtattacatgcctcnagcaacaatatgcaggctattctccccagtcatctggtggatattctgccaccaacctgggatcagtccactgccccacctcaccaacagtctactcatggtggtggttattattactatagtcaacagccacagcaaccacaaaatcctgggggtcctgcccctccagctgatggctctgcatacaattacagtcagccaccttcctctggttataaccaatcagcacagcagggttatgcacaggacagctataatgcatataatgcgcaatcacaatcagggtatgggcagccacctacatatgatcagcagcaaggctatggtagtgaaagcaacccggcacaagagggccacactgcaaactatgcagtacagggagattcagcccaagctccttctgcccaaccaattaccgtagcgcacaaggttatcctaccaaccaactgcccagttcaaacactgccaactaccc

SEQ ID NO: 11920 - DNA, 572 bp, Glycine max
cgaaggcacaatttgtcagtggaagaacttttaaatatgacataattggtgctggttcacattcttctgaggaactttctgaagaaaagaatcagggaaaagtaaagcaggttgatgctaggttgaggcaaagaatagatccacaatacaatgaagttcaagctcaaatggaaacaaatctattcaaattgtctcttgatgatgttgagactccaaaaggttccatgttagacctcaagatttcccaatctaagattgcacttcccaaaaatacagttggagggaccattttgcgcagtgatttgctggcaaatttcttaacagaaggcaattttagagcaagtgttgatttgcaacgtacccaccgtatcaaaggaatgattaaaatggtggctacagttggcattcctgaaaacacaggtatagcactggcttgtgcaatgaatagttccattagagggcgtgccagttctgatatctatactatttgttcgcaagattgtgaactgtggaatcctgcttgtacaaaagcaatgactatgtcatttaatccaaacccatgttctgatgcg

SEQ ID NO: 11921 - DNA, 752 bp, Glycine max
cccacgcgtccgcccacgcgtccgcccacgcgtccgcccacgcgtccgccctcgcgtctgggcagaacattggaagtgataagtgataaaacagagtttcgttgaatctgcactaaaaccctacgcacacatcttggtgtaagtccaatcgatatagcagcaatgtctacgcttgaaattgaagctcgagatgtcatcaaaattgtgcttcagttttgcaaagagaattcgttgcatcagacttttcagatgctgcagaacgaatgccaggtttctctgaacactgttgacagcattgagacctttgttgctgatattaatagtggaaggtgggatgcaatattgcctcaagtttctcaactcaagcttcccaggaataagttggaggatttgtacgagcagattgtattagaaatgattgaacttcgagaactggatactgcacgtgctattttaaggcaaacacaggtgatgggtgtaatgaaacaagagcagcctgaaagatatttgcgtcttgaacatctcctagttagaacttattttgatccaaatgaggcttatcaagactcaacaaaagagaagcgacgtgcacaaatagcccaagctcttgcagcagaagttactgtagtgccaccatcccgattgatggctttaattggtcaagctttaaagtggcagcagcatcaagggttactttcttcaggaaccgcagtttgatttgttcgtggaacagctgctatgaaacaagatgt

SEQ ID NO: 11922 - DNA, 589 bp, Glycine max
  unsure (1)..(589): unsure at all n locations
cgagatgacgacagaaggggaccctagtttctgttctccctctttcaccgcagtgttagggtttctgtagcctccaaccagaaagagagggaaatggctcccaaacatcctagtacgggtttgtttgttggattgaacaagggtcacgttgtcaccaagaaggagttgcctccacgcccttcagatcgtaaggggaaaacaagcaagcgagtgcactttgtgaggaacctcattcgagaggttgccggctttgcaccttatgaaaagcgaataactgagttgctcaaggttggaaaagataagagggcactgaaagttgccaagagaaagcttggaacccataagcgcgcaaagaagaagagagaggagatgtccaatgttctccggaagatgagggctggtggagctggagacaagaagaaataagtcttgtttactttttctagtttcactagactgtttcgatgtacgagttgtcttatttttgttttagttcaagattttgctttgagaaatatgttttacctaatcgagacatgatttactccaaaagtacaattggcttattttcgacatgcattcccnanna

SEQ ID NO: 11923 - DNA, 296 bp, Glycine max
tcggcgcgcttatgggtcccaagctttctcttggcaactttcagtgccctcttatcttttccaaccttgagcaactcagttattcgcttttcataaggtgcaaagaagaagagagaggagatgtccaatgttctccggaagatgagggctggtggagctggagacaagaagaaataagtcttgtttactttttctagtttcactagactgtttcgatgtacgagttgtcttatttttgttttagttcaagattttgctttgagaaatatgttttacctaatcgagacatgatttac

SEQ ID NO: 11924 - DNA, 451 bp, Glycine max
acaataaattattggaccgttaaaatcagcttacagctcactaaggttttgtcctcaagccaaataattgaggagtaagactatgaatatcaggaatagtttatttaataaaagaatttgtgtttgatttttaatctagtaaagtaagagaaacttgtgatttcttacacaggataacacttttgatttaattttgagataaaagtgatacgtgtagatctaggaagaggcgttgcctatttaaagaagctaaccctccacaaggaattaaggtgcaagagtttgttgtgagctataagctagtttatcgtgaggagaatatgaagttgtttgtcttctttgttgctgcagtagttttggtagcatggccatgccatggcgcaggctaccaaaggttccctctccgaatgaaaactggctatggtgagcgttcttcggaggtaaaatgcgc

SEQ ID NO: 11925 - DNA, 546 bp, Glycine max
cccacgcgtccgcccacgcgtccgtagattagagattgagagggaggagtacgtggaaggcattttgacctatcgctcgcgcgaaaccaaatctctttgtttctcttaattcctttatagtagcaagtgaagttgaagttgcaggtgtgtgtctcatggcgtctgttattcctcgatgccttcctcccccaattccaattgcacaccgacgaaaggcgcaggtggtgaaatcgtgtcaccaaaacgagagctctgcttcggctcacacagaccactcctcaaatccaaaggaactccgagtaacagtttccaggcgtaattgtctctcatgtttgtgttctactatagttttgattagtgattgcgccatgcctatttttttaccaaaggcatccgctgctgatggaaatggaatcatggaaaaacctgtgtgcagaaattgcttgggaagcggtgctgtgctttgtgatatgtgtggtggcacagggaaaatggaaagctcttaaccggaagcgagctaaagatgtttatgaatatactgagtgt

SEQ ID NO: 11926 - DNA, 2569 bp, Glycine max
  unsure (1)..(2569): unsure at all n locations
cccacgcgtccggccaaaaattggaatgaggagaaatgaagagcgaagaaaaaaccagggttgcttaacctaagcgaccatgctataaggagcaaacatctaaggtgtgtgtcttaattgcatttgcatagcatggacatcaaaacctttgctttcgccccatcttctccgccgttaccggtaatcgccgccgccaagctcgccggaatctctccctcgattgatacctctctctctcctgactcacctcccgcatttatcttctccgatgggctcaagttgcatggagcatatgctcttctacgttatatcggccgagttgccagccttcccaatttctatgggcaaaatgcattagaatctagccagattgatgaatggctggactatgctcctatcctctcatctggccctgcttttgagaatgcatgcaaatatatagatgagtacctggagaagtgtacttttttgggtggttattcattgtcaattgcagacctagcaatctgggcaggtcttgcaggttctggaaagagatgggaaagtctaaggaagtcaaagaaatatccaaatcttgcacgatggttcaattcaatagtggaagaacatggtactgccttaaatgaagtcacatcagtatatgctggcaaaaaaggattgggtgaaccaacagcaaccaagtcaaaagaacagtcagtaaacactgataaagtgaagaaggtgaatggagatgtgtctgagaacaacaaaggaggaagcaaaccttcagcagaaatagatcttccagatgctgaagttggaaaagttcgcttgcgatttgcacctgaaccaagtggttatcttcatattggacactcaaaagcagctttgttgaacaaatattttgctgagcgataccagggtcaggttattgtgcgttttgatgataccaatcctgctaaagaaagcaatgaatttgtggacaacctgattaaagatattgatacattgggcatcaaatatgaacaaattacatatacatcagattacttccctgagttgatggaaatggctgaaaaattaattcgcgagggtaaaacatatgttgatgacactccacgtgaacaaatgcaaaaagagagaatggatggcatagaatctaaatgcagaaataatatagtagaggagaatctaaaactgtggaaggaaatgattgcaggaacagagaggggattgcagtgttgtgtccgtggcaagttggatatgcaggacccaaacaaatcacttagagatcctgtttattatcgttgcaatccaatgccccatcatagaattggatccaagtataaagtgtatccaacttatgattttgcttgtccatatgttgattctatagaaggaatcacgcatgcccttcgatctagtgaataccatgatcgcaatgcccagtattactggattcaagaggacatgggtcttagaaaagttcttatctacgaatttagccggttgaatatggtctacactcttctgagcaaacgaaagcttttgtggtttgtacaaaatgggaaagttgatggatgggatgatgcacgatttcctacagtgcaaggaattgtgcgtagaggtttgaaaattgaagccctgatacagtttattgttgagcagggggcgtccaaaaatctcaatctcatggaatgggacaagctctggaccattaataagaagattattgaccctgtctgtcctagacacactgctgtcattgcagacagacgtgttttgttgactctcaccgatggtcctgagaaaccatttgtccgcatcatacctcggcacaagaaatatgaagctgccggagataaagctacaacatatactaaaaggatatggcttgaccttgctgatgcagtgtctttatcagcaggtgaggaagtaacattgatggattggggaaatgccatagtgaaggaaatagagaaggaccaagatggaaatatcatagggttgagtggtgttttgcatcttgaaggatctgtgaagaccacaaaattgaaactcacttggctacctgagatagatgaactagttagcctgacattagtggagtttgattatctaattacaaagaaaaagcttgaagaaggggaggatttcattgatgtggttaacccatgtaccaaaaaggagactttagcttatggagactccaacatgcgaaatcttcagcgtggagatttattgcaactggagagaaagggatatttcaggtgtgatttacccttcattcgcccctcacaaccaatcgtgctatatgcaatccctgatggcaggcaacagacaagtttgaagtaatctttttatcttgaaactgtgtggagcataacccacattcacactcagaaaagttggtaatggggataacaagtttgtggaactacttttatgtttaccatcacattgtactatgtttatatgcaaaccattatatctggattttttactagcaattggaaaagtcttccctttgttatttttgggacaaattgcaatatagccttaacgnnnnnnnnnnnnnnnnnnnnnnnnn

SEQ ID NO: 11927 - DNA, 1960 bp, Glycine max
cttccacaaatttgaaaaccagatcgaaaacttgaactaagagagtcagagtaagcactttgcgaccagcgctctccgaaccctaaattccccgtttttcgcggtaaaattctcgccggatttaggcttttcccgcgctcggtgcggcgtagagtgccggcggcggaggtctccttcgctcgctgagatatggaaggaggcgggaggcggatcacggtgagtccgcggccgtgctgcggccggcgcgtggtggcgaagaagaggccgcgtctggtcgacggcttcgtcaacagcgtcaagaagcttcagcgccgcgaaatcagctccaaccgcgaccgcgctttctccatgacggacgcgcaggagaggtttcgcaacattcgcttgcaggaagaatatgatacacatgatccagaaggtccttcgtctgctgtattgtcatttctgagaaagacgtcaacgataattgagattgtagcagcacgtgacattgtttttgcacttgcacaatccggtgtttgtgctgcatttagccgagagaccaatgaaagaatatgcttcttgaatgtcagtcctgatgaagtcataaggagtttgttttataataaaaataacgactcacttatcacagtctctgtctatgcatcagacagttacagttctttaaaatgccgaagcacaaggattgaatatataaggagggttaaaccagatgctggctttgctctttttgaatccgagtcattgaagtggccaggttttgtagagtttgatgatgtaaatgggaaggtgctcacatactctgctcaagatagcatatacaaggtgtttgacctgaaaaactattcaatgttgtactccatttcagataaaaatgtacaagagattaagatcagcccgggaatcatgttgttgatttatgctaaagcaagtagccatgtcccgcttaaaatcctttcaatagaagatggtactgttttgaagtcattcagccatctccttcatcggaataagaaggtggattttattgaacagttcaatgaaaagctacttgtaaagcaagaaaatgagaatctccagattcttgatgttcggacttttgaacacacagaagtttgcagaagtgaatttatgacaccatctgcatttatttttctatatgagaaccaattgttcctgacatttcgaaatcgaactgtggctgtgtggaacttccgtggagaacttgtaacttcttttgaggatcacctcttgtggcatcctgattgcaatacaaacaacatatatataaccagtgaccaggatcttatcatatcatactgcaaggccgattctgatgattcattgtccgaaggaaatgcaggttctattaatgtcagcaacattttaactggcaagtgtcttgcaaagataagagcaagtaatggcttacccatggtgaaggaatgcagttgcagcgatgacaattgttcaagtagtgcttgcaattcagggaaacgaaagcgttcctccagaattaggagcacagttgcggaagccttggaagacattactgctctcttctatgatgaagagcgcaacgagatctataccggcaataggcatggtctggttcatgtctggtctaactgatgcattgttgagtttattcttgtctcgtgttttctcattagtattgatccatgggttgcagtcatagttctctcctgatgtaagaacctttgggagagctgtaaccattaggtgttattggatcctttctgtattggttgtttggtcatttatgtttaaggcaagtttaatccgtaggtggcatcaaccgttgttatcaaagtgatacagtatgttggcacctcaccccaatgtttaagatgtaatccatattacgatctatggagtcggctctaagtagtgaaatatgtgcatcaatgttcacttctctctgttcattcttcccccg

SEQ ID NO: 11928 - DNA, 388 bp, Glycine max
caaaatttgaaaacgagatcgaaacttgaactcgaaaagagtttagagtaagcactttgcgaccagcgctctccgaaccctaaatccccgcacgcggtaaaattctcgccggatttaggggtttcccgctctcggtgcggcggaggtttccttcgctcgctgagatatggaaggcggagggaggcggatcacggtgagtcctcggccgtgctgcggccggcgcgtggtggcgaagaagaggccgcgtctggtcgacggattcgtcaacagcgtcaagaagcttcagcgccgcgaaatcagctccaaccgcgaccgcgctttctccatgacggacgcgcaggagaggtttcgcaacattcgtttgcaggaagaatatgatacacatgat

SEQ ID NO: 11929 - DNA, 460 bp, Glycine max
agaggatagggttgttatatttgatcttagcagaggattgctcttggtgaacttcggaccccgtttattaaatatgttgcctggtctgatgacatggaacatgttgctttactcagcaagcatgccattataattgctagcaagaaacttgtgcaccaatgcactctccatgagactatccgtgtaaaaagtggagcttgggatgaaaatggtgttttcatttatacaacactaaatcacatcaaatactgtcttcccaatggagataatgggataataaagacattggacattccaatttatatcacaaaggtctctggcaacacaatcttctgcttggatagggatggctatgattgcttatcttcagcagaagggctttcctgaggttgcactgcattttgtgaaagatgagaaaattcggttcaatttggctttagagagtgggaacattcaaatt

SEQ ID NO: 11930 - DNA, 895 bp, Glycine max
cttcgccacatgcaacagtgacgccacgtcaccgcaagatccattcgtttggaatcatcgttccacccaccttggttccatccatcttcaaaaagcaaagaatttgagtaatgggttttgaaattcaagtaatttgagtcgtgggttttgaaattcacgcgatttgggacgtgagtttttgaaattcgaggccatttggttgatgggtttgggaggaatctgaggaaaattttcaatgtcggagagcgatcagcgtcgtcttctcggggcttccgaggatgacgtggagtctggagggtcggaattggctttggcggtcgtcaatggcagcagtggcaacaacaacaacaacaacaaaggttttagggatttgctaaggttgtcgggtcaccgacacagtttgaagcgcattgagaaagaagaagatagagatagagacagggataggggtatagatagagatagaagagatcaaaatcggcatctccacgatgtggatcttgattcttctgttgatgtgcttggggacagtgcacctcctgaatgggcgttgcttctcattggttgcctcattggactcaccactggcctctttgtggcactttttaataaaggggtgcataatacatgaatgggtatgggctggcactccagttgagggtgctgcctggcttcgtattcagagattggctgatacatggcatcgaatccttttaatacctgtcactggaggagtcattgtcggcatgatgtgtggtttactggaaatactggaccaaataaagcaatccacttcctctcaaacacaacgttttgattttcgtgcaggaatctttccaacaataaaggctatccaagctgcagttactttaggtacgggctgttcaatgggccc

SEQ ID NO: 11931 - DNA, 500 bp, Glycine max
ccctcgcgtccgggagatttctcagagtgctgatgggatctgctgtacatgtgttggtgctggagatcctcggcttgcaaattttaggttccgtcaggtacttattgatgagtccactcaagcaactgaacctgagtgcctcatacccttggttcttggagcaaagcaggttgttcttgttggtgatcattgtcagcttggtccagttattatgtgcaagaaagcagcccgtgctgggttagcacagtcactttttgaacgcctagttctacttggtgtcaaaccaattaggttgcaggttcagtaccgtatgcatccatgcctttcagaatttccctcaaacagtttctatgaaggcactctgcaaaatggagtcactgttaatgaaaggaagtcttctggaattgattttccttggccagtgccaaaccgtcccatgtttttctatgttcagatgggacaagaagagataagtgctagtggaacatcttatttaaata

SEQ ID NO: 11932 - DNA, 425 bp, Glycine max
cccaaagcatgttttccaaccagtttttgaatttgcttctgtaagctgtcaaaatgcaaacccgaagtttcgggaagcatctgttactgctttgggtgtcatttcagaaggttgtttggaactcatgaaaagtaagctagaacctgttctccatattgtcctgggagctctgagggacccagaacaaatggtcagaggggcagcttcctttgctttgggtcaatttgctgagcacttacagcctgaaattgtatcccattatgagagtgttcttccctgcattttaaatgctcttgaggatgtatctgatgaagtaaaggagaagtcatactatgcgttggctgctttttgcgagaacatgggtgaagacatccttcctttcttagatcctttgatgggaagactgttgacagctctccaaaata

SEQ ID NO: 11933 - DNA, 1283 bp, Glycine max
ggcccacacatggcagctgtctccagcccatgttccctgaagcactttatatatccatccttcttaccatattcacttccgcccccgtccctagctgaaattgtcacgaccatgttgtcattattcaccaacttgctcctcttcctatccctgctaatcggtctatgcaattgcagggtaacaacaacaaatgaagaggtgcaaaccctaaacacaaacactcacttcaacccacaggtcccacccctccgaaccctctcttcctcgaagcggttcgagggttcctcggagttcgtgaagctcaaataccacatgggacctgtgctatcgtctccgatcaacatctacctcatctggtacggcaagtggccccaatcccagaagctcctcatcaaggacttcctcaactcaatctccgacgaccaccaccgcgcctccccctctccctccgtctccgactggtggcgcactgtctccctctacaccgaccagaccggcgccaacatctcccgctccgtctccatcgccggcgagtactccgacctccgctactcccacggcacacacctcacccgcctctccgtgcaggacgtcatcgccaccgccgtccaggccaagcccttccccgtcgaccaccgcaacgggatctacctaatcctcaccgccgaagacgtcaccatggaagacttctgccgcgccgtctgcggtttccactacttcaccttcccatccaaggtgggttacacgctcccttacgcctgggtggggaactcaggaaaacagtgtcccgaggtttgcgcttatcccttcgccgtccccggctacatgggcggcggcggacccggccacctcacgccgccgaacggagacgtcggagtggacggcatggtgagcgtgatcgggcacgagctggcggagctctcgtcgaacccgctcgtgaacgcgtggtacgccggcgaggaccccaccgcgccaaccgagatcggagatttgtgcgaggggttgtacggaacgggtggtggcggcggttatattggttccgttatgaaagatggtgaagggagaacctttaatcttaacggtaggaatggacggaagtttctagtgcagtggatttggagccccgttttgaaggcttgtgctgggcccaatgctttggattgaattccttcatacattacaagctctgcctgctactctttttttgcttacttaccctatctatgtatcatacacctaatgatgcttttttttattattaatgacgatattcatttttatct

SEQ ID NO: 11934 - DNA, 394 bp, Glycine max
  unsure (1)..(394): unsure at all n locations
catcccaacccttggtgaatttctgagcagtgagcagcatgttgtcattattccctaacttgttcctcttcctatcactgttaattggtctatgcaattgcagggtgcaaaccctaaacactaacccaactcacttcaacccacaggtcccacccctccgaaccctctcgtcctcgaagcgcttcgaggggtcctcggagttcgtcaagctgaaataccacatggggccggtgctttcatctccgatcaatatctacctcatctggtacggcaagtggccccaatcccagaagctcctcatcaaggacttcctcaactcaatctccgaccaccgcgccgncccctccccctccgtctccgactggtggcgcaccgtctccctctacaccgacca

SEQ ID NO: 11935 - DNA, 443 bp, Glycine max
ggaaatggcaacaaagatggactgttctctgtgctactgagagactatagagcacatgctgctgcatcttgcatgaatcgtttagctaaattgagtgcacgatggattggcaatcatgggttctcaataggcattgatgatgtccaaccaaaagagattctgattaacaagaaagatgaaacaatttcagaaggttatagggaatgtgataaacacatagaagctttcaataagggaaaactagaactcttagctggttgtgatgctgcgcagacattagagactcggattactggggtattaaatggacttcgtgatacggcagggaaggtctgcatgcaaaccctacactggagaaatagtccattgatcatgtcacaatgtggctccaaaggatcttctattaatatcagtcaaatggttgcctgtgttggtcaacaatc

SEQ ID NO: 11936 - DNA, 2285 bp, Glycine max
ctgaagaggaggagcgatctgaggtgaggaaattaaaagagcaatgctagcacagggattcgaggacgaagagaaatggctcgccgaggggatcgccggcattcagcacaacgcattcttcatgcatcgcgcactggacgataacaatctcagagacgctctcaaatactccgcgcagatgctatccgagcttcgaacttccaggctctcacctcacaaatactaccaactttatatgagagccttcgatgagctcaggaggttggagattttcttcaaagacgaaagcagacacggggtttccatagttgatctctacgagcttgttcagcacgctggaaatatattgcctagactgtatctcctttgcacggtaggatctgtttatctcagatgcaaggatgctccagtaaaggatgttcttaaagatctagtggagatgtgtcgcgctgttcaacatcccattcgtggtctatttttgaggagttacctttctcaagtcagtaaagataagttgcctgatattggctatgaatatgaagagggggaatctaatagtgtgatggacgcagttgaatttgttctacagaatttcacagaaatgaataagctgtgggttcggttgcagttgcagcatcagggacctgctcagataagggagaagagggaaaaagaaaggaacgagcttcgtgatcttgtggggaaaaatctacatgttctgagtcaaatagagggcatggaccttgagatgtacaaagacaccgtccttcctagtgtcttagagcaggttgtcaattgtaaagatgagcttgcccaattttatcttatggagtgcataatccaggtttttccagatgagtaccatttgcagacacttgagactttgttaggtgcttgccctcaattgcaggtgggtaaattagattggaaatagatgacctcttttgtgcttgggattttaaaaattatactagtggtgactggtcaaccttgtagaggcctaatatacttgagtttaactttgttgttattatattgattccttcttaagggttttgttttacaagtatgtgaagctctatgacttatgaattgctgatcatacatttggttgctcatgaatttaggctatttggaatggtgaccactgacctattcaattagattttgaaacaccttggatttggtgcataaaaaaattgcacatgatatgcttaatcacgtgtggacaattggacatacttagagtgtatttaaattaagagattctaggagtcaatgtaatttttaagactaataaaataaaatatcttgattggatactgaaccggtgaattttaaaatctgtaagcattttgattgagtgtaataaaacagagattttggaattctgcctattgaagtggattttcaaaaattcgtcaagaactgactgcactgtcttctttctttcatactcctttaagcttcattgtacatcgtttattttgtacttatctcaactatcatagtttatggcttcaagctattattaattcacatggtcaacgaatcatcagacatttgctatgcccaccaatcatttgacaacattcctagtccagatatggaagctgtaaaattatttacttataatcattgtctttgtcatttttgataattatttggttgactttgttattaaccaatcattgttttgttatggatgttgatgtaaattgtttgatgagatgcttgagagagatgagcgtcatggacaacaatattggatgggtatacaaggaatgataattttggtgcagcttctatctaatcttcttcatggacggaatttcaatttcacctcttgttacccagatacatcatttttcaaatgaagaaaattaaattgacaaaatttgattctctgtattttaatttctgaaaatttaaaattctccatccaaacgcaacccagttttattttttgtttcttaattgtatctagctggtggtaggtttccttgcagatgaccaagaaatttactggatggctgtggctcacccatgtgactttcttttacaatatatgcggggattctattataagtgaagagtgaagcaacagaaaaacttctcatagatcaattctgttctatttttctctgattttcttaaagctgaaagccatttttatctcccctatgactgacttgatttatttgcagcccacagtagacatcaagacagtgttatctcagttaatggacaggtattgcccgaatttctgcaagtggaagcattta

SEQ ID NO: 11937 - DNA, 718 bp, Glycine max
atctgtttatctcagatgcaaggatgctccagtaaaggatgttcttaaagatctagtggagatgtgtcgtgctgttcaacatcccattcgtggtctatttttgaggagttacctttctcaagtcagtaaagataagttgcctgatattggctatgaatatgaagagggggaatctaatagtgtgatggacgcagttgaatttgttctacagaatttcacagaaatgaataagctttgggttcggttgcagttgcagcatcagggacctgctcggataagggagaagagggaaaaagaaaggaacgagcttcgtgatcttgtggggaaaaatctacatgttctgagtcagatagagggcgtggaccttgagatgtacaaagacaccgtccttcctagtgtcttagagcaggtctaataaagttgtcaattgtaaagatgagcttgcccaattttatcttatggagtgcataatccaggtttttcccgatgagtaccatttgcagacacttgagactttgttaggtgcttgccctcaattgcagccggcagtagacatcaagacagtgttatcacagttaatggacaggttgtcaaattatgctgcttctagtactgaagtattgcccgaatttctgcaagtggaagcatttaccaaattaagcacagcaattggcagggtgatagaagcacaagttgacgacatgcctatcgtgggagc

SEQ ID NO: 11938 - DNA, 1798 bp, Glycine max
  unsure (1)..(1798): unsure at all n locations
acgagggagcccactggcggttcagcgacatgcggttccggctcaggaaaggacctcgtcctcaatcggtccactccgcttctgcgaaatttcttcgtctctgtctctgacctcctaacgccttctcgattcctaactccttcaaccctttgcaccattcaacacgtcgtcatcatgctcccttcaactctcgcctgatcagattttccgtttcgtcggcgatctctctctctctctctctcagttcgcgatccatcaccggttggaggttttagggcacagagaccaaggtcgccgccatgtcaatgtcggattccgattcgtcctcctcttatggcgctgaatacaagagtctcaaacaagttagccgcgagcgattattacatgaaatgcttaggtcagcgaaaacaggggattcaaaatctacatggaaggtactaataatggacaaacttactgtaaagataatgtctcattcttgcaagatggctgatatcactgatgaaggcgtttcattggttgaagacatattcaagcgaaggcaaccattgcccaccatggatgctatatacttcatccagccaaccagagagaattggcagtattattatgtttttgtccgacatgtctggaaggaaacccttgtacaggaaggcctttgttttctttagttcacctattgccagagaattggttatggaaattaaaaaagatgcacaggtgttgcctcgtataggtgctctgagagagatgaacttggagtattttaccatagacagtcagggcttcattacaaacaatgagagagctttagtggagctatttggggatgaggagaataatcgtaaagctgttgcatgtttaaatgtgatggctactcggattgcaacactttttgcttcattaagagaatttccttttgtccgctttcgtgctgccaagtccctagatgcaaccacaatgactaccttccatgatcttattcctacaaaacttgctgctggtgtctgggactgtcttatgaaatataaaaaaactgtacctaatttccctcagactgagtcctgcgagttgctcatcattgatagaactattgatcagattgctcctgtgatacatgaatggacatatgatgccatgtgccgtgatttgttgaatatggagggaaataaatatgttcatgaggttcctagcaagactggtggtccacctgagcgaaaagaggttcttttggaggatcatgatcctatatggcttgaacttcgtcatgcacatattgcagatgctagtgaacggctgcatgagaagatgaccaacttcatttcaaagaataaagctgcacaaatccaacatggttcaagaggtagtggtgaaatgtcgacaagggacttacaaaagatggttcaagcacttccacaatacagtgaacaaattgacaagctctccctccatgtagagattgcaggaaaaattaacagaatcattagggagtcaggacttcgggaacttgggaagctagagcaagatcttgtttttggagatgcagggatgaaagatgtgatcaaattttttactacaaacgaagatacaactcgtgaaaataagttgcgcttgttaatgattcttgcgtccatatatcctgagaaatttgaggctgaaaagggtctgaatttaatgaaggtagcgaagttgacagatgaggatgcaattgcaataaataatttgagaatgcttgggggagaacctgataccaaaacgacttcgacgagttcttttgctcttaanattgatatgcaca

SEQ ID NO: 11939 - DNA, 778 bp, Glycine max
ggagggagggagttgtagagaggcgcatgatagcagaatgagttggcgttagggggtggagcccaccgacggttcagcgacatgcggttccggctcgggacaggacctcgtcctctatcggtccactccgcttctgcgaaatttcttcgtctctgtctctgaccccttaacgccttctcgattccgaactccttcaaccctttgtaccattcaacacgccatcgtcatgctcccttcaactctcgctaaataacaatgccaccataaattcactcctccttcttcctcttcttttgatttttgttgattggttcaaattgaagataccctttccatttctctctcgtttctcgtcttcgtagcttgatcaggttttccgattcgtcggcgatctctctctccattcgcgatcgatcaccggttggaggttttggggcacagagaccgaggtcgccgccatgtcaatgtcggattccgattcctcctcctcctcttatggcgctgaatacaagagtctcaaacaagttagccgcgaccgattattacatgaaatgcttaggtcagcgaaaacaggagattcaaaatctacatggaaggtataagatgctgaattctgcctgagtttttctgcttcaccataaatacagatggaccatccttctgtctattttggcctcagtctgtaatttcattctaggaattttttagaagaaatttcattttatgatgctgatgattggacataggacatatttagcaaatctttccaatatgcacc

SEQ ID NO: 11940 - DNA, 527 bp, Glycine max
atttataccagattcgttgccacacccctaggttttctccctcttcatctctcccaatttctctcatcaaagtttcaacctttgataagattgaatcatggggaacgccctgagattcctctacagccattgctgcaagcccacagcagctggtgattctgaatcacttggaccacacggtgtttcctctgccaccgttggtgtttcaacacttgcccatgatctctttcactttgacatcacctcccaggtcccggaaggactcagcaagcatgttgtgtcttctaagaaggctcaggctaattggtatagaaagttagtagatgcttggaaagaggcaaaacctcctcctaagacacctgaagaagcagctagacttgtcattcagaccttgagaagacatcaaaaagcagatgttgagggattgttggctttctatggtcttcctctaccacacacactggttcaaggaactacccaacccctttcatccttgcctgatggagttcaatttgaaatgcacacct

SEQ ID NO: 11941 - DNA, 673 bp, Glycine max
aaaatttccaaaaagtaatagggacttacagattctttagccattttttaatcatgtttgctgggttatgtaattttcaggttaaaatcatatgagattcttaagagctacaaacctagggcaagcatctttcccagtgttcttgattatacagtttgtccttacacatggcctttctgtcgtcagccactctatgcaggtgccatgcctgtcatcttcaatgccaccattttgaatggaatgggtgttgtcggatatgttgatagtccaccaacatggcatccttctgatgaagaagggaatcttctaagcatacattttacttattctgagatcatctggccttggactggttatttggcccttcacatgcaaatcaaggaagaaggtgcacagttttctggaaagattgaaggtaatgtgactctcagggtttctagccccccggctcatggagagaaggaccctcgaattagcatatgtgtgcttcaattaaagttaaatgtggtgccaacaccaccacggtcaaaacgaattttgtgggatcagtttcacaatatcaaatacccacctggttatattcccagagattccttggatgttcgtaatgacattcttgactggcatggggatcatctgcatacaaattttcacatcatgttcaacatgttac

SEQ ID NO: 11942 - DNA, 477 bp, Glycine max
  unsure (1)..(477): unsure at all n locations
caagatcattgatcctcgtctcaagaaccaatattcacttggtgctgctcgaaaagtagccaaattggcagataactgcttgaagaagaatcctgaagatagaccatccatgagtcagatagtggaaagcttgaagcaagcattgcaggattcagaaaccaatacacttagctcaatatgacttctaaatccactgaatctaaattggtcccgagtggtaaataggtgcagcttgagaataatttttgtaattagtttgattcatcaccacaaagccaagtcctatactgtcttcagtatggttttgtttggagaaacttttctataagcacttatagaagactataagaataaaatagattgagtttctcacaattgataaagtaaggtgtaagatgattttagcttttagaagtaactcaattcattttatntatttttccccctcttattaatgcttaaggaaaaatttatccc

SEQ ID NO: 11943 - DNA, 577 bp, Glycine max
cgagatttcaaatcttcaaacgttctattagatgcggatttccacccaaagctctcagatttcggtctagctagagaaggacctcagggtgatcagactcatgtatctactgcggtagttggaacacagggttatgctgcaccagagtacattgaaacgggccacctgaacgttcagagtgacatgtggagttttggtgtagtactatatgagatcctcacaggaaggaggtcattggaaagacaccgtcccacagcagaacaaaagcttctagattgggtcaaacaataccctgccgacaccagcagattcgtcatcataatggacgctcgtctcagaaaccagtattctcttcctgcagctcgcaaaatagctaagttggctgatagctgcttgaagaagaatccagaagatagaccctccatgagtcagatagtggaaagcttgaagcaagcattgcaatattcagacactacttctcaggacattgctgaatcctcctcctcatctcgttctaaattggtccgaaaaaagtaaatatggagctttttttttttttgaaggacttgtgggaaat

SEQ ID NO: 11944 - DNA, 462 bp, Glycine max
taatagggatgcagctaagaaaagcaggcttaggataaaagcctatgttcaacaactagagtcgagtaggattaggctgaatcagctggaacaagagctacaacgtgctacaactcagggcatgttcttgggtggaggtgcactcttgggtggagagcaaggacttcctgtcactatgaataccattagcacggaggctgcaatgtttgacgtagaatatgctagatggcaagaggagaaccaccgcatactgtgtgagctaagagctgcagtgcaagagcaccttcctgagaacgagcttagactgtttgttgacaattgtttggcgcattatgaccaagtgatgaacctcaagagcttagtggccaaaacagatgtgttccatcttggctctggcatgtggtagaccccagctgaacgttgctctatgtggatagatggattcaggccatctgaactcat

SEQ ID NO: 11945 - DNA, 512 bp, Glycine max
ggttttctttcctagaccaaactctcaaccgcttggactacctgccaacttcacctccttgtctcatcttctcttctcttccttttttgtgtctcaattcttgaaagtgagagataatcatcatggtggagtgattcttgctcagtttggaagctacaaaaagaaagaaaacatgggttctgcttcaagagttgaaagtagcaactacgattactcctttaaggttttgttgattggtgattctggtgttggcaagagtagtcttcttctcagctttatctccaactctaactccatcaatgacctctcccccactattggtgtggatttcaagataaagctttttacagttggtggtaaaagattgaagcttactatttgggatacagctggacaagagaggtttggaacagtaataagttcttattatagaggcgcacatggaatcattcttgtctatgatgtgacacgacgtgagacatttacaaacctcatcgatatatgggcaaaag

SEQ ID NO: 11946 - DNA, 1171 bp, Glycine max
gagacctctctgttttttgttcaaaagcatataagagatggggttagaagggaaggaaacgccgtcgtttatgagggattttctcgataagtgtggtggctgcgccgttattgacggtggttttgccactgaacttgaaaggcatggggcggacctcaatgacgaactctggagtgccaaatgccttattagctccccacatcttgtccgaagggttcacctagattacctcgatgcaggagcaaacataatattaacagcatcttatcaggccactattcaaggttttgaggccaaagggttctctagagaagaaggtgaaactatgcttagaagaagtgtggagattgcacgtgaggcacgagaaatttattatgataggtgcaccaaagattcttctgactttatgagagatgaaagatataggaaacgtcccattttaattgcagcttctgtgggaagctatggagcgtatttggctgatggctctgaatatgttggggactatggtgatgcagttactgtccagacactgaaagattttcacagggaaagagtaaagattcttgttgaggctggtgctgacttaatagcctttgaaacaattccaaataagctggaggcacaggcttatgctgaacttctcgaggaagaaggcatagaaactcctgcgtggttttcttttagttgtaaggaatgaaagcaatgtggttagtggtgactctatctttgaatgcgcttcaatagctgattcatgcagacaagttgttgcggttggagttaattgtactgctcctagatttattcatgggattggatttcaatttaatcaagaaagggcaacaaagtaaaccaaggtacttggtataatcccaacaagtggggagaccttatatcgctgagagcaaccaatggggtgaaaatcaagtggggccaccagagcatgattttgtcctcctacataggcaagtggcgtgatgctggggcttccctttttggtggctgctgcaggactactcctaatactataagaggcatagcagaggcaacatatgggaaacttaaagacaaatgtatataactgttgaagtgtgtttttatctgtaatggaagaaactataataatctgaatgaaatggctaactttttgccggaggagcaagtgatcaaa

SEQ ID NO: 11947 - DNA, 357 bp, Glycine max
atcaggttcaaaagcatataagagatggggttagaagggaaggaaacgccgtcgtttatgagggattttctcgataagtgtggtggctgcgccgttattgacggtggttttgccactgaacttgaaaggcatggggcggacctcaatgacgaactctggagtgccaaatgccttattagctccccacatcttgtccgaagggttcacctagattacctcgatgcaggagcaaacataatattaacagcatcttatcaggccactatcctaggttttgtttttttcatccctacaactctacattttaattttgccgtctttttggggttggggtgcaggccactattcaaggttttg

SEQ ID NO: 11948 - DNA, 1592 bp, Glycine max
agcaggcctcaagtcctctgcatttgaacaaaatttcaatacaaaagtcctgtccgcggtgaagaaattgactaaaaaatctccccctgatattgtgctgtacgtggatcgcctggacctgcaaactagagatatgaatgatctgccaatgttaagatcaattaccagtgtcctgggttcatcaatatggcgaaatgtcatagtcactctgacccatgctgcctctgctcctccagacgggccatcaggtgccccattgagttatgatgtatttgttgctcaaagatctcacatagttcaacaaaccattggacaagctgggtggggacctacgtcttatgaatccgagcttaatgaatccagtttctcttgttgaaaaccatccttcttgtcgaaaaaatagagatggccagaaggtgcttcctaatggtcaaagttggagacctctcttgttgctcttatgcttctcaatgaagattctctctgatgctagtaactctacaaaaactcaagaatcatttgaccaccgcaggctgtttggttttcgtccccgctccccaccacttccatacttgttatcttcgttattgcagacacatacatacccaaaactccctgcagatcaaagtgggcctgacaatggtgattctgatgttcaaatggctgatttatctgattctgatctagatgaagatgaggatgagtatgaccagctcccaccatttaagcctatgaagaaatctcaggttgctaagcttactaaagaacagcagaaagcatattttgatgagtacgattatcgggtgaaacttctacagaaaaagcaatggagagaggagttgagaaggatgagagagatgaagaaaaaaggtaacacaaaagaaaatgactatggttacatggaagaagatgatcaagagaatggaagtccagcagcagtgccagttccattgcctgatatggccatgccaccatcctttgacagtgacaatccagcctatagataccgtttcttagagccaacttctcagctcctgacaaggccagtcttagacagccatgggtgggatcatgattgtggttatgatggtgtaaacattgaacagagtctagctatcatcaataaattcccagcagctgtcactgttcacgtaacaaaggataagaaagacttcaccatccagttggattcctcagttgctgcaaaacttggagagaatggatcagccatggcaggctttgacattcaaagcgttggaaagcagctagcttacagtgttagaggagagaccaaattgaaaaatttcaaaagaaataaaacttctgctggtgtgtctgtgacattttttggtgaaaatgtgtctactgggctgaaagttgaggatcagattgctgtcgggaaacgcgtggtattagtaggtagcacaggggttgtgaagtctcaaactgattctgcttatggtgccaatgttgaagtgcggcttagagaggcagattttccaattggccaggaccagtcttcactgagcctttctcttgtgaagtggagaggagacctggctttgggggctaatcttcagtcccaattttct

SEQ ID NO: 11949 - DNA, 1112 bp, Glycine max
ggacagaaaggtggcagtggaaaaacaaagaaagcaaggacgggttgaggaatactaaattttctccattactgcatagattatctagtaaggctcttcaaaggccatttaagaaagcagcgtgttacagatgcttctattgcttctgaaaatggtgatgcatctagtgatagtgacaaggaacaaagtttgacggcatattattccgctgcaatggcttttagtgatacaccagaggaaaggaagagacgtgaaaatcgttctaagcgatttgatttaggacaagggtatcgaacagaaaataatcactcgaggaaaaaacacgctggggctggaagcttttacaatagaagggctagtgccttggtgctgagcaagagctttgaagatggtgccagcaaagctgttgaggatattgactgggatgctctaactgtgaagggtacttgccaggaaattgaaaagcgttacctgcgcctaacttctgcacctgatcctgccactgtaagacctgaagaggttcttgaaaaagcactattgatgattcaaaattcccagaagaattacctctataaatgcgaccagttaaagtctattcgccaagacctaactgttcaacgaatacgcaatcaattaacagtcaaggtgtatgaaacacatgcccgattggcactggaatttggggacctgtttgagtataatcagtgccaatctcagttgcaaactctttatgccgaaggcattgaggggtctgatatggaatttgccgcttacaacttgctttgtgtcataatgcattcaaataataacagagatcttgtatcatcaatggccaaggttatctcacgaagcaaagaaggatgaagctgtaaaacatgcccttgccgttcgtgctgctgtaacttcaggaaattatattgcattctttagactgtacaaagcagctcctaacttaaacacctgccttatggatctctatgttgaaaagatgcgctataaggctgtgaactgcatgtgccggtcatatcgtccaactctacctgtttcatacatttctcaggttcttgggttttcaactggcgtggccacacatggagtgagcgatgagagag

SEQ ID NO: 11950 - DNA, 681 bp, Glycine max
agcacaaacaccaaaccctacaaccaacaacaaccctccaaacaccatcaccccagcttccttccccaacttctccgcagatctcttgtcgaattcgagtttttcatcgacttcgtcggaggaaacaacgacgatggggggagggggaatgaggcgcaagaggaagaggaagtggaaggacttctttgagaggctgatgaaggaggtgatagagaagcaggaggggctgcaaaggaggttcttggaggccattgagaaaagagaacaagagcgtgtggtgagagaggaagcgtggagaatgcaagagatgcaaaggatcaacagggaaagggagattctaccacaggacacgtccattgccgcagcaaaagatgctgctgtcatgacatttttgcaaaagatagccgaacatcagcaacaagaaactatcaatcttgaaccagcattgaataacaacagcatcactgttgttccacagcaaccagtgcccccagcaactccaacatcaactccaacaccacaacaagcacaaacaacaacagttcctgaggccccacaagtacagccattggtcccacaactacaacaacaacaacaaatagtggtgagtaatgtggaaatcaacaaagctgataataacggtgagaatttgatgatggaagcaagctcttcaaggtggcc

SEQ ID NO: 11951 - DNA, 981 bp, Glycine max
  unsure (1)..(981): unsure at all n locations
ctcaatttcatgaagcgcaaagaacagcttcagaggcatatgaggaaatgtgatcttaagcatccccctggtgatgagatatacagaagtggtacactgtcaatgtttgaggtcgatggcaaaaagaacaaggtttatgggcagaacctttgttatttggccaagttatttcttgatcacaagaccctctattatgatgtagacctgtttctgttctatgttttatgtgaatgtgatgatcgaggttgtcacatggttggctatttctccaaggaaaaacattctgaggaatcttacaatttggcatgtatcctcaccctaccaccttaccaaaggaaaggctatggcaaatttctaattgcattctcatatgagctgtccaaaaaggagggcaaagttggcacacctgaaagacccctttcggaccttggactgctaagctacagaggatattggaccagggttctcttagacattctgaagaagcacaagggaaacatttctatcaaggaactgagtgatatgactgccattaaagctgaagacatattaaccactcttcagagcctagaattgattcaatacaggaaaggccagcatgttatttgtgcagatcccaaagtgttggatcgccatcttaaagctgctggcaggggtggcctcgaagttgatgttagcaaattgatctggactccttataaagaacaaagttgataatcaaatattcatcaaagaaatactatcatgatgtaacttgttcttttgtgtataaagtatataggctaggtatcttagacaaatcctttgatgtattagtattaactaataagattcaatacattttagatgagaataggaacacaactgattgttttatgtgctgaaccgtagccttaggtatatgtttaagatggtgtcttcngttctaatgatgaatgccaagaggaaacattttgtttatctggggctatgtatgttaat

SEQ ID NO: 11952 - DNA, 575 bp, Glycine max
atactgttccctgttgactgaacctatcccatctctctcgccctttcttttctcatcttttagtaaaagggttatctcctagtttcatttttctcttgtttccaccatttttctaaggtgaccttggaactggtttaattcaaagacacttattccatttgacattagaggccgtgttcgaatacttcatcctccagttatgacttgtttcccattctcatttggtaagaaagtgcgctttgtggcaacacatgatccagatattgatgaagtactctcaggcattcaaaatgtaagaatctatacctacaaagaactaaaagttgcctctgacaatttcagtccggccaataaaattgggcagggtggatttggttcagtttataagggactgctaaaagatgggaaagtagctgccataaaagtactttcagcagaatcaagtcaaggggtaaaggaatttatgacagagattaatgtaatctcagaaatagagcatgaaaatttggttcagctatatggttgttgtgtggaagggaatcaacggattttggtctacaattatcttgagaaca

SEQ ID NO: 11953 - DNA, 652 bp, Glycine max
gttcaaaccactcagcttcgtcttcataccacaacacagagacatgttcccatcatcatctcccacctcactccacaccccaatccttcacccccgttactgtcaccaccctacaccgtcccgcacccagttctcccctctcgccctcccacccttccgccgcaccctctccttcctcgcccctccgccgctcctcccggccgcgcccgccctccccgccgcctccgccgcgaagcccgacaagtccggcgagcagaagtgggtcctcgagggtctcgtcatggagtccctcccgaacggcatgttccgcgtgcgcctggacaacgaggacttgatcctcggctacatctccggcaaaatccgcaagaactacgttcggatcctccccggcgatagagtcaaggtcgaggtcacccgctacgactcctccaaaggacgcatcgtttacaggctccgcagcagcaccccctcctaatgtttgtcaaaattactcacacagcaacaacgtataggaacaatccagtttcactgtatcgttcttgtataaaaaaattactaaaaacagaatgataatgcttcacgctgcaatttggcgcaatttatttcagtttacgtttcttcttttgagtcatcttgtcttattggtagttgt

SEQ ID NO: 11954 - DNA, 897 bp, Glycine max
cttactcgtacgattgcttttagcatttgttatagtattatgaaacatgacatcagcaagcagacacaatacaagagttatattatttgtaaaccgtgcttctcacagtccaagtgaattattcagagtcatatatagttaactaaacaagctctttgcttgagttattaagacctggaactgaaaggaaagcactgcatttctattttttaaaaatctggatatccctccaacgagattccatgtagttggaagcaccatcctgtgcgtaaaccccaaacttgaagtagtgagtgctggctccacggccaggtccattgtacctgggattatcctccccattaagaaaaatcttcacattgttggcacccacatcatggatcacgttaaaccggatccacctattatagatgtttggttccagagtaggtgattggtaatgagtgagagaaccaccatagaccctagtctgcgaggttgtggcagaagttactccaccaaacacttgctggatgcacaccccgcttgtgccactaggcacgtaaaaaaacccttgaaattgccacacaccggatgtataatcgtatccagcgatacgaatctcagttcgtggcttcgtattgctgccttgcatatgaggcttgtccgtggagtatacccaaaatctgtgcactccatttgaaaagctgtagcgctcgttgactgcaacgtcgtaaggcttttggatttgcaagtttgagctactagataatccaagaggggtgaagccaaatgtgggatcggcggcatcgaccaaggaaagagtggtcagagagattattaatgacaaaagggttagatgcaaaatgggttgcggcaccattgttgcagttccactcgagccgaatcggctcgaga

SEQ ID NO: 11955 - DNA, 2429 bp, Glycine max
agcgcttcgatgagttggccattgatgcaaagctccccaagactcgctttagccagtgcatagggatgaacgaatcgaaggagtttgccggtgagttattcgatgcattagctcgtcgtcgagggataacatcagcttccataacgaaggatcagttgcgtgaattttgggagcaaattacagaccagagttttgattcacggcttcagaccttttttgacatggtggacaaagatgccgatggacgaattaatgaagaagaagtaaaagagattatcaccttaagcgcttcagccaataagctgtcaaaattaaaagatcgtgcagaggaatatgctgcccttatcatggaggaactggatccggacaaccttggatacattgagttatacaacttggaaatgcttcttctgcaagccccagcacaatcaacccacataaccacagatagcagggtactgagccaaatgctaagccagaaactagtcccaaccaaagattacaaccccatcaagcgtggcttccggtcactggcttactttgtggaggacaattggaaacggatctgggttattgtcctctggctttcaatctgtgctgcccttttcacttggaagttcatccaatacaagcaccgtgccgtgttcgacgtcatgggctattgtgtcacttcagccaagggcggtgctgaaacaaccaagttcaacatggccttgatcttgttgcctgtctgcagaaacaccattacttggctcaggagcaggaccaaactaggagccatcattccctttgacgacaacatcaactttcacaaggtgatagcttttggcattgcaattggggttggattgcatgcgatttcacatctgacgtgtgacttcccaaggttgttacatgcgacggacgaagaatacgagcccatgaaacaattttttggagatgagaggcccaacaattattggtggttcgtgaaagggactgagggttggaccggggtggtgatggtggtgcttatggctatagcctacactttggctcaaccttggttccgaaggaacaggctaaaactccccaaacccctcaagaagctcactggtttcaatgccttttggtactcccaccatctttttgtcatcgtctatgggcttttcatcgttcacggttactacttgtacctcaccaagaaatggtacaagaaaacgacttggatgtatcttgcaattcctatgatactatacgcatgcgagcgattacttcgtgcttttaggtctggatacaaaagtgtcaagattttgaaggttgcagtgtaccctggaaatgtcttggccttgcacatgtctaaaccacaaggatttaagtactctagtggacagtatatttttgttaattgcccagatgtctctccttttcaatggcatcctttctctattacatcagccccaggagatgactatgtaagcgttcacattaggactttgggtgattggacatcacaactgaaggctgtttttgctaaggcatgtcaaccagcaagtggtgaccagagtggtcttctacgagctgatatgttacaaggcaacaacataccaaggatgccaaagctcgtgatcgatggtccttatggagctccagcacaagactacaaaaactacgaagtaatccttctcgtgggactaggaattggtgccacccctttgattagtattctcaaagatgtgctaaacaacatgaaacaacagaaagacatagaagaagggatggtagaaagtggagtcaagaacaagaggaaaccttttgccaccaaccgcgcctatttctactgggttactcgtgagcaaggttcctttgaatggttcaagggtgtgatggatgatgttgccgagtatgacaaggatggaataatagaacttcacaactattgcacaagtgtgtatgaagaaggagatgctcgatctgctttgatcactatgcttcaatcgctccaccatgccaaaagtggcgttgatatagtttcagggacaagggtcaagacacactttgctagaccaaattggcgcagtgttttcaaacacactgcactcaaacaccctgggaaaagagttggtgttttctactgtggggcgcacacattggttggagaacttaagaggctttctcttgacttttccaggaaaaccaacaccaagtttgattttcataaagagaatttttaaattcttttatcatagttcgtatttttttttccaactgtaacgtatgtagttgagggaaagtttctagttatatatagtttgttggggtttttttctttggtactagagctaggtagataagcagctagctgcattcaattagagttgtatacatgtataaaaaaattcattttgatataaatgaaatggttacgttgttaacaataagcataccat

SEQ ID NO: 11956 - DNA, 558 bp, Glycine max
tctttcttcgtccgcggacgcgtgggtttgatcacaatgcttcagtctcttcaccatgccaaaaatggtgtggatatagtttcagggacaagggtgaagactcattttgcaagacccaactggcgcaatgtctttaaacatgcagccatcaaacaccctgaccaaagagttggtgttttctactgtggggcgcatggattggttggggaactgaaaaagctttctttagacttttccaggaaaaccagcaccaagtttgattttcacaaagaaaatttttagattcttttctcagtttatttattattatttttggcaactgtagttatatatagttggatcattttttgttgtagtgggtggtatatagctagctgcatttgatacatggaacttacatgtatcaaaaaattgtagtccctttcaagtaatgtgaaatcgtgatgttgtacgctttcatactatcatcagttcaaatgattattgtaattgatttgtaaaatatcaaacttcgtagtttccctaataacagtaaataatagtacttgtttttgaagt

SEQ ID NO: 11957 - DNA, 394 bp, Glycine max
cggacgcgtgggcggacgcgtgggaagacttctagacagatggggtggtcttctacgagctgataggttacaaggcaacaacataccaaggatgccaaagctcgtgatcgatggtccttatggagctccagcacaagactacaaaaactacgaagtaatccttctcgtgggactaggaattggtgccacccctttgattagtattctcaaagatgttgctaaacaacatgaaacaacagaatgacatagaagaagggatggtagaaagtggagtcaagaacaagaggaaaccttttgccaccaaccgcgcctatttctactgggttactcgtgagcaaggttcctttgaatggttcaagggtgtgatggatgatgttgccgagtatgacaagga

SEQ ID NO: 11958 - DNA, 619 bp, Glycine max
gtggtcttctacgagctgatatgctacaaggcaacaacaaaccaagaatgccaaggctattaatcgatggaccttatggagctccagcacaggactacaaaaattatgatgtaatccttctggtggggctaggaattggtgccacccctttgataagcatactcaaagacgtgctaaacaacatcaagcaacataaagatgtagaagaaggagaggtggaaaaggacaagagaaaaccttttgccactaagcgagcttatttctactgggttacccgtgagggaaggttcctttgaatggtttaaaggggtgatgaatgaggtggaagagaatgacaaggaaggagttattgaacttcacaactattgcacaagtgtgtacgaagaaggagatgctcggtctgctttgatcactatgcttcagtcgctccaccatgccaaaagtggcgttgatatagtttcagggacaagggtcaagacacactttgctagaccaaattggcgcagtgttttcaaacacactgcactcaaacaccctgggaaaagagttggtaagtactgatgttgctcttgattcatttttcaaattcattataccatcatatatatatatatatatg

SEQ ID NO: 11959 - DNA, 395 bp, Glycine max
  unsure (1)..(395): unsure at all n locations
cttttcacttggaagttcattcaatacaagcaccgtgccgtgttcgacgtcatgggctattgtgtcacttcatccaaaggtgctgctgaaaccctcaagttcaacatggccttaatcctgttacccgtttgcagaaacaccataacttggctcagaagtaagaccaagttaggcatggctgttccttttgatgacaacatcaactttcacaaggtgatagcttttggcattgcaattggggttgggatacatgcaattgcacatttaacgtgtgacttcccaaggttgttccacacaacatacgatccgcatnancncatgaanccattttttggagaatatangnacaacaatgactggtggttcgggaaaggaaccgagggttgtaccgggat

SEQ ID NO: 11960 - DNA, 373 bp, Glycine max
cccacgcgtccgacaacccatcggtgaaattcaaaagccccgtatgcgtgacgcgcccactctcctcacagcgcgtaaacgacgacgtcgtcgtcgtcttcttattactactcctcaacgacagcttcccagcctgcgttttcttaaccgttcgatccgccgtcaagtcaacggaacagtcaatgtcttcaatcactataattgaacggctcgtcgtttggatcagtaatgagcgtaactcggagttatcagagactttggttagttccaagtcgtaaacgtcgtaacagagaaaattcgccattgccggtattaagctcgaattacccgagcccgggtggccgtggagtaaatacccacgcttccaggcccc

SEQ ID NO: 11961 - DNA, 958 bp, Glycine max
gtaacttcttgttgcttttcacttatagttaacaactttcatcactaccattacgtgcattacagatccatcattcatcccaagttggtggaaggcgttggcttcgatctttttgatatggttttagagtttgaatatcaagaagaatacaggaggaactcaaggggagtgcaactcttcacttgcaaatggttgcctttctcttctccgaagggcctggttttcctttgccatggttatggtatggaatgcagtggcttcatgagagaatgtggtgtacggctagcgtgtgccaaatatgctgtgttcggtatggattatgaagggcatggacgttctgaaggtgctcgttgttacataaaaaaatttgataacatcgttaacgattgttatgactttttcaagtcagtcagcggtatggatccaaataatttaaattctcaactctattgaaacctgagatattttggcaaaactttatggctcataattcatttgcatatttcagagcttgcagagtataaggcaaaggctagattcttgtatggagagtccatgggaggagcagtgagccttcttttacataggaaggacccttcattctgggacggtgcagttctcgccgcacccatgtgtaaggtatgaactactaataataataaaatttttcaacaatattgttagtctaggaaaatgaatcatactaatggaatacaaataattcgagtaactctattaattccattaattgaataggcactttttcctacgtaaaaattaaacatggcttattcaaatgttgaaacactaagccagatatcagagaaggtgaagccacacccggtggtggtcaacatattacctaaggtcgaggatttaatcccaaaggggaacatagtccccacaaaggatgtcatcgattcagcctttaaagaccctgctaaacgagagagggtga

SEQ ID NO: 11962 - DNA, 443 bp, Glycine max
cttcactaaatctgagtgatgtattagagatagccttctaaaggctgctcgtgcacattggaagaattttgcacatctactgttatattgtttcaattgttataacctttttgttagcttatcttacaatgttgtgtactgaccaatttacctttttttttcctggggctttattctgaagccgaatgcaacgctagggatggttcttgattctgcagaaaaggttatttcagaagttgtgcaagagccggtgataaggagattgagactatcatcgacagtgtgagatatcagtagcaatatctggaagtggcaatctttcagtggagaaagaagagagccagcattttgggtaagtacttatttaaatggctggccttcatttctctatgtttttcaggcttgcttgatcattcaagcttgcaaattgggactgatccgaa

SEQ ID NO: 11963 - DNA, 1044 bp, Glycine max
cttcaaggctgtgtgcacattgtgctttctttatgggtttgcagaggaaacagggagaggttggtcaagaaggtcagcaatttgatatacgagggacagttgaagaatttcggcattctgttaatatgtacatgttctggaaaccggggatggagatttatgtttctcatgttcgtagaaggcaaattccattctatgttgttcctgatggttataaacgatctcggctatcaaggccaacatcacaagttgagaattgcaaatcatttcataatgaggtttcggggactgaacatgttgagagaatccgtaagaggaagaacaatgatggtgtggatgtgagggaggatgctatagttaaaaggcaatatgcttgtcctcctggggatagattggcaagacgcatcagccttggtactggtggtttgtctgttgaagctgtatctgatagtcaagagttgagaagtgtggagtgcaatcatttgtcaaacagtgggcaagatgatttggatagaacagagtctcctgaagctgcttcaaattctagtgtgattacatctgttggttcttctgaagatattgtatctgtgtcagtggctggttgtgttgagaactccaggggtgttgaaatgatgaacaatggaaggtttgaggatactacttatgggaatgattctgtcacactggtgaaaaatatagtggccagtggaaatgaagtgtttcagcatgagctacagcagcagttgcagccgaatgcaatgctagggatggttcttgattctgcagaaaaggttctctcagaagctgtgcaagagccggtgataaggagattgagtctaccatcgacagtttagatatcagtggcaatgtctggaagtggcaattgttcaagtggagaaagaagagagccagcaatttgggtaagtactaatttaaatggctggctttcatttctctatttttttcaggcttgcttgatcgttcaagcatgcaaattggaactgatctgcatcaggctgaagagttggagctgagatttgtcag

SEQ ID NO: 11964 - DNA, 424 bp, Glycine max
cccacgcgtccgcccacgcgtccgatatatttatcttttcttggaagaaggaatccatagaatggcaatgcacaagagcagttcaggttcagcattgggtccgggaggcttggacttaactcaagccttcttcaagtcgatcatgaacgctgcagcttcttctcccaccaaacgccacaacaaaatctctgttgttggggcaggcaacgtgggaatggccatagcccaaaccatcctcactcaggatctcaccgacgagcttgtgctcgtggatgcaattcctgacaaactccgcggcgagatgcttgacctccagcacgccgctgccttcctcccccgcaccagaattcaggcctccaccgattactcggtcacgctgggctctgacctttgcattgtcacagccgtagctcgtcaaattaac

SEQ ID NO: 11965 - DNA, 688 bp, Glycine max
ttcttccaaaagctccaacttctctacaggcccccttgatttctgatccactccctccctcaagccctgctaagggagatgcgtctaaggcattcccttttcaatttggatccattactcctggctttgttcgacgtagtggacgacgctgccgccaagatgtccaaatcaaacggcggcgccgtcgccgccaacaacctcattaaccggtggaacgggaagccttattcgcagaggtaccacgacattttggagaagaggaaaaccctaccggtgtggcaccagaaggaggagttcttgcaggctttgaaggataaccagactctcattctcgttggcgaaaccggtagcggcaaaaccactcagattcctcagtttgttttggaagctgtggatatagaaaccactgataaacgtaggaagatgatgattgcgtgtactcagcctcgtagagtggctgcaatgtctgtttccaggcgtgtggctgaggagatggatgtgagtattggagaagaggttggttggctacagcatcagatttgaggattgcagtagtgccaggacacttttgaagtatctcactgatggtatgcctccgagagaggcattgacggatccgcttttggagcgatacagagttattattctggacgaagcacacgagaggactttggctactgatgtgcta

SEQ ID NO: 11966 - DNA, 292 bp, Glycine max
ggtctgccgatttattaattacggaatttgcgatcacgatattaatagtagggttttgatgggtacggagcggaagaggaaggtgagcttgttcgacgtagtggcacgacgctgccgccaagatgtccaaatcaaacggcggcgccgtcgccgccaacaaccgcattaaccggtggaacgggaagccttattcgcagaggtaccacgacattttggagaagaggaaaaccctaccggtgtggcaccagaaggaggagttcttgcaggctttgaaggataaccagactctcat

SEQ ID NO: 11967 - DNA, 687 bp, Glycine max
gaaccgattgaaagtgcagagagagagagagagaaccgacaagcaaacgaaaagtaaatcaatcaatcgttggaatctctcaacttatcgcttcttcctggtttgaatttgggggtttccgtttcaatggacgacggcgagttggatttctcgaaccatgaagtgttttcgagtccgaacatggggtgagcttccgagcagcggttcaatggacagtttcttcgacgagcttctcaaggacacgcacgcgtgcacccacacccacacctgtaaccctcccggccccgatttctcccacactcacacgtgctaccatgtccacaccaaaatcgtccccgcccctgaggaggaccatgtcgccaccgatgacaccgccgagtccgccgagaagaagtcgtcgtcgtcgaagaagcggtctctggggaacaaagaggccgtccggaagtaccgcgagaagaagaaggcgcgtgcggcgtcgctggaggacgaggttgtgaagttgacggctctgaaccagcacttgatgaagaagctgaaggggcaggcggctctcgaggccgaaatcgcgaggctcaagtgtttgttggttgacataagggggaggattgaaggggaaattgggtcctttccctatcagaaaccaacgccgactgcgccccctccggtggctggttcttatgtgatgaa

SEQ ID NO: 11968 - DNA, 309 bp, Glycine max
gtggacccagaataaggagaagaggtagaggtcttggccctacgcgaattatcatcgtagaacaatcagacattcacacattctcgatcacatgtaagtctgagactagaagaatacgtataaattagaaccgattgaaagtaatcaatccgtggattctctgaacttatcgcttcttcccggtttgaatttgggtgtttccgtttcaatggatgacggcgagcttgatttctccaaccatgaagtgttttcgagtcccaacatgggtgagcttcccagcagcggttcaatggacagtttcttcgacga

SEQ ID NO: 11969 - DNA, 1017 bp, Glycine max
ggtgttgctgcggctcgcgatcttcgggctctgcctcgcgttggggtacgtggcgacgaaggtggcgctgcatgggtggaaggacaaggagaatcctatgcccaagtggaggtgtagggttatgtggatcacgcgcttgcgcgccagatgtattctcttctcctttggctatcagtggataaaacggaaaggaaaacctgcaccaagggaaattgctccaataattgtatgtaaccatgtttcttacattgagcctatcttctatttctatgaattatttcccaccattgtggcagctgagtcccatgactccataccttttgttggcaccattattagagcaatgcaggtcatatatgttaacagattcttaccatcatcaaggaagcaggctgttagggaaataaagaaatctgctttcaaggaactgaataacagagaagggcctcttgtgataaatttcctcgagtactattatttcccgagggaacaacaactaatggcaggaaccttatctccttccaacttggtgcatttatccctggatacccaatccagcctgtaattatacgctatcctcatgtacactttgaccaatcctggggtcatgtttctttgggaaagcttatgttcagaatgttcactcaatttcacaacttttttgaggtagaatatcttcctgtcatttatcccctggatgataaggaaactgctgtacattttcgggagaggactagccgtgctatcgcaactgcactaaatgctgtccagacaggacattcttatggagacataatgcttcatatgaaagcacaagaagcaaaacaggagaacccctcaagttttatggttgaaatgaccaaggtggaatcattatttcatatcagcagcacggaagctgtggactttctggataaattcttggccatgaatcctgatcccagtggatcgtgttcaatatcatgacttcttgagggtcttaagacttagggctcgcccactatctgcaaagatatt

SEQ ID NO: 11970 - DNA, 551 bp, Glycine max
ctgagtatccatcagccatacctccactaggtgttttttttgctgcagtggcacctcgtttacagcctcgttattattctatttcatcctctcctaggtttgctccgcaaagggtaccatgttacttgtgccttggtgtatggtccaactcccactggtagaattcacaaaggagtatgttcaacctggatgaagaatgctattcccttagaaaaaagtcccgactgttgctgggctcctatttttattaggccatcgaatttcaagctaccagttgatcattcaattcctattattatcggtggaacctggtactggtcttgcacctttcaggggatttttacaggaaagatttgccctcaaagaggctggtgttcaacaaggccctgcaatactcttctttggatgtaggaatcgtcgattggtaaattaattgatctttgtgctttagatccaaatgggttttcagagcaatttctgatttcccaatatgtttgtataggattttatttatgaggaggagctaaagaattttgtggaacaaggttctc

SEQ ID NO: 11971 - DNA, 489 bp, Glycine max
ctctgtctgtgtgagtttgtttcatttttgcgttatacctctcttaaagtgttcccgccagagagagagagagagagggggcaaggcaccgggaaaagtgccactaattgtgatgccgaatcccgaggctcaccacccctcccggtcccgggcccggccctccacgtcagccgcggcccgccccccggcccgggcccgcgtctccctccgccagcttctgcgcgtggcatcagtcgcgagcggcatccagttcgggtgggccttacagctctctctgctgacgccctacgttcagcagctggggatcccccaccaatgggccagcatcatctggctctgcggcccagtctccggcctcttcgtgcagcccctcgtcggccacatgagcgaccgctgcaccagccgctacggccgccgcaggcccttcatcctcgtcggcgccgtcgccatcgtcgccgctgttctcgtcatcgcttacgccgccgacat

SEQ ID NO: 11972 - DNA, 414 bp, Glycine max
  unsure (1)..(414): unsure at all n locations
tatgatttgaatcagcaactgacgcctgaactttacgtttgaacctgaggtggaactttgcataattcgaccttggaggcatacttccatatgtctgtcagtcataaggaacttcatttagaaatgtgattttgcttaattgtagttatgtattatcggcttaataattacaattgtggcacaacttaaggagtattttgcacctgacattcgctcatgcttttttgctgccctctcaaattgcatgcaagtaactgttgcatttaataaatgcatttgagttttggtgnnnnnnnnnnnnnnnnnnnnnnnnnnnnnnnnnnnnnnnnnnnnnnnnnnnnnnnnnnnnnnnnnnnnnnnnnnnnnnnnnnnnnnnnnnnnnnnnnnnnnnnnnnnnnnnnnnnnnnnnnnnnn

SEQ ID NO: 11973 - DNA, 786 bp, Glycine max
acgaggacccctccaggttccacaattgcaacctggaacctcaactaggacactccttcctatggttatgttccagaacatgtcccaaggtcctcctagctcacttttgcaggttgctgtaaaaaacaaccaacagcctgtgtggtattttaatgataaattctcattccatgtactttttactgaggatggtagaatggaacgttccgctttcttagagacttggaggtcccttcctgattcaaacgaggtttccaaggacttcccagacattgtgattggcggtgtggaagcgacactggatcgactagctgcatcaaacgtgttctttattgcaaagcgcaagaatgcaaaccaggatgtgttttacttctcagctaagattcctcgagggataccattattaattgaacttaccacgttggccggaaaccctggcgtcaaatgtgcaatcaagactccaagccctgaaatgtctgcacttttcttcgaagccattgagactcttctcatgggttaatgtgttttaaattttggtttttcttttagtttttgtttatatattgtttttgttagaatatttgataaatatcctggacaggtgtgttatatcttatttggaaaaaaaaaatccattgacttttgttgtccctggctgtatttcactactgccatttttgccgttattggcaccatggatgcagttgtgctcttgtagacagattttgttgaggttcgactgcttgtagtattacgttctttgtaaagtgattaaattgtgatgct

SEQ ID NO: 11974 - DNA, 877 bp, Glycine max
tttctctatataagtttgttctttcattttcaaaattttatcacatgctaacattattgttttcaatgtttcagaattgttttacaaaaatattggaggagtgtcttataaggctgatgtctatagctttggaatgcttttgatggaaatggcgagtaggagaaggaactcaaatcctcatgcagaacattcaagccaacattacttccccttttggatttatgatcaatttaaagaagagaaaaatattaacatgaacgatgcttctgaagaggacaacattctatctaaaaagatgttcatggttgcactttggtgtattcagttaaatccaagtgatcgtccttcaatgagtagggtagtggagatgcttgaagggaagattgaaagccttgaattgcctccaaggccttcttttcataaaaatcaaacatatgtacatgatgatgatgatatcgtctctgaccaaacatcattcactaattccacttattctgatagttatcttggttaaagcataactagtgattcacaagagagtagtactttacaaaaacaagtaatctaactcaaattaagtatagtgttgatgagtacggttggaatagtgccaaagcttggtccttggaaaagactgattttgttgtagttattcaatagtgtaggataatgcactatgatctagtggtgtagatgattatggtctcccaaaacttcatcttagtggtaaagtagtctggcatcactacaattcctcaacgagtttttgttttattttgcttcattgtttgttttgttgtcattttttttcctcaattgtaaattgacatatgtttccccttaaaggtacgaatatatatttggatgtaatgtttta

SEQ ID NO: 11975 - DNA, 407 bp, Glycine max
ctcagtctagtattttcatacatgaaagattttctgcttctaggaaagtggttgaaagagagtacaaacttttgaatctgctggatttcactagcaaaagaaagcgtatgtcagtgattgtgcgtgatgaggagggcagtctttttcttttttgcaaaggggctgacagtatcatatttgatcgattgtcaaagaatggaaaacattatttggaggctactaccagacatctaaatgaatatggagaagctggtttgagaacactagccctggcttatagaaagcttgatgagcaagattacactgcttggaacaatgaatttcagaaagccaaagctgctgttggggctgacagagattcaatgcttgagcgggtatcagatatgatggagaaagggttgattctt

SEQ ID NO: 11976 - DNA, 503 bp, Glycine max
ggtgtaccagagtccaacattatatttctcaatctcgtatcagcacctcaaggtgtgcatgtggtctgtaaaagatttccaagaataaaaatcctgacatctgagattgagattggtttgaatgaagatttccgtgtcatacctggcatgggtgagtttggggaccggtactttggaacagataatgatgaccagcaggtggtacccccttcacagtagttatacttgggaggaaattcacaatattttttggttcgtcatcattaatgagacctttactgcggaagggggaaataaaatttgctgaattaagattctgctgggctccgagttattgttctaaatcaattttgatcataatattttgtttgattttacaaacatatgcataatcggaatattccaaggcaaattttgtattaccttttattattataccggaatttttctttgaacttattctttgccggacactggcttatccccatacatgtttaccgtcc

SEQ ID NO: 11977 - DNA, 879 bp, Glycine max
cttgcttccacgaaacaaccgaagacaatgtcataagacttgtaacgggggttggcatacaagttctgtgcagctatgtgacattgccatatgctctagtcacacagatgggttcaaccatgaggcccaccatcttcaatcagagagtagcatcagctctgaagaactggcacaacactgccaagaagcatgtaaaaaacagtaagcacaccacaccattctcaagcaggccatcaacccctcaatatggtatgtctccaactcatctgctacacaaacaccttgctggaagaagtgagagtgcacaaacttctccaagaacatccaactatgaaaatgaacagtggggtgttgaaggatcaccttccccgagccaccatgcagtagctgctgatgaaacccagatgcaagttttggagccaggctcaggctgctcaggttcagcaccagaattgcctattagctctcaacttgatatcagagttagttcatctgagttttcgtttgagaaaagacacattcctggaagtgattagatgtgtagatttagtttttagttaaccggttcaaatgtacagcttctgtacatatcaaagttccaaatgcatgcatgcatgcttttgctgcaatgcaaagccatgcatttgaagaatgaggcataatcttttttgatggagcacgatttgttgaatgaggagtgacactttgttgaaggcaaatttgctgttgaaatttcattatgtgtacatgaatgtgtacaacaacaaaatatgtttcccttccaaatgactaatgttaggtcatgtgttcaaagaactgttttaagtgagtgtttgcatatgtgtatgtaaaattcattttgaattaatgcgatttttt

SEQ ID NO: 11978 - DNA, 411 bp, Glycine max
aaagaattgaagcttgtgagatatttggaggtcttaccggaaaactaaaaattctaagtataatagttaaaaaaattgaaaaatcactaaccaacccaatatatgaattggcagattttatgtggataacatccctattagggtatacaagaataaaagcgatattggagtcggatacccaaccaaagccatggcaaatacaagcatctttatgggatggagatagttgggcaacaaatggtggcaaaaccaaaactgattggagcttatgcaccattcagagcaagtttccaaggctttgaagttagtggttgtcaagttccaacctcaaatattagccaaaattgttcttctgataagtactggtggaatacgcagaatttttggcggttggattctgtacgacaaaga

SEQ ID NO: 11979 - DNA, 551 bp, Glycine max
tcgcccacgcgtccgcccacgcgtccgcacgatcctttgcaacaacccaccaccaatcagttcaatgggggcaacaagttacctggtgaccattgtggtgattctggttttgaccaaagggtcctaactgctcccataaaatctgctgttgacaagttccagcttattcctgagttcctcaaggttaggggattggtgaagcaacatttggattcctttaactattttgtgaggacagatataaagaaaatcgttcgtgctaacaatcttatcatggcgagtaggtacccacacatatatctaaggtttttaaatgtcggaattggtaaaccatccatgatgattgatgaggttactgagggccttactccacaaacgtgccgcttaagtgacctgacgtatgcggctccaatatgtgctgatgttgagtacacgctacgaagtcacgataaaccagacaacaagagaacgctcagagttgaaattggaagaatgcctattatgctgcggagttgttgttgtgtcttgcatgggaaagatgaagctgaact

SEQ ID NO: 11980 - DNA, 1350 bp, Glycine max
  unsure (1)..(1350): unsure at all n locations
attattttcagggtttgtgggtgaactttgcaaaggatcagttattttgtcttctaggacccaatggagctggaaaaactacagctattaattgcttgacaggggtaactccagtaactgatggagatgcgttgatttatgggcattcaatcagaagttctactggcatgtcaaacattcgaaagcttataggagtctgtccacagtttgatatcctatgggatgcactgtctggtcaggaacacctccaactctttgctactattaaaggcctgtccccagcttccataaaatcaattacccagacttcattagcagaggtaagactcacggatgcagccaaagtgagagctggaagttacagcggaggaatgaaacgccgtctcagtgttgcaattgcccttattggtgaccctaagttagtcattctggatgaaccgactactggtatgggtccaataacaagaaggcatgtgtgggacataattgaaaatgcaaagagagggcgtgccattgttcttacaacgcactctatggaagaagctgacattctaagtgaccgtataggaatcatggcaaaaggaagtcttcgctgcattggcacctcaatcagattgaagtcccgctttggtactggttttattgctaatatcagcttcaatggaaacaatatcgaacatagtcctgccaatggagatgcaatatctacagaacgtcgtgaggcagtgaagaaattctttaagaatcatttagatgtagtgccaaaagaggagaaccataacttcctaacttttgtgattcctcatgacagagaggcgctcatgacgaatttcttttcagagctccaagatagagaagaagaatttggcatatctgatatccagcttggtctaacaacgctcgaagaagttttcttgaatattgctagacaagcagagctagaaagtgctgcagctgaagggagactagtgaccctgaccttaacatctggggaatctgtgcagattcctataggagctaggtttgtgggaattccaggaacagagtctgctgaaaaccctactgggtttatggtagaagtatactgggaacaagatgatactggtgccttatgcattgctggccactcacagaaggttcctattcctaatggcgttcaactatcttcttctccatctgtaagacaccgtagatatttaggccggtcaggaacagttcatggggttgtgattgatcctagtcaagttagttcagtagcttttcagtgatgtgtcatgcaaaatgtacagggagatgcatcatgcttatttatttttttctacaggtaattatacttgagttncttataaa

SEQ ID NO: 11981 - DNA, 352 bp, Glycine max
cacaaactcagcgtgctaaaagaatctcgttctcgcggtctcaaggaaccctagatcgggtcatgtctggagcgtacggtcaagacggcggcggttccgcgccaccgtcttatggagccagcggcggatacggttccaccggcggtggtgccggtggaggtggttgttatggtggcggaggctatggaggacgacgaggtggtggcggatatggtggtagtgatggcggtggaggtggaagttacggagccaaaggcagcggaaacggctgcggatatggtggtaacgatggtggaggttatggcggaagaagcggctacagtggaaaccgtggcggaggctatggaggaag

SEQ ID NO: 11982 - DNA, 491 bp, Glycine max
cggacgcgtgggcgcgcacttcctcgagcacatgatcttcaagggcaccgcgaagcgcaccgtcagggagctcgaggaggagatcgagaacatgggaggccacctcaacgcgtacacgtcgagggagcagacaacgtattacgctaaggtcacggagaaggatgttcctaaggcgcttgatattttggctgatatattgcagaattcgaagtttgatgaaaaaaggattagccgcgagcgtgacgtgattcttagagaaatggaagaggttgaggggcaaatggaggaagtaatttttgaccatttacatgcaactgctttccagtacactccacttggtagaacaattcttggtcctgctcagaatattatgacaatcactaaagatcatctacaaaactacattcagacacactacacggctcctaggatggtggttgctgcatctggagcttgcaagcacgaagaaattggtgagcaagtaaaaacat

SEQ ID NO: 11983 - DNA, 578 bp, Glycine max
tttaaatccaatactcccctaaaaccccgagtcccaaagatctgagagtacgcagcaccaccgccaccggaatctgttagttaatcgccgataacgattcaaagccttcgtccctctctattgcgcagctatatcattatatccacaagcctgtgactttgacgcgaatgagaaggttcacgtggttcacgccgtatcggcgccatttgctttcgttcctgaccttagaatcgctcgtggataaaggagaatcaacattcagcaaagtctcgtcgtctcgccaatcgtttttgctcgctcgagctttggtcaattgtggtttcgtcacgaaaacgcaggagtctctgattccgagagtaccgttaagatatcgttattttcatgccacagcattttcttcgtcagctgaccgagactactatcgaactcttggtgttcctgaaaatgccagtcaggacgagataaagaaggcatttcactcgcttgctaaaaagtaccatccagatgcaaataagaataatccatctgctaagaggaaatttcaagatttaagagaagcttacgagacattgagagac

SEQ ID NO: 11984 - DNA, 291 bp, Glycine max
cgttcccgaacctaaacccaacacgctaaaaccccgactcccaaaaatcagagagtacgcagcgccaccgcaccggaatctgttagttaatcgccgataactcttcatcgccgttccgataacaccacaagcctttgacgctgcgaatgagaaggttcgcgtggttcacgccgtatcggcgccatttactttcgtctctgacttcagaatccctcgtggataaaggagaatcaaccttcaccaaattctcgtcgtctcgccaatcgtttttgctcgctcgagctttggtca

SEQ ID NO: 11985 - DNA, 1130 bp, Glycine max
gtttatattgccatttaggcggtgatcgtaactgaaaattggcaatggtgaatcgtcgacgcctcactcgggtggcgacgagcgacgatgaagacgaagcaccgccgcgtacacaacgcacgcggaagaggatgaggcttatcgaggaagataacgatgatgacgagaatgaagaagagaaacaacaagaggtgccggaactgcctcagcctgcggaggacgctaagcctcttggcgaacccgttagggtttcgggaaaaggaagaggaaggaagaggcactatgattccttcgagttcgatggcatccaatatattctcgaggatcctgttcttcttgtacccgaggagaaaggccagaagccatatgttgcaattattaaggacattacgcagtctatcagtggcaacgtgaaagtgacggggcagtggttttatcgtcccgaagaatccgagaaaaaaggtggtggaaactggcaatcgtgtgataccagagagctgttttatagtttccaccgggacgatgttcctgcagaggctgttatgcacaagtgtgtggtgcattttgttcccagacacaaacagcttccaaagcgtaaggatcaccccgggtttattgtacagaaggtgtatgacactgtggaaagaaagctctggaggctgactgataaggattatgaggaatttaagcagcaagagattgatgtgcttgttgagaagactcagcaacgtattggtgaactacttgaccttgagcccgaggaagcccctgatgacgatggggatcaattgaaaaataaaaaaagcttcaggagaaagagtgtttcacctcttgatgtttcaaaagaggaggaagaaactcttaagagtgaacaacatccaaaatctgaaacaccaacgggttgcataactaatggttcagagtattatcggatattggtagatttcaatgcactaactggagatagccatcgagacaaatggttggagaggttgcttcaacgcattcagtacatgtgtgattctaatgattgcaaagaaagggacaaaggattagggaatgccaattctgatgaaatcaacaatgaaagcaagcatagaagttcagaatcagcaactgactgtcaagat

SEQ ID NO: 11986 - DNA, 931 bp, Glycine max
cgcgtccgtttttattgatgaaattgatgctgctggatcaacaagaaaacaatgggagggccacacagagaagacattgcatcagctacttgttgaaatggatgggtttgagcagaatgagggaataatattaatggctgcaacaaacttgcctgatattcttgacccagctttaacgaggcctggcagatttgatcggcatattgttgtaccaaatccagatgtgcgaggtcggcaagaaatattggaactctatcggcaagataaacctatagctgatgatgtagatgttaaagcaattgctcgtggtaccccagggtttaatggagcagatcttgcgaatttggtaaatgttgctgccattaaagctgcagttgaaggtgcagagaaagtaacagctgcacaattggagtttgcaaaagacagaatagttatgggtactgagcggaaaacaatgtttatatctgaagagtcaaagaagcttactgcttatcatgagagcggtcatgcaattgttgcccttaacaccgatggtgcgtatccaattcacaaggcaacaatcatgccacgtggatctgctttaggaatggtcactcagcttccctcaagtgacgagacatcaataagcaagaaacagttgttagctcgccttgatgtttgtatgggaggaagagttgcagaggagcttatctttggccaggattatgtcacaactggagcaagtagtgatctccacactgctactgagcttgcccaatacatggtatcaaattgtgggatgagtgatgcaatcgggccagttaatataaaagagcgaccaagttctgaaatgcagtcacgtattgatgcagaggttgtgaaactccttagagaagcatatgatcgcgtgaaagcccttttgaaaaagcatgagaaggcattacatgtgctg

SEQ ID NO: 11987 - DNA, 409 bp, Glycine max
acaatttcattttcattacaactctctctctctctctcagcagcagaaacacaatacgcttgtgcaattgtgccaaagggcaatgaactatattcagaccaaatgcgtggtcaagcgcaaaggcaaagaaaccggtgaaagtgaaaccttgtgttttacaaagtccaaggataacaacaataacaacatgtgcgaccgccactgcggaaaacgctaccctctgttgtcgttttgggagctgccggaattcatgaaggacaacgaatacattcttcgttattacagagccaattggcctttcaagcaagctctctttagcctctttcgttggcataacgaaaccttaaatgtttggacgcatttaattgggtttttactctttctcggattgaccctcgcgaatttgatg

SEQ ID NO: 11988 - DNA, 550 bp, Glycine max
tgatagcagtgacattccctccgtcgtttgctccaaaaccctttcttttgtttgtgattggtttctctctgtttgtgttggatcacattcacaatcacgatcatgtctaaaatgttgaagaaggtcaatgcctgcaaccctaaactctggctcctcatcggaataggactcgctggcgcggtcgttgttgtggccgagacccggcggcggcgacaccggaacctccccaaagaggacttcggtgcattcgttgagcgtatcgaacttctccccattcctcagcccaaccaaacgcaaacgctctctgctcttaccttcggcatcaaagacatattctgatgtgaaagggtatgtgacggggttcggaaaccctcagtggaagaagacgcacggcgaggccgggaagactgcgattgtcatcaccgctctcctcagcgacggtgccacttgtgttggcaagactgttatggatgaattctcttttgggatttctggtgagaacaagttttatggaacaccaaccaatcctcaaatgccatcttctatccct

SEQ ID NO: 11989 - DNA, 434 bp, Glycine max
cataaaacaaatcattttagttctggtaaaattaatttattttgtatttcatccttaaaaatactatcattttttcattatttaaaatattttttttacaatttaaaacactatctaaagttctttaaatatgaaaaataaaacaaatacatttcactagtactaaaatgaaaaatataaatttgtaaaacaaaaatttaaaaacactaaattgtatgaaaaaaaatatatttaaacatgttatttaaattaaatttcctctactttccagatacaaggaaaaagaaaagacattttgatcatgaacggtggagggacaaatttgattccatcacattttacaaacggatgcccataaaatatcttatccttctttttggttacacaaaatatcttatccttctgccaaaagttattatccccaaaaaagaaat

SEQ ID NO: 11990 - DNA, 539 bp, Glycine max
gcagcgatggcgccaccgtcgccaccgtcactttccacggccgcttcgatatcctctcgatgtccgcgaccttcctccaccacgcctccccggcggcgatcccgaacgccttcgccgtgtccctttccggaccgcaggggcagatcgtcggcggattcgtcgccggcaggctcctcgcggccggcacggtgttcgtgattgccgcgtcgttcaacaatccgtcgtatcaccggctttcgtcggaggaggaggcgcagaacaactctggcggcggcgcaggagacgcgcagtctccgccggtttccggtggcggcgtggagagcggacacgttccggctgagtcgtttatgtacagctgtcaccttccttcggatgtgatttgggctccaacccctagaccacctttctgatcatcatcaatcaactctatttttaattcgtgcttgtgttgtgaattttgtttcgttaatctagttgtttgagttgtaatgctgctgttagcttatttagttctagttctaaattcaaaaacaatgatt

SEQ ID NO: 11991 - DNA, 522 bp, Glycine max
  unsure (1)..(522): unsure at all n locations
ggcagcggcctatgagcaaatcaaatctgctatttatgagttancananggcaaacacaaagggagttagggcacacaacaagcaaagaaggctccttgaacaggacaaaacaaaacaaactggtcttgttgtgttgagcctaattgctatcaatattcaatattttatactattctttattcttattcttccagttatatggtttgtatttgctaatagctcccatcaaaggcccaaaaatgggtaccatcgttgaagcagataacacatataccaagatcctaggaagatggccagtcttttattatggcatgggacacatgctcaatgacataactgctgcttgttggttcacatatttattattgttcttgacagatattggactttcaccaaggaatgcagctgttgtgatgctttctggtcaagtggctgatggatttgtcaccatatttgttggtgaactgatagacacgtttggacactccaagatatcgcatggtgctggatctttattggtg

SEQ ID NO: 11992 - DNA, 438 bp, Glycine max
ctcgagccgttttatctttgagtccattgattttttcccaagttgggttggataatcggatgagtttgctgtctgtgatgatcatgggatgcttgtgcttacctcactttcttcttccggtgtttgtatttgctaatagctccaatgggtactattgttgaagcacatgacacatataccaagatcctaggaagatggccagccttttactatggcatggggcacatgctcaatgacatatctgctgcttgtcggttcacctatttattattgttcttgacagatattggactttcacctaggaatgcagctgctgtgatgctatcaggtcaagtggctgatggatatgccaccatacttgttggcgaactgatcgacaagttcggacacttcaagatatagcacggtgctggatctttattggtcgcaatatcattt

SEQ ID NO: 11993 - DNA, 428 bp, Glycine max
accagttttttccaagtcactatcttgtggttttctttctttctgttgtggccaagttgggttggataattggattctttggtgtctgtgtatgtgactgtgaaaaggatggggctttgatgatgatgatgatggggtccttttgctagcttcattcactttcttcttcctgtgtttgtatttgctaatagctcccatcaaaggcccaaaaatgggtaccatcgttgaagcagataacacatataccaagatcctaggaagatggccagtcttttattatggcatgggacacatgctcaatgacataactgctgcttgttggttcacatatttattattgttcttgacagatattggactttcaccaaggaatgcagctgttgtgatgctttctggtcaagtggctgatggatttgtcaccatatttg

SEQ ID NO: 11994 - DNA, 426 bp, Glycine max
ggcgtacgcacacacgtatatgggggacttaacccagggtggatgctcgtctagatatatcggcagcttcagcgtttgcaaagaagattctgaatggttccagtagttcaactgctgatgttagcaaacaaccatcagcctcaccccggctaaatttaatctttcaacagcaggttgcagggccagttgtttttcgagctgattcccggattgcccttgagtctttcgccaggaaaaacggtgtgtcagtagaggattttatttgcagcctgagttactccttgaaggatcttcagtctggaaagatcgttgcttggtattctccataaagaaaagagggaatggttgaatttcgcatgtatgaggtttagcagaaatgcaacaaccctcacatttttgtaacttacgcttagagatcttacaatg

SEQ ID NO: 11995 - DNA, 425 bp, Glycine max
gcggctgtttgtggtatggttggttcagggaaatcaagttttcttttgtgcatccttggagagattcctaaaatttctggtgaagttagagtgtgtggctcttctgcatatgtctcccaatcaccatggattcaatcaggaactatagaagaaaatatcctctttggaagcccactggacaaagcaaagcacaagaatgttcttcatgcttgctcactgaaaaaggacctagaacttttcatcacatggtgatcttacaattattggggatagaggtgtatacctgagtggtggccagaagcaccgggttcagccggctcgggcactctaccaagatgctgatatttatcttcttgatgatcccttcggtgcagtggatgctcacactggatcagacttgtttagggagtatatattgacagcac

SEQ ID NO: 11996 - DNA, 426 bp, Glycine max
ccattattaattccgttagcaaaactgcaaaccccatctccttctctagagaaagattgggctctggcgtaggcgcaaataaccagatataatggcggtatcggtgaaagtcagcaacatctcttcaactgcaaccgagcaagatttgagggaatctcttgcgtttccgggaaaaatcgaatatattgaaatgcaaagtgattagggaaattcccaagttgcgtatgttaccttcagtaatccagagggggcagaaactgcagttcttctctcggcggcggtggtgtgtggacagtctctaaccatagctttggctccggatcatgctctgcctgcctctgctgcatctgctacacagactagtaatgctgagagtggcgaatctggtttgagaaaggcagaggatgttgtaaccggcttgctagc

SEQ ID NO: 11997 - DNA, 748 bp, Glycine max
aattacaatggctgctgtttctttaaggctcctttgctttcttttttttctctgtttcacaataacatcacaagccgcgcagacatgtgataacgacacagggaactacacagtaaacagcacgtatcacaacaacctcaacaccctgttatccagtttctcttcccacaaagaaatcaattacggtttctacaatttctctcatggccaagacccagacagagtatacgccattgggctctgcagaggagaccaaaagcctgatgattgcctcaaatgcctcaacaattccagagtctctctcgcaaaggagtgtccaaaccagaaacatgcgattgattggggtatagagtgcatgttgcgctactccaaccgctccatatttagcctcatggaaactcaacctatgggggaactcgtgtacacgttggatgtaaagggttcaggggaacaattcaacgaggcgctgcagagcttgatgaggaatctaacacgcacagctgcatcaggtgactctcgtctcaagtatgctacggctagcacacctgctccgagttttcaaaccatatttggttatacgcagtgcacccctgatttgtcatcggaagattgcaccaagtgcttggaagaagctatttcaaaaattccagagtgttgtagtggcaaggctggtggcaatgtcttaaaacccagttgtagaattagatttgacccctacgtcttctatggaccaacattaaaattagac

SEQ ID NO: 11998 - DNA, 453 bp, Glycine max
  unsure (1)..(453): unsure at all n locations
gaatgaacttggtgttgtttctgcagaaagcattgctggtgcaactatggttccagtaagttggacagagatgcagtgcccgttaactggtcaaattgagcaaagaaaggttgcaaaggctgcaagctgactagaatacttcatcgagctggaatctgttctgttttgtagaaatagactaacatgcgttgttgttagggtgagaaattatagccagtttgtattttacattgcaagttggcctacttataaagtatcacaaacctgggatttcaattcactcgtgctatgagcaggattttatttactttttattgtattttttcaatttaaggctattgattactggcattttaagacatggttcaattttcaactttgaatggaacttgtttcatatnnnnnnnnnnnnnnnnnnnnnnnnnnnnnnnnnnnnnnnnnnnnnnnnnnnnn

SEQ ID NO: 11999 - DNA, 776 bp, Glycine max
gttggagcagacgatggtttgttttaaatgagaagactggcaagcttggatacacaaaaaaacaagaagagagacatttccgaggagtgattacattagaggaatgcaatattgacgagattcctgatgatgatgaagcctccacaaagagttccaaggataaaaagtccaacggacctgattctgggaaagcatcaaaccttattttcaagattacaagcaaggtcccttacaagactgttatgaaagctcaaagtgcagttttgttaaaggctgagagtatggcagataaggttgagtggatcaacaagttaagaagtgttgcacaggctaaaggaggtcaagccccgggtgaacctagttttcctatgcgacaaagcctttctgatggttctcttgatacgatggccagaaaacctgcagatccagaagaggagctcagatggatgtctcaagaagtgcgtggttatgttgaagctgttcttaacagcctcgctgcaaatgttccaaaagcagttgttctttgccaagtagagaaagccaaagaagacatgctcaaccagctatacagttccatcaggggatcaacacaaagacactttgggcatacaagtaggcaaagcttgggaaggtgcatagtgtatttgggtggagcagtgggcttgcatatttaatgatggtccttgcatcttcaacttggtcttggataggattatatttttggtggctctgatggtttggctattgctacttcaagggagttgccatttctgata

SEQ ID NO: 12000 - DNA, 874 bp, Glycine max
  unsure (1)..(874): unsure at all n locations
gagagtgactcagcaaaaccctaggtgttctcacactctcgttccgtctttctccaacaatggaagttccttcggaagcgccgccgtctaccggcaccggtgaaaccataagcaaaaatgcgctgaagcgggaactcaagaacaaacagagagaagaagatcgcaagcgcaaggaggaggagaaggccaaaaaggcagctgaaaagcttgaaatgcagaaggataaggataacaaatctgcaccagctgatgatgaggatatggatccaactcaataccttgagaacaggctaaagtatcttgcagttcaaaagacagaagggaagaacccgtatcctcataaattctttgtcactatgtctattgatcaatacatcaaggaatatggaggtttaagcaacgggcaacacattgaggatgtctctgtgtctttggctggccggatcatgcacaaacgcacctctggttctaagcttgtcttttatgacctgcacggtggtggttgcaaggtccaggttatggctgatgcgagtaaatcagacttggatgaggctggatggtccgaattccattctaatgtgaagcgcggggacatagttggtgtcactgggttcccaggcaaaagtaagaagggcgaacttagtattttccccaagacttttgtgtcgctgtctcattgtttgcatatgatgccaaggcaaaagtctgctgctgctgcggataatgcanatttgaagaaaaatccatgggtaccaggaagtaccaggaatcctgaaccatatattttgaaggatcaggaaactaggtttcggttacgccattgggatttgatgctaaatccaaaggttcaggaattttttagaacccggcttaa

SEQ ID NO: 12001 - DNA, 412 bp, Glycine max
agcgttcgcccacgcgttcggtcttaaaagccacgcgaaggagcaaaagcttaacctccatatttagctgggtgcgtgaagaaaaccatgagacataacctaatatggcttactattttttcctcttttgtcctcggtcctctcgggatcttgaattcattcaacacctttcccaaattaagctatagccaataaaacaaaatagtataataattttcattaatgatgagcagcggtagtggtagtggcagcagtagtggtagcccttgtggtgcttgcaagttcttgaggaggaagtgtattccgggttgtatatttgctccgtactttgattcagagcaaggtacaagccattttgcggcggtgcacaatgtttttggggccagcaatgtgtccaagcttctccttagca

SEQ ID NO: 12002 - DNA, 686 bp, Glycine max
acaataatgaattgtgaaacaaaaaaatgcaaataaatcattaaaaatagtataaaataaagtttttaaggtaagattatatgcctaattgactgttttgaaatgttaaagtagtaggtgataaagcaaagaaatcataaaaaataaaataaaataaaaaatattgaataagattatatatatgattaactattatgtaatgctaaaagtagtaggtgataaagcaaagaaatcataaaaaataaaataaaataaaagatatagaataagatgatatatatgattaactattatgtaatgctaaaagtagtaggtgattcttagtcttgaatttctatctcttgtcaaattcattgaatgtaatgcatcgttataagaactttctcctcttatttgcacaaaaaagtttcaataattgtaagttaacataatggtacagtattttctaataaccttataattcatttaacaataataattattaaaataattgttaaattatttatatacatatttttttattagttttctcttattctatttaacaatacatgaaagataataatataaacacagtcatatctttaaaaaaaatataaaaaaattacactacattttaaaaataatccttatttaaaaaattattaataataatgtaaaattaaaaaaaattaacaataaaaata

SEQ ID NO: 12003 - DNA, 422 bp, Glycine max
tgacatgcatgctgactactctggccaaggatttgatcagcttttagatgttattaacaagataaagcataatcccaatgatcgaaggatcattctctcagcgtggaatccatctgatcttaaattgatggcacttccaccctgccacatgtttgcacaggtccgcagctatatttgggtttctctttggaagagctctctctttttctctcatgaagttttgtcaacttccttttattgttttttccctgtagttctatgtagctaatggggagctatcatgtcaaatgtatcagcgatctgccgacatgggcctgggtgtcccatttaatattgcatcttatgcactcctgacatgcatgatcgctcatgtttgtgaccttgttcaggtgattttatccatgtaatgggggatcacatgt

SEQ ID NO: 12004 - DNA, 405 bp, Glycine max
gtacaaccactggggtgtcagctcacgatagggcaacaacagtcttggcccttgcgtctagagattctactccaggcgatttcaaccggccaggccatattttcccactaaaatacagggaaggtggtgtcttgaagagagctggacatacagaagcttctgctgatcttgctgtacttgctggcttggatccagtggcagttctgtgtgagattgtagatgatgatggttccatggctagactgccaaagcttcgccagtttgcagagcgtgaaaatttaaaaattgtatctattgctgacttaataaggtatgcagttacaattcatggaccatgtaataaaattcattgcatgcatatttatgtttagactctgctttagtgcagatactatacttttttat

SEQ ID NO: 12005 - DNA, 434 bp, Glycine max
cccacgcgtccgtttgtgttcttttattagtgccaacaaatattggttatcattaatcctatattgggttcctctttaattgttggtatcagtttatttttgccttctccatgctccaagcactcaatcttgtaatcttgacggcggcagttccattattgaaagcatatagttgtgccttttcattaattgctattgtgggatatactctggctgtgatgcaagcccttccctctcctccaaaactctccactactgagtgatcaatcaaagaggaacccaatataggattaatgataaccaatatttgtgttcttttattagtgccaacaaattttattattactgtactactataaccatagtgcttgttattcaggttaaaagccaataatttgataagaaaataagaacaaaaatatgttttgtaaacc

SEQ ID NO: 12006 - DNA, 755 bp, Glycine max
  unsure (1)..(755): unsure at all n locations
tagttgtgcctttttattaattgctattgtgggatatactctgnctgtgatgcaagccattccctctcctccaaaactctccactactgagcgatcaatcaaagttcttagcgacagcttctcatgaagagggtccatgtccacaaaggtcccataggtggtcatatcgttatctttattcaaagaggatctgctttggtcgctacacatgagaaccaaatttttattttggtatctgaatattctaaagaacactgccgtgtactcttgcaagccacgagaagcaaaaactagcaagccaaagggtcccaaaccaccctttacggctgcaccctttctactacacagaatttggggatccacccattggtccaatacttcgccctttccaaactcattcacgtcaaatgaaatttcaacgtcagcctgtgccgcagtaacaccagtaacttgaagcatttcaccacctttgaccactttggtgggccagtggacaggattcacacgtaagctttcaagttccaccaccggccattgcaccaactgttttccagatttatgaagccagatggcccttggaatagtatggattccagcccatcctttcttgatatcatccgaaacacttgaggattcattaacccaacccaataagacctttctgttctttccatcctcaaaaatggtttttgaggcataatattttccatagtcatatcttaggacagtttgactatcctttaatccatcggacg

SEQ ID NO: 12007 - DNA, 444 bp, Glycine max
acggacatatgcgaatgccgggctggtggatgaagcaatctctctgtataagagtattcctcggtttagctgtgtgaattggacagaatccttcaacaccatgttgcagataatggtcaaggagaaccggcttgaaattgcacaccggctttttgtggagagctcttgtggttgggaagtgaggtctctggttcgagcattgaacttgcttatgtatgctctttgtcaaaagagtcgctctgatctggcattgcaattattccaagagatggattatcaaagttgctaccctaatagggatagttatgcaattttgatgaagggactgtgccaagacaggaggttgcatgaggccacccatttgtgtattcaatgttttggagatctcacagaaaggaaatggtgagggatatgtggtctatagaactcttttggatgctttat

SEQ ID NO: 12008 - DNA, 1301 bp, Glycine max
agagcatatagcatggctctttctcacttttccgctgccattttcatctctttccttctcctcactctccaccaccacgccgaatcaactcagcctccctattcctgcgactcgtcctccaactcaccctactacccattctgcaacaccaggctccccatcaccaaaagagcccaagacctcgtctcgcggctcactctcgacgagaaactcgcccaactcgtcaacacggcaccggcgattccccggctcggcatcccgagttaccagtggtggagcgaagccctgcacggcgtcgccgatgccggcttcggcatcagattcaacggcaccatcaaatccgccaccagtttcccccaagtcattctcaccgccgcttccttcgacccaaacctctggtaccaaatcagcaagactattgggaaggaagcgagggcggtgtacaatgcggggcaagcgacggggatgacgttctgggctccgaacataaacgttttcagggatccacggtgggggagagggcaagagactgcaggggaagaccctctgatgaatgccaagtatggtgtggcgtatgtgagagggcttcaaggggattcctttgaaggagggaaactgggtgagaggcttcaagcttcggcgtgttgcaagcacttcactgcctatgatttggaccattggaagggactagatcgctttgtctacgatgctcgtgtcacgtcgcaagatttggcagacacataccaacctccatttcaaagttgcatagagcaaggtcgagccagtgggataatgtgtgcctacaaccgtgtcaatggtgttccaaactgtgcaaatttcaatcttttaaccaaaaccgcaagacaacaatggaaattcgatgggtatattacgtcagattgtggagcagtctctatcattcacgatgagcaaggttatgcaaaaactgcagaggacgctatagccgatgtctttagggcagggatggatgtggagtgtggtgattacataaccaagcatggaaaatcagcagtgtcccagaaaaaactgcccatatctcaaatcgatcgtgcccttcaaaacctcttctccattagaataagactaggcctattagatggaaaccccaccaagcttccatttggcacaattggtcccgatcaagtgtgctccaaacaaagcctccaactagccctcgaggcagcgggggatggcatagtccttctatagaacacaaactcacttcctccaacttccaaaaacaaaccccactattgccttaataggccccaatgccaatg

SEQ ID NO: 12009 - DNA, 565 bp, Glycine max
tggatgtggagtgtggtgattacataaccaagcatggaaaatcagcagtgtcccagaaaaaactgcccatatctctatatcgatcgtgcccttcaaaacctcttctccattagaataagactaggcctattagatggaaaccccaccaagcttccatttggcacaattggtcccgatcaagtgtgctccaaacaaaccatgttgttgtcgatcgcattgggagtcacgaatcacggtaacatggcggggaagcatcccgtgttgctgtttgtgaggcagggaaaggttagaaacaatgggaatccggtgaaacagttggtggggtttcaaagtgtgaagttgaatgcaggggaaacggttcaagtggggtttgagctaagcccttgtgagcatcttagcgtggcgaatgaggctggttcgatggtgattgaagaaggatcttatttgttgcttgttggggaccaagagtacccaattgaaatcactgtttgatcatgcaacaattggagtgttcaatcaatcaagtaatgcattaaaggaataaaaactattttgcagcttcttt

SEQ ID NO: 12010 - DNA, 416 bp, Glycine max
tacgactcctgaatataagttgcgtttgttgatgatttatgcatctgtctatcctgaaaaggtttgagggtgataaagcttcaaaactaatgcagttggcaaaactatcacctgatgacatgaaagttatcagtaatatgcaacagctggcgggatcatcaaacaagaaatcatctgctgctggtggtttctcactcaagttcagtaaccagaagacaaagcaagcagcgcgcaaagatcgtactgaagaggaagaaacatggcaattatttcgattttatcccatgttagaggagctcattgaaaatctaagtaagggagaattggcaaagaatgaatattcctgtataaatgagccaaatcctagtaatgcacgaggttcagttagaatcagcaaacagacccagacaccttca

SEQ ID NO: 12011 - DNA, 736 bp, Glycine max
aaatacagaattttcttgaccaagctgttggtgctagttgtgagggattaagtattaaagcattaaatgaggatgctacatatgaaccttccaagcgatcactcaactggctaaaactgaagaaagattatatggacagtataggggactcactagatttggtacctattgctgctttccacggtcgtgggaaacgtacaggagtttatggtgccttcctccttgcttgctatgacaatgataatgaagaatttcaaagtatttgcaagataggaacgggattctctgaagctgtgcttgaagaacgttcttctagtcttcgttctaaagtgattcccaaaccaaaggcatactatagatttggagaaacaataaatcctgatgtctggtttgaagccagtgaggtgtgggaggtgaaagctgccgacctgaccattagccctgttcaccgtgctgcagtgggcatagtagatccgaacaagggcatatctctacgatttccacgactacttcgagtcacgcctgacaaagctcctgaacaggcctcatcatctgagcaggttgctgaaatgtataaggctcaaaaacacaatcacacgaacaaccaaaatgacgatgaagatgatgattgagtgaaaaaattctgtttctcatgctgagctataaaatctcagtaatttttgctgatgcaaatgcgaattctttaccttcaagcataggtcagagagcataactg

SEQ ID NO: 12012 - DNA, 464 bp, Glycine max
ctaaagtctcattttttttcgacaattacttatgcaggaaataagatatctgtatcacgagtagtcttgattgttgtccctgttgttgtatcgataattctcttgttatgtgtctgctatttcatattgaaaagatcaaggaagaaatacaacactcttctaagggaaaatttcggggaagaaagtgccactttagagtcgttacaatttggtttggtcacaattgaagctgccacaaacatgttttcctatgaaaagagaataggtgaaggtggattcggagtggtctataagggtgttctccctgatggacgagaaatagctgttaagaaactctcaaaaagttcgggacaaggtgcaaatgaattcaagaatgaaattctattgatagccaaacttcaacatagaaatctggtgacattattaagattttgtttggaagaacacgagaaaatgcttattta

SEQ ID NO: 12013 - DNA, 459 bp, Glycine max
tattacccccctcttcatagagtgaatgggtgatttgtagagtctttgagaagagtcggtgtgggaagaaaatgcatgttccaaagtgtgggaggttcaacaacccctttggagaggaaccatcatcaggtgcttctctattgcctcctttgatggattcttctccatacaacagtgaaacaagaaccaccactgctggggagttgtctcaggtgacatgcttctctgatccaaatcaaactgaggatcagaacaacacacatgatgacattgttgatagcatggaaactcctattttgaacttctcacccttttcaaggcctgatgatgcatccactttggccaaagcaaccctttcctcagccccaaaccaatcagcacagattgcacaccaaattggggaatcacagttcccagattattgttatgcgcctcaagaaccgtccatgttgaagatgc

SEQ ID NO: 12014 - DNA, 721 bp, Glycine max
cccacgcgtccgcccacgcgtccggacgccaatgcatccattcgggaaagtgaacggtgcagggtttgagtacatgacaccgcggaggtcaaacttggcgaacatggggcatgtggtgataacggagtcggagctggggccgtcgccatcggaggtggcggcggcgatcgcgaggaagccggtgatcgacgagggggagaattcaacggtgggagggtggagcttggacgcggagagcgtggaggggctgcagtcgaagctggagaggtggcggacggacttgccgccggtggtcgatcgcggcgaggtctcgagctacccaacgacgagcaccaccaagacgagccggcactcgcggaggcacaccgacggcgggagtactgggagtggcttgttctcatgctttagtaacatatgtggtgttgagtgctacgttggttgcggcggtgaccctaaaggaaagaagaaccgcatccgcagtcgccgcactccctcagcggatgacagttccagtcttctctaactacccacaccaatatgcattgtggagccaacatgggaatatttgtggcaatggactatgctgtaataattttattcattctttgttattccatcatctgtttttgctactccatcttttgtcaattgtaagacatgtcagtttaattcgttgggactccccaatacaacataaggctatacacatatttcctttctt

SEQ ID NO: 12015 - DNA, 523 bp, Glycine max
cccgctttgccatcgtctcgccaactaccgcgtcaatgtcggccagtggtggcgccggcatctccggcggaagcgcaaccgcaatcggcatctcggcgagaaccgcttctacagtccgccgccggcgaggaaacaccgacagaagcaggaccagcagcggtcgtcactgtcgagagcttcctcggagaataggcccggttcctcttccgattgttcaatttcttcgcgcgccacatcggacatgtccaatttggatcggttgttggagcacatcacgccccttgttcccgcccaatattttcccaagacgaactcgaggaggtggaaatcgagggaagcggaattgcatccttactttgagcttggggacttgtgggagtcttttaaggaatggagtgcttatggggcaagtgttcctatagtgttgcatgggaatgaatcctggactcaatattataacgtcttcttgtctgccattcagctatatatcgatccgtacaagcccttcacacgacttaggaaa

SEQ ID NO: 12016 - DNA, 972 bp, Glycine max
gcggacaaaggcaactagggagaaggcagagaaagaaataggaaaggaagccaaagaattctacacaaaaatggttgaacaaaaaaatcaggtcatccctcttcttactccttacaggatggggaacttaaatctttcacacagaatcgttttggcgccactatttagagcaagatcttacaacaacgttgctcagccgcatgctattctatattactctcaaagagctaccaagggaggtcttctgattactgaagctactactatttcacccacttctaaataccatccaaacgcagttggtatatggtcaagagagcaaatcgaagcatggaaacccattgtggatgctgttcatgccaaaggtggtatattcttctgtcagattgttcatactggaagggcttacgatccagatcttaagcccgatggacaaaccttaatatcatcaaccaacaagccatttacacataatgccaccgaaccaacggcactaaggacggctgaaattcctgatatcgtcaatgaattcagacttgcagcaaggaatgctattgaagcagggtttgatggagttgagatccatggggcacatggttttctaattgatcaatttttgaaagaccaagttaacgacagaacagacaaatacggtggatcattggagaatcgttgtcgttttgcattagaagttgttgaagctgttgttgaggagataggggcagatagagttggaatgagactttcacccttttcagacttcaatgaatgtagtgactcaaatcctcaagcattaggtctctacatggccaaatcacttagcaaacatggtgtgctttattgccacatggttgagccaagatgggacatttctggggagaataaggaaacccttcacactctttcaccaatgaagaaagcttttgatggaaccttcattgttgctgggggttatgatagagaagaagggaa

SEQ ID NO: 12017 - DNA, 1129 bp, Glycine max
cccacgcgtccgcccacgcgtccgcttgacaaatccacatcattgtgtctatttttcgacgttgtgaggaaggaaactcctgatgcaacaatgcagtccacaagcaatcaattttacttccaatttttgacgtattatcagaataacagtgggcaaatgagattacgggttacgaccctttcacgtagatgggttgctggaccagaaagtatacaggacttgattgctggatttgaccaagaagcagctgctatagtcatggcacgccaagtctcttttaaaatggaaacagaggctgaattcgatcctatcagatggttggacaaggcattgataaatttgtgttctcggtttggggaatttcaaaaagacactccatcttctttcagtttgtctcccaggttgtcaatattccctcaatttatgtttcatttacgacgctctcaatttgttcaggtctttaacaacagcccagatgagactgcttactttagaatgatactgaaccgtgaaaatgttacaaattctgttgtcatggttcagccttcggtgatttgttattcattccatgctggtcctgaaccagctcttcttgatgttgcggccattgcggcagataagatcctgcttttggattcatttttcactgttgtcatttttcatggttcaaccattgctcagtggcgtaaggctggatatcataatgaaccggaacatcaggcatttgctcaattgctactagctcctcatgatgattcagatttaataataaaggagagatttcctgtgcctcgcctggttgtttgtgatcagcatggctctcaggctcgatttctactagcaaagttaaacccttctgctacttataacactgaatcttataatcctggaggggatattatctttaccgatgatgttagctttgaggtcttcctggatcacttacagagattagtagttcaataaaattacagttttaccttggactttttatgtaaaattttccttcgattgctgcttgtacattaccttcattttagtatgctgttataatttccaattttgtgcaaaatgttgtaattatttggaatcatgcattctcaaatcgatgacatgagtattaaatcta

SEQ ID NO: 12018 - DNA, 581 bp, Glycine max
gataaaaaggcttcatttacttcttactgtcaaggagtcggctatggatgttccatccaacttggatgctaggaggcgtatttctttcttctctaattcattgtttatggatatgccacctgctcccaaagttcggaatatgatgtccttctctgtcttgacaccttactttaaggaacctgttcttttctccctaagtcatctgggagagccaaatgaagatggagtctctatcctcttttacttgcaaaagatatttccaggtgaatggaaaaactttgttcaacgttttgataataaaagtgaagagaaactcagagtagagaatgaagaagaacttcgtttatgggcatcatacagaggccagacattgaccaaaactgtccgaggaatgatgtatatccgacaagcattggagctacaggcttttcttgatatggcaaaggatgaagaattaatgaaaagttacaaggctgcagaactagagagcaggaaagtacaaccggtgagcgggtcgtgtggactcaatgtcaatcattagctgacatgaagttcacttatgtaggttcatgtcaacaata

SEQ ID NO: 12019 - DNA, 647 bp, Glycine max
cccacgcgtccggtggatacatggctggtatattgtgtgccactgtctctcatcccgctgataacctcgtctctttcctgaacaattccaaaggggcaacggttggtgatgctgtaaagaagcttggattatggggtctgtttacccgtggtcttcctcttcgtattcttatggttggaactctcactggagcacaatggggaatatatgattcattcaaagtttttgtggggctgccaaccactggtggtgttgctcctgctgctgttcttgctcccgcttctgctgcttagcttgcaaaggtgtaaaatctccaatggattagcaagataacacttcgatagttttgtttcagaaacacagaaaaccagcgaatgtagggaccataaatattcagagaacttctgaagttgatagataaggaactttatatatagtgaaagagaatgctacatgtttttgagatcttggttaaggaataaaaaaattagaaaggtttataaaaaaaagtgtcttcataataaatcttaaaactttatgtatatcattttttaatcaatgtcctgataaccctgttttttgtaattaagattaatagtgtagttcactaccgatcgttgaatttaaatttaaacattattttagga

SEQ ID NO: 12020 - DNA, 910 bp, Glycine max
ggaatgtggaagaggacatttgaaaatttggtgacataaatacttctaacatgctagggtgtagcatttaaattaagtttcttgaattctgtgtgcaggttttggctcattgggtctcatgacttctgtgctgttatcttctgatggcgagacattagaagctgacgcagctcatggaactgttactcgacattttcggtttcatcagaagggtcacgaaactagtacaaacaggattgcttccatatttgcatggacatgaggactggtacataccagcgaagctggataatcctgctaaattacgggattttactcaaaatttggaggctgcatgtgttgagacagtggaatcaggaaagatgactaaagatcttgcaattctgattcatggacctaaggtatcaagggaattttacttgaacacggaggaatttattgatgctgtggcacataatcttcagaaaaagctccgagagcctgcagtggtctagacattatttttgcaggggggaagaggaacataagttggaaaagctaaaaagtggtttgatgggtgcttaattttttggcctgtgatgctgcttttggttggaatcatgggaccctaggatctgaggaaaattttaattggtggttgggtggataattgattcttggatttttggccactgactgtcccattcttacacacaccaccattacagttatttaaaacggtaaaaatccgtcagtacggaccagcagaattaggaaagtacaaaattttgatgtgaataatgcagatgatggatcatgtttttattgtaatttgattggtttatatatatatatatatatccaaacaaaaatcaagttactctaaaatcatgtttacttaagattaattctataaattcacgttgatttc

SEQ ID NO: 12021 - DNA, 520 bp, Glycine max
atggttatggcggtcccttgtatgcaggaactggttgctttcacaagagagaggctctgggtgggatgaaattcagtgatcaatattgcaatgactggaatagtgaagatgatcagtttaaagaagcaaacctgcaagaactagaacaacaatcaaaggttcttgcaagctgcaactatgaggaaaacacactatggggaaaagagatgggtttaaaatatgggtgtccagtggaggatgtgataacaggattgtctatacagtgccaagggtggaaatcagtgtactacaacccaccaaggaaggctttcttaggtttagctccaactaccttgcctcaaacacttgttcagcacaagagatggtctgaaggagacttgcaaattttgctttctaaatacagccctgcatggtatggttttggaaggatcaattttgggctccaaatgggatatagtgtttattgcttatgggcacctaattgtttagcaacactatactattctatcatcccttcact

SEQ ID NO: 12022 - DNA, 504 bp, Glycine max
aattttaaaaaattacttttgaagaataacattaattattacaagtgttgccaacaacggtttaaaaacaatgtatgtatttgggggaaaaatatatcttttgaaataattaatatttttaatgaaatatgaatttcttttgtctctattttttgtaatatctttatttttaaaaataaatctagatatttaatattataatacttgatagaacttaaaatctttcaagattaatataatatttttttaatccatctccttccaaagttttcaattattcaatcaatacaattttaaaactatagtcctactaataaaaataataatatataatatcatataataattcaaattaataacaaataatagtatatttttaaaaagtgtgaaatttatttggggccttagatgatttgttgacctaaggtaacaacctaactggccttgtagttgccacggtcctgtactacatgatatattaatttttataataaaaaagtctgt

SEQ ID NO: 12023 - DNA, 473 bp, Glycine max
tgtagcagtactaagctcaggtggaaggagaagcatgttgaaactggcgcatcgcatgacgcacaatatgtgttacagtgtgtgtgcctgcgcagggcacaagtcggacaagctgaacgccaggcacgtcgcggaagacgtgagggtgatcaccaggaagagtgcggacgacactgtcgaccaccccggcatcgcgctaagcactgtcacctgagcgtggattcccgtctcgttgcacaggctgtttgacttgctccgcgactagctgctccaaaaccagtggcatatcctgtgcaacagtggacccatgcgtgagatcgctcacattgcagatggacatgaccatgctcactgcgactccctccgtagagccagtgctataaacgcgaaccagaacaccatgcatgatcttgcaggagacgttcaccgacacgtgcagctagcctgtggtgtacgctccggtggacattccg

SEQ ID NO: 12024 - DNA, 471 bp, Glycine max
ggttgcctgaacagcctcaagcatatatgatttggaaatccattcaacaatggactgagaaatctgcttcaagagctggggttatattgcctgatcttacttctggggctgaaaatgtacctgtttgtcttgtgaatgatgttgataacgagaagggccctgcatatttcacttacatcccaactctcaagaatttgaggccaactgctcctgtggaatcttctactggatgcccttgtgttggtggatgtcaatctaaaaattttaactgcccttgcattcaaaagaatggaggctatcttccatattcttcagctttgctacttgcggacctaaaatctgtgatatatgagtgtggcccttcttgtcaatgtccttctaattgccgaaatcgggtttctcaaagtggcttgaaatttcgtttggaggttttcagaaccaagaataaaggttggggtcttagatcatggg

SEQ ID NO: 12025 - DNA, 602 bp, Glycine max
tctctgaactactgatgaaggcagctagtgattatggtgctttgacagcatcagtggcagattttcagtggagtcagaatttcaaggaacctcccccacgcgtccgggaaatgcttcggcccattcctgtagctttggcatcttgcactcggttctttgaagccatgtctgccacaagagagtcatttgcatcacttcaaaaactgagagttggccattttgattcccctctacctagaacaccagctggagatccttcccaaagagtaccaggagtttctgattgtctaacaccacctccatggaaaactgaaacaaactttgatgacttaggcatcagaaaccaaagaaggcaacatctagatcagcaggtggaggatctaaacagctaggtgaatgagatccatcagaatatctgtacaagcctaacgatcttgtcttgccttccctcatttaaagaagattgttacatagatatctaacatactctttgtatcatttgtgagatatatcatatacatcaattatttttgcaaatcaattatttgtcattgttgttgcggaattatgtatttttgagtcactagaacttgcgtcacaaa

SEQ ID NO: 12026 - DNA, 442 bp, Glycine max
tgcaatttggaatcggcatgtaaatttcaagttcttcccaaagcgctttcagatcagaatagagagtagttacagatcgagtaccttgagtgagagcgtaaatctcttgttgaatttctgaaacacgaaccaaatcaccttgtgagaaacgctctttcagatcgagccacacatcggaagcgttatccatgaaaacgatggatcgggaaatggaaggttcaacggagttgagaatccagctatgaatcaacatattgcagcgattccaagctcggaacgacggatcgaaggcatcaaccggcatcggaattgttccgtcaagaaattcgaacttgagtttggctccgagagcgcgtcgcagagacctcgcccaagaatggtagttggaaccatcaaagagtggtgtgaccttgacggacgagggaccgtcgctaggatgaac

SEQ ID NO: 12027 - DNA, 463 bp, Glycine max
cggccgcgtgggcaaaaatcagtagttatgtatctttctttactgaatgtagaccactttctatgagcatgggaaatgcaattaggtttgtaaagagtcgtattgtcaatctgactttaaatcattcggagtttgaggcaaaaacaaccctgtgttctgatattgaccggttcataaatgaaaaaataattcttgctgataaggtgattgtccgacatgcttttacaaaggttaaggatggggatgttcttctcacatatggattgtcatgtgttgttgagatgattcttttatatgcctatgagcaaggtaaaaagttccgtgtggtggtggtagattcacgacctaagcttgaaggtcaggccttacttcgtaggctagtggctaagggcctgagttgcacatatactcatataaatgctgattcttatatcatgcatgaggtcacacgggttcttctggg

SEQ ID NO: 12028 - DNA, 799 bp, Glycine max
cctatctctttcaacattattatcaagttgttatttagtattgtgaccaatggtcatcatgttaacaggagacagctgtcccgcaacacttccattgcccttggctgccttcacaagccttaccataacctacaaagttgataaggcatcagagcgttttcttaatttggctggccaaacattggagagcctcgctgcaggttgtccatggccttgcatgccaattgtagcttccttgtggaccctaaaggcaaaacgttggagtgacttccttatcttctcagcatctagaactgtcttcctccacaacagtgatgcagcagttcaacttctaaagagctgcttcacagctacccttggcatgaattagggctctcctatctcaagcagtggtggtgttggagcccttcttggacaaggatttaagtatcatttatgtggagggctttgccctgttgctccaggaattctctatttacgtgcgtatcggtcaatcagagatgttgttttcttgacggaagaaattgtttccatcttgatgcactctgtgagggaaattgtatgcagtggcctgccaagggagcgattggaaaagttgaaagcaaccaaagacggcataaaatatggacaggcttccctcgctgcttcaatgactcgggtgaagcttgccgctgccctcggggcctctttagtatggatatcaggaggcttgatgttggttcaattattaataaaagaaactttgccatcctggtttatatctgttcacagattagaccaggaagaaaagtctggtgga

SEQ ID NO: 12029 - DNA, 429 bp, Glycine max
cccacgcgtccgcccacgcgtccgaaaatgttttgatattaaaagaaaaatcattatgtgcaaagctttctgatatgggaattagtaaacgccttcttgaggatatgtcttctttgggtcacactgttactggctgtggaagttcagggtggcaagcaccggagcaacttgttcaaggacgtcaaacacgagctgtggatttatttagtttaggttgcattctctttttctgcatgactggaggaagacatccatttggagaacgtcttgagcgggatttcaatattgtgaaaaatcaaaaggatcttttcttagtggagtttattcctgaagccgacgatcttatttcttgtttgttaaacccttaaaaccctgatctcagactaacagcgattgaagtattgcatcatcctcttttttggagctctg

SEQ ID NO: 12030 - DNA, 539 bp, Glycine max
gttcttttgttctgtttaggtgcctgtttatatagctgagattgcacctcaaaacttgagaggtggccttgggtcggtgaaccaggttgaagccttattgttgcttcttgatgcaagtctgtttttttttttttttatttgaagtttattattcattaattttgtagtttttctggctcagctctctgttacaattggcattatgctggcttatctgttgggtctttttgtcaactggagagtccttgcaattctaggtaaattgctaattatttacttggcttagctcttgcggatagacaaatgaaaatattaaaaaccttggtcacaaattagtttcattaagttcttacagaaaggaacagaaggaatatgtgtgttcaggggaggagccatatttataaaataaaaaacagttgaccgtgatatacaggagtaaatttgatcggggatagaaagcacgaatatggcctgtggtcttgaagaaacacggcacaagctgacaactataataaaccttattaaattagcataaaaat

SEQ ID NO: 12031 - DNA, 484 bp, Glycine max
  unsure (1)..(484): unsure at all n locations
gtcacattcttcttcattcatattcagaaaaagcaaaagtccaaggcacatgatcccacaatggaagaaacaacatcaaccatcatcatggctgcactctccaccctcacaccttcccaattctcagatctcactcgctccattatctccgccaccaaccaccaccatcgccgcctctcctccctcctctcctccccaacgctcttctctttaacccttcaccatctccacactctcacactcccccagaagaccctcctcatcgcccgccacctcctctcctccctccacctcctcaccgccacgtcgccgcctctgtccaccaccacacggcagcgcgacctcgacgccgcgctgctcctccttctcctctgcgaaacgcacaaccacaacccacatgccctcgaggcaccgttctccgaatggagaaaaaacttgagcaaagtgttctctgattcgttgntaactgtttctctggcacccc

SEQ ID NO: 12032 - DNA, 456 bp, Glycine max
acgggactggtgcactgatcacaatattgagttcattgaggcatgtgcttccaatgctgattgggacaaatgtgtgtcgattgatggtgatttacaatgagttgagcgtctctacggtgcactttctgctcatatgtggcctggaatggtattgaaatctggcaataggataaatcaaccgtcatttcctgagaaagaagagttatcttcagaagaatctgattatgcacaagagtatgaagtcttatcagctggctcagccgattgggatgaaagtgaacaacgatgggtttctgcatcgtccttaggtgcagggggatcagctcctcaaaacaatcctggcacagttggtcaacatgaggatggaattaaatctgataaagagtcacatgctacaacctcaagcactgcaattcacgatgagagtgaaaaggatattgtgcacaattccatgga

SEQ ID NO: 12033 - DNA, 1766 bp, Glycine max
tgcagttatggttaaaaatgaaagtgagaagaacatgggttgacattataaatagaatgaagttgtgaaagatgaatctttgtatgatggtggatagggagttctggtggaaacagaaagaagttggactcaaaatctttttttgtaacatattatattataaaaatacctataaatctatgttgctttggatgtgtgtgtttattttctttaaaagtgttgcatgtttatgtgtgtgagtgtgggtgcacatactttttacagtaactgttttggaactccacgtatacggtatatcgtgattcaggtgaatgagaagttattcccatgccaactatcaaataaaaatgttgacatggctgataaggctgtgcaattggctgttgaaacatggggcaagagatccttaactgagcttgaagcagaggagcgcctatcctatacctgtgaaaagggtcctgctcaagatgaagtcattgccaagctgacaaatgcatttctggaaatcggaaaagaatataaagtcttcactgaggaagagaggaagaaggttgtggaagctggcggactacatgtagtaggcacagagcgtcatgaatcacgtcgaattgataatcagctgcgtggtcgaagtggcagacaaggagatccaggaagctcccgctttttctggagtctggaagataacatatttcgtatttttggtggagatcgaattcagggcctaatgcaagcgttcagagttgaagacctacctattgaatccaagatgttgaccaaagctttagatgaagcccaaaggaaagtggagaactatttctttgacattcggaagcaattgtttgagtatgatgaagtacttaacagccaaagagatcgagtttatacagagagaagacgagcccttgaatctgacaatcttcagtctcttcttattgaatatgctgaattgacaatggatgacattttagaagcaaacattggttctgatgctccaaaagacagctgggatcttgaaaaactaactgcaaaaattcagcaatattgctacttgttgaatgatctatcccctgatttgctggggaacacatgttcagattacgaggaattgcggaattatctccgtcttcgtggtcgtgaagcctacctgcagaaaagggatattgtggagcaacaagcagcaggcttgatgaaagaagcagagcggttcctaatcttaagcaatatcgatcgcctgtggaaagaacatctgcaggcactaaaatttgttcagcaagccgtggggttacggggatatgcgcagcgggatcctcttattgagtataagcttgaaggctataaccttttcttggatatgatggcacaaataagaagaaatgtcatatattctgtgtatcagtttcaacctgtgctggtagagcaagatcaggacaaaacagagaatcggaaatcaggaaaacgtaatgcacgaactcaggttaatccaaaccctgatccagttggcactgtcgagccttcaacgacaagtactacttcctaatatagcactcaagactaatatgtatctggagttccaacatattgaacgagaagtagaaagcttcagttgatcctccatgtttgttgcaatttattatagagattgcatatgatcaaatgttgtaaatatttacaaatgtatagcaagctgtaaaaagcttctgttaatcctccatgcatgtcgcaatttatggtaaaatagaaattatgatgctcaaacgagtttt

SEQ ID NO: 12034 - DNA, 419 bp, Glycine max
  unsure (1)..(419): unsure at all n locations
cccacgcgtncgccatcctagctactttctcactcttcaacactcatgggcgtaacgcgccgccgcagacatcaccatcacttccattggctgcaaatcttcaccaccttcacttttctcttcttctcttccacttcagccattaccactctcaccccacatcccagtggtggggcagcgaagcagcttaaccgggaagagaaacaaaatgggtcaacggtggtgccggtgaacagagtggtggtggaggagaagaggttcggcgggccggggtcgtcgccgccgtcgtgcagatccaagtgcggctggtgcagtccttgttttacggttcacgttccggtccaaccgggtttgattattcgcctcgagtactacccaaaagcgtggcgtgcagtgcggaacaagctattatgcatgac

SEQ ID NO: 12035 - DNA, 930 bp, Glycine max
ggattttgagattccaccagaggctcagcgtggtagtctgtcaacggtggaagggatacttatgagagcagctgatgggcttcaggcccttcaagaggaacgcaaaaaagtggctccagagacagctgaggcaattgatcagttcctggtgaaactgcgagcctgtgcaacaggagaatcagccttcacatttattcttgatgatcctgctggaaacagcttcattgaaaacccgtttgcaccatcatctgatccatcattgactatcaagttttatgagagaactcctgagcagcaatcatcattgggataccttgttggttccactcacattgaaggaattcatgatcaagcaccagaagggggagaagctgtgactgctgatcaagtgaggagagaacctcatgggtcaataggggcaacagctggtcatcgagccattgcacagagtaacagttcagaaattgctgaagccttatttcgatatactgcaccagaagaggtgatgacatttccatcttcttgtggtgcttgtgctgctagttgtgagactcgaatgtttgtcaccaatattccttacttgcaagaagtaatagttatggcatccacatgtgattcctgtggttaccgcaactctgagttgaaacctggtggccgaattcctgaaaaaggaaaaagaattactcttaatgtgaagaatgttaatgacctgagccgtgatgtaataaagttaaaagttgtaatgatacatatgcaggtctttctaataaggataaactgtgaaaaatgtcatgatgatacccatataggcctgatcatttaaattttttctgcaatctgagacataaaaatgtatttcatatctattgactgagtagtttggtttgattaagctgatactgcaagtgtaaaagttcctgaacttgactt

SEQ ID NO: 12036 - DNA, 807 bp, Glycine max
agttactagtgcatattatcgcggtgctgttggagcaatgttagtttatgacatgactaagcgccaatcatttgatgacatggcaaaatggttagaggaactgagaggccatgctgacaaaaacattgttgtgatgctaattggcaacaagtgtgatcttggaactcttagagcggtgccaactgaagacgcggaggagtttgcgcaaagagagaacctattctttatggagacatcagcacttgagtccactaatgtagaaactgcctttctgaccattctaactgagatatacagacttataagcaagaaaacacttactgccaatgatgatgcagatccaagtggtatttcagggcttctgaagggaaccaagataattgttcctagtcaagaaatcaatgctggtgaaaagaagggtaagggtggctgttgttgatgttcctaactttttcttgttttcactaatctttggaagcattttgcttcccccagctccgcctacgtgtaacgtttgtagagagggtagttacttttcttggtcatcccattatcagcaaaatgtagcctatatttatttactactgtgcttgttgattgcaagcatatacacagtctttcttctgtttttggccctttctctagctttaggatttcaatttgttaatacaaactcccggttgtgaagggatggttcagttcagatagaggaatggaaactgtataacttactagatgcaattgttttttgccggtagttaaattttttagtattaatgtgatcttttgatgtgagatatttattat

SEQ ID NO: 12037 - DNA, 486 bp, Glycine max
caaggtttctggtttagctagctcccgctgggtcctttcttctcaccactgcacccacccatccctctcgcgttgagtcacgagtcacgagtcacgagtcactcactaaaactactacttcctcagttcctcctgttagggttctctttctcgcgcactcgtcactgtctcctccttcatcttctcccgctccgaattttgaccgagttgttgactccacgatggcttccaattccgatttggtccgcgccgttgagtcgctcctcggcgtctcgctcgccgattccgtctccgattctttgctcctcattgcgaccacctccgccgccgtcataatcggccttctcgtgtttctctggaagaaatcttcggatcggagcaaggaggtgaagccggtgatcgtgccgaagggcttgccgaaggatgaggacgacgagatcgatgttgccgacgggaagactaaggtcacgattttcttcggtactc

SEQ ID NO: 12038 - DNA, 430 bp, Glycine max
ggaaatccattgacatcgatggaaagaagtggcccagtgtggctggtttagcttagttagcgtcccgctgggtccttccttcttctcaccactgcaccaacccatcccctctcgcgtcgagtcacgagtcacgagtcacgagtcactcactacaactacttctttctctttctggtaggtttctctctcgcacacttgtcactgtctcctcctcgctcccaattttgaccgagttgttgactccacgatgccttccaattccgatttggtccgcgccgttgagtcgctcctcggcgtctcgctcgccgattccgtctccgattcgctgctcctcatcgccaccaccttcgccgcgctcataatcggcctcctcgtgtttctctggaagaaatcttcggatcggagcaaggagctaaagccggtgatcgtg

SEQ ID NO: 12039 - DNA, 1118 bp, Glycine max
cgttcgcttgggcggacgcgtgggcggacgcgtgggcggacgcgtgggcattgagttgcgctgttccttcctcctgttgtctgtctcttaacaaatcaattcatttccgccgccgtcgtctccgccgctgagagcgatgtcttccgtcgaaacggagatggagccactcacgtcgggggccagcaaccgcataattccgctcctcaaggccctcagagcctccctcatcttcgtctacaccttcttcctctccttcctcctgttcgttctcccccgccgccgccgcctctcccccgcggcggggccgccctctccgaagaagcatttgaggcggcgctggctcgtgcgcgaggaggaggacacgtgccgcagaagggcgctggcgcaggacgtgggaatgggtcgcgacgaagggtggtaccgctggagcacttccatcttctacggggttcgaaacaacgctctgttttgccggtcctggttcccggttgccggtgatgttaagggcattctgatcatcattcacgggctcaatgaacacggtggaagatatgcggactttgcaaggctattaacatcatgcaactttggtgtctatgcaatggactggataggtcatggaggcagtgatggattgcatggttatgttccatctcttgatcatgtggttgcagatacgggggctttcctggaaaagattagatcggagaatcctgggataccatgctttctctttggtcactccactgggggagctgtggtcttgaaagcggcttcccatcctcatattgaagtaatggtggaaggaattatattaacctcaccagctttacgtgtgaagccagctcatcctattgttggtgctggttttgcatttgttagttgtgcataatgtttgaaattaatgtgtttctgatttgttactacagtcctagccatgctcggtacacttgtacttatatcttaagcttgccgtaaaaacaacctccgtttccaattgttatgtcaattctctgtaatatacaaagttatcattggttcatttgatgttggtgaattggaagcagaataaacacaactacagatgttattttactttgaaatatatatactagatt

SEQ ID NO: 12040 - DNA, 620 bp, Glycine max
  unsure (1)..(620): unsure at all n locations
gtcttggaacgcggctgggacgttgcttgcaacttgtagtagagataagtctgtttggatatgggaagtgctgcctgggaatgagtttgagtgtgtgtcagtgctgcaaggacactcgcaggatgtgaaaatggtgaagtggcatcccacagaggatatcttgttttcatgtagctacgataatagtgttaaggtttgggcggatgaaggtgatagtgatgattggcagtgtgttcaaacgcttggggaacccaataacggtcatacttccactgtttgggccctctccttcaatgtgagtggtgacaaaatggttacgtgtagtgatgatcttacactgaaggtatgggaaacagaaagtgtagggacgcaatctggtggtggatttgcaccttggacacatcttttgcactctctcagggtatcatgatcggacaatattctcagttcattggtcaagagaaggtatctttgccagtggagccgcagataatgctatacggctttttgtggatgacaatgaaagtcaggttggtggtcctctctacaagttgctgctgaagaaagagaangcccatgacatgcatataaattctgtgcagtggacccctgtggagaag

SEQ ID NO: 12041 - DNA, 537 bp, Glycine max
gcttatcttgatttgtcccataattctcttcatagtgaaataccttcttcattggcagatttgacccaattagagttcctaatcatctctcacaacaacattcaaggctcaattcctgagttgttgtttctaaaaaatctcactgtcttagatttgtccaataattcacttgatggtgagatacctcgtccggcaaatcttatccaattacagagcctaatcctttctaacaacaaatttcaaggtcccattcctcgtgagttgtttctaaaaaatctcattgtcttagatttgtcctataattcacttgatggtgagatacctcgtccgacaaatcttaccccattacaaagcctaatcctttctaacaacaaatttcaaggccccattcctcttgagttgttgtttctaaaaaatctcactgtcttagatttgtcctataattcacttgatggtgagatacctcctgcactgacaaatcttacccaattagagagcctaatcatatctcacaacaacattcaaggttcaattccg

SEQ ID NO: 12042 - DNA, 429 bp, Glycine max
cccacgcgtccgcccacgcgtccggtggaagtggaaatggcaactctactggaaccacggctgggggtggtatcatagttgttggatcattagaacatcctttgtcaagtttgtctattcaaggttatgtaaaagctaatggaggaaattttgaaccgcaaatcagaaacgaaaaatttgcaatatttgacaattttactggaggtcccgggggtggatctggtggcactatactaatgtttctacatatgctcaccattgggaaatcagctgttctttctagtatggggggatatagcagttctaatggaagtggtggtggaggtggtggaagaattcattttcattggtccgacattcccactggtgatgtttatctgccaattgctagtgtgaatggagacatttagatctggggaggaaagggta

SEQ ID NO: 12043 - DNA, 533 bp, Glycine max
ctctgcttctgcaactgtattccaccatagcagggatgccgtagttcagctcttaagaagttgcttcgcctccacccttgggcttggttccgcctgcatttataacaatggtggtgttggcaccctccttggtcatggctttggttctcactactccggagggttcactccggttgctcctgggtttctctacttaagagtttacaggtctattagagatgtgatgttcttgacagatgaaattgtatctcttttaatgctttcagttagagatatagcaaatggtgggttgcccaagggtgaagtggagaagctaaagaagactaagtatggaatgagatatggacaggtttctctttctggatcgatgacacgtgttaagcatgccgctcttcttggggcttcgtttctttggatatctggtggttcaggtttggttcaatctttgattacagaaactctgccttcatggtttttatcagcccaagggttagagcatgaagggggagaatctggagttgtggttgctatgc

SEQ ID NO: 12044 - DNA, 538 bp, Glycine max
aaataatagcataaaatattataaaaaaacttatatattataaagataaatttctcatcaagaaaagacttttatcaattaggtaaaatacaaggaatatttcagctttaacataaggggtattcaaggttggtttaagttggatttaactaaatcttttattcaattcgttcaaaattatattggttgagttgaatttatgtgattttgttgttaaatttaaactgaatcaatctagtcacaaataaattgacttgggttgagtaagtcaggtctaagcttttatagttattttaagtgtcctaaagaataattttttttcttaccaatttttacatattctatagttaattattgtatatttaattaaaaataaatgcacattctaaagatattgaattttatcaacgttgcatacttgtactaaacaataaattaatatttgtaatttaaaatatatgtatatataaataataaattaaaaaaaaatgtcagcacaacatattgagttcacgagttcaaaaataaaaattattac

SEQ ID NO: 12045 - DNA, 557 bp, Glycine max
cttttccgctcccgtaggcatcgaagatttataattccaatcatatatagtaatcgtaacatcgtagtataatctgattcatcaacagcgcttgtcggaaacagagtcggtttagtttgttagttagttgtttaatgaacgcaattcggtcccgttggttgacgagaatggcagaagacattgggaaaagcaacctcgaatcctcttctgcttcaacaacttcccgaggcttctggccttctgtcttacgttggatcccctcttccaccgatcacatcatcaatgctgaaaaacgccttctctctcttgtcaagactccgtatgctcaagaacagtaaggatgattctcctacgctggtgatggttcatggatatgcagcatcgcagggtttcttctttcgcaattttgatgcccttgcctcccgtttcagagtgattgctattgatcaacttggttggggtggatctagcaggcctgactttacatgcagaagcactgaagaaactgaggcatggttcattgattcttttgaggaatggagaaaggccaaaaacct

SEQ ID NO: 12046 - DNA, 588 bp, Glycine max
cttttcttttccgctcccgtaggaatcgaagatttataattccaatcatatatagtaatggtaacatcgtagtataatctgattcatcaacagcgcttgtcggaaacagagtcggtttagtttgttagttagttgtttaatgaacgcaattcggtcccgttggttgacgagaatggcagaagacattgggaaaagcaacctcgaatcctcttctgcttcaacaacttcccgaggcttctggccttctgtcttacgttggatcccctcttccaccgatcacatcatcaatgctgaaaaacgccttctctctcttgtcaagactccgtatgctcaagaacaggtcaatataggttccggtccacctgattccaaagttagatggttccgttcatctagcaatgaaccacggtttattaacacggttacatttgacagtaaggatgattctcctacgctggtgatggttcatggatatgcagcatcgcagggtttcttctttcgcaattttgatgcccttgcctcccgtttcagagtgattgctattgatcaaactggttggggtggatctagcaggcctgactttacatg

SEQ ID NO: 12047 - DNA, 359 bp, Glycine max
atactttttccttgtctatttctgtaattgctacctattcttttactactaaacacatatcgttgcctattttcggattaacccattgttttactacctttgaatatctgtttttcacaataaaattgtagaaatcagggcgcttcttcttctgaattgagaaatgctaccaacaacaacaatctctctaatacattctttgcaagcatactcttttttatcgactgaaatttttggaaaatcacaaaattttgcaggactccgtatgctcaagaacaggtcaatataggttccggtccacctgattccaaagttagatggttccgttcatctagcaatgaaccacgggttattaacac

SEQ ID NO: 12048 - DNA, 1635 bp, Glycine max
tgtgaagaggttttcttgtgtggttttgctggctctggaaggaacatggcatgaaagaacacacgttatattcaggttgacttttctgtgagaggaacttggtaagatagagcacatgatgtataaaatgagagaaaagcaagagcatgagcgttcgtgatcacacacagaagatcgatctggtagaaacgatgaaggaactatgggcacaaatggggtcactaatggccactattgtgttcatgtacacaatctttgagcgcttcttccctccacacttgcgtgaaaaacttcaagcctatactcaaaaactcaccaaccatttcaacccttacatccaaataagcttccctgagttctcaggggaacgactgaagaagagtgaagcatacacagccatccaaacctacctgagtgcaaactcatcccagagagccaaaaggctcaaagctgaagttgtgaatgatagccaaacccctcttgtcctcagcatggatgacaacgaagagataactgacgagtttcatggcatcaaactatggtggagtgcaaacaaagtaagcaacaatccacaaagatacaaccctttttcttattacggttcctcagacgagaaaaggttctacaagctaacattccataagcgccaccgtgatattgtcaccatgtcttacataaagcatgttttggatgagggaaaggatattgagatgagaaacagacagttgaagctttacaccaacaatcctagtagtggttggtatggttacaagcaatcaaagtggagccacattgtgtttgagcaccctgccacttttgaaacactcgctatggatcggagaaagaaggaggatatacttaaagaccttgtgaagtttaagaagggaaaggattattatgcaaagataggtaaagcttggaagcgtggctatcttttgtacggtcctccggggactggtaagtctaccatgattgctgctattgctaatttcatgaactatgatgtgtatgatcttgagttaaccgcggtgaaggacaacactgagctaaggaagctgttgattgagactccgagtaagtctatcacggtgattgaggacattgattgctcactcgatcttaccggccagaggaagaagaaaaaggaagagaatgaggatgaagaacaaaaagatcctatgaggagaaatgaggaggagagtagcaagagtagtaaggtgactctgtctgggttgttgaattttatagatgggatttggtctgcttgtggaggtgagaggatcattgttttcacgacgaattatgtggagaaacttgaccctgctttgattaggagagggaggatggataagcacatagagatgtcttattgttgctatgatgcattcaaggtgctggccaagaactacttggatgttgagtctcatcatttgtttggtgcaattgggggattgttggaagaaacagatatgtccccggctgatgttgctgagaatctgatgccaaagtctgtggatgaagatgtggagatttgcctgcacaaattgattaaggctcttgaagaggccaaggaggaaaaagcaaggaaaaaggcagaagaagaagaagaagcacggttgaaggaggagaaagtga

SEQ ID NO: 12049 - DNA, 493 bp, Glycine max
caaccattaagggtgttcccatcaccaattcctttagtccagaaccaccatcttcacatggaagaccaagtcctagccctgctgcagcgaccgagccgctctcggattctaactgctgctggccccattgcaggccattttgctgccccgatgaggtcgaagccaaagatgatgatgacacaataccaaacccacgaagaagggaggcgtttgtggcagcagcacccatttgagctgccttctgcagcaatgcagtggctgacatggcaggctgcggtggcgacgacacatactgttggcctactgttgcgaagattggtgaggcactggtggtggagaggcaaagagatatggcctcggatgatgaaggagctgagataagcggacgcgtgggcggacgcgtcccatggctctaattaagtcactgaatgactggtgtttgagattgtaggctcccagatgctgttgaagaagcaaataaacccgcaaacac

SEQ ID NO: 12050 - DNA, 284 bp, Glycine max
ctgtcccgacgaggtggaatccaaaggtgacgatgacacaatgccaagcccgcgaagaagggaggcgtttgtggcagcagcacccatttggtgctgccttctgcagacattccaggggctgacatggccgggtgcggtgaagacgacgcatactgccggccacctgttgcgaagattggtgaggcactagtggtgctggccaagaactacttggatgttgagtctcatcatttgtttggtgcaattgggggattgttggaagaaacaaatgatgagactcaacg

SEQ ID NO: 12051 - DNA, 694 bp, Glycine max
cttaacactagtcattaaaagatgagttccaattccagagagagtcaagttcacccagaaatagcaaaggtcgaggatccttacctctctgctgtgttactttgctttagccgggtcctccctgcagtcctaaatgcagctattgatctcaatttgtttgatatcatagcaaaggcacagagttcatgtgactcaagtttctcagcctctgagattgcttctttgcttccaaatcaacacccacaattggctaataggcttgaacgcatattacctttgttggccagttattctcttctaaattgctccattcgcacaaatgaagatggtaagagagaaagagtttatgctctctcacccgttggtgcatactttgcatttgataaggatgaaggaagttctttggctcctctctcttctttaatccatcgcggatttcatgacatgtggaaggatgtaaaggatgcaattgtggaccctaacaacaataaccattttgaaaatgtgcatggaataccaccatatgattatatggagaaaaatgctgagctgaatgacattttttacaaagcagtaattcacgctgccccactagaactgaaaagggcactcaaactatacaaaggatttgagggagtgtcaacacttgttgatgtaggaggtggagctggagagaccctgaaacagattctcc

SEQ ID NO: 12052 - DNA, 890 bp, Glycine max
taaagggtgatattcaggatgaataaaagctgctggtgctgttaggcgcttaagcttgagtgaacaagcacttgataaggcttctgaatcttatggagctgatattgttaggtttacgcagaacaatattctcagagtatatccaaagggaacacgtctcaattcctcaaattacaagccacacatagggtggacatacggagctcagatggttgcgttcaacatgcaggggtatggcaaatcacttcggtacatgcaaggaatgtttagagcaaatggagggtgcggttatgtgaaaaagcctgaatttctaattgaaaaaggcccacataatgaggtttttgatcctaaaagaacattgcccgtgaagaaaatattaaaggtaaaagtctatatggggaccggttggagcttagatttcagccaaacagacttcgatacttactcgccacccgacttttacgttaaggtttgtattgttggagttccagctgatatggccaagaagaaaacatgtgtaatttcaaataactggtttcctgtctgggatgaacagtttgatttccctttgactgttccagagctggctttgctccgcatagaagttcgagagaatgacaagagtcaaaaggatgactttggtggacagacgtgtttgcctgtctcagagctaaaatctggattccgatcagtccctctgtatgatgaaaagggtgacaaattaaagtctgtgaagcttctaatgcggtttcagtttagatgaattataggatcagccatataataatctttagttgcttgcaatcgggtatttctggctttactatgttatattttctgcaccatcaacatcaatatgaaacagtattaagaacttccaatattgtcac

SEQ ID NO: 12053 - DNA, 458 bp, Glycine max
cccacgcgtccgtggagttcctgctgatatggccaagaagaaaacaagtgtaatttcaaataactggtttcctgtttgggatgaagagtttgattttccttctgactcttatcattctctcgaacttctattcgaagctcaggagaatgataagcgtcagaaggatgactttggtggacagacatgtttgcctgtctcagatctaaaatctcgattccgatcagtccctctccatgatgaaaagggtgacaaattaaaatctgtgaagcttctgatgtggtttcagtttagatgaatcataggatcagccatataataatcttagataatggatatgaggtcattgtaatgataattatatttatctttagctgcttgcaatggtatttctggctttactatgttatattttctgcaccatcaacatcaatataaaacagtgttgcgaaaaaaataat

SEQ ID NO: 12054 - DNA, 260 bp, Glycine max
gtcagaggcaaggtgtgagcgtcattctagtaacattcactcttatggttgctgctagtggccttctgttcgaaagtttcaggtcaatttgatttgcaggtccacaaagctgttgatgcttgcaagaatgttcttagaggattgcatagcaacaaaattacggagagggagttggacagggttagttattgaaatgctcaacttgtttttacattacaatttagtgagcagcacttttagacagtttttctcctatacgt

SEQ ID NO: 12055 - DNA, 423 bp, Glycine max
cccacgcgtccgcccacgcgtccgattctttcccttcggattaggccctcgaatctgtgtggggcaaaatttggcattggttgaggcaaagattgctcttgctttgatcattcaaagttacagttttgtgctatctccaaactatatgcatgctcctatactatttgtgactttgcagcctcaatatggtgcacaaatcattttcagaaagatatcatattgctgattgttgttgccttttcccacttctccccctctgtaactttaaactccgtaaatggggaagcattgtagctataaatattgtgctttttttacttgtgaaagcttatgtagcctatgttgataactggtgaaagtttttcaggttaaagcagcataccttaaattggatcatcaaatatataaagatttggcatgcaa

SEQ ID NO: 12056 - DNA, 804 bp, Glycine max
tttttgttcaaggctgctgagttgtgcatggttggtttgagtgctggtgcagtacagggtgcgttgtcaaactctttggctagtaaaaaggaggggagattatctgtgacagtcccaagtgtgagcagtaatgctcttggttatggtgcttttcttggaatttatgctaacctgagatatcaactgttatgtgggtttgatagagcaatgatgacccattttgacgtcattggagttgccttgttcttcagcacagcattcagggtcttgaacgttcaattaggagagacctctaagcgtgcctgggttggagttgaggcagatccactggctcagtcggatgacctcttgaaagtttataacaggacttctgagaatgtagaaaagtcatcctcaaaatggtttatatcaaagaatgcggttgtttctgggcttggactcctaggcatcaaacaaaggaatgcagacgggtctggttcagaatcttcagctcctaaatctcgccggaaaaggattgttcggaagaaggttgcagcgggttctgcttagtatcttctgatgtaaacgtggtcatagtccaattttgccgtttgcttcttctggagggtcatttgtggtttactggctgcttcaccaagtccggggggtaattagtggaccaagatttttcatcacattgagggttttgtttttaaattttgttaggaattcttatattgatccttttgtgttttgctatctgattctgtactagtatatattttgaatcttttaaataaagtagagcaagtattttttttttcc

SEQ ID NO: 12057 - DNA, 730 bp, Glycine max
ctcgagccgattcggctcgaggttagagttccccttttaaagagaggggtgaatgacaccaacagaggcaagaatcccaatagtcaaattcaagagattcccaaacttttttactttttattccctttttctcactatacaatacaaatacacattcaacaattttcgattcaagttcaaagccatcgacgagtgttgaggaagaataacaatgggaatgatagtggattttgaaaatgaccaaaacgacgccgttctggttccgccccctaacttcgccatggttgaagactgcgttttccgatccagcttccccaccccttccaatttcccctttctccaaaccctaaaccttcgctccatcatatacctgtgccccgagccttatccggaagaaaatctcgagttcctccgctcgcagaatattcgcctctttcaatttggaattgaggggaaaacggacgtttctatgcctgttctcaaggattctatcatggatgcactgaaagttttaattgatgtgagaaatcaccccattttggttcattgcaagcgaggaaagcatagaacaggttgcctagttggttgcttgcgaaaattacagaactggtgttggtactcctcaaacacagaggacaaacgatttgctggtgctaaatccaggacaacggatttaacattcatagaaatgtttgatgttctaagtctgagtcagtgcctttacagcatc

SEQ ID NO: 12058 - DNA, 542 bp, Glycine max
gtttcgtcgcaatagcggcaacagcaaaatctagttgtacggcgttttggaatcggagggagaggagaatccattccaaacggcgccgtattccttaaaagggggaactctaacaccggaattttcctcacaaacacaataatcgattcgaacgttcttgaagttgaaagtcattaactatgggaatgatagtggaggttgaaaacgaaaacggagacctaaacgacgccgttcttgttccaccccctaacttctccatggtcgaggactgcattttccgatccggcctccccaacccttccaatttcccctttctccaaaccctaaaccttcgttccatcatatacctgtgccctgagccttatccggaagaaaatctggacttccttcgttcgcagaatattcgcctttttcaatttggaattgaggggaaaacggacatttctatgcctattctcaaggattctatcatggatgcactggaagttttaattgatgtgagaaatcaccctgttttgatccattgcaagcgaggaaagcat

SEQ ID NO: 12059 - DNA, 521 bp, Glycine max
caaaggttccggtttatataatttcttcagtggctgaagagttactagcgttgctgaacggcgggcctgactggctttgcaaacagccgcaagagaaactatttgatggggaaccattgtttgcacacctcaagctcctaaaagagagaaaaattcatgtggttcctgctattcattctcatgaactcttaattaattggcaggaaccatgcattgtattttgtcctcaccggaatttgcgtatgggtcctgttgttcatttgcttcgacgatggtgtggtgatccaaaatctttacttattcttgaggatgttttgaatccactatcacttttaccttaccagcctgttgcaatgaaggttcttcaatgtgtatttcctgttggaatacggttgcatgaagttcaacctttactaaagacattgcagccgaagactgttctgtgtccggaggagttgagactgcatatcaacttttcaagtgaaaagaagactttctccgttttgtattatactgaagct

SEQ ID NO: 12060 - DNA, 532 bp, Glycine max
ccggcacgcaaatacaacatcgttgttctgttctgttctgtagctaatagatcccatctactggtacttttattattctgtctccttcttcactttttttctccaatggaacactcaaaagatttggacgctctctattactcttagacgtcatgttctgcctcagatcctttcttttcacactaccctcggccttgatatacaaaaagacatgtataagaaccggttgcaagaattggctcaaagaagctggtttaatttgccggcctactcatgcattcgcgaagggccagatcatgctcctcggtttaaagcaactgtcaactttaatggagagacctttgaaagccctacattctgctctactcttagacaggcagaacatgcagcagctggagtggctcttaacactcttgcaaaaagaggtccctctggagctttggcagcaagagttctggatgaaacaggagtatacaagaatttgctccaggaaactgctcatagagctggactgaatcttcctgtgtataca

SEQ ID NO: 12061 - DNA, 461 bp, Glycine max
acccacgcgtccgaaaggggttttaactgcgccctttaggctgctcaaaacaaatcgactaggggttatcctgacctttgctgtttacaagagagatctcccatcaaatacaaccccaaatgaaaggattcaagcaactgacgggtgtgcctagtttttgaatttttttgcatctgacattcattagcttttttggtcaatttttatgattttttatcattcatataatttagcttattccattttggtcatctaaagctttgaagtactactaagtaactaatccctgtattcaaattttcagagaagattcatgaaatctattaatgtgagaagagtgaataattattggctctccccttgtgataattagaagctttgaagttataaatctacttttaaattcaataaagccaatgggggaaataaaaaaaattgtcaaagactattggaaggtgttg

SEQ ID NO: 12062 - DNA, 515 bp, Glycine max
gcgtccggccatgtattcttcattgtacttggtacataagagtggctattctgttatggactctgttgtataccaattcacatgcatttgacttgatatttcatcttgttgaattggtgtactataacacggcattgaccttggtttgtatattttgcagaagtctcagataaagcttctcacaaagcattttctttggaagacaagcagaaacttgataggcagttgcatgatatggctttagccattgagaggttggaaagcagtacgcagaaacttctaatggagattgactcacaatgtactgaaatagagaggctttttgaggaaaattctaatctctcaaattcgtaccaagaggcagttggggcagcagcaagatgggaaaaccaggttacaatcagcatcaggggtttggccataaatataaattatgggtactcggttaaaccgttaacgtctcatctgtacgaccaaaatttactggatttcgctcttaaaaatcttactattac

SEQ ID NO: 12063 - DNA, 727 bp, Glycine max
aaaaaaataaaaaagtgctggaaccttttttcatcaaatagttcatatttgattcctgagggagtcttgttaaggaatttagagagcagagaggaagagatttgtattgaggaattcaacccaactaaaaacagtttacaactctgtttatatgacagttacataactgtaactgtcaactaacctgagtgagttagtgacatctgtaacatagctgtcctaactaactactgaccatagttagacttactgacttagctaaacttcggtattctgcttcagtactggacctagccactactgattgctttttggaccaccaagagaccaaattgggtcctaggaaaattgctgcacctaaggtggaccttctatcatcaggatctgatgcccagtcagcatcacaataggcatgaacagaatagtgagagaaagagaaattaggctgcatactagtccaaaattgatagtccctttgagatacctaagtatcctcttcacagctatccaatgctggtcagtaggtttactcataaactggcaacctttgttgacagaaaaactgatttctggccttgctattgtagcatactgaagagcacccagaactgatctataaagagaggggtctgaaaaatattcataccctgtttgagttagtttgcagccaccaaccataggagaagagatagaattagcctcatccatagttggctttgcttggatt

SEQ ID NO: 12064 - DNA, 494 bp, Glycine max
cttcacctgccccaccacgatgcaggagctctgggatgattccgtcactccaaacaccaccctttacaggctcatacacatgtggttctcgcagaagtacttgctcatgaagaagaggtcagaggatgttcaaggaagggcttctgaacttcttgagacactgaagaaggtgaagagtcaggctcgggttcaggccctcaaggagcttcaccaattagtggcttcccatgccactgcacgcaagactgtcattgatgaaggtggagtttctggtgtatcttctttgcttggtccttttacttcccatgctgttggctctgacgttattggtattcttgtgactttgacacttgattcggaatctaggaagaatctcttgcagcctgccaaggtttccttaatggtggacatcttgaatgagggttccattgagacgaagatcaattgcacgcggttgattgaatcgttgattgaggagaaggattttcgatccg

SEQ ID NO: 12065 - DNA, 631 bp, Glycine max
gcgcgccttttactttgaacttgagagttggtagtggagggagcagagaacccgaacgccatgtttggctccgctcaaccttcttcttctcccttcggcacccctgcattcggtaccccttcttctacccctgccttcggttcttccctcttttccacacccttctcttctcaacaaccacaaccacaacaacagcagcaacaacaaacacctctgtttcaacagcaacaacaacaacaaacttcttctgctttcggctttcagaattcactcgcattcgcagcaccgcaatcctcgcccttcccaaatgctcaattaaccactcagatggctaacgttgcacctgttcctttctccctcgccgatcgcgatgttcagactattgttgatgcatataaggatgatcctgggaaccccaagtacgcctttaagcatttgttgttcagtgtaacagaaccgcagtttagagtgaagcctgctggtgtatcagatatcatgtgggcagaggcaatagggaagcttcagggtatggaacagtcctgatagagaacgcctgtggccacagcttgttcagggttttaaggatctttcacaacgccttaagatacaagatgaagtcatcgtttctgat

SEQ ID NO: 12066 - DNA, 380 bp, Glycine max
tcgctcaggcgtcctatatgttgtcctcgagctcgtttactaggacataccatgtgacaggtgaggaggtccgtccggattcatggccaatgacattcgggatgacgctcacgattgcgcttgctgaataggggttcgaatatgaggacttggaggacgacttgacgatcatgtgacctatgatctcacatatgaacacgattcacaagatgattcccgatgtcatacacattggcgaatccattatcgatgccctcatcgttgatgaggacattgatgacggttggaatgacaggacttcatagccgtattaagacgcttacgatagagcttaggctggatactgggccgattatgttcacgatcttatacatgagatt

SEQ ID NO: 12067 - DNA, 567 bp, Glycine max
catagttttgtgcgatactggcgccgaaatgatgatggaagttatgttgttttatttcgctctagggaacatgaaaactgtggtccacagcctgggtgtgttcgggcacatattgaaagtggaggatttaatatttcccccttaaaacctcgaaatgggaggcccaggacccaagtccagcatcttatgcagattgatctgaagggatggggtgtgggttacttgtcatcttttcagcagtattgtgtccgtcaaatgttaaatagtgtagctggtttacgtgaatggtttgctcaatcagatgaaagaaatgctcatccaagaattcctgtcatggttaatatgtcctcaacagctgtttcttcaaagaagaatcagaagccaaatgatttttctgtcaatcctacttctcttgatcaaatgaatgctgcaagcagaagttctgccttgatagatgaatattctgatgatgaagaagattttcaaatagcggaacctgaacaagaggcataccaaattggtcttgagaatgatgtgagaaaaacagccttggaagaagaaccggca

SEQ ID NO: 12068 - DNA, 512 bp, Glycine max
  unsure (1)..(512): unsure at all n locations
cggctcgagctggggcaggagactttggtcctccaaattttggctttgaaactggaagacagtgaagctgctgagcaatattgtgctgagataggaagagctgatgcatatatgcagttgcttgaaatgtatttggatccacaagatgataaggatcccatgtttactgctgctgttcgccttctgcataatcatggagaatcattagatccattgcaagttttagagaaactgtctccagatatgccacttcaacttgcttctgacactttactaagaatgttcagggccagagttcatcatcatcgtcaaggacagattgtgcataatttatctcgtgccgtagacattgatgcaagattgtcaagattggaggagaggtcaaggaatgtacaaattaatgatgagagcctctgtgactcctgtgatgcacgtcttggtacgaagctatttgcaatgtatcctgatgacactngtgtnatgtacaagtgttaccgncgtcaaagtgagtc

SEQ ID NO: 12069 - DNA, 524 bp, Glycine max
gtggggctcgtgggttcaaatgcaggaaacagcttctccaaatcttggtgcacagggttgccgcccttttttagggtttggctcttctaaagcagttgcttagtttcaagaagtcatgcgagatccacatgtagctgcagatggttttacttatgaagctgaggctatacgaggatggcttgacggtggtcatgacaattcaccaatgactaatagtaagctggcacatcacaatcttgttcccaaccgcgctcttcgctctgcaatccaggactggcttcaaaaccactgatcaagctcattatttttctctgcccatttttattgaactgtgtatctactgtttataccatgtataggaaagaaaagtgtcatttcattttgttaccttatatcagttttatttcttggggttcttcaatcacattttatacctatcctcttgtataggttagataaccacgggattatcttacaatagttgtaaagtacatatatatcatagcatatatgtcagaagtcaa

SEQ ID NO: 12070 - DNA, 475 bp, Glycine max
ctcatacaaaattatattcttattttccctatgcacttggggtgcataagctgaggaccctttagggcgattctgctacgaaaacaccatcattggcagtggaggaaaattatcagccaatattgataaaatattgactgaaatagccctcaaaactccctccactggttttgttgccaccacatatggcatagaccaagactaagtgtacgcactcgctcaatgtagggcagatgttagcacccaggattgctccaattgcatccaagatgcaacgaaacaaatccgccaacgctgtccaaaccaagtggatggcagaatttggtatgattactgctttgtaaggtatagtaacaagagtttctttggtgaggttgatacatcttttggtatattctatttcaatgttgaaaatgtgactgaccctgaagattttaacaaagagcttggggctcttatggatcacattagagca

SEQ ID NO: 12071 - DNA, 442 bp, Glycine max
ctagtcatcaatttttttattatgagaaaagagaactataaatagttatccaattatatgtgtatagacaagattaaaagttaattagtgatattatatgattatttaaaaagttatctgtatttttctgttgatggttcaaatataatctaatgatcttatttgtatttctcactttcttacaataagaagtattgttatttaatgggtttcacatgcgagttatatataatgactatacattatttttagatagtagattggtttgtgaagatttggccaaaatttaagaccataggaccaaatgtgccatctttcttcttagataagcaatgcgaagatgaccaagattatggggttacacaattcaagagtgaagaatgcgtggaatggctagatgataagccaaaagggtcttgtggttatgtattcgttgggagta

SEQ ID NO: 12072 - DNA, 726 bp, Glycine max
gttttgaacctgaattgcctgcaaggaaattggaagcaattgagaggatggggtttgggctgctgaacaaggttgctatggtttttcctcatgtgttttggggggaagatcgagacacatttggatgtctcaatgaacatagtcatcaacgtggggaatttttcctattttactgttaccatacagtttctggaggtccagcacttattgcgctggtggctggtgaagctgcacaagcctttgaatccacagatgcttccattttgctgcatcgggttttgaccgtgttaaaaggaatatttcatcccaaaggcatcattgtgcctgatccaatacagtcaatttgtacaagatggggcagtgatcccctttcttatggttcctactctcatgttagcgttaagtcatctggtgccgattatgatatactcgctgaaaacgtggggaatagattgttctttgctggtgaggccacgagtaggcaatacccagctactatgcatggtgctttcttgagtggcttaagggaagcatcacacatttaccgatcagctcggattcaaaacaatcctaggaagtgcatgcctaagaatatcgtaagcaatgacatcctgggtgatttattcaagtggcctgatttggaatttgggaagtttgctttcattttttatccgtcttcagaaaatctgcagtcaacggggcttctgcaagtcactattggtgatg

SEQ ID NO: 12073 - DNA, 758 bp, Glycine max
cgaccggggcgaccgaaaaaaggttcatagttgatatctccagcggaacgatgaagtttgaagatttggcagaaggatgcatggcaaaaatactgtcctacaccactcgtgcggatgtatgcaggctttctctggtttccaaagcctttcattccgcggctgaagccaacactgtgtgggattgctttctcccctctgatttgtcctctatcatctccccttcttcttccgttcctccctttcgctctattaaggatctctatctctatctctccgatcgtcccaccatcatcgatcaaggtataaagagttttcaattggagaagcggactgggaacaagtgttacatgctttccgctagagatctgagcattatatggggtgacactactcattattgggagtggacaaccctaccagagtccaggttcgaagaagttgctaggcttcgagctgtgtgttggtttgacattactgggaggatgaacacccgcgttttgtcgccaaatactaattatgcagcttttcttgtgttcaagatgatcgatgccggtggatttcactacgatcctgcggtgttatcagtaggtattttgggaggcaatagcagtaccaaaaatgtttgtttggatcccaacttagtagataatcgacttgatgatagattccatggactccaacgtccaactgtgaggagcgatgggtggctggagattgagatgggtgagttcttcaatccaggcctagaagaagatgag

SEQ ID NO: 12074 - DNA, 1097 bp, Glycine max
cccacgcgtccgtctctgtaagctttgctttcaattttctccttacaaaaaaatcctttcccttctctagtccccataactagcaaaagaagccaatagaaaactgttccatatagtttcccattcaaacttgttttgattttcattttaactcaatggagaatagaacaagctctgtactcccacctggcttcaggtttcaccccactgatgaggaactaattgtgtactacctttgcaaccaagccacatcaagaccatgccctgcatcaatcatcccagaagtggatatctataagtttgatccatgggaattacctgaaaaaacagactttggagaaaaggagtggtacttctttagtccacgagagaggaagtatccaaatggggtgaggcctaatagagcaaccgtgtctgggtattggaaggccactggcacagataaagcaatctatagtgggtctaagcatgtaggggtgaagaaggctttggttttttacaagggtaagccaccaaagggtctcaagacagattggattatgcatgagtatagattaattggatcaagaagacaagccaatagacaagttggatccatgaggctagacgactgggtcttgtgtaggatctacaagaagaagaacattggaaagtcaatggaggcaaaagaggaatacccaatagcccaaatcaatcttacaccagcaaacaatgacagtgaacaagaaatggtgaaatttccaaggactagttcccttactcatcttttggaaatggattacttgggtccaatatcacatatattatctgatgccacatacaattcaacctttgattttcaaattaacactgccaatggtggaatagacccgttcgtaaaaccacagccggttgaaatcccttatgcagcagattcagggaagtaccaagtgaaacaaaatagcaccatcaaccccaccatatttgtgaaccaagtgtatgatcaaagaggataatgccaaaaaatatattagaaatgatattgaatcaattgcacccacgataagcgtcaccaattaaataatcctagtagatctttgtagatatatatattacat

SEQ ID NO: 12075 - DNA, 673 bp, Glycine max
cgttctctctctatctctattaagttgttactctatttataactcagatatttgagaaggctttaaaagatggtgcttttgggacttctcttggtgggatttctctctcagctgggttcatcagtttcagcttctggttatggttggatggatgctcatgcaaccttctatggagggggtgatgcctctggcaccatgggtggagcatgtggatatgggaacttgtacagccagggctatggaacaaacactgctgctttgagcacagccttgttcatcaatggtttaagctgtggggcatgtctccagattaggtgtgttaatgaccataggtgcgtgccttccacgctcacttattgtcactgcaaccaatttctgtcccccaaacaatgcactccctaataatgcaggtggatggtgcaaccctccccttcaccacttcgacctttcccaacctattttccaacaaattgctcaatacaaagctggaatagtacccgtggcttaccgaaggtagttacaattatcgttatttttctgttaactaccaacaaagattaatacaattaataagaaacggattcatatcccatgagggctattcttgctgtgcttcttgagtgagccttaaggcctgttctctagtcccggctagtccttgggattaactcac

SEQ ID NO: 12076 - DNA, 650 bp, Glycine max
cccacgcgtccgcccacgcgtccgcccacgcgtcaaaaaagaagaagaagaagaagagaggaaagtagtagaagaatacagggcagagctgcagccaacaccacccatggctgaatccgtttcagtggacatggagatgatctttctcggcggaaaggaacatcatattcaaactggctgtggttctgtatctgtaatagtctgtggggatcaagaaaaaccagctctgatcacttatccagatatagcgctaaattatatgtcatgtttccaaggattatttttctgtccagaggcaacttctttgcttcttcacaacttctgcatctatcatatcagtcctcctgggcatgagttgggagccgctgcaatttggtctgatgatccagtcccttctgctggagacttagcagatcaaataatcgaggttctcaattattgtcggctcggcgcagtgatgtgtatgggagtatcgtctggtgcttatatcctttcgctatttgcaacgaaatatagggagcgtgctcttggtttaatacttgcatctcccttatgcacatctgcttcttggactgaatggtcctataacatggtgatgtcaaatttgctatacttatatcgtgcgcgtcgcttgttgaaagagtggctgc

SEQ ID NO: 12077 - DNA, 632 bp, Glycine max
ctgctgtaacagctttctgtcgcaaattgatgatatttgggtgttgatgcgcttctgtcatttggtttagattcaggatgaaaatgtcactggtttggcctctcttaacgaggcgaggattcagcacaagctctgagaatcttgttgcttctgtgctctttgagagattgccagtggtcattcccaaaattgatcctgtggtttatgcatttcaagaattctcgtttcgatggcgacaacaatatcaacgcagatatcctgatgaatttctagacaaatctgatgctaggggtaaaggtgattatcagattgactatgtgccagcaccaagagtcactgaagctgacaaaaacaatgatcgaaggtcattacaaagagctcttgatagaagactctaccttctcctctatggtaatgcatatggggctccaagcgggaagcctgtgtggcattttcctgacatacgttatgaatctgaggacaccatgcgcaagtgtgcagaatctgcattgatatcacgtctacgagatccttctcacacatacttcgctgcacatgctccaatgtcctatatggctgttcagcctacagaagatcagtctagatccacatctactaagagatccttctac

SEQ ID NO: 12078 - DNA, 360 bp, Glycine max
ctctctcccctacttccaaaacccttcttcacttctccagttcccattgctgcaacagctacctcatattgttccgaatggaatgatattgccgggtgatacccttgcttaacgatgaagatgtcactggttcaacttcgacctctcttgacaaggcgagggttcagcacaagctctgagaaccttgttgcttctgtgctctttgagagactgccagtggtcattcccaaaattgaccctgtagtttatgcatttcaagaattctcgtttcgatggcgacaacaatatcaacgctgataccctgatgaatttctagacaaatctgatgctaggggtaaaggtgattatcagattgactat

SEQ ID NO: 12079 - DNA, 1131 bp, Glycine max
  unsure (1)..(1131): unsure at all n locations
cattcctataaataccccctaattcataaccctctaagttccaatccgcaatatatccaccttttggggagaccaccggagatatgtacggacggagtgattcttacgaatccgatttggcgcttctggattcgattcgccgccacttgctgggagagtccgaattgatattcggagccccgaatttcggttcgggtcggagctccagtttcagcagcttggactcgtgtttgagtgatgattggggagagcttccgtttaaggaggacgattcagaagatatggtgttgtacggcgttctccgtgacgcagttaatgtggggtgggtcccatccctcgatgccggctcgcccgagagcgtctcgtcgggttttccggcggtgaagctggagcctgatgtcatgccggcgttgattaatccgtgtccgcctccggcgccggcggtggaggagaagaaggttgttccgccgaaggggaagcactaccgcggcgtgcggcagcggccgtggggaaagttcgcggcggagatcccggacccggcgaagaacggngctagggtttggctggggacgtttgagacggcggaggacgcggcgttggcgtacgaccgcgccgcctaccggatgcgagggtcgagggcgctgctgaattttccgttgagggttaactccggcgagccagatccggtgagggtgacgtcgaagcggtcgtcgtcgccggaaagtatggcggcggtggcgccgaagagaaagaaagttatggtggtggggacggtgcaagagcaagtggggagtcaagtggcgcagtgtacacgtggcgagcagttattggttagctgaggtggattctaaaactggtgttgtgtttattaaatacaataaatacaatacacttttgtaattatgtgatgtgcgtgtgtgtgtaaagcacttagctatattatagccatcatccaactcaattttggaacaaagaaaaaaaggtgaaggatgaggatagatgattttagcacatcaaatggtgagtggtgtgaccccacgggaagaaaagaaaaaaagagggggagaaaaaatttcaaagaggttatggaatttggaagatgatgaggaatgacgggggtaaggaatgagg

SEQ ID NO: 12080 - DNA, 495 bp, Glycine max
agcccacgcgtccgcccacgcgtccgcccacgcgtccgcctcctcttccaaaatatccacgtttcttttcccacacactatcttaaatcttaaaaacattttttttttcaaagcaattagaatttagaccacaaaaggaacaccgaagagatgtacggacagagtagtagtagcagtagttcttacgaatcggatttggcgctgttggattcgattcggcaccacttgctgggcgagtccgaatccatattcggcgccccgaatttcgggtcgggtcggagctccagtttcagcagcttggactcgtgtttgagcgacaattggggcgagcttccgtttaaggaggacgatacagaagacatggtgttgtacggcgttctccgtgacgccgttaacgtcgggtgggtcccatctctcgatgccgggtcgcccgagagcgtgtccgtcgggttttccggcggtgaagctggagccggacttgatgccggcgctgat

SEQ ID NO: 12081 - DNA, 601 bp, Glycine max
  unsure (1)..(601): unsure at all n locations
accaaagccaaaaccatgttaggcactcctcacaccctcatactccttctcttcctcttgctcatcaccaccttctcccactcccttgtcttcaacataaccaacttcgtcgaccctgccgccgccaccgccatatcctacgagggcgacggaagaaccaccaacggctccatcgacctcaacaaagtcagctacctcttccgcgtcggaagggccatctactccaaacccctccacctgtgggaccggtcctccgaccttgccatcgacttcgtcacgcgtttcaccttctctattgagaagttgaacttaaccgaagtcgcctatggagacggcttcgcgttttacttggctccgttggggtaccggattccgccgaactccggcggcggaacctttgggcttttcaacgctaccaccaacagcaacctccccgagaatcatgttgtcgcggtggagttcgacactttcatcggctccaccgacccgccgacgaagcacgtnggcgtggacgacaactcccttacctcggctgcgttcggaaactttgacatcgacgacaacctcggaaagaagtgctacaccttgatcacttacgccg

SEQ ID NO: 12082 - DNA, 934 bp, Glycine max
cttatataatccattcttctccctggttttttctttcttcattccccattaccatgggttccctttccaccaccccttttcttcccttcactgcaaaaaatgcttctactagaatccctcctcccacatcattctcttacagcaagcaacgtagtaacagggatcccaggaaggttgtctgcgcctgcatcgctcctcctcaaaacttcaagagccaggactcttccgccattcatttcaatggttcgtccaaatcagagcaattgagcactgcgcgggatcatgaggatgattctgatgttcttattgagtgtagagacgtgtacaagtcttttggggaaaagaaaatcttaaatggtgtcagcttcaagatcaagcatggtgaagctgttggaataattggtccctctgggactggcaaatctacagttttgaagattattgcaggacttcttgctccggacaagggggaagtttatattcgaggtaaaaagagagttggtttagtaagcgatgatgacatatctggtcttcggattggattggttttccaaagtgctgcactctttgattctttgactgttcgtgaaaatgttggttttctcttgtatgaacactcaagcatgtctgaggatcagatatcagagcttgtcacggaaaccttggctgcagttggattgaagggagttgaggatcggttgccttctgagttatcaggtgggatgaaaaagcgagttgctttagctcgatctattatttgtgacactacaaaggaatcaatagagccagaggtgctcttgtatgacgaaccaactgctggacttgatcccattgcatctactgttgttgaagatctgattcgctctgtgcacataaaaggacgagatgcacgtggaaaacctgggaatattgcatcttatgtggttgttactca

SEQ ID NO: 12083 - DNA, 1380 bp, Glycine max
gccacattaggaggaccttcggtagttgaacccaccaatcatctgatgcaggagcttcatagcaagtctgtgatgcagatcaaacatgaattgcccagtgtaagaggaactgatcagctgaagttcaaagggactgttgctgatcagatggaagcttcttctggaacatcttactgtgttgatcctaataatatccaccagaacttcccacttcccaacttctgcatggatggggatgtccaatcacacccaagaaataatcttccatttgcctctaatctcgatggattaacacctgatactttgctctcaagaggctatgattctcagaaggatcttcaaaacttgctgtccaattatggtggtgctccaagagacattgaaactgagctgtccactgctgctcttagtccacagccgtttggggtgccaggcattccttttaagcctggatgctcaagtgatattgccatcaatgatcctggggttttgaataatggcttgtgggctaaccaaactccacgaatgcgaacatatactaaggttcaaaagcgtggctctgttggaagatgtattgatgttacccgttacaagggatatgatgaactccggcatgatttggctagaatgtttgggattgaagggcagctagaagatcctctaaggactgattggaaattagtatatgtggatcatgaaaatgacattcttcttgttggtgatgacccttgggatgaatttgtaagctgtgtccagagcataaagatattgtcatctgcagaagtgcagcaaatgagcttggatggggatttaggtggtaatgttccaatccccaatcaagcttacagtgggacagacagtggcaatgcatggaggggacagtatgaagataactcagctgcctcctttaataggtaatgatgtcaaatgctgacgcttaagagagatcaacttgtgcatttcaagtggtggtggagaaccaacttcttaacctaacaaaacttctggttggtgcttctcaaatggaaagtacacattcattacaaatgatgcagtttattggggattgtattagaggtggactggacccataactgcatcctagttctcttcaccacaccacttttgatggtgagaaagtttagatcctcaaatgtagcaagagcagtttcccttacactattaatgctacagatcctataacttcggaatcagcttttcttgtggttgtttgattaggatttctttttcattttttgcaagggacaacagaatagggcagctagtgtataatatgatcgttctgatataaacattaatttttacttatctcttgtaaatcttgtcatggttaaagttgtatacggaagtttggtgtcc

SEQ ID NO: 12084 - DNA, 382 bp, Glycine max
cttactacttaatttccacttctaattaacaaagttaagcaagcattgacttggtacctataagtagtaatggctgtggctttgacgattgtgttgagcttgctctcggttctctcttctgcatcttgtgcacgaatggtgggggggaagacggaggtccccgacgtgagaacaaacagggaagtgcaagagcttggaaggttcgcggtggaggagtacaaccgcggtttgaaacagtggaagaacaatgggagtgaacagttgaacttttcggaggtggtggaggcgcagcaacaagtggtgtcaggaatgaagtactacttgaagatctcagctactcataaaggggttcacaaaatgttcacctcttgtgtggtggtca

SEQ ID NO: 12085 - DNA, 571 bp, Glycine max
agctgctgagcgtgattatgacctgaaccgtgctgctgagcttaatgatggaactttgatgtcccttcagcgccaattagaagaagctgaaaagaacctaagtgacttccgaaactctggacaatctttactccgagaagaggtcactgaccttgatattacagagattgttagcaaatggaccggtataccattatcaaacctccaacaaacagagagagaaaagttagtcttgctggaacaggttcttcacaagagggtggttggtcaggatactgctgtaagatctgtcgctgatgcaattcgccgttcaagggctggattgtctgatccaaatcggccaattgcaagcttcatgttcatgggtccgactggtgtcggcaaaactgagcttgccaaggctttggctggttacttgtttaacactgaaaatgctcttgttagaattgatatgagtgagtacatggagaaacatgctggttcacgtctagttggagccctcctggttatgttggttatgaagaaggcggtcagctaactgaagtggtcaggagaagacctactctgtggt

SEQ ID NO: 12086 - DNA, 386 bp, Glycine max
gtcgtgcacttgttcttcttcccttctccttgtgaatcctccgccgagcacttcccgccaccacgcgatccgccgaaacctgagaatgtcccttaacaacaacgattcaaagctgaacccttcttctctgctgaattccgtcaccaaattactatggggccaatcgctcccgccggggctcctcgtcgccaccgtccgcaccgcctggaactccacgtggcacctcatgatgtcgcagctcgccccctccgactcctcaggcggctactcccgccccgccttcaaattccgcttctcctcaaccaccccttcccagggcagcagcctccacctctacgtgggcctggcatgcccatgggcccaccgcaccctcatagtgcgcgcgc

SEQ ID NO: 12087 - DNA, 639 bp, Glycine max
gttataaaaaatggtagataaaagctgtcagccaggggaagttggaatatagattattcttcctggaaaaaatcaaaacaccttaacaaggaagcttccgaactgcgggaggggatagttaattctcatgattggtgtggaagatttcataaagggcattattccgaacggtgggcggggaagtgtttaattagtcaataacttaacaactcaaccagcaagagccaccaactcttatactgttataaataaagtaaccctctaattccctccactacctgctccattgattacatcacgagaaacaacgccacgctgaaatcccttttttgtgtccatgggcagcagcatgctgaggctagtgttgggcttgtctgttttgagttgtgtgcttgtgacatcctcagctcaaacgtgcagaaaccaaacattctcaaacagggtgtttgccacatgtcgtgatcttccacagttgacggcttacctgcactggacatacgaccaggctagtgggaggttggagatagcattcaaacacgctggaatcacctcgaccaacaggtgggttgcatgggccatcaatcccagaaacacccttgacccagccatgattggggcccaagccctggcggctatccc

SEQ ID NO: 12088 - DNA, 394 bp, Glycine max
ccacctgctccactcttcaactaaaagctattgtttacatcacaagaaacaaggctacgctaaactattcttttgagttttgaaatcccaagccaatacagattctcaagcacagcagcagcaagggatatgatgggcagcagcagcatgttgagggtagtgttgggcttgtctgttttgagttgtgtgctagtgacatcctcagctcaaacgtgcagaaaccaaacattctcaaacagggtgtttgccacatgtcgtgatcttccacagttgacagcttacctgcactggacgtacgaccaggcgagtggcaggttggacatagcattcaaacacgccggaatcacctcgaccaacaggtgggttgcatgggccatcaatcccagaaacaccc

SEQ ID NO: 12089 - DNA, 1044 bp, Glycine max
cctacgcttccgaaagttttgcttctttccttctctctctcaccaaaacaatttgctcacaaaggaggaaaaatggcacctttcgtttccctctctttgttgcttctctttctcaaccaccccctcctttccctctcaaccaaccctgaagggaacgctctgcatgctttgagaagcaggctttctgatcccaacaatatgttgcagagttgggacccaacactggttaatccctgtacttggtttcatgttacctgtgactccaacaatcatgtgattcgcttagacttgggcaactctaacgtttctggaactctgggcccagaacttggccagctacagcatctgcagtacttggagctctacaggaatgagataacaggaaagattcctaaggaacttggtaacttgaaatcacttattagcatggatttgtatgataacaagttggagggtaaaattccaaaatcatttggaaagttgaagtcacttaaattcttgcggctaaacaacaacaagttgacaggatccatcccaagagaactcactcgtctcactgatctcaaaatctttgatgtttctaataatgatctctgtggaacaataccagttgagggaaactttgaatctttcccaatggaaagttttgaaaacaacaggtttagtggtcccgagctgaaaggacttgttccatatgattttggatgctgaagaaagatagaattcgcattattatcatctaaacagactacaatgaaaaggcttagtttacgtagggagggagtatcacaaagggaaaagctggtgttattttcacatcaatatttcctcaccatttttacactttgcttaattaaaaaaaaagaaaagaaaaggaagtgtgaattgaaatctatgtttttcatattttattataaaaaggaagctatgtaagaatgctctcaaaacaattgtatgtaaataacattattgatgtaacccgaatatgaatctaaaaatgtcagatttgcatgtctatttatataataacatgattgtaccgcc

SEQ ID NO: 12090 - DNA, 425 bp, Glycine max
cttctttctttcttactttctctcactcaccaaatagttttctcacaaaggaggaagaatggcatctttcatttcactctctttgttgcttctctttctcaattaccccttcctttccctctcaaccaaccctgaagggaacgctctgcatgctttgagaagcaggatttctgatcccaacaatgtgttgcagagttgggacccaacactggttaatccctgtacttggttccatgttacttgtgactccaacaatcatgtgattcgcttagacttgggcaactctaacgtttctggaactctgggcccggaacttggccagctacagcatctgcagtacttggagctctacaggaatgagttaacagggaagattcctaaggaacttggtaacttgaaatcacttattagcatggatttgtatg

SEQ ID NO: 12091 - DNA, 508 bp, Glycine max
ccctgcgttttcccacgcgtccgattacttctttccttctctctctcaccaaaacaatttgctcacaaaggaggaaaaatggcacctttcgtttccctctctttgttgcttctctttctcaaccaccccctcctttccctctcaaccaaccctgaagctagcaagcagacttaagcttggccttaatagttttgatttgatccaaataatttgcgtagggaacgctctgcatgctttgagaagcaggctttctgatcccaacaatatgttgcagagttgggacccaacactggttaatccctgtacttggtttcatgttacctgtgactccaacaatcatgtgattcgcttagacttgggcaactctaacgtttctggaactctgggcccagaacttggccagctacagcatctgcagtacttggagctcttcaggaatgagataacaggaaagattcctaaggaacttggtaacttgaaatcacttattagcatggatttgtatgat

SEQ ID NO: 12092 - DNA, 265 bp, Glycine max
gctcggcccgcttccgctcgggttgatcgttctctctgaacaaccccagccatgggaggaggcacatggacagaaggccaagatggctcgtgagagaaacatggagaaaaataaacctgccaaaggtagccagttagaggccaacaagaaggccatgaacatccagtgcaaggtgtgcatgcagacattcatatgtaccacatcggaagttaagtgtcgagaacatgctgaagccaagcatcccaaggctcatctctacacttgg

SEQ ID NO: 12093 - DNA, 740 bp, Glycine max
cttcagcgaggcctttgatgcggcttgttttcctcttactcttttctcaagctcatttgatccaggttgggcatttggcttgtcagctaccgtgatccaagggttgctgggcatgctagtggagggggctgcagacaatgtcaatcagtgtttcttggaggcttcacgttttggcagtacagaacttgtgcgcatactattgcagattgctcaaagaaacagcttggatgttgatgttgacttggcgttgggttttgcctcccattatggcaagataggaactatggagtgcttggtggaagagggaaatgccatagcctttttgggccctttgatgagagctgctgagaggggttgcatgcaagttgttgagtggtttgtgcagaggggttgccgagacatggaactatgccttgcccttacagctgccacttctagctgccaagttcacattgcagcttatcttctgccgcacgtacctcagcaggtccttgcagcacttagtgttgaaattcttaaggccgctggtgagcgcacggtggatctcttgatggtgtagcatttcttctccaatctgacttcttaggtgatcctgcagctacttatgctgttgcagatattattgctaaatcagaagatgaagctgttgcacctgagttgaagacttttcttaaagagcattggtcagaaagagcttacaaggagggattaaagttagggcaagagcattacatgaacct

SEQ ID NO: 12094 - DNA, 468 bp, Glycine max
gaatgctggagtcttatgtcattgccagagatagatttctcattcctaatgggaaaatgtttcctacagtgggaaggattcacatggctcctttcagtgatgaatatttgtttgttgaaattgctaataaggccctgttttggcggcagcaaaactattatggtgttgatttgacgcccttacatgggactgcctttcaaggatacttttctcagcctgtggtggatgcttttgatccaaggttgttaatagctgctcctatgttccatgtgttagactttaccaaaataaaggaagaagagctgtatgaaattgacattcctctcaaattcacagccactgtgggtgccaggctacatgggttggcatgctggtttgatgtactgttcaatggaaggactgcacgaaggtggcttaccactgcccctggttcacctacaacccactggtatcagttacgctgtgttc

SEQ ID NO: 12095 - DNA, 768 bp, Glycine max
gtctgatcatcacatccagcgtgtgacgctcattaatcatatcactaggtctgatgatgagaatgttggatctcatgggcgtactggcaatctagggtattcaactgaatgcggtgtctggagcaaaccttattatgtcaatcggaattgctgtcgcgttctgtgtgcatatagtacatgctttcacggtaagcttgggggataggagccaacgagcaaagacagcattgtgtaccatgggggcttccgtattcagtggaatcacacttacaaaattagtcggagtcctcgtcctttgcttctcaacatcacaaatttttgtggtgtattacttccagatgtatctggccttggttatcattggcttcttacacggtcttgtgtttctacctgtggtattgagcttgtttggtcctccgttaagatatagtcattaaggagcagctagaagacatgccttctgcttcatcagagcagcctctaattagatgaaagttagattttaattacgctgatcacatacttaatgaacaagaagaaatgttttgattatagaggattaatagtatcttatgacttttagattgagaaagttcattgcttatatatctgaacatggtcacggagaaactctgccagtttttagtcatttctgatgtttggaaggtttgatcatcagagttactgtgtatataatgccgagaacatttcctgatatttgaagcacatatacctttataattattaatatacttctgtttttttttt

SEQ ID NO: 12096 - DNA, 2695 bp, Glycine max
ctcacctactatgttattggatttgatccaaatgttgggaggttgttcaagcagcatctcattctactgtttatcggccagatggcttcggcgctatttcgtgctattgcagcactgggtagaaacatgattgtttccaacacatttggagcctttgcagttctctcgtttcttacattgggtggttacgttatgtcaaaaaatgatatcaaaaactggtggatttggggctactggatttcacctttaatgtatgggcagaatgctttgatggtcaatgaatttctttcaaacagttggcacaactctagccgaaatttaggagttgaatatctggagtctcgtgggttcccctcaagtgcatattggtattggttaggcttaggggcaatggctggatttgtgttgcttttcaacgtgatgttttctgctgcactcgagatccttggcccatttgataagccacaagcaacaataaccgaagaagaatcacctaatgaaggaaccgtagcagaagttgaattacctcgcatagaaagttcaggaagaggtgattctgttgtggagtccagccatggaaagaaaaaaggaatggttcttccttttgagccacattctatcacctttgatgaagtcatatactctgttgacatgccacaggaaatgaaggaacagggtgtacaagaggacagattggtgcttttgaagggtgttagtggtgcattcaggcctggtgttctcacagctttgatgggtgtaagtggagctggtaagactactttgatggatgttctggctggtaggaaaaccggaggatatattgatggaagcatcaaaatttctgggtaccctaagaagcaagaaacatttgctcgtatctctggctactgtgagcaaaatgatatccactcacctcatgttacagtttacgaatccttgctctactctgcatggcttcgtttaccttcaggtgttgattccaaaaccagaaagatgttcattgaggaagtcatggaactggtggagctgaacccagtaaggaactcactggttggattgcccggtgtgagtggtctctcaactgaacaacgaaagagactgactattgcagttgaattagtggctaacccgtccataattttcatggatgagcctacttctgggttagatgcaagagctgctgcaattgttatgagaacagtcaggaatactgtggacactggaagaaccgttgtttgcaccatccatcagcctagcattgacatatttgaagcattcgatgagctattcctaatgaagcgtggaggacaagaaatatatgttgggccattgggtcgccactctactcatttgatcaagtattttgagagcattggaggggtgagcaaaatcaaagacggatataacccggctacttggatgttggaagttacaacttcagcacaagaacttagtttgggtgttgattttactgacttgtacaagaattctgatctatataggagaaacaagcagcttatacaagaactgggtcaacctgctcccggttcaaaggatctttatttccctactcaatactctcagtcattcttggtccaatgccaagcttgcttatggaaacaacgttggtcatattggcgtaatccaccatacactgctgtgaggtttttcttcactactttcatagccctgatgttcggaacaatgttctgggacctcggaagtagacgtacaacaagaggagacctgttgaatgctctaggttcaatgtattctgctgttctcttccttggaatacaaaatgcttcctctgttcagccagtggtagcagttgaaaggactgtcttttatagagaaaaagctgcgggaatgtattctgccttaccctatgcatttgcacaggttctggtagagataccatatatcttcgctcaagctgtgacatacggtttaattgtttatgccatgatcggatttgactggactgcagagaaattcttttggtatctatttttcagtttcttctcattgttgtactttactttctacggcatgatggctgtgggagtgacgccaaaccaccatgttgctgccattgtggctgctgcattttatgcaatttggaatctcttctcaggatttatcgtcgtaagacctaaaatgcccgtgtggtggagatggtactattgggcatgtcctgtggcttggaccttgtatggattgattgcatctcagtttggagatataactgaaagaatgccgggtgaagataacaagatggtgaaagaattcatagaagactattttggtttcaaacatgacttcgttggaatttgtgctgttgtggttgctggcatcgccgttgcctttgcattaatctttggtgctgcaatcaagacctttaacttccaaaagagatagatggatagattgaactctttctccaacgtcaaagattctttatattttctccctttttctttttttcttcttgtttttgttttccctttaagcttataatatttgtatctatcatttaatcatttgtgcaaaaccagcccgtttgaaggctgtcctttataaatgtatgatgaatttcaaaagaaagatttttgatacttaccacataagcataatgatgtacctcccatcaataaatcaaaaacgtattctattacgagttgataagatttat

SEQ ID NO: 12097 - DNA, 608 bp, Glycine max
tacggggacgacagaagggggaagttgaagatctgaaaccctaattatccatcgatcgatctggtgtggagggtgtgaattgtgaatttgtgattgtgggaaaaagatgccgcagaggcactcgaagaacaacaacgatcttgcgttcttcacgtacgatgagaagcgaaaactaggttatgggacccagaaggagaggttgggcaaggactccattaagcccttcgatgcttgctctctctgcctcaaatccctaattgatcctatgagctgccagaaaggccatctcttttgcaaagagtgcattcttcagtgcctcttgtctcagaagaaagacattcaaaggaagcttgcagcccatgctgctcagcagaagcaagaaaaagaggaggaagaagagaagttgaagttgcaaaaggctaaagagcttgatgcatttgatcaacaaaatcatggtgctgtaccacaatacagcgacagaaattatagtcgtgataagaatggtttccatggggcaaacagtgtgaaggtcacttcctatgaggaggaagcccttcggacaatgaaggcattttggttgccttctgctacgccagaagcttctgtta

SEQ ID NO: 12098 - DNA, 576 bp, Glycine max
atcgaacaaaaaaaggttgacagaagagagatacagttttcacagaagttaggagagagaaagagaagcgtacagatctgtttgaccaaaacccctcacaacacatacaaatcagacagacgaaagaaagaaagaagagaacaacagagcaatggaaggaggaggagctgctccgccggccgacaccgtgatgtccgacgcggcgccaccgccgcagcagcctccggtggcgatggggatcgagaatattccggcgacgctgagccacggtggcaggttcatccaatacaacatattcggcaacatattcgaagtcaccgccaaatacaagccacccatcatgcccatcggaaaaggcgcatacggcatcgtttgctcggctttgaactcggagacgaatgagcacgttgccatcaagaagattgcgaatgcgtttgacaacaagattgatgcaaagaggaccctccgtgaaatcaagctgcttcgtcacatggatcatgaaaacgttgttgcaatcagggatatagtgccaccacctcaaagggagatattcaatgatgtttacattgcatatga

SEQ ID NO: 12099 - DNA, 484 bp, Glycine max
attttgtggggcaaatacggggagagggggtgcccaaataactttgtgatgggatctgccacaacttcagagcatcaggaaaaattcttacatttttttgcctattgtaattattgtctaggttgttgcaatcagggatatagtgccaccacctcaaagggagatattcaatgatgtttacattgcatatgagttgatggacactgaccttcaccaaatcattcgttcaaatcaagcattatcagaggagcactgccagtattttctgtatcaaatcctccgtgggttgaagtacatacattctgctaatgttctgcatagggacttaaaaccgagcaaccttctcctaaatgccaactgcgacttaaaaatttgggattttggactggctcgtgtcacctctgaaactgattttatgactgaatatgttgttacgagatggtaccgtgcaccggagcttctggtgaactcttctgactacact

SEQ ID NO: 12100 - DNA, 469 bp, Glycine max
tctgcttcttcttcttctctattcctatgtttccataacaacaccgccgattcattgcgtcagcgtcactaacttcatcatcataaaacattttcatataaataaatatattcattcattcattcattcacataataatcattaactatcattctctcttctctctctctctttcaattttagacagacaaaagaaagaaagaagagaacaacagagcaatggaaggaggaggagctgctccgccggccgacaccgtgatgtccgacgcggcgccaccgtccgcagcagcctccggtggcgatggggatcgagaatattccggcgacgctgagccacggtggcaggttcatccaatacaacatattcggcaacatattcgaagtcaccgtcaaatacaagccacccatcatgcccatcggaaaaggcgcatacggcatcgattgctcagtttgaactcggagacgaatg

SEQ ID NO: 12101 - DNA, 282 bp, Glycine max
attgcatcaccgtcaccaccactttcatcatcataaaacatttttcatataaataaaatatattcattcattcacacatcgtaataatcattatctatcattctctctctttcaattttagacagaagactaaaagagtgaagagaacaaacagagcaatggaaggaggaggagctgctccgccggccgacaccgtgatgtccgacgcggcgcctccgccgcagcaagcgatggctatggggatcgtgaatattccggcgacgctgagccacggtggcaggt

SEQ ID NO: 12102 - DNA, 476 bp, Glycine max
gaccgactcgtcctctttgctagctcaccgtgagcatcttgatttccggtaagttaattgttcatttttcaaatgccaccttatataggtaggttattaacaatttaacttattgttctgtacattactttgtgttttccaaactctaccttcctctacttttgcacttttgatacctactatactgtaaatttataacgtaaattttttaaaatgctattttttaaatcacagttatggacaatacaaaagattgcgttatgaaattgacaagcatgaaggcggtctggatacattttcacgtggttatgaaaaatttggcttccaacgcaggtattatttctagagtttaatatcttacatgtgcacatctttgtttcataaattatttatgtcaaattcctaagatgataaatagcttaatcaatccaacatatctattgctgatcaattaacaaaacaattttaaagaaaac

SEQ ID NO: 12103 - DNA, 536 bp, Glycine max
  unsure (1)..(536): unsure at all n locations
attattttaggatcaggtggtcatactgctgagatgcttaatctactggcagtgttacagaaaggtaggtttaatccaagattctacattgctgctgctactgataatatgagtcttcaaaaagctcagttgttggagaattccctggctgctgagatgcggatcagaaatagattttactgcagaatgcaacaagggtcactgatactgcacagttcatgaagatatatcggagtagagaagttggtcaatcatatataacctgcgtttggactacttttgttgcaatggtgcatgcgctatggctaatgattaaaattagacctgaagtgatactttgcaatggacctggaacttgcattcccctctgtgctattgcatttatatttaaggatcgtattcccttccttattcttctatcatttccataatttcatttatccacttcatttgataaattatggttctactgaaattgntcaagcttctgtgcaggtactgggaatcagatggtcattaattntctacgttgagag

SEQ ID NO: 12104 - DNA, 435 bp, Glycine max
gggttattcctaccactgtaatggttaatcgcacacgcgtccggccatatatggatgaaatatttcatataccacaggcacagcagtactgcaagggaaattttggaagttgggaccctatgattaccactcctcctggcctgtactatctttcacttgcccatgttgcttctttgtttccaggcttttactgtgtagaagctgcttcaatttctgacttgtgctctgctgcaattcttcgatcaattaatggtgttttagcagttgtctgtagtttaattctatatgacatagttactcacttgaagccaacacttaatgataggaaggcgatgcttcatgcagtggtcctatccttgtacccccttcactggttcttcacttttctctattatacagatgttgcatctgttactgcggtgctggctatgtatc

SEQ ID NO: 12105 - DNA, 1441 bp, Glycine max
ttcacgcggctgatcatatcataccctttctatcctacttgctacttcccacttccattctttgctccagaaaattaactagctaggatggtgagtgttgaagagattcgtaaggcgcaacgtgcagaaggccctgccactgtcatggctattggcaccgccactcctcccaactgcgtggatcagagtacctatcctgactattatttccgcatcaccaacagcgagcacatgaccgagctcaaagaaaaattcaagcgcatgtgtgataagtcgatgattaagaagcgatacatgtacttaaacgaagagatcctgaaggagaatcccagtgtttgtgcatatatggcaccttcgttggatgcaaggcaagacatggtggttgtggaggtaccaaagttgggaaaagaggctgcaactaaggcaatcaaggaatggggtcaacccaagtccaagattacccatctcatcttttgcaccactagtggtgtcgacatgcctggtgctgattatcagctcactaaactattaggccttcgcccctccgtcaagcgttacatgatgtaccaacaaggctgctttgccggtggcacggtgcttcgtttggccaaagacctcgctgaaaacaacaagggtgctcgcgtgcttgtcgtttgttctgagatcaccgcagtcacatttcgcggcccaactgacacccatcttgatagccttgtgggtcaagccttgtttggagatggtgcagccgctgtcattgttggatcagaccccttaccagttgaaaagcctttgtttcagcttgtctggactgcccagacaatccttccagacagtgaaggggctattgatggacaccttcgcgaagttggtctcactttccatctcctcaaggatgttcctggactcatctccaagaatattgagaaggccttggttgaagccttccaacccttgggaatctccgattacaattctatcttctggattgcacaccctggtggacccgcaattttggaccaagttgaggctaagttaggcctgaagcctgaaaaaatggaagctactagacatgtgctcagcgagtatggtaacatgtcaagtgcatgcgtgctattcatcttggatcaaatgaggaagaaatcaatagaaaatggacttggcacaaccggtgaaggtcttgactggggtgtgctatttggtttcggccctggactcaccgttgagactgttgtgctccgcagtgtcactctctgatcatatatattgagcaagagaacaaatctttcttttttcatatgtattcttggctggccggtttgaaaaaacgtattgtgtttcgattttttttcccctgccctgcaaatgcttctgtttgtatactagtaaataacaacttgttatactattttttcaattaagcttacacacaagttatctatat

SEQ ID NO: 12106 - DNA, 453 bp, Glycine max
ctcgagccgtttcatacacttttctttcgtagctagctactccttaattactaattagtttcattctttggtgcaagctagcttcattagttgattcataaaattataacaatggtgagtgttgaagcaatccgtaaggcacaacgtgcagaaggccctgccaccgtcatggccatcggcactgccactcctccaaactgcgtcgatcagagtacttatcctgactattatttccgcatcaccaacagtgagcacatgactgagctcaaagaaaagttcaagcgcatgtgtgataagtcgatgattaagaagctatacatgtacttaaacgaagagatcctgaaggagaatcccagtgtttgtgcatatatggcaccttcgttggatgcaaggcaagacatggtggttgtggaggtaccaaagttgggaaaagaggctgcaactaaggcaatc

SEQ ID NO: 12107 - DNA, 407 bp, Glycine max
atcatatcatagccttttctttcatagctactacactactttatcactttcattctttaattgggttcaaagaagcttaattaattggttgcagagattgaaaattaggaaaatggtgagtgttgaagagattcgtaaggcacaacgtgcggaaggccctgccaccgtgatggctattggcacggccactcctcccaactgcgtagaccagagtacctatcctgactattatttcagcatcaccaacagtgatcacatgaccgagctcaaagaaaagttcaagcgcatgtgtgataagtcaatgattaagaaacgatacatgtacttaaatgaagagatcctgaatgagaatccgagtgtttgtgcctatatggcaccttcattggatgcaaggcaagacattgtgg

SEQ ID NO: 12108 - DNA, 239 bp, Glycine max
gccttgactggggtgtgctatttggtttcggccctggactcaccgttgagactgttgtgctccgcagtgtcactgtctaatccatatatcttgtgcaagaccaagtccttttctttcttattcattctttcatgttgagtttgaaaaatgtattctttctcttcctttgtttccctgcttccctcacatgcttctttttttatatcagtaaataagaacatgttatatactattaatgc

SEQ ID NO: 12109 - DNA, 452 bp, Glycine max
gatgtctttgctgacttcttgttaaggttgtcggtgatgcaattgttgttggttttgtgctaagagaagaagctgttgggaaggtttctttcgtcttttgatgatgatgtcacacaacttaacggggcagcttgtgggtgcagagatacatggctttcacacgttggatgatttggatgttagtaatactatggaggaagcaaaaagcagatggcttcgtcccaatgagattcatgccatactctgtaatcacaaatatttcaagatcaatgccaagccagtaaatttgcccaaaagtggtactattgtactatttgaccgcaagatgcttaggaacttcagaaaagatgggcacaattggaaaaagaaaaccgatggaaaaactgttaaagaagcccatgaacacttaaaagttggcaatgaagaaaggatccacgtatattatgcacatg

SEQ ID NO: 12110 - DNA, 571 bp, Glycine max
cccacgcgtccgcccacgcgtccgcgagaaagcatggtaggtcagacagtgaaccctctgttgaacatccagatgatgaaattgaagggaagaggagtagactggctggaaatgagagcagaatcaatataactgggcctcggcctcaatctcacagcttctgcttccagagctcaactgtcagctacggtggtccaaatgggatgtattatacatcctcaagggcaaggaggagtggaagtgatggagtgacctttgaagagaggaaggaggctgatagttcaacaaggaaagcttctcacctaatttctagaggcattcgtggcaagggacattctctctcaagaaatctgaattcagatggtagggtagatactatgcagactctgcacaatataaatgaagatgagcttgctggctttgaagaagaatgggaggacaagggtcaaaagtatttgcctggatggactggcagtgttgaagctagcggtagtaatagacaagcagtgcaggccaagcgcggaagtttggcactcccttcttcggggcatagtcatgccgtgggaacaat

SEQ ID NO: 12111 - DNA, 864 bp, Glycine max
aatacattgatgagttgaaacagattgttgaggagtggaaagcaaagaagtcttggcttccacaagaacgagtagacgaggtcataaaaagttctgaaaaattgaagaattggttggatgagaaagaagctgagcaaacaaagacttctggattcagtaagccagcatttacatctgaagaagtatatctgaaggtgcttgatctgcaaaccaaggttgccagtattaatagaattcccaagcccaaacctaaggttcagaagcccgtaaaaaatgaaaccgaaagcagtgagcagaatacagagaattctgattctaactcagctgatagttcctcttcaagtgattcatctgccaacagttcagaaggcacaagcaaagagacggttactgagcaatctgaaggtcacgatgagctatgattaactgggcatgcatgtaaggccggttttaatcatctacctgcaacgtttttatagtcagagatgtagactggtaatggtagaattaataggtgaaaaggaggcagtgtcggttctcggcgagcaggagaatagagttgaggcaacatttgctggttgagttctaaaattttgaggttagatggctactactgtagtagatgatttattacccttttatatttaagggggcaacttgtaatttgcagtcatatgaaagcttgtatttgccgaaacacaatgtgataggggaagaaaaaaaaagaaaaactcacgagatttgatttgctcagaacatataggaattttgcttgagtgactcgtagttctaaacgatttttgtttttaattaatttagcagatacatctaaaaaaaaaaaaaaaaaaaaaaaaaactccagac

SEQ ID NO: 12112 - DNA, 645 bp, Glycine max
cccacgcgtccgctttcacatcatttctcaatcttccttgcttgcactctcatcagagaaggaaagcttttgataaagaaagaaacagaaagaaccttgtaactttgggcttgaaaagccatggccagggagcaaattcaggtgctaaatgcgcttgatgtggcgaaaacacaatggtaccatttcactgcaatcatcattgctggaatgggcttcttcaccgatgcatatgatctattctgcatatcccttgttacaaagttgcttggccgcatatactatcacgttgatggcgcagcaaagcccggaacattgcctccaaatgtttcagctgctgtaaatggcgtggctttctgtggaacactctcaggccagcttttctttggctggcttggtgataagatgggaaggaaaaaagtctatggcatgactctgatgctgatggtaatatgctccatcggttccggcctttcattcggacatagcgcgaaatccgtcatagcaactctctgcttcttccggttctggcttggatttggtattggtggagactatccactttctgctaccataatgtctgagtattctaacaagaagactcgcggtgcattcattgcggcggtgtttgccatgcagggttttgga

SEQ ID NO: 12113 - DNA, 627 bp, Glycine max
cccacgcgtccgcccacgcgtccgcccacgcgtccgggatgttttaattctcttgcaagaaggtgacactgcttacaaagtctgtttatctgaggtagagtgggagagagtcacagcagttaccagctacttgaagctttttgttgaggttatcaatgttttcactaagagcaagtatccaactgcaaatatatatttccctgagctctgtgatgttaagttgcatttgattgaatggtccaagaattcagatgagtttatcagttctttggcgtcaagattgagaagcaagtttgatgagtattgggagaaatgtagcttagggttggctggtgctgcaatgttagacccttcgttcaagatgaagttggtagattattattatccgcaaatttttggcagcatgtctgcaaatcgaattgaagaggtctttgatggtgtaaaggctctatacaatgaacattcaatatgctcccctttagcttctcatgatcaaggtctggcctggcaggttggcaatggttcacttctcttgcaaggttctgcgaaggattccagggatcgattgatggggtttgataaatttctccatgaaactacacatggtgaatgcacaaaatcggatct

SEQ ID NO: 12114 - DNA, 798 bp, Glycine max
aaaatattttgttgtcagaaactgcctgcctaatgtcaagtcagatatgcttttgtcagcatggaatcctccatccgaatggggaaaatagagatttatccccttaagatccatttaacagagacgatgtacagaatgatgtgggaatatttcttcccagaagaagaacaagattcccaacgtcgtcaggaggtttggaaggtttcaaccactgctggtgcaaggcgtgtaaagaaaggttcatcagttcttgaagcttctgcttcaaacagtcacacaacaaaagagtccgaggcctcatccaaatctggcatatctgctatgctatttcccacatcaagtcagccctcatcccatgttgactcggctcaagcatccaaaacacaaaatgtcaaagcaaaccctggtaatggtgcaacccttgagttgagaaggacatcatcttttgacagaacttgggaagagactgtggcagaatctgtagctaatgaacttgtgctacaaagcttttcttcctcaaaaaatggccaatttggttctactgagcaacaagatgaagctgctaagaataaatcaaaagattcaaaaggtgtgaaaggtggtcgctcatctcatgaagaaaaaaaggtggctaagtcacatgaagagaagagatctaggccacggaagatgatggagtttcacaacatcaaaattagtcaggttgagttactggttacatatgcagggcaaagatttgttgttaatgtctcaaattactgatggatcaatttcatcgaaccgagtttactggaactt

SEQ ID NO: 12115 - DNA, 1666 bp, Glycine max
ggagccgaccggcacctggttctttgccttctcgtagggtaggaggagttggaagtcgtgctccacctgtcagaccagttagtgtgagagatagacgccctatgatgtccatacctgcaagaagtaggccagtgcctcctccatctagatcttatgataggagaccagttgctcctgcatatccataaaagtagcatgaagagagattatggtcggcgtgaggatataccacctcccagaagtagagttgctgtagattatggctcaagggtggcttctgtaaggcgaccatcttacagggattatcctgcccgtggtcctggctacaccgagctccctagaagcacatctcgtgctgcaccaaggagaggctatgtggatgatgggtatggccagagatttgagagggctcctcctcctcctcctcctccccatctaagttaccgtgaaggacgtccccgagattatgatgctctgtctggctcaaaacgttcttatgctgctatagatgatgttcctccacgatatgctgatactggtgctcgccaatcaagagctcgactggactatgactatggcggtagtgcttcacagtatggagatgcttatggtgatagacttggaagatctagtatgggatatggtggtggcagcagaagttctatttccagtcaagattcacatgggttgtatagcagtcggcagggcatgagttatggaggaggttcttttggtagtggtgatgttggtggcatgtattcatcaagttatggtggtgattacatttctcgtggaagtgatgttggtggcagctcatattcatcagtgtattctggaaggggtgtgggtggtggtagcagttatatgggtggtggtggttcaggatcttattattgaggatgaccgttgaagcattatgtctacaatttggagacaaaggattgctatttatagcttttatgagaatttgttacaaaaactagcttatctcaattagagatgggatgtatttatcaagttatggtggtgattacatttctggatgggatgtattatcagtacttgaatttatgctgtatggactcaagttaattagagatggaaaaagtattgagcagtgatgtgtaattcatatcatacttggacggataatgtgaaagatttccccactgctctatcttcattttcatttggacagagatcagactagagatgctacttgtttgattaaggcttcatggagttttacctcctgaatttatcaataagttgattctttattttgaatctctaaagagatgtttagttactttggatgaattacttttttgttttacagtgatatgatcagaacaaaggtgaactcattagccctttgttgagatagtagtaataagagcactacttcagcaattaataaagtcaaatagttagtttcatgggatttatttggcttggtgtcttcctaagatagtaaaaagcataatgcactggtaaaatttgctgctggaatgatttgatactattgaggtttttgtgctgagggggactactagacaatgctaaagatgcattgatatctttccttagctagttaacttcatagatttccatattgcaattcaataatttgtactcaattggttgaccttcactgacatggacc

SEQ ID NO: 12116 - DNA, 327 bp, Glycine max
ggtgtgggtggtggtagcagttatatgggtggtggcggatcaggatcttattattgaggtaagtcgtctgataacttcttgggattgcatttgtggtgtaaatcaggatgcatccaatataagtgtatatttttgagagatttctctatcctcgaaatagcatctcttatttttttcacaagtgccggcgaaggttgcactctggtcaccagtgcatttgtctgtgaacagatctgatatgatacagtggctgctgtaggatgactgttgaagcatgatgcctacaatttggagacaaaggactgctacttacagtttgttttttgg

SEQ ID NO: 12117 - DNA, 1710 bp, Glycine max
gtaaggaacactcccctcaaccaaacagataatgaagtagcccaagggacccaacctgcaattggatctggaggccagtataaatattatttcaatattggaagtgttgagtcttttgaggagaagctagaggaagcgcaagaagctctgggcatttactctcatgattttgtgcctgtcacatattcttctgaagtggtttggtaccaggaattgatgaggtttgctccaacactgttgcttttgggatctctcttgtatatgggaaggagaatgcaaggtggaattggtgttggtggcagtggtggcggcaagggtgcccgtggaatattcaacataggaaaagcaccagttactaaagtagacaaaaatgccaaaaacaagatctattttaaagatgttgctggctgtgatgaggcaaagcaagaaattatggagtttgtccacttcctcaagaacccaaagaaatatgaagaacttggtgcaaaaattccaaaaggtgctctcttggttggtcctccaggcacaggaaaaacccttttagcaaaagctacagcaggggagtctggtgtaccctttctttgtttatctggttctgatttcatggaaatgtttgttggtgttggaccatctagggtgagaaacttgtttcaggaagcaaggcagtgttcacctagtatcgtatttattgatgagattgatgcaattggtcgagcaaggcggcgtggtggtttttctggtgcaaatgatgaacgtgaaagtactttaaatcagctgttggtggagatggatggttttggaaccacttctggagttgttgtgttggcaggaacaaataggcctgatatcttagacaaagctcttcttaggcctgggcgatttgaccgccagataacaattgacaaacctgatattaaaggtcgtgaccagatatttcagatctacttgaagaaaatcaaacttgatcacgagccttcatattattctcaaaggcttgcagcccttacacctggatttgctggagcagacattgctaatgtctgcaatgaagctgctctgattgctgcaagaggtgaaggaacacaagtcacaatggaacattttgaggcagccattgataggatcattggtggtttggaaaagaggaacaaggtaataagcaagctggaaaggcggactgttgcctaccatgaagcaggccatgctgtttcaggttggttcttggaacatggtgagcccttgttgaaagtaactattgttccacgtggcaccgctgctcttgggtttgcccaatatgttcccaatgagaaccttctcatgacaaaggagcagctttttgatatgacttgtatgacacttggcggtcgggctgctgagcaggttcttatagggagaatctcaacaggagcacaaaatgacttggaaaaagtgaccaagctgacgtatgcccaagtagcagtttatggttttagcgacaaagtaggcctcctctccttccctccaactgagggctcatatgagttttccaaaccatacagcagcaaaactgctgcaatcattgatagcgaagtgcgtgattgggtggacaaagcatacaaacatacgattcagcttatcgaggaacacaaggagcaagttactcaaattgcagagttgctgcttgaaaaagaagtacttcaccaggacgacttgcttcgagttttgggcgag

SEQ ID NO: 12118 - DNA, 593 bp, Glycine max
ggctcgaggcattgcatcgcatttgatttttaaacgatgcgccactgctagcgcatactctgaactctcaccatatatatataatgcgccggcggtgcgcatggagataacctacgcatcccctagcttctccgacctccgcgccatgccgtcgacggcgaccgccgcgcgtcccgtcaggatcattcccctgcagcacccgaccgccacgacgtcgtcgccgcagccgaacgccgccttctcgcgctggacggcgaagctccggcgaatgacgtggctggagtggattgaattcttcctcccttgcctccgctggattcgcatctacaactggcgcgagtatttccaggtcgatctcatggccggaatcaccgtcggcgtcatgctcgttcctcagtcgatgtcgtatgcgaaatttggctggacttcaaccgatatatggactctactctggttttgtgcccctatttgtatatgccatatttgggtcttctcgccagcttgcagtatgtccagaggcattggattctgtcttggtctctaatgtgctgggtagcatagctgattcattcactgaattatacacagagctg

SEQ ID NO: 12119 - DNA, 607 bp, Glycine max
cttaaacgacgcgccacacctagctactgcatgctctgaactcttaactctcacgccatatatatatatatatataatgcgccggcggtgcgcatggagataacctacgcatcgccaagtttctcagacctccgcgccgccgctacctcctcctccatgccgtcgtcagcgcgtcccgtcaggatcattcctctccagcacccgaccgccacgacgtcgtcgtcatcgccgccgaacgctgcgttctcgcgctggacggcgaagctccggcgaatgacgtggatggagtggatcgagttcttcctcccttgcctccgctggattcgcatctacaaatggcgcgagtatttccaggtcgatctcatggccggaatcaccgtcggtgtcatgctcgttcctcagtcgatgtcctatgcaaaattggctggacttcaaccgatatatggactctactctggttttgtgcccctatttgtatatgccatatttgggtcttctcgccagcttgcagtaggtccggtggcattggtttctctcttggtctctaatgtgctaggtaacatagctgattcatccactgagttatacacagagctggcaatattac

SEQ ID NO: 12120 - DNA, 1295 bp, Glycine max
aatcgagcggatcggccctaacaccccattcggtggtgcctcaacccagacagcgtgcgtctctgcgaccaacagctacaacagttttcccaactccgaacttatcgaagaagatgactcgcggcataaaacaccgtcagaaagccaagagcaagaagaagggctcgaagaaagagggtgggtcttcttcatctttggcgccagaaattcccgcgaaggtgtggcaaccgggtgtggataagttggaggaaggtgaagagcttcagtgtgatccttctgcttacaattctcttcatgcctttcacattggatggccatgtttgagctttgatattttacgcgactctttgggcttggttcgaacagaatttccccacacagtatatttcatggcagggactcaggcagagaaaccttcttggaattctattggaatttttaaagtatcaaatattactggaaagagacgtgagccagtgcctaaacttggaactgatgacactgaaatggatggtgaggatagtgacagtgatgatgatagtgaggaagaagacgaaggtggtgctcagggtcccagtttgcagttgcgtaaggttgctcaccaaggatgtgtcaaccgtatacgctccatgccacaaaatcctcatatatgtgcagcttgggccgataccggtcatgtacaggtctgggacctaaactctcacctcaatgttctagctgagactgaaacagaatgtgtccaaggagttgctgcagtttttaatcaggacccattgtataaatttaaacacaaagatgaaggttatgctatagactggagtcctcttgttcctggaaggcttgcatctggggattgcaataattgcatttatctgtgggagcctacatctgctggaacatggaacgttgataatgctccatttactggacatactgctagtgttgaagatctgcaatggagccctacagaacctgacgtttttgcttcttgttccgtggatggaaacattgcaatatgggatacccgtttggggaagtcaccagctgcatcttttaaggcacataatgctgatgtgaatgtaatgtcatggaacaggttggctagttgtatgttggcctcggggagtgatgatgggactatttctattcgtgatctcagactgctcaaggaaggagattctggtggtagcccatttcggaatttaccagcacccaattacattcattgagtggagtccacattaagccttttcattggcaggttcttcatctgataatcaacttaccatattgga

SEQ ID NO: 12121 - DNA, 706 bp, Glycine max
cggctcgagcttgcttcgtgcttgggatgcttagccgtgtcgatccaaaggtacaggctccacaggcgctctgcatctgccccacccgggagctggccattcagaacatcgaggtgctccgcaggatgagggaagtacacggggattgcatccgagtgccttgtgccattggaccgggatgcggttcatgtatcgaaaagggcacctattatggcacaggtggtgattgggaccccagggacagtcaataagtttattagcttcaagaaacttgggaccacgaggttgaggattcttgttttcgatgaggctgatcaaatgcttgctgaggatggatttagagatgattccctgaggataatgaaagatatagaaaaagagaattctaagtgtcaggttcttttgttttctgctacatttaatgacaccgtcaagaatttcgtttcaaggacagtcaggatggatcataataaactctttgtaaagaaagaagaactatctttagatgcagtgaagcaatataaagtgtattgtcctgatgaacttgctaagattgatgtggtaaaagattacatatttgaaataggagagaatgtggggcaaacaattatatttgtgcgctcaaaaattactgcaagattaacacatgaagcacttgttaagttgggctatgaggttacatctatacaaggttctcttagtaatg

SEQ ID NO: 12122 - DNA, 505 bp, Glycine max
tcgcggacgcgtgggcggacgcgtgggtggcacaagaaagttttgaagactagagacccaagtatggtatctgttggatggaggcgttaccagacaaccccaatttatgccattgaggatagtaatggaagggatcgtatgctaaaatatactccagaacacatgcattgccttgctatgttttggggccctcttgctcctcccaacactggggttgtagcctttcagaacttatcaaacaatcaggcaacatttaggattactgcaactgcagttgtacttgagtttaatcatgcagcaaggatagtgaagaaaatcaaattggttggttatccatgcaagatattcaagaagacagcacttatcaaggatatgtttacctcagatcttgaagtagctcgttttgaaggtgcagctattcggacagtcagtgggatcagggggcaggtcaagaaggctgcaaaagaagagataggtaatcaagcgaaaaggtagggagggcaaa

SEQ ID NO: 12123 - DNA, 442 bp, Glycine max
  unsure (1)..(442): unsure at all n locations
cccacgcgtccggggggcgcgggttttagacgggagtgcgaatgcgatgatgaagggaaagggaaccgaagacgatcgtccatggcaatcttaccacactgtttacacaaccgccaaagcaggaatggaattggttgacaaggagaaagttcaaagggtagtttatgaaatgagcaaaggatccaaatattttcaaaacgaggaacgcaaggtagcttttattaagcagaaaattgataacctgcgaattcagtgtgcaaacctcacacaagaagacttggcccattatcaaaaggttgctgatagaagaattgttgagctggaagcttcgcgtgacctttcaaggatttggttacatgtagatatggatgctttctatgctgcagttgagactttaagtaaccctacattaaagggcangccaatggcttgtgggagcatg

SEQ ID NO: 12124 - DNA, 1801 bp, Glycine max
ataaaatagataggccttctgctcgagcagaatatatcgtcaactctaattttgaactcttcattgaactaaatgcaacagatgaacagtgtgactttcaagtaatatatgcaagtggtataaaagggcaagcagggttgactcctgaaaatctggcagaagaccttggtccattgtttgaatctatcattagatgcattcctggaccacgtattgacaaagatggtgcccttcaaatgttggttacaaatattgagtatgatgaacataaagggcgcatagcaattgggcgtgtgcaagctggagttttagaaaaaggcttggatgttcgagtatgtacttcagatgattcatgtagatatggaagagttactgagctttatgtgtatgacaaattcaatagggtccctgcaaataaggtggaggcaggagatatatgtgcagtatgtggaattactgatattcagatcggggagacaattgctgataaagtatctgggaaaccactaccttcaatcaaggtggaagaaccaacagtgaaaatgtctttctccataaacacttcaccttttgttggccgtgagggaaagtatgttactagtaggaatttaagggacaggctttatcgtgaacttgagcggaatctggctatgaaagttgaagatggtgaaacagctgatacatttgttgtcagtgggcgtggaactttgcatatcaccatacttatagaaaatatgcgaagagaaggatatgaattcatggttgggcctcccaaagttatcaacaagaaggtggatgaaaaactgttggaaccgtatgagattgcaactgtggaggtaccagaagagcacatgggagctgttgttgaacttcttggcaagagacgaggacaaatgttcgatatgcaaggagttggattggaaggaactacactactcaaatataagatcccaacccgtggccttcttggattgcggaattcaattttaactgcctcccgagggactgctattctcaacactgtttttgatagctatgggccttgggctggtgaaattagtactcgggatcaaggctcattggttgcttttgaggatggaacaagtacttcttatgcaatctctagttcacaggagaggggacagatgtttattggtcctggagtggatgtttataaaggtcaaattgttggcatccatcagcgacctggggacttgtccttgaatgtttgcaagaagaaagctgcaaccaacatacgttccaacaaggaacaaacagtgattcttgatacgccattggactatagtctggatgactgcattgaatacatccaagaagatgaactagtagaggtcacccccgcaagtatccgaatgtccaagaatccaaaaattacaaacaagaaaacaaggtagactttcaccgtgaagctgtaacttgcaaatgctttttgagttaaccagttaccgctggtgtgctgaagcgcataactcattaatgtgttgctgctaaagtgacgaagaagtaaatcattaccattgatgtaatgtcacatatattcttccaaagatgcagacagtataggagctggctgaaagccgtattcattatagatattggtcatcacagttgattaaagggatgaagttacactgaattttgttcaatttgtaaagtctatatattagcagtaaggaacaagatattaattcttcatcatatggttattgattggagaatagcaatgcaacaccttggttaaatttccaatgagatttctaatgcattctctgattttttt

SEQ ID NO: 12125 - DNA, 899 bp, Glycine max
  unsure (1)..(899): unsure at all n locations
tcgtttagtcccttancttcacataatgtggttgcttcatctttgtgatgcacatcaggaaatgcagtcatgggcagaagctgctcagtgtgctgttgctgttgctggtgttgtaatgcaggcccttgttgccagaaacgatggtgtttggagcaaagaccacgtttctgctttacggaagatttgtcctatggttagcaatgagattacgtctgaagcatctgctgcggaggttgagggatatggtgcttcaaaactgactgttgactcggctgtgaaatacttgcagctttgcttataagctcttctcgcaagctgagctttttcatttctgtgcaagcattctggaacttgtaatcccagtttacaaaagcaggagggcttatggacagttggctaaatgtcacacattacttactaatatctatgaatcaattcttgaacaggaatctagtccaattcctttcacaaatgcaacgtactacagggttggattttatggtgttagatttgggaaacttgataaaaaggagtatgtatatcgtgagcctcgtgatgtacgtctaggtgacataatggaaaaacttagtcacacatacgagtctagaatggatggtaatcacactttgcatattattccagattctagacaagtgaaggcagaggagttgcagcctggtgtctgttaccttcagattactgccgttgatccagtaatggaagatgaggatttaggaagtaggagagaaagaattttctctctctctactggaagcgtccgagcccgcgtatttgaccgattcttgtttgacaccccatttaccaaaaatggcaagactcaaggtggattggaagatcaatggaagagacgcactgttcttcggactgagggttctttt

SEQ ID NO: 12126 - DNA, 774 bp, Glycine max
accgactaataatacatcagagctgtcagcagaggcagggactcttggtgaaactttggatgcagatgcaaagtgggggaaaacattggatgagcgtcacaaacaaaaaataatgagagaagtagaacaactacggcatgccaaccttgttaaaaaattagaacagaagctttcctttgctgaaagaaagttaacgagagctgaaaaagccttaatgaaggtggagtcgtttttgaagccatcagaatacaaagcagatcctgaaagtataactgatgaagagagatttatgtttcgcaaattaggattgaggatgaaagctttcttacttcttggtagacgtggggtttttgatggtactattgagaacatgcacttgcattggaagtaccgggaactggtcaagataattgtgaaggctaaaacctttgaacaagtaaaaaaaattgcactagcacttgaagctgagagtggaggtgttctggtctcagttgacaaagtttcaaaaggatattctgtaattgtttatccgggtaagggttaccagcgtccttcaacattgagacccaaaaatctattgacaaagagaaaggctttggcacgctcaattgagctccaacgacatgaggcactcatgaatcatatttcaactttgcaaagtaaagtggggaggataagatccgaaatagagcaaatggagaaggtaaaggacaaaggagatgaagcattgtatgacaaattggattctgcctatcctagtgatgatgagaactc

SEQ ID NO: 12127 - DNA, 665 bp, Glycine max
tgcgtttggagcgaaacagaacagaacagaacagaggaaagacattgatagattgatcatcgatgaagaaagagaaagagaaagagaagtgcgtggctgtgacaagccctgtgagtggcgaagacagcgatgataagcaacgccctgcctttccctcggtcagattctcttcccgcaacgcttcttccaaatacgatttcgtcaaggtgaaggtgtggttgggtgataatgcggatcactactacgttctctccagatttttgctcagcagaatgctaacggtaaccaagattccaaaccacgttgctatcaaaattgctctcgaattgaagaagctgctcacagataacagccttctagatgtctctcaatctgacttggaagtcaacctatttaagcttatggagcggcggggatatggagaagaatacataaatcgttacaagatgatgacgagatttcatcatcaaagagttccgttagtaatccttgtttgtggaactgcttgtgttgggaagtctactattgccacccagcttgcacagaggctaaatttaccaaatgtattacagacagatatggtttatgaattgttgcgcacatcaacagatgcaccattggcatcgactccagtatgggctagagacttcagttcatcagaggcg

SEQ ID NO: 12128 - DNA, 1213 bp, Glycine max
gacttgcaagctattatattccagaaagctgaagatggagcccgtaaatgcattgtggccactaatattgccgagacatcattaactgttgatggtatcttctatgtcattgactctggctatggtaaaatgaaggtgtataaccctaggatgggcatggatgctctccaagtcttccctgttagtcgtgctgctgctgaccagcgtgccggtcgagctggtagaactggtcctggtacgtgctatcggttgtatactgagagcgcttacctaaatgaaatgttgcccagtcctgttccagagattcagaggactaaccttggcaatgtggttttgttgctgaaatctcttaaagttgaaaatttacttgattttgatttcatggatccacctccacaggataatattctcaattcgatgtaccagttgtggcggttcggggcccttaacaatgtgggggggttaactgatcttgggtggaaaatggttgaatttccactggcccctccgctggccaagatgcttttgatgggtgaacagttagggtgtcttgaggaggtttaacaattgtttccatgctgtcagtgccatctgttttctttagacccaaagaccgggcagaggagagtgacgctgcacgggaaagattttttgtgccagagtctgatcatttaaccctctacaatgtttatcagcaatggaaacaacatgattacagaagtgattggtgcaacgatcattttttgcatgttaaaggtctaagaaaggctagagaggttagatcccaactgcttgatattctgaagactttaaagatccccttaacctcatgttggccggatactgacattgtcaggaaagcaatttgttctgcatacttccacaattcagcaagattaaagggtgtgggggagtatgttaactgcaggaacgggatgccgtgtcatcttcatcccagtagtgctctctatggtatgggttgcactcctgagtatgtagtttatcatgagttaatcctgaccacaaaggagtacatgcagtgtgcaacagcggtggagccccagtggctggctgagctgggacccatgtttttctctgttaaagattctgatacatcattactggagcataagaagagacaaaaacaagagaaaacagccatggtggaggagatggagaacttgaagaaggtgcaagcagaggttgagaaaaa

SEQ ID NO: 12129 - DNA, 709 bp, Glycine max
atcagtttttgcaacatcaaacagcagaggtaccattgttgattctggaacaactttggcgtacgcttgcggaagaggcttatgatccctttgtctctgcgattacagcttcaattccacaatctgtacacactgttgtttccaggggaaatcagtgttatttaatcacatccagtgtcactgaagtttttcctcaagtaagtctgaactttgctggtggtgcatctatgattttaaggcctcaggactacctgatacagcagaattccattggtggtgcagcagtgtggtgtattggctttcagaaaatccagggtcaagggataacaattctaggagatctcgtattaaaagacaaaattgttgtttatgatctggctggtcaacgcattggatgggctaactatgactgttctttgtcggtgaatgtctctgcaacaactggcactggcagaagtgaatttgtgaatgctggtgagataggtggaaacatctctttacgtgatggacttaagttgacaaggacagggttcttggctttctttgtgcatctaacgctaatttactgcttcggattcttatagcatttatacatcgtgagagatattctttttcatatgtatattcttttgccggtatatatttgtgtcaatcggcaagaccacattattaattttaatgttgcttttagcctcctttctgcacaaaa

SEQ ID NO: 12130 - DNA, 960 bp, Glycine max
  unsure (1)..(960): unsure at all n locations
cccaagggctttggcaccaactgaaaatgtggaatagattgactttaatactgagatttacgctacacatgagatagatcgcatatctcactttgcatataaggttgctaagaaccgctgtgggaaactctgctctgctgacacagccaatgtactagtggcatcaatgttatggagacagagacttctggcaatagcgcaagagtatcctgatggtgagctctcacatatgtatgtcgataatgcttcaatgcaactaattcgcaatccaaaacagtttgacaccatggtgacaaacaacatttttggcgatatattatcagatgaggcttcaatggtcactggaagtattgggatgcttccttctgctagccttggggcttcgggacctggactttttgaacccatacacggttctgcacctgatattgccggacaggacaaggcaaatccatttgctactgttcttagtgctgctatgcttttgaggtatggcctaggagaagaaaaggcagctaaaagaatagagaatgcagtggtggacactttgaacaggggatttcgaactggtgacatatattctgcaggaacaaagctggtaggatgcaaacagttaggtgaagagatactgaagtcagttgaatctaacgttcatgctggtgctgctacagtgtgatctcgagaccaactcgccatagaactttggattctggtttttatcctggagatcactatgactgccaaagctgagaaaatctccctaatttggcttccttctgcgtcatgtattttgtcacgagtgtctactactatgcatatatgatatatgaatgtaaccctttgcttagaggtgtgatcaaacaatgagacatcattaattaaaattgttttgcagcgccgaannnnnnnnnnnnnnnnnnnnnnnnnnnnnnnnnnnnnnnnnnnnnnnnnnnnnnnnnn

SEQ ID NO: 12131 - DNA, 867 bp, Glycine max
  unsure (1)..(867): unsure at all n locations
tacatggttctgcacctgatattgccggacaggacaaggcaaatctcatttgctactgttcttagtgctgcgatgcgtttgaggtatggcctaggagaagaaaaggcagctaaaagaatagagaatgcagtggtggacactttgaacaggggatttcgaactggtgacatatattctgcaggaacaaagctggtaggatgcaaacagttaggtgaagagatactgaagtcagttgaatctaacgttcatgctggtgctgctacagtgtgatctcgagaccaactcgccatagaactttggattctggtttttatcctagagatcactacgactgccaaagctgagaaaatctccctaatttggctcccttcgtgtttccactttcttcttttactaattttactggctaagacaagcatttttttaaaataccttttagtatatctggattaatattttaaaagtattgaaaattgtagttggccgttaaacaaggttaagtgaggtaccacggcgattcaataagggtgggagaaaactctctcattcaaatgaggactttgcctatacatgataagcccaaaccccaagcaaaaaggttttttctagtaatgacaatgaaattgagaatcctgaagatcttctttttgagtatgtggtacaggatcttatagttgtgaatcattggcaaaccaagatattagatcttgcacaccactatccaacacttgtcattgagaagttgtgacttattgtcagtcaattggaaatttgtgacatggtatcaaattgtaacttccaagttttgagtgaaaggaaaatctcttattctcgtnnnnnnnnnnnnnnnnnnnnnnnnnnnnnnnn

SEQ ID NO: 12132 - DNA, 618 bp, Glycine max
gcttcaatggtcactggaagtattgggatgcttccttctgctagcctgggggcttcgggacctggactttttgaacccatacatggttctgcacctgatattgctggacaggacaaggcaaatccatttgccactgttcttagtgctgctatgcttttgagatatggcctaggagaagaaaaggcagctgaaagaatagagaatgcagtgatggactctttgaacaggggatttcgaactggtgacatatattctgctggaacgaagctggtaggatgcaaacagctaggtgaggagatactgaagtcagttgaatctaacgttcctgctggtgctgctgcagtgtgattttgaaaccaactcgccatagcattttgggttctggtttaggttggaggccactatgactgccaaagccgagaaagtctccctagtctattaagttctggcttccttctgtatcatgtatttcggttaacacacccagcctatgtatgattgaattttagaaagtagcaaggttgtttatcttgtattcttgtacccgggattctagtttcccttgcatgcgaggtcgcttgtaatggtggaataatgattaatggagtttgtcttgtt

SEQ ID NO: 12133 - DNA, 2268 bp, Glycine max
gcaccgtatcatatccaaatcccatcactcttacgctttctttctttttttcttccaaattctctctttcttctaacctaaccctacaattatgccccattaacacaaatcgcaattaccccaaattcctcaccctagcgtagatcgatctcttcttccttcgtgaattctggttcagggtggctgccatgtatggcacttagtattttccctttttgaagattaggggtgggtgggttgtgtctcgcttagggttccaaagtttgtcgttttgaatggaacctcgcgttgggaataagtttcgcctgggtcggaagatcggaagtggctcctttggggagatctatttaggcactaatattcagacaaatgaagaggttgcaattaagctcgaaaatgtcaagacaaagcatccccaattgctgtatgagtccaagttgtacagaattctccagggaggaactggaattccaaatgtcagatggtttggagtggagggagattacaatgttttagtgatggatctgcttggaccgagtcttgaagatctttttaacttctgcagtagaaagctatcactaaagacagttctcatgcttgctgatcaaatgatcaaccgtgttgagttcattcattcaaaatcgtttctgcatcgggatatcaaaccggataattttctaatgggattaggaaggcgtgcaaaccaggtttatgctattgattttggtttggctaagaaatacagagatagttcaacacatcaacacattccttacagggaaaataagaatttgactggaactgcaaggtatgccagcatgaacactcaccttggcattgaacaaagcagaagagatgatcttgagtctcttggttatgttttgatgtacttcttgagaggaagtcttccttggcagggtcttaaagcgggaacaaagaaacagaagtacgagaaaatcagtgaaaaaaaggtttctacctcgattgaagccttgtgtcgaggttatccaacagaatttgcatcttacttccattactgccgatcattgaggtttgatgataagccagattatgcttacctcaaaaggatatttcgtgacctgtttattcgtgaaggattccagtttgattatgtctttgactggaccattttgaagtatcagcaatcacagctagccactcctccaacacgggccattggtcctagtgctggaaccagttctggaatgccccccgctgttactaatgctgataggcagacaggaggggaagaagggcgacctcctggtctggtttcaggggattccacaaggcgaagaatgtcagggcccatcccaaactctgtaaacatttcaaagcagaaaaatccagtcactacggatgctgcccttaataaggaagccatgttatcaaggcccaatgtcttggggcagtcaagtggatcatctaggagggttgctgtctctagtagccgtgatgcatttgttggtgctgagtcagatatccgtactcgcactgctgaggctagccctggagcagcacatcgagctttgagtgggcaaagaagttctccaattggatcttctgatcctaagagagttgtatcatcagggagaaatgcttctcatgtgaaaaattatgacactgcacttaggggcatggaaggtttgcaattagaaaatgatgagaggacccattattaatttcacaacttctctcctattaatttgtgagttgataggcactgccaacgttgcttgtgttgctaagttgagctgtgagaaaattcggatctgaacttgaaattctggctttgtattgttaacccatctggtcaaaccgatgaagctgtgaagctgaaataatttgagccaaaccagggattgtgcttgctgtaaagctcagttttaattggttcttctagctggaactcctaagttttataacatttttctgagttattatattggtttaccagatgtttacagtttcacgtggactgcaaatgtcaaaaactatcaaataccagcaaaaatgtaattagccattgtactcttgttggataagattcccttggtttacacgatgtaattgtctggcaaatattttggtattaggaacttgaatgttcgtatttgtgaggttccttcaaaagcttaaatgcatctctgtagtttttattagatctatcacaatgaactcgtatgcattttatgttgatctgtgaaaaggttttcattattaaaatataaattgtattgtccgctg

SEQ ID NO: 12134 - DNA, 608 bp, Glycine max
gcgtacctcaaaaggatatttcgtgacctgtttattcgtgaaggattccagtttgattatgtctttgactggaccattttgaagtatcagcaatcacagctagccactcctccaacacgggccattggtcctagtgctggaaccagttctggaatgccccccgctgttactaatgctgataggcatacaggaggggaagaaggtagacctcctgctttggtttcagtggattcctcgaggcgcagaatgtcagggcccattttaaatactttatcaagtgccaatgccttgggtcagtcaagtggatcatctaggagggttgctgtctctagtagccgtgatgcatttgttggtgctgagtcagatatccgtactcgcactgctgaggctagccctggagcagcacatcgagctttgagtgggcaaagaagttctccaattggatcttctgatcctaagagagttgtatcatcagggagaaatgcttctcatgtgaaaaattatgacactgcacttaggggcatggaaggtttgcaattagaaaatgatgagaggacccattattaatttcacaacttctctactattaatttgtgagttgataggca

SEQ ID NO: 12135 - DNA, 269 bp, Glycine max
catgaagggatgatgtgacgtgttgcccgtctaccacgtggagggttttgattggatgggagagtggattccaaaagaagggcgacctcctgctttggtttcagtggattcctcgaggcggagaatgtcagggcccattttaaatactttatcaagtgccaatgtcttgggtcagtcaagtggatcatctaggcgggctgctgtttctagtagccgtgatgcatttgttggtgctgagtcagatattcggactcgcactgctgaggcta

SEQ ID NO: 12136 - DNA, 786 bp, Glycine max
gtttagaattattggaatttggaagacagggtctggttctgttgttgcctaagaatgggaggaaattccagtttcagggatgaatataccttcgaacaaaggcttggagaatcgcgggatattgtggccaaataccccgatcgagtccccgtgattgtggaaagatatgcgaaatgcgatctgcctgagttggagaagaaaaaataccttgttcctcgagacttgtctgttgggcatttcattcatattttgagttccagacttagtctgccccctgggaaagctctctttgtatttgtgaagaataccttgcctcaaactgctaatatgatggactctgtgtatagatcattcaaggatgaggatggatttctttacatgtattatagcaccgaaaaaacctttggttcgtacatcatgtaaaatattaaactctgtacactattgtatccaacactttgtgaagtgactactatcacgaaaccttgtacaaatttgttgtatggtttaatgtatcactatttattaaaaaaaaaaaaaaaaaaaaaaaaaaaaaaaaaaaaaaaaaaaaaaaaaaaaaaaaaaaaaaaaaaaaaaaaaaaaaaaaaaaaaaaaaaaaaaaaaaaaaaaaaaaagtaactgacattcaaatagttcaaatgacttgggtataggctcgaaagactaatcttaccgtctagtacctgaaaaacatacgaagtttccctcatgataacaggagcactcgggcaaattctatcagttaacgtcaatgatcacatgcat

SEQ ID NO: 12137 - DNA, 448 bp, Glycine max
cgctccatctttctctggttctgttgttgcctaagaatgggaggaaattccagtttcagggatgaatataccttcggtatgttctcccaactcctcttatcacctatttttttttttattactaccattattaagggtttactttcttatctgagacttgattgatttggtgtgtgcgcagaacaaaggcttggagaatcgcgggatattgtggccaaataccccgatcgagtccccgtaatcatcttctccttaattaatcaaatatttaatctcggtttatgtagaagcacacggtgacgatgaacatgctttccctaaccctaattttgtcattatatgatcgattcttcttgtttttcttctgcaggtgattgtggaaagatatgcgaaatgcgatctgcctgagttggagaagaaaaagtaagatcatccttcatgattgaag

SEQ ID NO: 12138 - DNA, 1211 bp, Glycine max
agaagttattaatgagaaggtggacatatgggctcttgggtgtctcctttttcgcatgtgctacttcaaaagtgcttttgatggggagtcaaagctccaagtcttaaatggaaactaccgcattcctgaattaccaaaatacaattcacctgtgacggacttgataagagacatgctccaagctagaccagataacagaccagatatcacgcaggtctggtttcgtgttaatgagcaactacctattaatttacagaagtcattacctgacagaccacctgaattgccctcatctaacaatcatgaaggtgtgtcaatgccctcaaacagatcacctccaatgcctcgtaggaacccacctcctccaccttcatctggagaacccaaaacttcaccacagccatcccctgcttctaggggagggggaagtgggggtgcacttggtgctttctggtccactcagcatgcgaaggaatcacttgttgctgaggataagagtaaaccaatttttgatgaagaaccatctagccaccatttttcaccgaaacatgatagaattcgtcctgaaaacgatcagttacccaaaaatgttggtcctaacaaagtggttaacacgcaaactcatactgtgaaaagcagtacacatggaaaattacccaagcctgatacggcaccctccaaggattttgaattaaatttgtttgaggataaagatcgtgtaggtgagagtacaactaactttcaaaaccaggcttttaacacttttgttgctgaattcgatgccactaagctcaaccctggacttaataacaaacccgaaagggaacaagcattagaggctgcggtggagatactcaaagagaagctgaaggaagctaatttggaaaaagctgaaataacatcaaagtacgaaaagctttctgctatctgccgatcacaaaggcaagaattgcaggatctcaagcaagcactcgcagctaggactccttcaccaagtagagagggtttgaaaatctctcccgcagttacatcgtctgcatctgcatctgcatcttcggtaataagcattttgtagtttcagttgtcttgctgattttgtgtaggttgtgtttctgacacaaggttgtgtttcattgcaactgcaggataagtcatggcaagcttttccagaggaaccgcaacaacaaaggtctctttcagccgagaatacc

SEQ ID NO: 12139 - DNA, 505 bp, Glycine max
aaaatcttgtgatcactcagttacaagagagaaaattgaaggaagagctataacaccgagaaagcaaaatggcaagtctactatgtcaagggaagagttcgtggcctgaggttgtgggaacaaacggggtggtagcagtggagaagattgagagagagaatgataatgttcgtgcaagattggtgggagaaggatctatggtgacaatggacttttggtgcaaccgagtttgggtttgggtcgacaaaattggggtggtcactcgtgtgccaaagataggttagctaggcatgcaccttgtatgtatgtatcatgtatggaataatatatatatatatataatagccattaattacttacattaatggttcttatatatatatatatatacttcttactcttaaataaggcatcgcatgctcaggacgattatgcactttaatcccatcatgtcttctacttgatctgtcttctgtaattgttatatatgtatgtgtttttatct

SEQ ID NO: 12140 - DNA, 791 bp, Glycine max
cggctcgagcggctcgagatttcatcaaacttagccttcttgttcttgtttcatctatcagagtagcaaccatgtggtctgcagtaacagatcccattagagctttttttgcaaattttctccgccatttcatccacaaagacttccatgaagcagtggccagaatgaccataatagatgctttcctcttcgttattgtgcactccattgataagttggggatatggccacgcttgccggttttcttagggctattgtacctggcgattcggcggcggcttcatcaggagtacaacctcttcaacgttggaacaacaccggtgggggttaggtttaaccattctgattttccatacagaacagctgatggaaaatataatgaccctttcaacgaagttgctggcagccatgggactttctttggcagaaatattctccctgtggatcagaaaaaaaagctattgaaacctgatccaatggtggtagccacgaaactacttgctaggaggacatacaaggatactggaaagcaatttaatgtgatagcagcttcttggattcaatttatgattcatgattggatcgatcatcttgaggacacaaaccagattgaactcatcgcaccaagagaagttgcaaggcaatgccctctcaaatctttcaaattctacaagacaaaggaaattcccactggcttctttgagattaaatccggatcatcaaacatccgtacaccttggtgggatgcaagcgcagtatatggaagaatggagacgttacagagagtgaga

SEQ ID NO: 12141 - DNA, 977 bp, Glycine max
tcttacgcgtccgcccacgcgtccgcccacgcgtccgctttcatcctcagcagactcgacaattcgattatggagcacaaaacttaatgccaatcttgtttgttataagggtcacaattaccctgtctgggatgttcagtttagtcctgtggggcattattttgccagctcgtcacatgacagaactgctaggatttggtccatggacaggatacagcccttaagaataatggcagggcacttgtctgatgttgattgtgtgcaatggcatgccaactgcaactacattgcaactggttccagtgataaaacagttcgactatgggatgtgcagagtggtgagtgtgtccgggttttcgttggccacaggggtatgattttgtctttggcaatgtctcctgatggtcgctatatggcatctggcgatgaagatggcacaatcatgatgtgggacctctctagtggccgctgtctcacacctttgattgggcacacatcatgtgtctggtccctcgctttcagttctgaaggttctgtgatagcatctggatctgctgattgcactgtaaaattgtgggatgtaaatacgagcaccaaggtttctagggctgaagaaaaaggtgggagtgctaacagacttagatcgctgaaaactctaccaaccaaatctactccagtttactcattgcggttttctcgaaggaatcttctttttgcggctggtgctctatcaaaaagtggctaatatatgagtatgtctactaatagataagatcagatcaaagtggttgaagctgaatttctcgcctaaaaagcatcgcgcatcatagttatgtactccctctgggtcctatatgtagggcatctgcacaagaattaagaagtgtagttaatctagtgatgttaaatttgtcactaatctgtatatttttttataattaatcttaaacttattgataccatattctctttttcat

SEQ ID NO: 12142 - DNA, 476 bp, Glycine max
tcgctcgtattgatttttatgctctcactcgaatcttgcatttgaggcattacattggatgtctttattttgtgcctgcacctggatttgaagcttacggggaccccactagttaccctggaagttctaataacaaaggcagcaatagtgaactaattgatgaggaacctttgaagttacaaaggctaggctatcaaggacctgaaattgacctggagaatcagagttggagagttttaaatggaccatttatttctgtctggcttcacaatgtggcttggggtgctgaaaacaccaaggcagcaccagatgcaaagttctcagatggttatctggacttgatcattacgaagaattgcccaaagttaccattgctgtcgttgatgtcagatttgaataatggaggtcatgtaaaatcaccatatgtcatgtatttaaaggtgaaaagtttggtcttggaacctggtccacgcttg

SEQ ID NO: 12143 - DNA, 885 bp, Glycine max
ttcagtgctttgcgaccaccggtgatgggtccattgttgtggggtctcttgatgggaggataaggttggactcgaagacgtcgatgaggatggctaagacagcatttcctgggcttggttcgccgattactagtgttgatgttacttatgatggcaagtgggtgcttggcactacggatacctacttggtgctcatttgtaccttgtttacggataaagatgggaggacgaagaccggatttagtggtagaatggggaacaggatacctgctccgaggctcttgaagttgactcctcttgattcgcatttggctggcgcgaacaataagtttcacggtggccatttctcgtgggtcactgagaatggtaaacaagaacgccaccttgttgcaactgtgggcaagtttagtgtgatatgggattttcagcaggtgaagaacagtgctcatgaatgttacaggaatcaagaagggctgaagagctgttactgttacaagataatattgaaggatgagtccattgtagaatcgcgatttatgcacgacaaatttgctgttagtgactctccagaagctccgttggtggtggcaactcctatgaaagtcagctcaatcagcatgtctggaaagcgacatggttaaacctctgtttacattttttctttaaaggtttcaaatttctagtgttaggagtgtctttgaagtttgaacaatatacttgcttgtatccaagtttgagatgctgttatttttctgtaaagcacgttttaggttgccctgtatgtattttcttcttttttgtgattagtttgggtttgctgactgaattgtccttttttattacaaataataaaataattgcttatgaagaaaaggcaattccacc

SEQ ID NO: 12144 - DNA, 686 bp, Glycine max
gaatagaacaaacacaccgcaacaaccaagaagaagaatatatggaaagtttttggcaggaggaagaaaccatgctcgatggcgaagaagatcattcacgacaccactaggaagatgtctcagctgtgccagaaaatcgttcaggtcgacgtccggtggggattcctcaaaagggtatctttcgttggccactttttccgtttcatttggaacagacttgttgtttgctctgtcgccggaagcccatctcactaccggaaactacccctccgggacccctcttcttcgccgccggccaccgttgacgacgtcttctcctccgctgcaaccactactggcggctatgactccgattccgatttggtgaacctcaagatcagcttgttgggtgattgccatattggaaaaactacttttgtgatcaagtatgtggggaatgagcaagaaaagggaagcttacagatggaaggattgaatctaatggacaaaactttgtctgttcaaggagctcgtatttcgtttagaatatgggatgttgcaggagataaaaggtccctggatcaaattcccatggcttgtaaagatgcggttgcgattttgattatgttcgatctcaccagtcgttgtacactaaatagtgttgttggatggtatagtgaagcaagaaagtggaatcagactgcaat

SEQ ID NO: 12145 - DNA, 1339 bp, Glycine max
ctgagttcaattacaacctaggaactctcacatcttcttactcttaattttttcttcaagtcactaagataatggcaagcatttataacattccatcacacataaaagcttgggtctattatgaatatggaaacatagaagagattctcaaatttgaatctaacatacccataccagacatcaaggaagaccaagtgctcatcaaggttgtggctgcagcgcttaatcctgcagattatatgagggctcttgggtttttcaaggacactgatgcacccttacctattgttccagggtttgatgctgctggtgtggtggtgagagtgggaagtaaagtgagcaaattcaaggttggagatgaagtttatggtgatatcattgagtatcctgggaataatccaaagaccattgggactttggcagaatatactgctactgaggagaaagtgttggctcacaaaccctccaatttaagctttattgaagcagctagccttcctgcagccatcatcactgcttatcaaggatttgataaaattgagttttctgctggcaaatctatacttgttctaggaggtgctggtggagttggatcccttgttattcagctcgccaagcacgtttttggcgcatctaaggttgcagccactgctagtactccgaaacaggatttgttgaggagcttaggagcagacttggctattgattatacaaaggagaattttgaagaactggtagaaaagtttgatgtagtgtatgatacagtaggagaaagtaataaggcattgaaggctgttaaagaagggggcaaagttgtgacaatagtaccaccggcgactccaccggctataaccttctctgcagtttcagatggtgcggtgttggagaaattacagccttacttagaaagtggaaaggtgaagccagtattggattctaagggtccctttccattctctcagacagtggaagcatttgcatacttgaagactaatagagccattgggaaagtagttctacatcccatcccataaacatatttaattaagcatataaggagagagcacagccttttaattatgtaatatgaatattgttagtcaagaatgtttagatttagaaacagattgtccttataaggttgtattggtaaattttgtcatatctagttcaaatgaaggtggtgttatcgttcagcaaaaaaaaaaaaaaaaaaaaaaaaaaaaaatgacaaaaacataaaaagaatcaaaaaaaaaataaaaataaataccaactcaaaatcttacctaaacaatctccaaaaaaaaaagggggggcccttcaaaagattccaacc

SEQ ID NO: 12146 - DNA, 517 bp, Glycine max
gaacaagacacacataattagcatagttattatggggagggttgagtactccccattgtttgagacaagaaggtgcagaggaaggttcatctacaggtcctttgcaatctcattatttgtggccatatgctttatatggcattacagatttagccacataacaaagggtgaagatggaaactgggcatggcttggtatgcttgcttcagagctgtggtttggcttttactgggtccttactcaagcccttagatggaaccttgtgttcagacaacccttcaaaaacagactctctcaaagatatgagaaaaagttgccaagagtggacatatttgtgtgcacagcagatccagatattgagccagcaatgatggtgattaacacagtgctatctgttatggcttatgattatccaactgaaaaattgagtgtgtatctctctgatgatgctggatcgcaaatcacgttctatgctctgctagaggcttcaaactttgcaaaacattgggtcccattc

SEQ ID NO: 12147 - DNA, 299 bp, Glycine max
acaagacacacataattagcatagttattatggggagggttgagtactccccattgtttgagacaagaaggtgcagaggaaggttcatctacaggtcctttaggaggcatttggtgatataagtttgtttggacatatatgattctattattcttttctatcatttcatcacttggcacttcttttttctagtattttagatgctaatataactagttatgtcttttatttatgtagtgaatctttttttcttgttttgcaaaccagattttgtgtctgtcaaccatctttgatatcat

SEQ ID NO: 12148 - DNA, 1066 bp, Glycine max
cccacgcgttcggccacgcgtccgcaaagactgattggaactagcttgcaagcattgaacttgtttcttctccctttgtcttaccagaagctcctttcctgttcctaagcggagttagggggtcaaattgaattcatttgcaacaaacacctttttgttaatgttgttgcattctcttttcctattgccgtaaacgggtcctgtcctcgcttttctcacaagccactgaaaaattttgcacctttcgccccaaaactttaacagaggggtgttgttcaccgcaattcctcaccccaatggaagaatcaagtgaattgcaatcagaagaaaataaagtctccaatgagaaaaataagaaaagaaagctgaaaacaccggcccagcttaaggccttggagaatttttataatgagcacaaataccccacagaggaaatgaaattagtacttgctgaggagttaggattgacagaaaagcaaatatctggatggttttgccacagaaggttaaaagataaaagattgatgaaagatgaagccgttgctaatgggagacaagatcgttcaagtggtgtcatccaagatcgtggcagtggacttgggcaagattcatgcggaagcagtaagcatgctgatcacaggtatctggatccgaaggaggttgagagccatggcctctacaatcacgaattgtcagttgcagatatgacccacagacgtaggaaccattatcctgaaaatgttagtggggtggatgacacatcatctgagagcagctcatttttgcaagaaaggttttctcaaggtcaggatccgtatgatatggagccttctagacatcttacacctaatggagctcttccacccctaaatcccaaaggtgcagttaagatggggcacaaaccatcaggatatttgaaagtgaagggccagatacagcatgctgctatcactgctgttagaaagcaatttggaaggcattatcatggaagatggtacactacttggcatacaattcgatgcactgtcttcagggcatttgaatgccgaactgcatatacagctaa

SEQ ID NO: 12149 - DNA, 322 bp, Glycine max
cctcgcgtccgccataagctcctttctctgttcctaagaggagttatgggggcaaattgaaaacgcattcaattacaacaaacacgttttttttttgttaatgttgttgcattctcttttccttttgccgtaaacgggggccctcgcttttctcataagccactgaaaaattttgctcctttcgcccctaaactttaacagaggtcgttgttcaccgcaattcctcaccccaatggaagattcaagtgaattgcaatcagaagaaaataaagtctccaatgagaaaaataagaaaagaaagctgaaaacaccggcgcagctt

SEQ ID NO: 12150 - DNA, 1384 bp, Glycine max
cccacgcgttcgccgtgaaacaacttcacaactttttggagaaaaccagagtaatggatggagtgccattgacaggaggacgcatatccagactaaccttgatcatcctaagtcttccaatgttgaggaaaatacctctgttgaaagtcctgttgtcttggattctcaggagttcgataatttatcgttagtatggggaaaaccaaggcaaccccctttgggttctgaagagtggaatgccttcttggattctgaaggacgagtcacagattcagaagctttgagaaagagagtattttatggtggacttgaccacgaattacaaaatgaggtatggggtttgcttttgggatattatccatatgaatcaacatatgctgagagagaattcctgaagtcagttaagaagttagaatacgagaacataaagaaccagtggcagagtatatcctcagcacaggctaaaagattcacaaaattcagggaaaggaaagggcttattgagaaagatgtggtgagaactgatagatcactcgctttctatgaaggcgatgataatccaaatgtaaatgttctgcgagatatcctgttgacatattcattctacaactttgatcttggttattgccagggaatgagtgatcttctatctccaatattgtttgtgatggataatgaatcagaggcattttgtgttttggtgctctaatggaacgtctcggacccaattttaatcgtgatcaaaacggcatgcactctcaactttttgcactatcaaagttggtggagttgctggatagtccattgcataactattttaagcagcgtgactgcttgaattatttcttttgtttccgctggattttgattcaatttaaaagggagtttgagtacgagaaaacaatgcgcttgtgggaagttttatggacacattatccgtctgagcatctgcacctgtatgtatgtgtggcaatcttgaaacgatatcgtggtaaaataattggagagcaaatggacttcgacacccttttgaagtttattaatgagctaagtggtcacatcgaccttgatgcaaccctcagagatgcagaggctctatgcatatgtgccggtgagaacggtgctgctcgcatacctcccggaaccccaccatcgttgcctgttgaagatggttctttttacgcccaacaagaacaagatgaaatattgtaaataaattcacatttataataaattgtttggtgatacttgaatatatcaacctaattgtgtatttcctcattgattcacagtttaaatacgttgttagcatatttaatgcatttctttaatcatatttgttgtacctttgattctaagcgcatcatttgtcgattcatttatc

SEQ ID NO: 12151 - DNA, 379 bp, Glycine max
gttcgataatttatcgttagtatggggaaaaccaaggcaaccccctttgggttctgaagagtggaatgccttcttggattgtgaaggacgagtcacagattcagaagctttgagaaagagagtattttatggtggacttgaccacgaattacaaaatgaggtatggggtttgcttttgggatattatccatatgaatcacacatatgctgagagagaattcctgaagtcagttaagaagttagaatacgagaacataaagaaccagtggcaggttttcatttgctccaaccattcttttccattgatggtcttccctctccacaggctaaaagattcacaaaattcagggaaaggaaagggcttattgagaaagatgtg

SEQ ID NO: 12152 - DNA, 628 bp, Glycine max
cagctatcggggaagcaattggtttaggagcagccattgattacttatctgggattggtatgcaaactatacatgattatgaggtggagctcggtagatatctgtatgagaggcttctttcagtcccaaatattcgcatctatgggccagcaccttcagaaaaagtcgaacgagctgccctttgctctttcaatgttgagaatttgcaccctactgatcttgcaacacttctggatcaacagcatggagtggctatcagatcaggtcaccactgtgcccaacccctccatcgctatttaggtgtcagctcaagtgcacgggctagtctctatttctataacacaaaggaggatgtagacaactttatccatgccctcaatgacacagtcagctttttcaattcattgatgtaactgaaatgtatttttatgtatattatattttgtttatacaagaatgagagggttggcttagttggtaggacaaactgcatcaatgaaatgttcttgaatttcattcttcctgttcatatcattggctggtaataggcatccactaattgcagtattgcaacctatctacctcctgaatttttgtgtaaagaaaatgctcttaacgcactaaattt

SEQ ID NO: 12153 - DNA, 856 bp, Glycine max
  unsure (1)..(856): unsure at all n locations
caaacttcataagtgtcaaaggtcctgagctactcacaatgtggtttggagaaagtgaggctaatgtgagggaaatttttgacaaggctcgcggttctgctccatgtgtcctattctttgatgaacttgactctattgcaactcagaggggtagtagtgtcggagatgctggtggtgctgctgacagggttttgaaccaactgcttacagaaatggatggaatgtcggcaaagaaaactgtgttcatcattggggccactaatcgaccagatattattgacccagctcttctgcgtccaggtcgtctcgaccagttgatttatatcccactcccagatgaggattcccgtcatcagatatttaaagcctgcttgaggaaatcccccgtctcgaaagatgttgatcttagagcacttgcaaagtacactcagggtttcagtggtgctgatatcacggagatttgccagcgtgcgtgcaagtatgccattagagagaacattgagaaggacattgagagagaaaggaggaaaagagataaccctgaagcaatggaagaggatgatgttgaagatgaaatagcagaaatcaaggctgctcattttgaggaatcaatgaaatatgctcgaaggagtgttagcgatgctgacattcgcaagtaccaggcattcgcccaaacattacagcagtctagaggatttggaagtgagttcaggtttgcagattccacctccgccggtggtacagctgctgcatctgacccattttcctctgctggtggagctgatgaagatgatctntacagttaggtcaacttgaatggtagtaaatgccgtgctatcttagttatgtacttctc

SEQ ID NO: 12154 - DNA, 598 bp, Glycine max
gcaagctagaaggtgacttaaaagttatgcaatgtgttagacatgtaatttgggaaagaatggtccagttctctgacaatttgcagttgccaagttctgtcagagtttttgtgctagagcttatgcaatttatctcaggtaaaaatattaagggtttctctacagaaatactagccaatgttcaaccatgggaagaatggaatgaattgatttatgctagtagaaagagtgagactgatgttgacaagcagttgccagatcacaaagactcttctagtagagttacgaatactttggttgctcttaaatcatctcagcttgtggcgtcaatctctcctagcatagaaattacccttgatgatctattgaatgcagacacggctgtgtcttgctttatgaggttgtgtggagaagctactgaagatctccaccttgatgctctgctggctattttggaagagtgggatggacttttcactgcaaggaaagatgaagaaaccactgttgaaacatctgatggaggaaatgactggaacaatgatgattgggacgagggatgggaaagccttgaggaagtagacaatcctgagaaagagaa

SEQ ID NO: 12155 - DNA, 502 bp, Glycine max
atttctttgtattgtttattattatagcaggcacctaatagatagatagatagatacgtagggatagggttaaggccatggagcgcatcatctgcgccaagtacaagctaggtcgcaagatcggaagcggatccttcggcgaaatctacctcgcgacgaatattgataccttcgagatcgtcgccgtcaagatcgagaacggtaaaacgaagcatccacaattgctttacgaggccaagctctacaatattcttcaaggaggaagtggcatcccgaacataaaatggtgcggcgtagacggggaggataatgtgcttgttatggacttgctgggacctagtcttgaggatctttttgtctactgtggaagaaagttctccctcaaatctgtgttaatgttggccgatcaaatgatgactagaatagaatatgtgcattctaaaggattcctacacagggatataaaacctgacaactttctcatgggacttggtcgaaaggc

SEQ ID NO: 12156 - DNA, 505 bp, Glycine max
actcgagcgattcggctcgagctttgatttcgcttccgaagcgacaagcagcacccactctctcttctcggaccttccaaacatggaacgcatcgttggcggcaagtacaagctcgggcgcaagatcggaagtggatccttcggcgaaatctacctcgcgacgcatattgataccttcgagatcgtcgccgtcaagatcgagaatagtaaaacaaaacatccccaactgctttacgaggcaaagctctacaatattcttcaaggaggaagtggcattcctaacataaaatggtctggcatagacggggaggataatgtgcttgttattgatttgcttgggccgagtcttgaggatctctttgtgtattgtggaaggaagttttcattgaagacagtattaatgttggctgatcaaatgatcactagaatagaatatgtgcattccaaaggatttttacacagggatattaaacctgataactttctcattgggactgggtcgaaa

SEQ ID NO: 12157 - DNA, 378 bp, Glycine max
ctggaactgggaaacaacctagaaccgggtccggttcgcccgttggccggggttggagtgagacaaaattgaaaggacaaaaataccccccggatgcatatttgtgttcttctgttctaagcgagtggttttggtttcggtggtgttgctctgagatcgaagcgtttgttattgtagaagcagctgatacatagatagataaggatagggatagggttaaggccatggagcgcatcatcggcgccaagtacaagctaggtcgcaagatcggaagcggatccttcggcgaaatctacctcgccactcatattgataccttcgagatcgtcgccgtcaagattgaaaacggtaaaacgaagcatccgcaattgctttatg

SEQ ID NO: 12158 - DNA, 268 bp, Glycine max
ctttgatttcggttccgaagggacaaccaacgaccaccctctcttctgactcacttctcgaaccttccaaacatggaacgcatcgttggcggcaagtacaagctcggccgcaagatcggaagtggatccttcggcgaaatctacctcgcgacgcatattaataccttcgagatcgtcgccgtcaagatcgagaatagtaaaacaaaacatccacaactgctttacgaggcaaagctatacaatattcttcaaggaggaagtggcattc

SEQ ID NO: 12159 - DNA, 573 bp, Glycine max
gttcatgctaaagaggacacatatatgtatttttctactacttttcacttaactatgggttatttagtggcaaatttagatgaagatctaaagtgtccaccaaatgtggattcatcatgtgctgactgccaaggttaaggatgttttgttttgtttccatgattgaattctgttgactgttagactttcacattttttaataaaacacttggtaggccataagcaagtattaaacaagaaaatagaaggataacgtggcatatatgctaaagactaaagagagttggcttaattggtatgatcaaccatcattgacgaaaaaggtcttgggttcaaattttctgctagtggtctttcattggtatgtaatgttgtcaacctttggagctgtgctggacatggtaacagacagaattagcactgcttgtctacttgtagtcctttcccaactgtacaagcctagccttatcttcttgtcattgcttgctttagatattgccagccactggctgcaaatgtacagcactttcttgacgggaaagactagtcataaagatgtaaaagacagcagca

SEQ ID NO: 12160 - DNA, 475 bp, Glycine max
gtggctttgttgatttggatggatttcttactggaaactatgtatgcaggatacatgcgggttcttttaaactgttttgccttctcccaatgtttatcaaacaaaatcttattctctattctctattttttaagctttgtatgtgatgctgttgatggctggtgtgcccgcaaattcaatcaagtgtcaacctttggagctgtgctggacatggtaacagacagaattagcactgcttgtctacttgtagtcctttcccaactgtacaagcctagccttatcttcttgtcattgcttgctttagatattgccagccactggctgcaaatgtacagcactttcttgacgggaaagactagtcataaagatgtaaaagacagcagcagctggcttttcagggcatactatggaaataggatgtttatggcttactgctgtgtctcatgtgaggttctttacttaatcctgttttatc

SEQ ID NO: 12161 - DNA, 512 bp, Glycine max
cccacgcgtccgcgaatcttttccaatctcccttcgccgatccttcgcgcgttccgccaccacctccgccgttctcagctccccgcttccggaaaattatgtatagtgttttcttggctgcttcatagtcctccctcccttgccaccggtgaatatttgattggcaatcctgtccttattagtcaagttttagaatacaaagaagcttcaatggccaagaaaccaggaccaagatccagtaaattgtcagtgtacctttacattcctaatataattggatacatccgggttcttttaaactgttttgccttctcccaatgtttatcaaacaaaatcttattctctattctgtattttttaagctttgtatgtgatgctgttgatggctggtgtgcccgcaaatttaatcaagtgtcaacctttggagctgtgctggacatggtaacagacagaattagcactgcttgtctacttgtagtcctttcccaactgtacaagcctggccttagctt

SEQ ID NO: 12162 - DNA, 413 bp, Glycine max
  unsure (1)..(413): unsure at all n locations
cttccaatctcccttcgccgatgcatcccttccccgatctgtcgcgcattccgccaccgcttctgcaaaagtatgtacagtgcttcataatcctccctcgccaccggtgaatgtttgattggcaatcctgtacttattagtcaagtttttagaataaaaagaagcttcaatggccaagaaaccaggacaaagatccagtaaattgtctgtgtacctttacattcctaatataattggatacatgcgggttcttttaaactgttttgccttctcccaatgtttatcaaacaaaatcttattctctattctctattttttaagctntgtatgtgatgctgttgatggctggtgtgcccgcaaattcaatcaagtgtcaacctttggagctgtgctggacatggtaacagacagaa

SEQ ID NO: 12163 - DNA, 914 bp, Glycine max
cacccccacgaatatttagcattttcgttgcccctttttttttctcggaaatatctttaagaataattttgccgagacagcttgaggcttaggtcattgaatatcaaccatatttcccgtatataaagaaccgttgctcattcttagtggccacagttcacactttctttctttcttattgagtttttgggcttctcacttctctctttctatctttctttcagacaaagccaaataggaacacgctctcaaacgcagtgattgatttttggtaacagagttcaattgaaatttgaaacatggattgggttcgaggagacgccctcgggcgaggaagcttcgctaccgttagtttagcgattccgactacaaatccgaatcagtttccgtctctaaccgccgttaagtccgcggaggctcaaacctcgtgctggctaagaaacgagaaacacgtgctggatcgcctaggttcgtcgtctccgaggataattcgctgcttcggagacgactgcagtttcgagaacggcgttgagtactacaatctgttcctcgaatacgccgccggcgggagccttgccgatgaattgaagaatcacgatggccagatttccgagcatgaggctcgggaatacacgagggccatcgtggagggtctgagccacgtgcacaaaagcgggtttgttcactgcgacataaagctgcagaacatcctcgtattcggggacggaggtatcaaaattgcggatttcgggcttgcgagggaggcagggcagaaacaggagaagagtgaatgcagggggactccgatggttatgtcgccggagcaagcgaccggcggcgagtgcgaatcgccggccgatatatgggctttgggatgtacaattgtgggagatggtgaccggggaaaccgcgtg

SEQ ID NO: 12164 - DNA, 515 bp, Glycine max
ccccttccttagcttcggattggggcccccgccacagttcacactttctttgtttcttattgagtttttggcttctcacttctttttttctttcacactctcaacgaagtgatttataacagtgtttaattgaaattccaaacatggattgggttcgaggagacgctgtcggacgaggaagctttgctaccgttagtttagctattccaacgacgaattacaatcagtttccgtctctaaccgtggttaagtccgctgacgctcaaacctcgtgctggctcagaaacgagaaacacgtgctggatcgcctaggttcgtgtccgaggataattcgctgcttcggagatgactgcagtttcgagaacggcgtcgagtactacaatttgttcctcgaatacgccgccggcgggagtctcgccgacgaattgaggaaccacgatggcaggattcccgagcctgaggctcgggaatacacgagggacatcgtggagggtttgagccacgtgcacaaaaac

SEQ ID NO: 12165 - DNA, 516 bp, Glycine max
ccagtgtgaaccagtctcacctcattgattcattctccgtcagaaatacctttcctttgcgaaagagaagagatctgaaaccctaaccctaaccctaaccagaggtaatggattcagtgcctcgaagaagcagaggaggaggcgttttggaaaacctcgacaaggtcctaatgcgtcgcaactgagtctacgtcaccttcgtcatcgcaggcgccttcctcggagaacgggctgtggattacggagctcacaagatcggggagcacaataacgttgggtccaaatggcacctagatggaaaggaaaagatgcaaaagctaaaaaggatgcacaagctgaagcgctcaaggaacccatgtcaaagattgtatctcaacttcagtcttctctagttcaatcaaatacttgtggatttctctctggtagtagtgtacacttagcagtgggagcagaacaacttcatttgctcgataaagcatgctttggctcacctgtgagaacagttgaaaaggacaa

SEQ ID NO: 12166 - DNA, 472 bp, Glycine max
attcgcggttgttgaattctgagcagccaccgtgaaccggtctcacctcgttgactcattctccgtccacttgcgaaagagaagagatctgaaaccctaacctaaccctaacagaggtaatggattcagtgcctcgaagaagcagaggaggaggcgttttcgaaagcctctacaaggtcctcatgcgccgcaactccgtctacgtcaccttcatcatcgccggcgccttcctcggagagcgggctgtggattacggagttcacaagatctgggagcacaataacgttgggaaacgatatgaagacattcctgtactagggcaaaggcaatcagaagagtgaacatcacgagttaaataatggttttagctttagcaacttgttaaatgctttatgtttgtaaaagcttgatttcaatgactatttggaaatatacagtattgaattaattcacatttctgtattgaatttta

SEQ ID NO: 12167 - DNA, 2355 bp, Glycine max
gcgaaaagtaaaatgagagaagcatggaaaaaagggcacgcccgagtgggagtaggcgtttgccatgcttgtccgtgagggatgggcttaacgttaatctcatgtcatgctttttaacccactcacacactctctcttctttcttcatgcccgcctccctttcttcttcctttgatccgttcatacggtggttagatgatggaatcctgtgattgtatagacacacagtatcctccagatgaacttctcgtaaagtatcagtatatctcggatgtgctaattgctcttgcctatttttctattcccgtggagctcatctattttgttcagaagtctgctttctttccatatagatgggtgcttatgcagtttggtgcttttattgttctctgtggagcaactcatttcataaacctgtggacattctccccacactctaaggctgttgctgttgtcatgacgattgccaaagtttcgtgtgctattgtgtcatgtgcgacggcactgatgcttgtacacattattcccgatctgttgagtgtcaagaggcgcgaatcgatcctcaagaacaaggctgaagagcttgacagagagatgggacttattcttactcaggaagagacgggaaggcatgttagaatgttgactcatgaaattaggagcacacttgacaggcatactattttaaagactactcttgtggagctggggaggactttgggcttggaggagtgtgcattatggatgccttcgagaagtggtctgaatctgcaactttcccatactttaacctaccatgtgcaagttgggtctacagtgcaaacaaacaatcctattgtcaatgaagttttcaacagtcctcgagctatgcggataccaccaacctgtccactggccaggatcagacctcttgtgggaagatatgtgccgcctgaagttgttgctgttcgggtgccacttctaaatttgtccaattttcaaatcaacgattggcccgatatgtcagcaaaaagctatgcaatcatggttctcatcctccctactgatagtgttagaaaatggcgagaccatgagttggaacttgttgatgtggttgcagatcaggtagcagttgccctttcacatgctgctattttggaggagtctatgcgagcccgtgatcaactcttggagcagaatgtcgctttagatttagctcggcaagaggcagagatggcaattcatgcccgcaacgattttcttgccgtcatgaatcatgaaatgaggacgccaatgcatgcaattatagcattgtcatcccttctcttggagactgaactgacgccagagcaaagggttatgatagagacagtgttgaagagtagtaatgttttggcaacactcattaatgatgttctagatctttctcgacttgaagatggtagcctcgaattagaaatgggaaaattcaaccttcatggagttttgggagagattgttgaactgataaaaccaatagcatccgtgaaaaagttacctatcaccttaattctgtctcctgatctgcctactcatgccattggtgatgaaaagcggcttacacaaactcttttgaatgtcgtgggtaatgctgtcaaattcactaaggagggctatgtttctataagagtatcggttgcaaaaccagaatctttacaggattggcgacctccagagttttatccagcatctagtgatggccatttctacatacgagtccaggttaaggactctggatgtggcattcccccacaagaaattccgcatctctttaccaagtttgcccagtctcggagtggaccagctcgacctagcagtggtgcaggtcttgggcttgccatttgtaaaagatttgtaaacctcatgggaggccacatatggattgagagtgagggtcctgacaaaggaagcacagctacatttataatcaaacttgagatttgtggcaatccagatccatccgatcatcaagctgcaaacagaagccaagcatacagtggaagtggtggcctcgctagatttaaacccttcatcaaagatgaagacgacactggtttttctactagacgcaatcaaagaagtttctaatatccaagacaccaacattgcatacctttcgatcacagtcgacaagatggagtacacatactttcattttgcatgtgctaaattgtataatttacagtttgcagctgtagaataggaatactatgtcaggcatatttctaacaaacaagtcttatgtgaactcctgccgtattaactagaatacaatgcaatgaaacaaatttgagagacaatccgttacttaatttgacttgtagtatatattgtgtt

SEQ ID NO: 12168 - DNA, 259 bp, Glycine max
taccgatgccactatgagggaaattaaagctgttgactatgaaaaccagaagaatttattatctgatgcatggagaatgaaccagcttcagaaacatctcagtgatgaagatcatccgtatcataaatgtagtgcagggaactgggacactttggaagttagaccaaaagcaaaaggattagatacaaggagcgagcttctcaaattctatgaagaaaactattctgctaatctaatgcatctagttatatacacaaat

SEQ ID NO: 12169 - DNA, 726 bp, Glycine max
atcgataagaaaattttgcacctaaaagacttgtctatgatgaaagaagggctattgggaaatgccctttgactcctgaggaggttggtcttattttgcgtgcattgggttttgacaattctaccaggatatatctggcagctggtgaattgtttggtggggatccatttatgatgccatgtcgaagtttgttccctcgacttgaaaatcattcttctgttgaaaactctgaagagcttgccgaaaacactaggggattggccggttctgctgtggattacatggtctgtcttctttctgacattttcatgccaacttatgatggcccaagcaactttgccaacaatctccttggacatcgcctgtactatggcttccggactactatcagacctgatagacaatctcttgcccctatcttcatcgatagggagaaatgggcggacggctggttttgaggaagctgttaggaaagtcatgctcaaaacaaactttggagaacctcacaagcgtgtttctccagagtctttctacactaattcttggcctgaatgcttctgccaaatatccgcacagaaccctgcagacaaatgtcccccaaatgacattttaaatattatgaacgacgaattacagaaaacagagaccgacacaaattctacaatatcctgagccaagttgtgtggcattgggctaatggttcttcaactctgcagtaatgaactg

SEQ ID NO: 12170 - DNA, 1133 bp, Glycine max
  unsure (1)..(1133): unsure at all n locations
aaataatccagagagaggagagagaagtaaaaaggtggaggaagaagcgaaaagcgagtgagggcagtgttgcttaataaaagaaaacgaacggtggtgataggcttcagtctagatctcaatcgtctccaccttgctttcttctccagcgtccgattctctcaccgatctcgcgccaaatacaaattcgtgtcaacccaacccagggttccggcgagcatggccgacggtccggctagcccaggcggcggcagccacgagagcggcgaccacagccctcgctctaacgtgcgcgagcaggacaggtacctccctatcgctaacataagccgcatcatgaagaaggcacttcctgccaacggtaaaatcgcaaaggacgccaaagagaccgttcaggaatgcgtctccgagttcatcagcttcatcaccagcgaggcctctgataagtgtcagagagaaaagagaaagactattaacggcgatgatttgctctgggcgatggccactctcggtttcgaggattatatggatcctcttaaaatttacctcactagataccgagagatggagggtgatacgaagggctctgccaagggtggagactcatctgctaagagagatgttcagccaagtcctaatgctcagcttgctcatcaaggttctttctcacaaaatgttacttacccgaattctcagggtcgacatatgatggttccaatgcaaggcccggagtaggtatcaagtttattattgaccctcttgttgtaacgtatgttttctacgccagttaccaagtgctcacggcatattgaatgtctttttatgttatgtgaatactgacaggagatgttggttcttgtgtccgttttttttttttaaattaaggtttgtatattatctttggattcgaattattatttgaaagttattattatattgtaaatcctagagccctgttgtctgaatccatcaggcggcttggtaaagaccgagattttaggactgattgtaagcataaatccgaatattcttttcctaatttctttgcacaataatgtatgaagaaggctcgagcttcttttaaaaaaaaaaaaaaaaaaaaacaaaaaaaaaaaagggggggnnnnnnnnnn

SEQ ID NO: 12171 - DNA, 696 bp, Glycine max
gtcggatccagctccggcaggaccgccaagcctgtcgtcgtcgccgactgttgtcaactctcttagctacggttactacaaaggcgacgacgacaaagccaaagccaaggccaatgccaaggtcacttgctttcttctccagcgtccgattctctcaccgatcttgcgccaaatacaaattcgttacatcctaacccagggttccgacgagcatggtggacggtccgacgagtccaggcaatggtagccatgagagtggcgagcatagccctcgctctaacgtgcgcgagtaggacaggtacctccccatcgctaacataagccccatcatgaagaaggcactacctacgaatggtaaaatcgccaaggacgccaaagagactgttcaggaatgcttatccgagtttttaagatcaacctttcagacacatgtattgagatggatggattacattcagcacaagcaagaatttgtaggtttatttgagaaaatattgttgcagaagcctggatttgagcccccggtaacacatcctgttggagttgtggaagctgatttaaaatcaaacaacactgagcaaagcgtaaagcatgtcagcaagtccgaagcagactcaagcaaggataaaaacaaagttgaagattgacggaaaagaatacagccgataagattacaccgtattttcttgcactcgt

SEQ ID NO: 12172 - DNA, 772 bp, Glycine max
  unsure (1)..(772): unsure at all n locations
atatataacttttcactgtattgtttgatgaagtctgttgtgctgctataatcatttgtattgcatattatgacacaaacttgtttttatgcatatttgcaccagtgtcgttgcagatacatgtgttgccatggatggctgggtgcagaaccctactgcacatacagccttggatgaaattcttccttgtgtggataatgcaactgcgcaggaaaccttgtttcgaaccagggatgtgacacaccaacttgctaacttacttggcaacattgtttccaatgtcacaaatagaaatctcccacctgctgctggacccttgtattacaatcaatcaggccccttgatgcctcctctgtgcaatccatttaacaatgatctcacaaatcggtcatgtgcagatggggaagtttcggtggacaacgctgctgaggtgtggaagaactatacttgtgaggtttcttcctgacgcatttgcaagacgcctggtcggatgaccccgaccatttatggccaaatggaggctgcaatgaatgtaagctatggcttatatcattatggtccattctcggctgatctacaagactgcactttcgtgcggaaaacattcacagacatcagcaatgatcactgacctggtctgcagagaaacagtcaatngatctatattggattgggtctggtatcagctgctcgaatgctgtctttgatcttttgggtcatctacgcatgagagctgcggtaccgtgtttatactaaacagctcattgagggc

SEQ ID NO: 12173 - DNA, 660 bp, Glycine max
caaaattcctcgtgtccggacacaccacacaacattgttttctctttttgcatcgctattagggtttgcagagttgcactttccctttcttccaattcatgcgttttgttttcgattccctttctctatcacgccaaatcccaccgaatcgtgcgacgcggtatattggaatctcacttgggctctaattgatgcattcacaccgttagcggttgggctccaattctccaagatgagcaattctcactctgaaaatcatgatgaagtaactgtggcgggatttgaagttccaaaatctcctgattctagttataacaatgtctaccctggaaatgaagatgacgcaagggatccacctatggtcccttcacatttacagcatactttgctaaattatcctgctaatagagacactgcaggaactgttccattgcctcagaatgtgattctaaatcatctgtacatcgagaatagagaatcaccaagatctgtggtggcgttgggattcactcatcgtttccactctaaatatgttacagtcgtgctttacaaaccagtccaaagaaggggaaatacaagcatttagtgtgcataatattaaaaacctcgatcaccgatggtttgtaatgatttattgtagactccatattctaattactg

SEQ ID NO: 12174 - DNA, 264 bp, Glycine max
agcaaatctgcaaccaaattagaactgctgtgtgtgtgtgtgtgtatgtagtgtgcatgtttgtaaatgttgcctccttagattaactgcatcaagtttatatgcattaaagaccaagctactctttcttcaggtatattggaatctcaattagagcccaagtgagattccaatatacctgaagaaagagtagcttggtctttaatgcatattggaatctcacttgggctctaattgatgcattcacaccgttagcggttgggc

SEQ ID NO: 12175 - DNA, 1219 bp, Glycine max
accacgcgtccgatttagttccccaaataaacaataccaatgttgacaagagtgtagcagccattcatgcaacggtgttcagctgtcttcgaaggcgtgaggttggggaacaactatatgatcctgttagaaatactgtgactgttgtttatgaggaatatagaaatcaatgtgcagccaattctttgagctcgaaaggaatgtttcaactgatccaaagaaaaggttcttcaaggaatctgatggctcttgttaatgatgatggatctgtggcaaaggcttggcctgttaatttagttgactgtaatgggaagcctgtatggtgccatggacctgagaatggagttggacatccaatgtatggtcccttaagaattggcaaggcagaacctgtcaatcttcagtttggtttttatgggatcagtgcatggccaagtgatggtggcactagtcgtgctggaagtgttgacgagtctagagccgatgggactgatactggtagtagatatgtatcctcttgctgtagctcgccaaggatgtcggatgttgccgcaaaggagctcaaggaagacttctcagtgcatggtagtgatgaagagattgacgatcaaccagaggtgggcagtgatgaggattttagtgatgatggcggcaaacatgcccttgaagaggtaggatcagttgatgaggaatcaacaaaatccgacgaagagtatgatgatcttgcgatgcaagacgtgctggaaactggatattggtcagatgatgaagagtataggatcagggttgatggtgtttccggtgaacttggaactaaaatgcatggggggtacaagtatcgtcggaacctggatattttccttagaagtagaagcgagttggcagagccactatgttcttattcttctttgctcgtggaaaagaatgagaggaaagccaaattaagaacacgttctcttagtattcctgcattaggaaagcatcgttcagcagtgaatgatcccatcctttctggtgctcctcagaggtagcactacctactttccctcttcaacaatactcgtaatgatcaaatctttttagtgttttttttggatgactatatcttacgatgtcccatgtgtatatagtagagcgttcaagaccttactggtcttgtagttatttcgttgatttgatatggatgaatccatgttttgacgacaaagattattaatca

SEQ ID NO: 12176 - DNA, 486 bp, Glycine max
aaatgcaccgcctggatgccgttttaaattaaagtctgtccccttcagtaaaaacactatgtttggaattgaagatgttaaggagctgatctctatcttgtctgatggtgatggtcatgtggaatgttccatagttggtagctataaactggacacctcagattctgtttgcccttcaagagttcgtgcaatgttggcatcacgagcatgtcgatcatctattatggttggtgatgcacttggaagaaatgaaatgcagaagatacttgagcatatggctgagctgaaatccccatggaattgtccccatggcagaccaaccatgcgccatttagtcgacttaacaaaaattcacaagagctatgaacttacaatgcagatgtaattaataatggacttttttccctaatccccatcgttaacttagaaattcagggaattatttaacttttttgtaccaattgcttgtaaaatattttgttctca

SEQ ID NO: 12177 - DNA, 547 bp, Glycine max
ggtagtgcccttattttctttgtcctaatctttaagatcctcagatgtcaaacaaaaaaaaaccaacaacctcttcctttgtgtttgtgagctcaagttgaagtttttagttcgaagacttttactctcttcactgttgttgtgttgtgcttcttctgggaaggttctggggttcaacggattcccccccccccccccaagacaagaccaacaagtttctaaatttagatagtgtcgagagatatcattgggattggataagtttctagaaatggaaagttccaagaacaatagagtggagaagagagggtacgagctagttgaggagggtgatgatgcacaacaccatcttacacaatcaaagaaaccaaaactacccggtttagccagtgtgattgtggaagctttaaaggtggatagtatgcagagactttgctcatctttggaaccccttctcagaaaaattgtaagctacttttgctttccttgtattaaatcctgcataatagtagactgtagaccctctgggcaattcttcacaaaagaa

SEQ ID NO: 12178 - DNA, 1554 bp, Glycine max
gaagatcttcagatatcaaacaaaaaaaaaaaaaccaagaacctctccttatgtgtttgtgagctcaagttgatgtttttagttccaagatttttactctccacagtccacactgttgtgttgtgcttcttctgggaaggttctggggtgcaactgtcctacggatcccctgccccccaagacaagtccaacaagtttctaaaattagatagagtccacagatatcattgggattggataagtttctagaaatggaaagttccaagaacaatagagtggagaagagagggtatgagctagttgaggagggtgatgatgtacagcaccatcttacacagacaaagaaaccaaaactacccggtttagccagtgtgattgtggaagctttaaaggtggatagtatgcagagactttgctcatctttggaaccccttctcaggaaaattgtcagtgaagaagtggagcgtgctttggcaaaattgggccatgcaaaactgactgaaagatctccaccaccaagattagaaggaccagcggcaaagaatctgcagcttcagttcagaacaagaatgccacctcatttgttcactggtggaaaggttgagggagaacaaggatcagcaatccacgttatgttgatggatcctaacacaggcagtgtcgttcaagttggaccagaatctgttgctaaattgaatgtggtggtacttgaaggtgactttaatgaggaagtagacgatgattggacaagagagcactttgaaagccacgaagtaaaggaacgtgaggggaaaaggccacttctaactggagatttgcaggttagcctaaaggaaggagtaggaacctttggtgatcttactttcacggacaattctagctggataagaagcagaaaattccggctcggggttaaggtggctcctggttattgtgaggagattcgtattcgtgaaggaaagactgaagccttcgctgttaaagatcatagaggagaattgtacaagaaacactacccacctgctttgcatgatgaagtttggagattggatcggatagctaaggatggtgcacttcacaaaaaattgattcaggcaaaaattgtaactgtagaagatttcctacgtcttcttgttcgtgagccacagaagttaagaagtatacttggtagtggaatgtccaatagaatgtgggagaatactgtggagcatgccaagacatgtgtcttgggtggcaagctctttgtatactacactgatgaaaccaatagtgctggcattgtgttcaacaatatatacgagctgagaggcctcatttctgatggccaatttttctctttggaatcacttactccaaatcagaagatgtctgtggattccttggtgaagaaagcatatgaaaattggcaccgagttgtagaatatgatggaaaagttttaaattctcatactaatttgaaaaaggcatcaagagctgtggccactcaaataatgcaccataacagtttccctgagcagcagtatacctcagcaaagaacaaggtgtcatacgtct

SEQ ID NO: 12179 - DNA, 549 bp, Glycine max
gtctttttcctcatcttcttcttgaggtagttgagcgggtataagaacgttcttctccactttttcttcatcccaattccatgaagcagattcattaacttcaacatctcgactgatgacgagtttcttagtttgcaagttgtagacacggtagcccttagagatattgctatacccaaggaagatacctcgtatagtcttgtcttcaagcttgtgcctcttcacgtctggaatatgaatgtagcatatagatccaaagacccttaggtgctttgctgatggcttcttcccgttccaagcttcaattggagtcttgtcttttacagacttagttggacatctgttgagtatgtaaacagcagtgtagactgcttcagcccagaatgtgttaggtagtcccttctccttgagcatcgatctagccatttccataactgtgcgattctttctctcggacactccattttgttgaggagaatatgtgactgtaagttgtcgctcaatgccttcatcctcacaaaatctttcaaactcgcaagaggtgtactc

SEQ ID NO: 12180 - DNA, 511 bp, Glycine max
ggattttcatttttcactacatgcaatcttctcaactcagcaggttcctttcttctacttcaggttcttgagatataggagcggttcaagctgtgtcccgtgaggcttatttcacagccattgacggtaccggggctgataatagtggaggtttgccaccagaaatttcaagcgccaagaaaaatcgtttgccaggtcttaaaggagagaccagtaacaaatctcttgaggccatggtgaagagcacgggcaaagagtccttacagtggggagtggctgcaggattgtattcaggtctcacatatgggctaaaggaagctcgtggagctcatgactggaaaaacagtgcagttgctggagcaatcactggggcgacccttgcacttacattggaagactccactcatgagcagattgtgcaatgtgccatcactggagcagctatctccactgctgcaaatcttctcactggaatttttaaatggatgccctgttcttattggcttttaat

SEQ ID NO: 12181 - DNA, 386 bp, Glycine max
gattattaccaacacctcgcttcctttttcttctcttcgaagtgaatcaatagtagtaattttagttaattaagatgaacctgaacacgagcagtaacttggagactcggtcactgcttgatgagctttgtaacttccacaagaagggactcttcgaccttggacaccctcttctcaatcgcatccttgagaccttcgtcaaagctgctggaattggagcggttcaagctgtgtcccgtgaggcttatttcacagccattgacggtaccggggctgataatagtggaggtttgccaccagaaatttcaagcgccaagaaaaaatcgtttgccaggtcttaaaggagagaccaattacatatctcttgaagccatggtgaagaacac

SEQ ID NO: 12182 - DNA, 551 bp, Glycine max
ctttgttggttatatttatgaggtttctgaactctgaagtaaggtcttttctggttcgtttttcttatttttcatattacgttgggaactcctcaacagaagcctggttctttggggagtgaaagcagctttgcgctagtgacaggaaacaccacctatggattcagcagagaagaggctcaatgagcttggttacaagcaagaactgagaagagaaatgactttgtttaagactctggcaatatcattttccacaatgacccttttcactggaattacacctctctatggttctagtcttcaatatgcaggccctgcaactcttgtttgggggtggataagtggtttctttcttcacttggtttgttgggattgcaatggctgagatatgctcatccttcccgacgactggttctctgtacttttgggctgcccatttagctggtccaaaatggggaccatttctcttcatggtgctgtgctttggcttgagaccatagggcttatagctgggatagggactcaggcatatgcaggttcacaaacgttgc

SEQ ID NO: 12183 - DNA, 454 bp, Glycine max
cttcatgagacagccccgcatctggtggattccatatgtgcatatcgtggtggctacggggcaaaggaaagaagaaaaatagagagttcattttttggtggtaaaatatgtggtgttgctgcaactaatgctcttgagttgggcattgatgttggagaaattgatgccactctgcatctaggatttcctggtaatattgcaagcttgtggcaacaagctggtagaggtgggaggagagatagaccatctcttgctgtctatgttgcatttggtgggcctcttgatcaatacttcatgacaaatcccaagaaactctttgaaagaccaattgaatgttgccatgttgattcccaaaacaagcaggttcttgaacaacatttggtctgcgcagctcatgaacacctttgagtgtgaactatgatgagcatattttggtcttgcttgagagtgtcat

SEQ ID NO: 12184 - DNA, 852 bp, Glycine max
gcaaatgtggagatcttattcttcagaaaaacatcaaatggaaattgatagagatgaaaagaaaaagaaaagtgaaggctctgggcctaatttggctggagatggagaacttgttcaagctcctctggggttgtttcctcggccatggcctacaaattctgatgcttcagagagtagccagttttcaaaagtcattgagtatttccggctactaggtcgtgttatggctaaagctcttcaagacggacgactactggacctgccattgtcagtggcattttataagcttgttctctgccaagatcttgatttgcatgacattctgttcattgatgctgagcttgggaagactttacaagagttcaatgcccttgtttgtcggaaacattatatagaatctattggtggtagctatacagatacaattgttaacttgtattttcatggtgcaccaatcgaagatctttgcttagattttactctccctggttatcctgaatacaccttgaagccaggagatgaaattgttgatatcaacaatttggaggagtatatatccttggtgatcgatgcaactgtcaagactggaatcatgcggcaaatagaagcatttagagcagggtttaaccaggtttttgatatctcatctttacaaatttttactcctcaagaactagataatttgctttgcggccgcagggagttgtgggagtctgagacacttgctgatcatataaaattcgaccatgggtacaatgcaaagagccctgccattattaatttacttgaaattatgggagggttcacaccagagcagcaacgtgccttctgtcaatttgtactggtgcacct

SEQ ID NO: 12185 - DNA, 684 bp, Glycine max
cccactcgtccggtttatggaggcgaataggatgaaagctaattgaagattagcgccagtgttctattggatgtcccacgggactctttgattatgaatgacgagatatttggtcctttacttcccatcctcacggttgataaaatagaagaaagctttgacgtaatcaattcaggatcaaagcctctcgctgcatatatatttacaaataccaagaagcttaaggagcaatttgttatgactatttcagctggcggtttggttgttaatgacactactttacatcttgcagttcatactttaccatttgggggagttggtgagagtggagtgggtgcataccatgggaaattcacatttgaagcttttagccacaaaaaagcagttctatatcgcagatttattggtgatgcaccagtaaggtacccaccatacacaaatacaaagatgagattgctgaaagctctcataggtggtggcatacttggtattattcgcgccctgtttggttggtgataggctttaattttaattatattggaattggaatcttgatgctatagacggcttttaatctggcttccttggattttaatctccagttaatttttttatgtaatactcatcaaccttgacttttggatgataggtaaaaatcatgtattggtattcggttcttttggc

SEQ ID NO: 12186 - DNA, 1566 bp, Glycine max
ttgatgcgtgggattctcctaagaatcaccacagcaagagcaagaaaaaaaaggaaaaaaaagaaagactttctcttgaatcatcatgaccatgaaagattccatagttctatattcagctttgggaagaggacaccttgtttcaatggtggaactaggtaaactcatactaagccaccacccttcactttccatcaccattcttttcctatcccctatcccccaaccaagacacccccacctcccccaccgccttcacctgcgacgccaccgccaaatacatcgccgccgtcaccgcctccaccccctccatcaccttccaccgcatcccccagatctccgtccccaccgttctccctcccatggccctcaccttcgagctctgccgcgccaccggccaccacctccgtcgcatcctcaactccatctcccaaacctcaaacctcaaagcaatagtcttggacttcatgaactacagcgccgcacgtgtcaccaacgcgcttcaaatccccacttacttctactacacttccggcgcctccaccctcgccgctctccttcagcaaaccatctttcacgaaacctgcaccaagtccctcaaggacctcaacacgcacgttgtaatcccagggttaccgaaaattcacactgatgacatgccagacggagcgaaagatcgtgaaaacgaagcttacggggttttttttgacatagccacgtgcatgaggggcagttacgggattatagtaaacacgtgtgaagccatcgaagagagtgttttggaagcgttcaacgaagggttgatggaaggaaccacgccgaaagtgttttgcattggacccgtgatttctgctccttgtagaggcgatgataacgggtgtttgagttggctcgattcacaaccgagtcagagtgttgtgtttctgagtttcggaagcatggggagattctcgaggactcagttgagagagattgctattgggttggagaagagtgagcaaaggttcttgtgggtcgtgaggagcgagttcgaagagggtgactcggcggagccaccgagtttggacgagttgttgccagaagggtttttggagaggaccaaggagaagggaatggtggtgagggactgggccccacaggcggcgatactgagtcatgactcggtgggtgggttcgtgactcactgcgggtggaactcggtgttggaggcggtgtgtgaaggtgtgccaatggtggcgtggcctctctacgcggagcagaagctgaataaggtgatcttggtggaggaaatgaaggtgggtttggcggtgaagcagaacaaagacggcttagtgagttctaccgagttgggggaccgagtcatggaactcatggactcggacagagggaaagatattagacagaggatttttaaaatgaaaatcagtgccacggaagcaatggcgaaaggtggatcttcaatcatggctttgaataagttagtggaactatggagggagcactagtagtatagaattagagatcgatagaatattattaagttcagaaaaaagtgtgattcattat

SEQ ID NO: 12187 - DNA, 365 bp, Glycine max
tcggaatcgctcgatggcctcacatgcacctcgtaatcccagggttacccaagattcacaccgatgacttgccggagcagatgcaggatcgtgcgaacgaaggttaccaggtttttatcgacatcgccacgtgcatgagggacagtgacggggttatagtaaatacttgtgaagccatggaaggtagggttgtagaagctttttccgaaggattgatggaaggaaccacgccgaaagtgttttgcattggacccgtgatttcttctgctccttgtagaaggatgataacgggtgtttgagttggctcgattcacaaccgagtcatagtgttgtgtttctgagtttccggagcatggggagattct

SEQ ID NO: 12188 - DNA, 703 bp, Glycine max
cccacgcgtccggtcagtctcatggagattgaaactagatcccgagcacagacccctgcgtcatctgctgttgcagttaaagcacgtttaaaagatgttagtaatgctttaatgacatccaaagagctacttagaattataaaccgcatgtggggtcatgaagatcgtccttcatctagtatgtctcttatctcagctctgcatactgagctggagagggctcgcctacaggtcaatcaacttatccaggaacagcgctcagatcagaatgagataaattatttgatgaagtgttttgctgaagaaaaggctgcttggaaaaaaaaggaggaggaaattgttgaagctgcaattgaatctgttgctggtgaactcgatgtacagaggaaactcaagagacgattagaaagcttgaacaagaagcttgggagagaactggctgacaccaaaacatcccttcttaaggtggtgaaagagcttggaagtgagaagagagcccagagaaattattgagcaagtatgtgatgagttagcaagagatgctgatgaagataagtctgatattgagaaaccaaagagagtgtctaccaaaagttggggaagaggtagagaaagaaaagggaattatgccattggcttgataggttacgcgaggagagagctcataggaaattctctgaggcaaaatatcagcttgaggaaa

SEQ ID NO: 12189 - DNA, 613 bp, Glycine max
gcaacttggtcagctcatcaaaggcactattctatttttaattattttttgggggaacataaaattgagtaattgacgactctgtctcttctgctaactgtggcattgccgtggacattttcttcttagctaaataagataaacacttccaattttgagacttttccttcgcacccttttgcatcttttagtgttttttctttatgagttttgctggttttggtccaacaacatagtgttttcatcatgggaaacgcttgtgcaaaaggaaaaccagttgctcatgtctcttcctccaatttttctggaggtaagaagcatgcaagtaggccaaagcagtattcaaattcttctgaacaactatctgctccaataacttcagaattaaatgttcccaaatccttctccagtaacctaaaatccttcagcttgaatgatcttaaagaggccactaagaacttccggcaagaaaatttaattggagagggaaggattcgggcgcgtcttcaaaggatggatcgatgagaacacatatggtcccaccaaaccaggcactggaattgtagtgcccattaaaaacctaaagccagaaagcttccaaggccacaaggaa

SEQ ID NO: 12190 - DNA, 633 bp, Glycine max
cttatctgagtgggttcggtggaaccaaagcgtgcttcctcttgctcctatcctaagtcctaattcagcatcgtgctgttccaattcgaaactcatatatataaatacagatcccaactcaaaagccaaatcacaattccacagaacaatagtaagtcctatcagtttccacgtaagtctccaaaatcagaaccactcgaagcttttcaatggagattgacggcaacgttctcgcggccaagtcgctggttcgcttcggtgtgcagcacatgttcggcgtggtggggattccggtgacgtcgctggccaaccgcgccgtctcgctcggtgtcagattcattgcttttcacaacgagcagtccgcgggctacgccgcctccgcctacggctacctcaccggccgccccggcgtgttcctcaccgtctccggccccggctgcgtccacggcctcgccggcctctccaacgcctccgtcaacacctggcccaccgtcatgatctccggctcctgcgaccaaaacgacgtcggccgcggcgattttcaagaactcaaccagatcgaagccaccaaacccttcaccaaactctccgtcaaagcctcgcatatctccgaaatcccggcccgcgtggccc

SEQ ID NO: 12191 - DNA, 927 bp, Glycine max
gtgatcagccccacatgtgcatatatgatatacatatccaacatagtatcagacccccgtccaccattttccacatgactggtagtagtagtaaagatgctagtatgctaccgacttttaccctcttcacactagaagttaatatacacttgaagcatagttatagtactaaaatttgaaaagaattaaacttgactggatgtagtgtcactgctgccgtcaagcaatggcgtcagttttcctcctctagttgtggcagattgctcctcatcatctttgtcatatacatcacttttcaaaaagattcctatgaaccatattacagcagcaagaaagaaaatggatgttaaacaaagtgctgttttcctccagtcgttgatatgatcctgcaggaccccaacaagtggtgaggaaggcacatcaccaaagacatggattgaaacagtagatatagccatagacagtggcctcaaactaggttttacacaacggagagaaacataatttacaggagcctgagtgacaaaaatcagtagttcacccatagtagaagaagactatgaaaccagacaagctcttgaaaaggaaatcgatcaagcagaagattgcaccaagaaatgttgctccagaaagaagcttgaaagcattagagatggttgaagatatcctgtcaagaaacaagcctccagctaatgtcccaacaataccacaaacaattgtaatgcctccaaataacaagtcagcattattctagaacatttataacatacacttggtcatgcaagagctcctgcatatctttggagaagatggtgaactgattccacaatttggatgttgacttggatcctttgagcaaggcttgatcttcagcaagcgtgtcatcatctccagtttctgaaacatttgtttcagtatatgtatgtg

SEQ ID NO: 12192 - DNA, 335 bp, Glycine max
  unsure (1)..(335): unsure at all n locations
gttgaagatatcctgtcaagaaacaagccttcagctaatgtcccaacaataccacanacagttgtaatgcctccaaataacaagtcagcattattcatatggtaaatgctgtatcctgcctttgggccccagtatgagtaagctccaatgacaaaattgtatgctatgtaccctagaacatttataacatacacttggtcatgcaagagctcctgcatatctttggagaagatggtgaactgattccacaatttggatgttgacttggatcctttgagcaaggcttgatcttcagcaagcgtgtcatcatctctatgggtgaactactgattttt

SEQ ID NO: 12193 - DNA, 638 bp, Glycine max
tctcacgcgtccgcccacgcgtccgcgttctttgccctcatctctctctcgccggcgtcgctacgaaggaaagcaatttactgtgaagaacaatgaggaagctaaagtttcatgaaaagaagcttttgaagaaggttaattttttggaatggaagagggaagggggtcacagagagaacctcattatgcaacgctaccatgttactggacgggacgattacaaaaaatattcaggtttatgccatatggttcagaagttagtaaacatattgaaacagatggacccaaaggatccttttcgggttgatatgactgataagcttttggagaaactctacaacatgggtgtgattccaaccaggcaaagcatcacactctgcgaacgcttaactgtgtcatccttctgtaggcgtaggctctcaactgttttggtgcgactaaaatttgctgagcacttgaaagaagctgtcacgtacattgaacaagggcatatacgagttggtccagagacagttacagacccagctttccttgtaactagaaacatggaagacttcgttacatgggtggattcatccaaaataaagagaaaggtgcttcagtacaatgacaaattggatgactatgatttaatgaat

SEQ ID NO: 12194 - DNA, 415 bp, Glycine max
cggacgcgtgggcggacgcgtgggtggctgctctttggcgctgtcgccgttcttagccctagtctctctgtctctcgtcgcctctctgcaagttagctgggacaagccaccaaggaaaacattttactgtgaagaacaatgaggaagcttaagtttcatgaaaagaagcttttgaagaaggttaattttttggaatggaagagggaagggggtcacagagagaacctcattatgcaacgctaccatgttactggacgggacgattacaaaaaatattcacgtttatgccatatggttcagaagttagtaaacatattgaaacagatggacccaaaggatccctttcgggttgatatgactgataagctattggagaaactctacaacatgggtgtgattccaaccaggcaaagca

SEQ ID NO: 12195 - DNA, 399 bp, Glycine max
cggacgcgtggggccgctgagctacaggtttattctcacgtttctcggaatgtggaaagagatgcaagaatgttacaaatgccaatatcagcaaattgttgaagccaaaactttagatgccttatcgttaaacacaaagcctggcaatgctcatattgatgcaacaataaagctcaaatctgaggtacagaaatggaatttgagcttcttagattggattcacgcccagacgtcccatgtgaaagccttgaatggttggctggtaagatgtctattatacgaacccgtagaagtacccgatgattcaactccctttctcacctagcatgattggggcaccacctgtgtttgtgatctgtcacaaatggtcaagggcagtggataatctctcagagaaga

SEQ ID NO: 12196 - DNA, 823 bp, Glycine max
gggtcgacccacgcgtccgccgtgttttcatcatcaggcaagagcgagcgcaacattattcgagtacgtagcttaacaatattttaagcaattgctgctacaatgatagcgcggtttcctttgttgccgttgctgttgctgggaattgtttttctagcatcagtttctgtctcattacaggtgaagccgccgagtcaccacgagtgcctccagagttgcgagagtgaaacggatccatacaagcggaaagcatgcaagcttagttgcaagttcgttcctgagcacggggagcaacaacatgaagaagaagaaagagaaagagaacatccacaaccacacccaccacacgaggagagaggacgtagagaaagaggacgccaggaaggtgagaaggaggaaaaggaacaagacgagcgtgaattacaaccacgtccatttccacgaccagaggagcatgaaggagaacagtggaaaggaaggcatcgtcatgaagacccggaagagagggcgagaatgagactgagggaagcagaaagaatagagagggaaagggaggaacagagggtgagggaggaggaagagaaactccggcgacgtgagaagaaggaacaacgggaagagaaagaagaagaaggtcaaggttcggaagactcacactcaaaaagacagaacaacccttttcacttcagctctaacaggttccaaacgctcttcaagaaccaacatgtgtcaccttcgcgtcctccagagattcgaccaacgctccccacaacttgagaaccttcgagactaccgtgttgtatagctcatggctaaacccaac

SEQ ID NO: 12197 - DNA, 1448 bp, Glycine max
gttagtttttctcagcatacggctggtcagattaggaatcgtaaatcaggaacttctgctggcacaaagtcatctgatcaaggtgaatcaatcacatttgctgatgtcgctggtgttgacgaggctaaggaggagctggaagagattgtggaatttcttcgcaatccagacagatatgtacgactaggagctcggcctccccgaggtgttctcttggtgggtcttcctgggacaggtaagactttactggcaaaggctgtggcaggggaagctgatgtgccatttataagttgttctgctagtgagtttgtagagttatatgttggtatgggtgcttcccgtgtgagagatctctttgcaagggcaaagaaagaagcaccatccataatatttattgatgagatagatgctgtggctaaaagtcgtgatggtaaatttcgcattgtcagcaatgatgaacgggaacaaaccttgaaccagctgctcactgagatggatggttttgacagcagttctgctgtcattgttcttggagcaactaatcggtcagatgtcttagatcctgcacttcgccggccaggaagatttgatcgtgtagttatggtagaagcacctgatagaattggaagagaagccatcctaaaagttcatgtttccaagaaggaacttcctttagccaaggatgttgacctcagtgacattgcttgtatgaccactggttttactggagcagatcttgcaaacctagtaaatgaggctgctttactggctggaagacaaaacaaaattgttgtggagaaaaatgatttcattcaagctgttgaaagatcaatagcaggaatagaaaagaagactgccaagttgaaaggaagtgagaaggctgtagttgcacggcatgaagctggtcatgctgtggtaggtactgcagttgcaaagcttcttcctggacagccacgtgttgagaaactaagtatattgccaaggtcaggaggggctttgggctttacttatattcctccaacaactgaggatagatacttgctatttgtcgatgagttgcatggtcgcctggtgacccttcttggaggacgtgcagctgaagaagttgttttttctggtcgggtgtcaacaggtgcacttgatgacatacgacaagcaactgacatggcatacaaggctatagctgaatatggtcttaatcagaccataggccctgtttcaatagccactctttctagtggtggaattgatgattctgggggagctgctgttccttggggaagggatcagggacatcttgttgatcttgttcaaaaagaggtgcaaacattactgcagtctgcactggctgtagcactttccattatccgagccaatcctactgttttggagggccttggtgctgatttggaagaaaaggagaaagttgagggtgaagagctacagaa

SEQ ID NO: 12198 - DNA, 932 bp, Glycine max
atcaaacaagcgctgccctgaatgcaaatcagttcttgatgaccctgctttgtgcctactgtgtggtagattgtgctctccaagttggaaatcatgctgcagggaaagtggatgccaaactcatgctgtaacctgtggagctggtactggagtgtttctgttgattaagagaacaacaatcctactacagagatctgcacgtcaggccccctggccctctccttacttagatgcttttggtgaggaggattttgaaatgcatcgaggcaagccactttatctgaatgaggaacgctatgcagctttgacttatatggtcgcttctcatggtctggaccggagttccagggtccttggtcagaccactattggttccttcttcctggtttagttcaaattctacatgtttattttgtgtgaagaatgttttactggacagatctctggaggatggaaatcagttctacatatgctaatttatcattagattgatacagtaaagattttaaacttgggtcctgtcggagaatctacctactggtcatggctgtacagattctactgatgctgacatagctgcaagctttcttttgctccatgcctttccataaagtaggtgcacatgtgtacatatatcatcatactagtgagaggagcaattgcttcaaggtatagtttgtggaattatgggcttatcagtggtttaggatgtctgaagacaataatgttggttctgtatcccttcctctccgtttctttttagttgggccatcccctctacccaggtagaggaagcaggataattcccttgggcatattgtatacaaggtatatatacatactgatttttactgtcaatatatgtttgctttttagtatatttcagcaccaatgctaatagactaatagtaaaatttgggctgttcattttc

SEQ ID NO: 12199 - DNA, 480 bp, Glycine max
gtgaaaaatctggttatggaaaacttaggaagagatatcaacaaattgagaagaatgctaaaattattcatgtgccactttcaaaggcagttcaagctaaggtagagaggaaggcagcatatgaaatatcaaagaaagatgtcaccaagtggcagcatattattcagagaaatagagaggccccaactattttctttgatgaaaatgtaaatttagggttttcaactgtaggagcaatagcttctgaatttgaacccagaactgaatttgagaagaaaatggctgctctagtttatgatgaggaagttatggaagctcataaaaaggatggttctaagcttcttgaaatgaacaaggtctctattgaaatgagaaggataggcaaatcggattgctaaaatgcggagcttctttttcgtcatgaaatgaaggcaaagcatattaaaaagatcagtctagaacattcatctttgttgaaga

SEQ ID NO: 12200 - DNA, 625 bp, Glycine max
cccacgcgtccgcccacgcgtccgaaaaaagagtagatcggtttaagcttggtgaaggtgtgatgccagctagtttcaaagttcttcatgatcctattaggaaaacagatactcttattgcagattttggtgaaagtgcaattggaagagttgctccagttgattctggattctggtggataattttacttcgtgcctacacaaagtctacaggggatttatctttggctgaatcaccagattgtcaaaagggaatgaaacttatactgactctatgcttgtcagaggggtttgatacatttccaactttgctttgtgctgatggatgttgcatggttgatcgaagaatgggtatttatggttatccaatagagattcaagcacttttcttcatggcattgagatgtgctttgtcaatgctgaaacaggatgacgccgaagggaaggaatgtgttgagcgtattgtgaagcgtttgcatgcactaagttatcatatgcggagttacttttggctcgacttccaacaactaaatgacatttatcgatataagactgaggagtactcacatactgctgtaaataagtttaatgttattcctgattcaatcccagattgggtatttga

SEQ ID NO: 12201 - DNA, 625 bp, Glycine max
cgagaccaaatcaaagcaagccaattggtctctctcttacaccatgagtgcatcaaccaaagcttggattgtggcatcaagcataggggcagtggaggccttgaaagaccaattaggtgtatgcagatggaactatgctttaaggtcactacaacaacatgcaaagaacaacatcagatcttatagtcaagctaggaaattgtcctctgcatcctctgctgcggtttccaacaaggtcaagagaaccaaagaagagcatatggggaaagtcatcgaattcaattgctggggtcctagtactgcaaagttttaattagttaatatttatcttaggtgttgctacgatgagacggtgaatagagactgcttttttccatattcaatcccaatatcccccattaagcatcattatgtatctcaattccaatgtctagtgcccctttgcagaatataaacttattcgtagtcctttcatctcctcatgttatgtatcttatttcatcccattattatagcaaatatatctcgatcgatttgaagaaaaaatgaggtgtatagtgtattttccttctacccctataaaggatgaaaaattatagattggttttaaaaaaaaaaaaaaaaa

SEQ ID NO: 12202 - DNA, 1394 bp, Glycine max
cccacgcgtccgctttctccaaacaaagatccccaggatgcctccttgcaagtcctttgcaattccctcgattctcttcttcctcctaagcttcttaatctttccaaccaaagcagctccaatttacagttcccatgcgtgcacagactcttctaaataccaaccaaacagcacattccaaaccaacctcgacctcctcctctcttacctttcttccaacgccacccaaggcgtccacttttacaaaacaacagttggcagtgaaacccccaacgccgtcaagggcctcttcctctgccgccgagacaccctcaccgccgtgtgccacgattgcgtcaacgccgcagccaaagacctgacacgccggtgcccagttgagaaagaggccataatctggtacgacgtgtgcatggtacgctactccaaccaaaactacctcaacaacagagtacccgcagtggacatgtctgactccaaaagcgtggctggcgctgatcttgaccggttcaacgaggtgctggcgggattgttgaacgctctggcaacgaaagctgcgaattccgaggatgagaagttcgaaacaggggaagtgaacttgacgagttcagtaaccctttatgggttagtgcagtgcacaccagagttgtccttgttcgattgcaacatgtgtttcagaagcgccattgcatctgttccaaattgctgtgatgggaaacaaggggcaagggtgttgcttcccggatgcaatatcagatatcaagtgtatccattttacaatagcactaaaatattggccacaccggttgtgaagtctcgtccttcatgacggagtcgggttgaagtgattcttacatttgttatccctattgttgctgccatggtgcttttcacttttggtatatgtcatgtcatgagaaagcaagcaaagagtctgaaacaattatggaggaaaacgaattactctgaaggtgtagatgagattgattctataaacttacggggataagagatagttatcggtagtttaatgggacaataatgcaaggcaaggttgaaaacgttagattgctaagctgtgtagtgatgaagtctctgatgcattcatctacctttttgtctttcgaatctgtgcaaaggatgcggttgcattttatcgttcaacgggcaatttggcaattggcatgtggttgtgacttgtgagattgaagtagtagctctctgcatcagcatccacaatgtctatgtttgctgtaattacttttccagcttgagtcattgtttagatgtaaaaataaacttgtttaggttagatatccatgaagcatgtgtgtggatagtgtttttatttgagtaatcattatcttacatatccaaaaataattcacttagtattt

SEQ ID NO: 12203 - DNA, 1232 bp, Glycine max
ttttgtttcctttccctacctcagacaatgttcaccctcctacaggtgaacttacactgagcaggcacggaagtggggtgctgccatcagaacaaacaaatcatcccaaatctaatagatttgaagagcagtggttggggtatggtgattctcagggagatggtaattcatcgttacttcagagtgaaatttccaaagctagtggtttcaaggggcctcgtgatattcaccttccagaagaagatagcttgattacagctagtgatcctctgcaaaactttttatctgctggaaatttagttaaaacagatttgtcccaagacactacagttgacattactagaaaactggcagctctgaatcctgcatttagagatgaccgactcgttacgagaaatcaagaaggtttagctttccctcgtggtccatatgatatgagggaacctggtattccatatcagaatcttaatgtccaacgatctcctcagatccactctcagttgaatcacagtggtccaatgtttaaccaactggattctcatcctcctcatataagttcttatatgaagcttccaactcctgagagcatggttcatcatgactcaccaccaaatcatcaatttccaggaaatatgcttcgtcctcctttccatcaaacaaacaatggactagcagggtttgatcctcccgttcatcattctatgttacaacaacaaatgcatatgcaaggaaaccttcccccacctcatttattacgtggattcccaaggggtgcacctatgccatctcatgctagcaatccaatgactggcttcatgcaggaaccaaacccaatgcaaggccaaggcttcccatttagtggtcaccagcatcctacttttggtggccctggaatgcaattacaagctcctgatgttggtggtggaagaaatcatccagaagcacttcagaggctttttgagatggagctgaggtcaaaaaacccaaagccaatccatgcttcaggtcacagccaggggatgtatggtcaagagctagacttgggttttgggtatagatagtgtattgtcattgttgatgtgtatacttagtttgtattcacctgatgttgtgcttctctataccccctgcatggaagatgggtttcatatgatgctttcctttggaaaaattagctattctgtaattaatgatttttcatcaatttgcattttgctgggatttcaattttt

SEQ ID NO: 12204 - DNA, 863 bp, Glycine max
ccgagccacgacgtcacgcgtacgcgtccgacttggtgtatggtgggggcagcgttgggctgatgggcttaatatctcggagagtgtatgatggaggctgccatgtcctagggatcattccaaaagctctcatgcctctcgagatatctggtgaaacagtaggtgaagtgaggattgtttcagatatgcacgagcgtaaggctgcaatggcacaagaagctgatgcatttgttgctctccctggaggatatggaaccatggaagagctgttggagatgataacttgggcccaacttggaatccataaaaaaccggttggtctactgaatgttgacggttactataactgttgcttgcattatttgacaatggtgttaaagaaggtttcattaagccttgtgcacggaatatagttgtctctgctacgtcagccaaagaacttatgatgaaaatggagcactacactccttcgcacgaacatgttgcccctcatcagagctggcagatgaaacaattaggtaatatccagatgcagagtgagactgttattgatggaaggtttttctccgaaaattgatttatgatgtgattcttcatcatttgagatgtatacaagagcctggatagatgggaccatatgttgtttgttaccgtgtactatgttgttttatgactggagtgcttatatattggctttgctgcttttcgtcatgttcctttctttatttttcctccccttcatttaatggtcaattgattccctgtcagatagtcatatctggttgttaccactcattaaaggcacacagcacttggaaatggaaagagatgatcagcttttcgtgaaaaaaaaaaaaaaagga

SEQ ID NO: 12205 - DNA, 801 bp, Glycine max
gttttcactttcattctcataactcattcaattattatcataatttatgtgttctgtttctgttctcttctaagttactatttggaaacctctctctctctagaaagacccagcaagccaggttggtaaaggggtgaagaatggatgctataaggaagcaagcaagcaaattgagggagcaagttgccaggcaacagcaggctatacttagacagttgggccaaattagcaatgaaccgctcatgactgatgaatctgaaattgaatgtctccagcaacttcaaaagttatacacttctacaaagacagccaagcattttcagcggcatattgttcgtgctattgaaggattcatttctgtttgctccaagcaaatggagatagtgaggaggatggcaagggactgctgtaagtatgggactgagaatcttggtagtagttacccccttgcaagggcttctcttcaatttggtaacacatatgatacaatggaaaatgagagagagactctgctcgggatcttaggcgatcaggtttgtatagatctctgagccactacgggcacagataacaggagctcctttggaggatgcacgccacctcactcgccgctatgacaaacttcatcaagaggtagaagcccaggctgctgaagttttgaggcgtcgatcaaagttgaagaattcttctgtttctgcagagagttccgcgaggcttcaaaatgcataaacaaggttgaaagaacttaaatttgccttggcagcacttggtagaaaaaccaacctctgctatgttgtctgt

SEQ ID NO: 12206 - DNA, 291 bp, Glycine max
tagttcaattattatcataatttctgtgttctgtttctgttctcttctaagtaactatttggaaacctctctttctatttctctctctagaaagtcccagccagccaggtaggggaagtgaagaagaatggatgctataaggaagcaagcaagtaaattgagggagcaagttgccaggcaacagcaggttatacttcgacagttgggccaaattagcaatgaaccgctcatgattgatgaatccgaaattgaatgtcaccagcaacttcaaaagttgtacacttcgacaaa

SEQ ID NO: 12207 - DNA, 673 bp, Glycine max
  unsure (1)..(673): unsure at all n locations
aaagaaagagagattgcgcaaacatttttcaataaattttgggacatgagttttgtgaaaaatagtgctttaaaagcaatggtgggacaattgtgacaaatatggatcctcaggcctttattaggttgtcaataggttctctggggttgcgatgcactggaattgaactgagcactacaaaatctggaattcaaacactctctttaccttgtgtttgtgagatacggcttcgaggttttcctgttcaaacatcatcagtccccgtgatatcctccacagaagttatacctgatactcagaacgttgcttttagcttttaccttgaggaatccgatttaaaagcgttgttagctcccggttgcttctacaacactcatgcttgtttggagattgcggtgttttcagggaggaagggatcccattgtggagttggcaacaaaaggcagcaaattgggatttttagaatgcaggttggccccgagtggggtgaaggaaagccagtgattctttttaatgggtggataggtattggcaagaacaaacaggataatggaaagccgggtgcggagttacatttaaaagtgaaactagatcctgaccctagatatgtattcctgtttgaagatataacaacantgagtcctanatagttcactgaagggatccatcaagc

SEQ ID NO: 12208 - DNA, 404 bp, Glycine max
agccttccgattctttctcctttttctttccctctctctttctcagactcataacaaccaaaagcacgaaggtattaagtatgctgtatgccgcatagaaagagagattgcgcaaacatttcagtgatttttgggtaattatcctcgtgatctgtgcacaatcgtctgctacttcatataccttcttccttctcccccacctcttttcctcctttctttgttcaacaccattcccataggagcaacccttttaaaagttttgggatttggagggtgcaaaagggcattagttttgtgaaaataatgctttaaaagcaatggggggacaattgtgacaaacatggatcctcaggcgttcattaggttgtaaattggttctctggggttgcgatgcactggaattg

SEQ ID NO: 12209 - DNA, 502 bp, Glycine max
cgttccacgcgtccggttcggcataattgagcgatcgatggcggcgttgataaggtcaccggcggtgatactggcgatcctgacgatctcggcgtgcatcgcgtgtacggcgtcgtacgggggattggtcgggggaaggtcgaagatccctgacgtgaaggcgaacaagaaggtgcaggatctagggcggttctcggtggaggagcataaccggatgctgaggcaggcgcagaaggaggaggagcaagtcacgttcgtggaagtggtggaggcgcaacaacaagtggtgtctgggatcaagtactacatgaagatatcggccacgcagggtggcgacggtggagattccagaatattcgaatccgttgtggtggtgaagccgtggcttcgttccaagcagcttctcaatttcgctccttccacgcagtgaaatacgatcaatttcggttccgtttcaattacttttttaactcataataacatgcttaattggttagtatgc

SEQ ID NO: 12210 - DNA, 1674 bp, Glycine max
ccaagattaatctgaacaagttgcgtgtccctgctgtcactgctctctgagcaaaaccagaagaacacatcaatccaaccctgccaaaatcaatccccagataccattccccttcccataacaaagacaacccaatcattgtttgttcacatccgaatccacaacacactgttaataattattctgattcacgaaaaacaggaaaaccccaaaactctctttgttcacaatgggcacagagacctcatcggtagatatttcggaacccctgctcttggatcctcacgggaacgaggaaaaggaagagtatttgcgcgaagaggttccggagtggaaggagcagataacgataagagggttggtggtgagtgctgtgttggggagcttgttctgcatcatcacccacaagctaaatctcaccgttgggatcatcccttctcttaatgttgctgctggcttgttggggttcttctttgtgaggacctggactgggttgttgaccaagatgggatttttcaccaagccctttactaggcaagagaacactgttattcagacctgtgttgttgcttgctatggccttgccttcagtggggggtttggttcatccttgattgccatggatgagagaacatatgaactcataggccctgattaccctggtaatagagctgaagatgttaaaaaccctggcttgggttggatgatgggtttcatgtttgttgtcagtttccttggactttttagtcttgtgccacttcgtaaggttatggtcttggattataagcttacatatcccagtgggacagctacagcaatgctaatcaacagtttccatacaaaaactggagcagaacttgctgggaaccaagttcggcagcttgggaagtatctaagcataagtttctgctggagttgctttaagtggttcttcagtggtattggggattcatgtgggtttgacaacttccctagctttggtttgacactatttaagaacacattctattttgacttcagtccaacctatgttggatgtggtcttatctgtcctcacctagtcaattgttctgttctccttggagctattatatcatggggctttctgtggcctttcgtctctgagcacgctggcgactggtatccagctgaccttggtagcaacgatttcaaaggtctttatggatacaaggtattcatatctattgctctgattttaggggatggcatttacaatctgataaagattatactgataaccattagggaaatgtggaggacaagctccaaacagcttcctgttgtgacagaggttcaagatgatgagaattctcaactgcaatcagaagaaaagaagagggaagaagtatttttgaaggacaggatacccacctggtttgcagcttctggatatgtgggcttggctgcgatatccatagcaacaataccaattatcttccctcctctcaaatggtacttggttctgtgctcttacatcctcgcccctgcccttgccttctgcaactcttacggtactggcctcacatactggagtctggcatccacttatgggaagattggtcttttcatcattgctgcatcagtaagccaaaactgtggtgtaatagcaagggtagcaccctgtgctgagatgatgtcaatcgttgtaactag

SEQ ID NO: 12211 - DNA, 457 bp, Glycine max
ccaagattaatctgaacaagttgcgtgtccctgctgtcactgctctctgagcaaaaccagaagaacacatcaatccaaccctgccaaaatcaatccccagataccattccccttcccataacaaagacaacccaatcattgtttgttcacatccgaatccacaaaatactgttataattattctgattcacgaaaaacaggaaaacccgaatctctctctttgttcctctcggggtcacgaaaatgggcacagagacctcatcggtggatatttctgaacccttgctcgtggattctcacgggaacgaggaaaaggaggagtatttgcgcgaggaggttccggaatggaaggagcagataacaataagagggttggtggtgagtgctgtgttggggaccttgttctgcatcatcacccacaagctgaacctcaccgttgggatcattccttctctta

SEQ ID NO: 12212 - DNA, 1367 bp, Glycine max
  unsure (1)..(1367): unsure at all n locations
cttatcccttatggacaaaggatgggtttcctctcaatctcttcttcctcccacacccgacaatactatgtttcctctcctcggattccccgtcaaactcagccgccccaccatggaactccaccatgataaccgcaaacttgtcgctgaagtcgacttcttctctcatactccgccacccaacatcgtcaagaaggaacttgatcaaacacctcttcacattaatactggtttacaactccttactgctaacaccaggagtgaccaatctaccgtggatgacgggctttcatcggatgcagaagataagcgagccaaaaccaccgagcttgcacagttgcaagtggagcttcaacgcatgaacgctgagaacaagaagctgaaagagatgctcagccatgtcaccggtaactacaccgccttgcagatgcatcttgtgacactaatgcaacagaaccagcagcgaacagaaagcacggaaaatgaggttgttcagggaaaggtagaggataaaaacgttggtgttggtggagggaaggtaccaagacagttccttgatataggtcccagtggcacagcagaagtagatgatcaagtttcggattcttcttctgatgaaagaacacgatcgagcacacctcagaaccataacattgaagctggagctagagatggtgcgagaaataacaatggtaatagaagcgagttgggtagggaagagagtccagactcagaatcacaaggttggggtcccaataagcttcagaaagtgaacccttccaatcctatggatcaatccactgcagaagccacaatgagaaaagctcgtgtctcagttcgtgcccgatcagaagctcccatgattagtgatgggtgccaatggagaaaatatggacaaaaaatggctaaggggaatccatgccctcgagcatactacagatgcactatggcagttggttgcccagttcgcaaacaagttcaacgttgtgctgatgatagaaccattttggttacaacatatgaaggcacgcataaccatccactgccacctgctgctatggccatggcatcaaccactacagctgctgctagcatgttgctttctggatcaatgtccagtgcagatggaataatgaacccaaatttgctagctagagcaattcttccttgctctacaagcatggcaacactctcagcttcagcaccattccccactgtgactttggacctcacacacaaccctaacccattgcaatttcaaaggcctggtgccccattccaagtacccttccttcaagcacagtcttagaactttgactcaggagccgncccatttgcacaagcacaagcactttataatcaatcaa

SEQ ID NO: 12213 - DNA, 434 bp, Glycine max
  unsure (1)..(434): unsure at all n locations
cattcacccatttttctctctcagatttcatttttcttcttcttcttctctctcttctttgtgcttattgtattttatggacaaaggatggggactcacccttgatacctcttcctctcaatctcttccattattcccttccaacgataataagatgtttcctctcctcggattccccgtcaacctcagccgcgcctccaaggaagacgatgaaaaccgcaaagttgtcggtgaagttgacttcttctctgacagaaacaaacctacacctccaccctctcacgaccacaacgttaaacccaacatcgtcaagaaggaaatcgatgaaacacctcttcacattaatactgggttacaactncttactgctaacaccgggagtgaccaatctaccgtggatgacggggtttcatctgatgcagaaaataagcgag

SEQ ID NO: 12214 - DNA, 599 bp, Glycine max
ggaaaagctgaggagagaaagcatggaggaatggtgcctcctagacaattcctggatttagttccgagtggtacgaccgaaatagatgatcaagtatcgaattcttctttgggtgaaaggactcgatcaaccacacctcccagctgcaataaaaatgatgataaggataagaaagagactactgatattccacactctggcaaattattgaaccatacgacggatccatccactagtccggaagccgctatgagaaaagctcgtgtctcagttcgtgcccgatcagaagcacccatgatcagtgatgggtgccaatggcgaaaatatggacaaaagatggctaagggaaacccttgtcctcgagcatactacagatgcaccatggcagttggttgcccagttcgcaaacaagttcaacgttgtgcggaggacagaacaattttgacaacaacgtacgaggggacccataaccatccactgccaccagctgcaatggctatggcatcgaccactgcagctgctgctagcatgttgttgtctgggtcaatgaccagtgctgacggaataatgaaccccaatttgctaactagagctattct

SEQ ID NO: 12215 - DNA, 319 bp, Glycine max
ggctcgacgccacgcgttcgataattaataataattagtatctattcaagtatcaacaatataagcaataggttgctgtggctaaagctcgatattaatttcgtggtgtggtaatataggttcaacgttgtgctgatgatagaaccattttggttacaacatatgaaggcacgcataaccatccactgccacctgctgctatggccatggcatcaaccactacagctgctgctagcatgttgctttctggatcaatgtccagtgcagatagtataatgaacccaaatatgctagctagagcaattcttccttgctctac

SEQ ID NO: 12216 - DNA, 424 bp, Glycine max
cggacgcgtgggttaatttccactcatatgcacctttgtagtttgtactaacacaagcagcaagtgcttggtctatatccacaatacatggtagttggaggttcgaataccggtgttcatggctggcgagacatcaagagtctcaccgtccaagtcatcaccgggagatggttcgtggtgttcgcctcctttctaatcatggccgccgctggagccacctacatgttcggtctctattccagcgacatcaaaacaaccctcggttacgaccaaaccactctcaatctcctcagtttcttcaaggacttgggcaccaacgttggggtcatctcaggcctaatcaacgaggtcgctccaccttgggttgtcctcgccattggtgccatcctcaacttctttggctacttcatgatttggctttccg

SEQ ID NO: 12217 - DNA, 256 bp, Glycine max
caataactccgttgctgacaaattagcatggccgctgccatcggaagcatggtggacacgaatgggctcatggtccaagtcatcaccggcaggtggttcgtggtgttcgcctcctttctaatcatggccgccgccggcgccacctacatgttcagcctctactccggagacatcaaatccgccctggcctacgaccaaaccaccttaaacctccttagtttcttcaaagacttgggtggcaatgtcggcgtcctct

SEQ ID NO: 12218 - DNA, 455 bp, Glycine max
gcaagaattgggctcccttgtttgcttattatgcgtgcctttatggggattgggtgttgccatgcctgctatgaataatatgctttccaagtggattcctgtttcggagagaagcagatcacttgccctagtatatagtggcatgtacctaggttctgtggttggcttggcattctcaccattgctaatccaaaaatttggttggccatcagtgttttactcctttggatctcttggaagtatctggtttgccttgtggttgagaaaggcatatagctccccaaaagatgaccctgatcttggggtagaggagaaaaggctcatactggaaggcaatgtatcaaatgcacctgtttcttccattccttggaaattaattttatcaaaagcacctgtttgggctcttataatcttccacttctgtcacaattgggggacatttattctttaacctg

SEQ ID NO: 12219 - DNA, 683 bp, Glycine max
tttttagagtctcgaactgagattaatactttggtaccaatctcattgattaaaataaaaaagcttgtgagagacagataagggaaacggtgtgccacgaacacgagctacttgttacagaatacaactaaagtaataataacgtttaaaatgtaactccaaggtccaaacttcgcttctgggtgtgactccaaacaaaaactactacttgcttagcacacaatattatgaaaaccaccgcagaggttgtttcatctcattgtcttgttgtagcagagtgctctcaatccagccccacacaactttctgctatggaacctcagattctgaatttggggtgcatgcattacagaaggagatgcaagatcagagcgccgtgctgtgatgaggtttttgactgtaggcattgccataatgaagctaagaattctgaggaggttgatgctgtggatcgtcatgatgttccacgccatgaaattaagaaggttatctgctccttatgtgatgtagagcaagatgttcagcagtactgtataaactgtggaatatgcatgggcaagtacttttgtactatatgcaaattctttgatgatgatatttcaaagaatcaataccactgcgatgaatgtggcatttgcagaactggaggcaaggataattttttccacttgaaccgatgtgga

SEQ ID NO: 12220 - DNA, 436 bp, Glycine max
  unsure (1)..(436): unsure at all n locations
ctcgcaacttgttccatttttcttccttcctcattcctcacttccgtcccgaaaatggcttcaagtggcgttgcgggaacttccacacccgaattctaccacaacgtcgtcgtaatgcgtcacggcgatcgcatcgacaacttcgaacccatgtgggtgtccaccgctacccgaccctgggacccaccccttatccaacagggtcgggtccgagccttcgccacgggtcgcaagttccgcaacaacctccctttcactctccaccgcgtcttcgtctctcccttcctccgatgcatccaaaccgccgccgaagtcgtcgttgcactctctgccatcgccgncggcgacgaccccaacgtcatcgtcggcgatgacgtcccaatcgatccctccaaactcaaggtctctgttgaatatgggttatgtgaaatgatga

SEQ ID NO: 12221 - DNA, 526 bp, Glycine max
accagattgaatagggcggttaagaaccgcggttgacagctataacctttcatgtggaaatagcgttcctttcacacttgcgtggtttttttttttttttctttctccttttcacgggctttctcttcttttcctctggcttcatcatcatctctctatctgcaccccttttgagaacttcaacttgttacttaattactctactctcccctttctagcttctgtgttcttcttcttcggttctctcttcatggggtgctgcttaagtgccaggatcaaagctgagagccctccacgcaatggtttgagttcaaaggatggtaacaaggaagaagatggcttaagcagcaaggcctcaactccctccgttcctccaactccgcggacggagggagagatcttgaagtcctcaaacatgaagagcttcaacttcagtgagctaaaaactgctacaagaaactttcgtccagatagtgtggtgggtgaaggcgggtttggttgtgtttttaaggggtggattgatgaa

SEQ ID NO: 12222 - DNA, 1108 bp, Glycine max
gactcgagcagctcgagcggctcgagcggctcgagctcgagccgattcgtccggcaaaacccacaggcacgctgagcatggaacacagaaccctagaactcaacctggcttcagcaaaggatctcaaagacttgaatatattctcaaagatggatgtatatgctgtgctttcactctccggcgatcaaaagaccaagactcccgtccacagaaacggcggcaccaacccaacatggaattttccggtcaagttcacttttgatgaatcggtggcgcggcagaaccgtttggccctcgaaatcaagatccgctccgagcgcgccctcgccaccgataaggacatcggccaggtccacgttcctctcatggaactcctcaagcaacctggcgacggtaaatccttccagcacgttagttaccaggtcagaaaaccctccggcaaacccaagggagccctcaatttctcctacaaatttggcgatgaattcgcagccccagccaaggtatcagcacccgcacctacctcgccttctcacaaggtggaccccgtcacggcttatcctgctcccgcggtgggctccacttcttctgccgcgtatcccgccatgtatcctccgccgccgccgccacaatatgcctatcctccgccgcctcaacccgctcacggatacggttacgcgccacaaccggcttacgggtgcgcgccacaagcggcttatgggtacgcgccacaacccgggtacggttacgctcctcctcctcctgctgctgcagcagttcaaagaccggggaagaacaatttgggaatgggattgggtgcggggttgcttggaggagccttgggtggacttctaattggggacatgatttctgatgccggttcttacgacgctggttttggagatttcggtggatttgatttttaaatctcttgttagttttctttgtttgggggtagttttttatgttcaaatgtgaacttaaattagaatatgttttttgcagtagatactgttttgttacttctagtttcttgtccggtgtatagatgtggtgtgtggatttgtggaagctacttctttatgtaaattttcaagtttggttacgt

SEQ ID NO: 12223 - DNA, 525 bp, Glycine max
acgagctctagtggtttccaacgcagcttttcatcattaagtctaaggcacacgcagaccatcagtcatctttctagtcttctgataactatggcgtattacagagatgctcaatatgcaaacctttgaacagttttatcgttgttaccctgtttccttcattgagaagccagatctggaaaagggtgataaaattatcatgcctccctcagcccttgatcgccttgcgtctttgcacatagagtaccccatgttatttcaaattaaaaatccttctgctgaaagagttactcactgtggggtgctagaattcgtatctgatgaagggatcatatatatcccatactggatgatggaaaatatgctcctccaagagggagacattgtaaaagtgaaaaacaccaaccttgcaaaaggaacgtatgtgaagctgcagcctcacacaaaggattttttggatatctccaatccaaaagccatgttagtatttcttttctaatatctagttatacctttaacagtgtc

SEQ ID NO: 12224 - DNA, 1339 bp, Glycine max
gtcttaactagcagggctattttccagagaatgaagaactacaccatctatgcagtatctatcacaatccgtatagtgtttggcttcatgtttattgcactgatctggaaatttgacttctcacccttcatggttttgattattgccattctgaatgatggaacaatcatgacaatttcaaaggacagggtgaagccatctcccttgcctgatagctggaaactgcaagaaatatttgctactggggttgtgcttggagagttacttggcactgatgactgttatattcttctgggcaatgaaagagacgacattcttccccgacaaatttggagttagaccaattcatgacaatccagatgaaatgactgctgctttgtatctacaagtcagtatagttagccaggctttgatatttgtcacccgttcgcgcagctggtccttcatcgaacgccctggattgctgttagtgactgctttcgttattgctcagctgattgctacagtaatagcagtgtatgccaactggggctttgcaaggatccaaggaattggttggggttgggcaggagtgatttggctctacagtattgtcttctatttcccacttgacatcatgaagttcgccatccgctacattttgagtggcaaggcttggaacaatctcctagaaaacaagactgccttcaccaccaagaaagactatggtaaagaggagagggaagctcaatgggctcttgctcagaggaccctgcatggacttcaaccaccagaaacttctaatatcttcaatgaaaagagcagttatagagaactcactgagattgctgagcaggccaagaggagagctgaagttgcaaggcttcgtgagcttcacacacttaagggacatgttgagtctgtggtgaagctgaagggtctggacattgacacaatccagcagcattacaccgtgtaatagttacacaagaacgatgtagataacaaaagggccaaaattcaatgattaaaatgaacggagagacaaggagaaggcctaactctatttatgcttactcggttgggagaggaagcctgtgatatatctctctctcagtctgtttatctttctttcatgtcttttcagatgttttggtctaaatttttgctttgatgcttggggaaaagtggtgttagcttcaatccttgattttcatatgcttttgggtccttccctcaaccagggtggtgttaattgatgtatgtcactttgaagtggcaagtgactagacaatgagcttattgggaattttgtggttggagaataagagtttatggaaaagctttaacggcatcttgc

SEQ ID NO: 12225 - DNA, 626 bp, Glycine max
ctcagcaagttgtcaagacatattgttcaatgaagccagcatggatttgcttcaaatgtggtagaaaaatgtttggagtatggtgatgccactgaacgggagttgctaattgcagagatatttgggcatgatgaccaatgtgataatttattgacaatgatgaaagatcaatttgcgaattatgtggtccagaaggtcattgatatctgttctgaaaatcagcgagcaatgttgctttctcacgtaagaatccatgctcatgctttgaagaaatacacttatggaaaacacattgtggctcggttggaacatcaatttggagagaatcaaacacccagctcatgatagaataaagagacaaagccatgggtctccagcaatgctgccgtgtcatgcaaaccctgcagcatcaacatatgttctgttgatcacaggaaatagctgagacattgatagcttccagttgtttttactcctgacttcgttcctgcgccttgatagcttctacattgatggcttcaggagacattagtatatacgactatactttgaaactcaatgtaattatgtcatttaaataattgggtccgaatgttatttgaataattattttgaagggaaaccct

SEQ ID NO: 12226 - DNA, 457 bp, Glycine max
gttaacaaaagggtactagagcatgcaccatgctcagttggaatctttgttgatcgtgggcttggtggtacatctcatgtctccgcaagtaatgtttcttatcgtgttacagtgcttttctttggtggtggtgatgatcatgaagcccttgcttatggagctcgtatggctgagcaccctggcatcagattgctggttattcgctttgtaggggaaccaatgaatggagagattgtaagagttgatgtgggtgactccactagcaccaaattaatctcacaggatgaggaattcctcgatgaaattaagacgaaaatagccaatgatgactccatcatctatgaagagaaagtagtaaaagatggtgcagaaacagttgctattatccgtgagttgaaaagctgcaatctgtttcttgtgggttcaaggccagccagtgaagttgccagtgctatga

SEQ ID NO: 12227 - DNA, 1068 bp, Glycine max
gcgatttgttgctgcaggaattcacagcccggcctgatatagcagatgattgttttttgttggcctcaaggtgtattcgctactgtcctcaactgtttattccctcgtctgtttttccttcattagtggattgctctatgattgggatcacagtacagcatagggaggcttcgaattccatattgcatttcttggctgacatttttgatcttgcgaattcctctgtgggggagcaatttataccaataagagatagtgtaataattcctcgaggtgccagcatcaccagaattttggttgcttcattaacgggagcacttcctaaatctcgagtggatgtggtatcttatacactcctggcattaactcgatcatatgggatgcaagcgctggaatgggcaaaaaagagtgttttgttaattccatcaacagctgttacagatgtagagcgatcaagattcttaaaagcactttctgatgcagcatccggaggggatactaatggacttactgttcctgttgaagagctgtcagatgtttgccgacgtaacagggccgttcaggaaatagttcaggaagctttgagaccgcttgagttgaatatggtgaatgtatcatagaggattggtaaatgcctgtgatagagagggccattttgtttagggtcctgtctgttggttaggctagttggttgtgtattatctatctgttatattcattttttttatccattatcattctccaattttttaggagagtttgcccctgcatgctctgttgtgttggccggaagaaattaaatggggtgttgtatctttttattcttgagatgtgggattggtgagtgatgtttgtcccggttttcattcttggggggcggaggttacatggtatacaattgtaatttaatggaacaggaaaagtgggggaaaatatagtacattgataagttgctgcaatttttcaagttgggaatgaatatcgattttagaatctgtgactcaattgtgttcagttcgccgtactaatctgttaaaatgaatgaaggcggatgttgagatgtaaaaa

SEQ ID NO: 12228 - DNA, 2095 bp, Glycine max
ggaattccggctgcgcgcacgcgtccgccgacgcgtccggtactacaacactttctatatttattgtccattctctctcacgcactccataattgcttcttgctttggtcgatccattcggtgatcggtgatcggtgatcagtggtttggtgttgttgatagagaaaatgcattccagccctttgcttcttgaggaacccattaggatggcatccatccttgagccatccaagcctactttttttccggctatgacgaaaattgttggcacacttggtccaaagtcacgatcagttgatataatttcccattgccttgatgcaggaatgtctgtggcaaggtttgacttttcatggggtgatccagaataccatcaagagacattggaaaatttgagagttgctatcaaaagtaccaagaaactctgtgcggttatgctagatactgtgggtccagaattacagattgagaataagactgatcacccaatcacccttgaagcagacacattagttgtcttaactccagatcaaaataaagaagctagttcaaatctcttaccattaaattttaccgggctatcaaaggctgtgaagaagggtgatactatttttattggaaaatacttgtttactggaagtgaaacagcttccgtatggctggaggtcagtgaggtggaaggtgaggatgtcacctgtctggtaaaaaacactgccacactctctggatcattgtttactgtacatgtctctcagattcacatcgatcttcctactcttgctgataaagataaggaggtaataagcacatggggtgttcaaaacaatattgacttcctttcattatatacccggcacgttgaagatattcgtcatgcacgtgaatttctctctaaattgggtgacctgaagcagacacatatttatgcaaagattgaaaatatagagggaatgaaacattttgatgaaatattgagagaagcagatggtatcatcctcgctcgtggaaatttagggatagaactcccacctgagaaggttttcttattccaaaaggctgctatttacaagtgtaacatggttggaaagccagttgttgttacacgtgttgtggactctatgactgataatctaagacctactcgtgctgaagcaacagatgttgccaatgcagtgttggatggaagtgacgcaattctccttggagcagagaccctgcggggacaataccctgtagagaccatttctatagttggaaaaatatgtgctgaggcagagaaagttcataatcaagatttgtatttcaagaaggctgtaaaatatgtgggagagccaatgagccatttggaatcaattgcttcctctgcggttcgggcagctatcaaggttaaggcctctgttattatttgcttcacttcatctggaagagctgcaagattgattgctaagtacagaccaaccatgcctgtgatatctgttgtcattcctcaattgaagacaaatcaactccgatggacgttcaccggtgcttttgaggctaggcaatctcttattgtgagaggtctttttcctatgctggcagatccacgacacccagctgagtccagaagtggaacaaatgaatcaattttgaaggttgctttagaccatggcaaggcttttggcatcataaagccacatgaccgagttgttgtctgccagaaagtagctgactcgtcagttgtgaagattcttgagctcgaagattgaatgattacaacttatgcgttatttgatgcataataataaagattcttgggcttgtgtttgataatcggagcgatatccagttttgaaatcaagcatggtgtgctgatctttcggctacttatgttgtttaatagtaaaccatccgaattcgaaaacgaaattgattatcttctaatgaattttatgctgaaaagaaaagtatgaattataagacactttgtaaacactgagtgtgccagataaacttgtgagattattttagcttaatcatgagttcaaagtatacaattgtgttgaatactttgataaagttttatttgcctacaataattctatttcattctaat

SEQ ID NO: 12229 - DNA, 433 bp, Glycine max
gaggcaaggcaatcacttattgtgagaggtcttttccctatgcttgcagatccacgacatccagctgagtctaaaagtgcaacaaatgaatcaattttgaaggttgctttagaccatggcaaggcttttggtatcataaaggcacatgatcgagttgttgtatgccagaaagttggtgactcctcagttgtgaagattattgagcttgacgaatagaacttgattcattttcaagtttgcgttataatatgtcttctttgtattagtattttctgttgtatgctttaataataaaaacacttcaaaataatgtgtatcacattggaagaaatgcttttggggaatggatatcattcattgccagcatgccaactgttgtttataatataacaccattgaatccttttatcaatacatatgcaagttaatttcc

SEQ ID NO: 12230 - DNA, 552 bp, Glycine max
cgacactatagacagagcttgacgccgctcgccgcgtgccacgctcgaagttcggcttgaggacagatcaactccgatggacattcaccggtgcttttgaggctaggcaatctcttattgtgaggggtctttttcctatgctggcagatccacgacacccggctgagtctaaaagtggaacaaatgaatcaattttgaaggttgctttagatcatggcaaggcttttggcatcataaagccacatgaccgagttgttgtctgccagaaagtagctgactcgtcagttgtgaagattcttgagctcgaagattgattggttcaatacaacttatgtgtcatttgatgcatcataataaaacttcttctcaaccttttcattctagcgtttgtgtttcattgaagtccaataccaaacacataccattgagatacatattgtagagtgggaaagagacttttttgtttgattgtttttttaataggcaatcacagttttgagctataaataatggtattggtatggaaataaaaaaaaatgatgttatatcagt

SEQ ID NO: 12231 - DNA, 630 bp, Glycine max
acagtttcatttctcaaacgactactttcctttcctgctgcgttcattccaaattccaaacccaccataatatctagcttcttgtgaaggctgttagtttgatttagaagttgatattgataatttgctgtgatgggtggccaaaggagtggttatggtaagcgtccccactctcaatctgaccatgataatgggccaaataaaaggaggaatcatggtgatgacagagagcagtttgtgattgatttggaggatactgtgtatcgttacgtgtgcccgggtcgaaagattggcagtgttattggtaggggaggtgagattgttaagcagctgagggtggagactaaggctaagattaggattggtgagacggtgccggggtgcgaagagcgtgtcgttactatttatagtcccagtgatgagactaatgctgttgagggtggtggcaactatgtgtctccggctcaggatgctttgtttaaggtgcatgacagagtggttgccgaggactttcacggtgaccaggatgatgatggaggccaacaagtgactgctaagctgctagtgccatctgatcagataggttgtgttattggaaaaggtgggtcaatagttcagaacatacgtagt

SEQ ID NO: 12232 - DNA, 554 bp, Glycine max
gctgcttctgccaaaattagtggcgccaccgcctttgagatttcaggaactcctgtggattgtgtttcgctagcgttatctggagcgttgtttccgtggtctaagcctatgctggttattagtgggattaaccgcggatcaaactgtggtcatcacatgttctactcaggggttgttgccggagctagggaagcgttgttatgtggtgtaccggcattatcaatatcattaaattggaagaaggatgaaagtcaggaaaacgatttcaaggatgcagtgtcagtctgtttaccgttaataaatgcagctattagggatgttgaaaagggaacttttcccaaaagctgttttttaaatatagaaattcccacatctcctttgaatagcaagggtttcaaattgaccaaacaaagtatatggagatccactccaaactggctagctatttcctccagccgctatccaactggtcatttcttagccaatcaaggtggccttggtcttcagtttgcacagcttggccgagatgcttctgctgctggtgcagctcgtcg

SEQ ID NO: 12233 - DNA, 717 bp, Glycine max
cccacgcgtccgcatcgcctcctccaacaccaccgccacctcctggattcgcagaagcggcgccgcctaccacccctccacccgcatcgccgccgtctccctcggcgacgaggtcctctcctccctcccctccgccgtccccctcctcctccccgccctccgctccctccacgccgccctcgtctattccaatctccataacgacgtcttcgtttccacccctcactccgcctccgtcatcctcaaccccttccctccctcccaagccttcttcaaccaaaccctagaaaccttcattctccctcttctccatttcctctctcaaacaaattcccccttaatgctcaacctctacccttactacgtcttcatgcagaacagaaacctcgtccctctcgaaaacaccctcttcaaacccctccctttctccaaacaaatgctcgaccccaacactcttcttcactacaccaacctcctcgacgccatgatcgacgctgcttacttctccatgaagaatctcaacgtcactgatgtaaccgttctcgtcaccgaaaccggttggccttctagaggggactctaaggagccctatgcaactccttccaacgcgctgacgtataattcgaacttgattaagcacgttttggatcggagtggcacccctctgcacccggaaactacttctagtgtttacatatacgagctttttaatgaaga

SEQ ID NO: 12234 - DNA, 475 bp, Glycine max
gacctcgtgttttcttctctctctcacactttctctcagcgttgaaacttgaaattcttcttctccgaaacctctttgaaccgggtcaagaaataaacctcgctgggaaccgttgattgggtttgtacgaataatttgaaatgaagattcagtgcaacgtcgtgcgaggccgcggaggccaaggttctgtgctgcgcggacgaggcagcactgtgctgggaatgcgacgagaaggttcacgcagcaaacaagctcgccagcaagcaccagagggtccctctctctctctccgcctctcacatgcccaagtgtgacatatgccaggaaatggttggttatttcttctgtttagaggatcgagctttgctatgtaggaattgtgatgtatctatacatacagcaaatgcctgtgtctctgatcatcaaaggtttttgcttactggtgtgagagtggccttgaagctactgacgcggt

SEQ ID NO: 12235 - DNA, 547 bp, Glycine max
cttttggatgacaatcttagcaaggggaaacgtcctgttgctgctggccaggcctactttatatctgatggctccccagtcaattcttttgaattcctgcaccctctacttaggagtttggattatgaactgccaaagacttccctaccggtcgaccgtgctcttgttctcagcaggatttgctgggctgtttatacaatcctatatccatggctcaatcggtggtggcttccacagccattcatccttccctctgaagtacacaaggtgggagtgacccattatttctcttatcttaaagccaaagaggagattggctatgctcccatggtgacctctcgagaggggatggctttgaccatatcttactggcaagagaggaaacggacaactctggatggaccgacaatctatgcgtggttgttttgtgtcattggaatgatctcactgttttgtggtgctttcttacctgatatagggatcatgtcccttctcagaactacatgtctatttgtctttcggtcaatgtgggttacaaggctggtgt

SEQ ID NO: 12236 - DNA, 402 bp, Glycine max
attttcataaccaaatttaatctcaaaagaatacaaaatgccgcgcccgtcttaagggctaaggcttctcagtcctctaaaaatttctagagtctctttcttcactttcttcctccacatggcagagacaccaaccctcagaatccacgaagtctgccccatctcgccgccacaagaaaccccatcaaccactattcccttcaccttcttcgacgtcctatggctacgcctccccccagtggagcgtctgttcttctattccttcccaaacccaacaacaacctcttcattcttcgacaccaccattctcccaaatctcaaacactccctctccctcactctccaccacttccctcctctcgccggcaccatcacatggccacttcacacaccccttcccct

SEQ ID NO: 12237 - DNA, 1150 bp, Glycine max
acgcttcaaggtgttgtgaccatcaacactacagaggactgaggagtacgcaagataagagctttactctatattttaatgttacaatgctattgccgccaacccatatggcattacattcgccgcggcttttatcactcacccgaaggccttttcttcttctccttcttcctttcaaggaggggtttctatggttcaaggagcttccagaggaattggcctcgaatttgttaaacagattttagaatacgatgataaagagcatgttattgctacctgccgtaatcccagtgcatcaactgggcttatccatctgaaagataaatttgcagaccgccttagaattttgccgttggatttgactgttgagaattcaatcgaggcatctgcattgtcaataagagagacatatggccgtctaaaccttctcattaatgcgtctgggattctttcaatacctgaagtaatacatccagaaacaacattgaacaaagtggagaaatcatctttaatgcttgcatatgaggttaatgcagtgggtcctatcttagttatcaagcacatgtggcctcttctaaaagtaggaggcggccacgggactggaagaagtgctgcagtggtggctagtttgagtgcaagggttgcatctattggggacaatcgtcttgggggctggcactcatatcgatcttcaaaggctgctcttaatcaattatcaaagactgtctccctggaatttgcaagaaagaaggatccaattgtatgcattttactgcatcctggtacagttgacacaaatctctctaagccatttcaaagaaatgttcccccagacaagctcttcaccaaagagttctcagttcagaagctactaagcatcattaccaatgtcaagatccatgacaatggcaagttctttgcctgggatggaaaagaaattccttggtaaccctgtcataacaggtaagaaatatatcaataataagtttcacagctgctctcaagagcaaaaattgtttttcataaaattctttgattcattgatgtttatggaatattggagaaacagatactaaaaaatgtttgctgtactgacgtggataggaattcgccctcaggtacttaagaaaagagtttgtattatatttgc

SEQ ID NO: 12238 - DNA, 666 bp, Glycine max
cttagcattattctcccctctcactctgttccttcctcatccacaattcaatggtattggtgagactggttcccatggcttcttcttcaatacgacccgctctctcaacaccttcctccttttctctcttcagcccttctcgccgtatctctttctcccatcttccctctccctctgtgtctcaatccaatagttttggcctcaaagcttccagagtgttgagacaatatggtaactccacgagaatcatggcatcaggggacttgtctcattcagttgcggctgcttcaccagaaaatgtgcttgagtgggtcaaacaggacaagagaagaatgcttcatgttgtatatcgtgttggggacttggacaggaccataaagttttatacagagtgcctaggaatgaagctcctcagaaagagggacataccagaggagaaatatactaatgcctttcttggatatgggcccgaagactcacactttgttattgaactgacatacaattatggagttgacaagtatgatatcggaactggatttggccattttggtatagctgttgatgatgttgcaaaagcagtggaactaatcagagctaagggtggcaaaataactagggagcctggtcctgtcaagggagggcgttcagtaattgcatttattg

SEQ ID NO: 12239 - DNA, 602 bp, Glycine max
  unsure (1)..(602): unsure at all n locations
caactccaaaatgagagggaaaaggaatgaaagaggaatcaataaacaataattcgacagaaatggaataatgtaaggtaaagaaagcaatttgaggagttatatcattttacaattagttgttattctcccctcactcatccacaatacaagggtcaccccaatggtattggtgagagtggttcccatggcttcttcttcttcgattcgacccactctctcctcccttagattcttaacaccgtcatctctttcgctctccaacccttcttctcgtatctctttctcccatcttccctctccctctgtgtctcaatccaatagttttggcctcaaagcttccagagagttgagacaacatggcaactccacgagaatcatggcatcagggcacgtgtctcaatcgatttcagctgcttcaccagaaaatgtgcttgagtgggtcaaacaggacaagcgaagaatgcttcatgttgtatatccgtgttggggacttggacaggaccataaagttttatacagagtgcctaggaatgaagctcctcagaaagagggacatacccnaggagaaatatactaatgcctttcttggatatgggccc

SEQ ID NO: 12240 - DNA, 1085 bp, Glycine max
tggaaacctcagagtatctaaaaaatgattgccttgtcatgcattgcactgttggtgttgttaaaactcgttttgagggatctaaacagggtgttattgtgccacagtcagacatgggccgggattttaaggacttgttggaatctgaggtcggttgtgacatacttttcaaggtcaaaagtgaaagcttcaaagctcataagttgatacttgcagcccgatctcctgtgtttagagcccagttttttgggcttgttggggatcctaccttagaggaagtagtggtagaggatattgagccctttatcttcaaggcaatgcttctcttcgtctactctgacaaacttcctggcatatatgaggttatggactcgatgcccctgtgctcatacaccgtcatggtgcagcatctcttggctgctgctgatctctataatcttgatcggctcaaactgctttgcgaatcaaaattgtgtgaagaaatcaatactgacaatgtggccacaacacttgcgctggcagagcaacaccactgtccacagcttaaggcaatctgtttaaaatttattgcaaatcctgcaaacttgggagctgtaatgcagtcggaagcttttgtgcatttgaaagagagctgcccctcaatgctgttggaattgctggagacatttgcatcagtggatgataactcaggccagacattgagcagaaagagaagtggcagtagcatatatgggcaagatttagcagacggggcagctgctgaatcagttaatccgaatggcaggcgagtacggaggcggacataagcatagtttacaatctgaatctgcaaccgttgaaactaaaagtgtgatatagttaacccacactagtcctgtcaatgtaagtgattcaccattttcatttccacctgatccctgagattttatatgtcaagttttctggccttcgcaccttttctcaaggggctactttggacagcattttcaatggtagtttgacattagaacagttctaatgtagggtacatcgtgtttgatgacgttaatattgaagtctatagcttcattcatgaatggccaaaa

SEQ ID NO: 12241 - DNA, 654 bp, Glycine max
  unsure (1)..(654): unsure at all n locations
ttttcttgttcagttgcactcaagccactcctcactggaagtcgaagtcgtcgcttgccaagtgcatttcttctcatttcttgctgcttccgcgaatggccagaaacatagcaggattactggcgctgcttctcgctgtttcgatctgcggagccgtcacgattcctggtcccgtctccgatgctcaccgttccgccgcgctagagctcttcgatggatccttttcaagtttagaagaggcctatgaggccctaagagtttttgagattcttgggattgggaataagcctgatgtgagcacaaccacttgcaagaaagtagcagaaaaccttgagttgtcatcgcctgtgaaggatttgttctattcgttaaaggttaatggcatattaaaatgcaaggttgatggggatgttttcaaggatattgctttgagacttaaagccactgtcaatgatgcaagtactttggtggacatgtactattcaataggaagtctggttcttataaaggaccaggcttctgatgttgatgtgcttcttactgatgctgatgggactntncattcaatcaaggctctgagtcaaagtgatggaagatggcgttatagttctgataatccaaaatctagtacctatgctggttgattagcacttg

SEQ ID NO: 12242 - DNA, 484 bp, Glycine max
cttgcgatgtgtaatcattttcttttgttttaatgaaggtgtcttgatagagcggctggggcgtccgctgctgagagcaaaagtggtgattattctaaccagtggagactttgcaccgtgacacaagtagaggaattgaaaatcttgattcgaatgtttccagtttgggctactgggattgtttttgctgctgtttatgctcagatgtcaacattgtttgtggaacaaggaacgatgatgaacacaaatgttggttccttcaagattcctcctgcttccctctcaagttttgatgtgataagtgttattgtctgggtccctgtctatgacaggattattgttcccattgcaaggaaatttacaggcaatgagaggggcttttcagagttgcaaagaatgggaattggcctttttatttcagtcctgtgcatgtcagcagctgctatagtggagattgtgcgtctgcagcttgcgaaagagcatg

SEQ ID NO: 12243 - DNA, 688 bp, Glycine max
cgttcatctaccatgacccttcaagctgattcagcaccagtaccaccaccgccaccggattccgcagccaccaacggcatctcccccaccgcagaggaagccccacaaccaccgtcaccaccaccgccgcatccaaccccacctccagaactgcgcgtcccaatatggtggccggaagacgggaacctcagcatggattgggtggacaacctgatgcggtgcttcgattggtcctctcggaacgtcccaccctcggagctcccttcggttctccccgtcggagtcttcgattcgctcatcctcgtcgcctccaagatgctccacaaggagcccaattgcgtcaccgtagaccccttccgccctagctccgatgatgataacactccctccgctgcctcctctgttgtcgtcgtcggcgatgttcacggccaactgcatgatctgctcttcctcctccaagatgccgggttcccctcgcgggatcgcatctttgtcttcaatggggattacgtggatcggggagcgtgggggcttgaaaccttcttgctcttgttggcttggaaggtattcatgccacataacatatatttgctacgagggaatcacgaatcaaaatactgtacatcagtttatggttttgagaaagaagtaatggtaaagtatggcgataaaggtaagcatgtgtacc

SEQ ID NO: 12244 - DNA, 254 bp, Glycine max
cttcaagctgattcagcagcagcaccaccaccactaccaccaccggattcagcagccaccaacggcatctcacccacagcagaggaaacctcactaccgccgcgtccaaccccgccgcccgaacttcgcgtcccaatatggtggccggaggacggcaccctcagcatggattgggtggagaatctgatgcggtgcttcgattggtgctctcggaacgtccctccgtcggagctcccttcggttctccccgtcga

SEQ ID NO: 12245 - DNA, 518 bp, Glycine max
cccacgcgtccgcaggcaatgatgaagaacaatactactacaagggaaagaagcagttatacaccctcgagaatggtgaaattccaggcaaaattataaaaccattttttttctctctctgtccaaacggcagatcagatccattcttcaacaaatccccttttcagtttcagtttttctcgaggatcccgtgaaacgacatggcgatggtggaccagcctctgtatccgattgccgttttgatcgacgagttgaagaatgaggacattcagctgcgcctcaactcgatccgaaggctctccacgatcgcgcgcgcgctcggcgaggaccgcacgcggaaggagctgattccgttcctcagcgagaacaacgacgatgacgacgaagtgctcctcgcaatggccgaggaattaggtgtcttcattccctacgtcggaggcgttgagcacgccaacgtgcttcttcctcccttggagacgctctgcaccgttgaggaaaccagcgtcagagacaagtcg

SEQ ID NO: 12246 - DNA, 454 bp, Glycine max
gggatagaagcagttatacaccctcgagaatggtgaaattccaggcaaaattataaaaccatttttttctctccgtccaaacggcagatccgatccgccctacaatcccctctcagtttttctctcgaggatccggtgaaacgacatggcgatggtggaccagcctctgtatccgattgccgttttgatcgacgagttgaagaacgaggacattcagctgcgcctgaactcgatccggaggctctccacgatcgcgcgcgcgctcggcgaggaccgcacgcggaaggagctgattccgttcctcagcgagaacaacgacgatgacgacgaagtgcttctcgcaatggccgaggaattaggcgtcttcattccctacgtcggaggcgtcgaccacgccaacgtgcttcttccttccttggagactctcttgcaccgtgaggaaacctgcgtcaga

SEQ ID NO: 12247 - DNA, 663 bp, Glycine max
taacatcatacaaagcttggttgattggtgttatgcatattgcaagttacgtgattttgacatgaacccacgagcacatcaagttttttattctgggtgccaggccattatgtatattctgtgttttcgcatgagatctttgatggatattcctaggcttaagttgcagctgcttaatatgcccatggaggcaatcttgaaacataaattgagtcccttgaaggtgtgtttgcccactgtagtagtggaatttcttagacaggcaaaggctgctcaacttttcatggcatcagagtcatttgttttcgatgatatgcttgagtctgatctttccaaggcttttggcgggatggatagacttgacatgtttttcccatttgatccatgtttgttgaagagaagtgaaagctacataaggccacattttgttcgctggtcaaaagtcagaactacatatgatgacgataacgacaatgatgaagtcagtgatagtggcagtgaattatcagatgatgattttattgacaggaacgccaaggatatgattgacgatgatatgatggtgagcgttgaaggcgctgattttaaccctgacttgaacaaaatgtctattacccccagaaaatcttgttaacattggtttgagacaccgttgaattaatg

SEQ ID NO: 12248 - DNA, 850 bp, Glycine max
ttttaagcttggaagcacatgcactgtttttgtggttctgctacaccgctaaacacagagaaaggcacagcacgatgacgatgaagataatggtagcgattaagcgagtggtggactacgccgtgaaaatcagggtgaagggcgacaagacaggggtggtgacccataacgtgaaaatgtcgatgaaccccttctgcgagatcgcgctggaagaggccctccgcatcagggagtctggcttggcctccgaggttgtcgccgtcaccatgggaccctctcaatctgtagacactctccgaaccggccttgccatgggagccgacagaggcatccatgtcgagtcaactgctttctctaccctctctctgttgccaagattttgagaaaactcgtcgagattgagaaacccggtcttctcatccttggcaaacaggccattgatgacgattgcaatcaaacaggccagatgatagcaggactcctcaactggcctcaaggcacttttgcttctaagtaggtggtccttgacaaagagaaacaggttgccacagttgacagagaggttgacgatggtattgaaaccgtgtgtctaaacttaccagcagtaataaccaccgatctgagactgaaccaaccaaagtatgctactcttcccaacataatgaaagcaaagtcgaaacccataaaaaaattcactccggaggagttgaatgtagaaatcaaatctgatttggagatagttcaagtcacagaaccttccaagagaaaagcaggggttattctttcttctgtggatgagctgattgacaaactaaaacatgaagctaatgtcatctaattattctcttct

SEQ ID NO: 12249 - DNA, 437 bp, Glycine max
ggaaatcctggaaaagctggtgctggggctattctacgagctaatgatggaagtttgatgtgtagattgcgtgaaggtgtgggtatagcaacaaacaatgctgctgaatatcgtgcaatgatattgggaatgaaatatgctcttaaaaagggatttactggtattcgtatccaaggtgattccaaacttgtttgcatgcagattgatggttcctggaaggtcaagaatgaaaacttgtctacattgtataatgtggcaaaagaactcaaggataaattttcctcattccagatcagtcatgttctaaggaacttcaactctgacgctgatgctcaagcaaatttggccataaatcttgcagatggccaagttcaagaagagtgtgtgtaattcactcatggcagctgatgattatgttttgggtttgttgcaaaaca

SEQ ID NO: 12250 - DNA, 599 bp, Glycine max
gctggcagcttgctcttataatccttgctttggtgcctcttctaggactaaatggagatctgcaattcaagttcttaaaaggattcagtgcagatacaaagaaattgtatgaggaagcaagccaagtggcaaatgatgctgtggggagtataagaacagttgcttctttctgtgctgaagagaaggtgatggaattataccaggaaaaatgtgaaggaccaattaagacaggcaaaaggcaagggataataagtggaattagttttggagtatcattctttgtgctgtattcagtttatgcaaccagtttttatgctggagctcgactggtcgaggatagaaaagcaacattcacagatgttttccgggtcttttttgctctcagcatggccgccataggaatctctcaatctggctctttggtccctgattcaactaaagcaaaaggtgctgctgcttccatatttgccattcttgaccgaaagtcagaaatagacccaagcgatgacactggaatgacactggaagaattcaagggagagattgaacttaaacatgtcaatttcaagtatcctacccgacccgatgttcaaatattc

SEQ ID NO: 12251 - DNA, 455 bp, Glycine max
  unsure (1)..(455): unsure at all n locations
acccacgcgtccgnnttgttttgtttacctttttgtctccattccttctttatttatttgttgttacttgttgctgttgtccctctccctgggagaaaaaagaagaagaagaagaaagagtttgaagtgaaatgtgagatatgggaagtggagtttcaacactctgttggtgctctgggaccaacaacgagcccgacgttattttcagcgccaccgacccactggacgaaaccctaggccactccttctgctacgtcagatcctccgcacgcttcctctctcccactcactccgatcgcttcctcagtccttctacttcccttcgtttctctccgacccatacccgacccgaatttcacgaaaccgggttcaaagccatttccggagcctccgtcagcgccaacagctcccttccgacaacagtcattcacttggacgaagaggtgaacggagtt

SEQ ID NO: 12252 - DNA, 774 bp, Glycine max
ggcccactcactttgggcccaagcctcctctctatttcaatgctggcatgtttgtttatgagcccaatctggatacctaccgtgacctccttcaaactgtccaagtcactaagcccacttcctttgctgaacaggattttttgaacatgtacttcaaggacaaatataggccaattcctaatgtctataatcttgtgttggccatgctgtggcgtcaccctgagaacgttgagcttgaaaaagttaaagtggttcactactgtgctgctgggtctaagccttggaggtacactgggaaggaggagaatatggagagagaagatatcaagatgttagtgaaaaagtggtgggatatatatgaggatgagactttggactacaacaatccactcaatgtggataagttcactgcggcacttatggaggttggtgaagtcaagttcgtccgtgccccatctgctgcttaagagtgtctttgggaaatcaagtgtgatccaagtacatgtacaaagtcatacatcattacattaacttttatgtatttctaaaagtcatacatcattacattaagttttatgtatttctaaagtcttaagacttaagaggaccttttttatgtgtcccgcttttctttttttctttttccaattctgtcattgtaaagcagtgaataccgtatccttaattttataaatggattgaattttaaaaaaaaaaaaaaaaaaaataaaataaaaataatactgaaaaagagaaatttggtggactcagaga

SEQ ID NO: 12253 - DNA, 458 bp, Glycine max
tacgaaacagagcacaatacaaggaaatcaatcctgcgatttcgaagcagaagaaggacaagaacaaaaaacatgtagcatgccataaaagcaggagctcttgttccttgtcatctagaaagaaatactgtagatctgggttagcaatggctcctggaagcagtgttttcaaagaagttcttgaatctcacctgatgtcttcagattatgaaatgggaaaagctaaatctgaggccaagagtaacagtacatctacaaaatctagcattgggttgagtggaaagagtggaattagttccaacaatgggcttttaggaattacttggatgccccttttgcagaaatttgagttacccccaaattcacagttgccaaaatggcaatacattaggttcccaattgtaaagttgaagtccataatatctgcccgtcctgccatcatgatcttgggaaatata

SEQ ID NO: 12254 - DNA, 357 bp, Glycine max
gggcaatcatcaatccagcgatttcgaagcagaagaaagaaggacaagaacaaaaaacgttggtattattattattattcaattcttcaatatccatatgcataccaacaagacacgctttttcgttcaatctccatagcgggggatgtagcatgccataaaagcaggagctctggttccttgtcatccggaaagaaatactgtagatctgggttagcaatggctcctggaagcagtgttttcaaagaagttcttgaatctaacctgatgtcttcagattacgaaacggggaaagctaaatctgaggccaagagtaacattacatccacaaaatctagcgttgggttgagtggaaag

SEQ ID NO: 12255 - DNA, 881 bp, Glycine max
atttgggcctagtgttggaatggcttctcatcaacagcaatcattgtatgggtttggatctggttcaaactcctatggtagaggatacctgcctaaccagggttctagctttggaggcacttccatttccaatcttaatgataggagttttgcttctcttgaaaatagcaggcggcaagggaggccaactgcttctctttgcaactgtattggtactcttgatttccttagtgagcagatccgaggaccaagggcctcgaagttgaaaaatcaaatttcaactgaaaataattctgtggatagtagtaaaaatagtgcatctactgccaagttccaaaatgaatcactcaatcggtcagattttgccacagattacaaggatgccaaattttttgtcatcaaatcttacagtgaagataatgttcacaagagcattaaatatggtgtctgggctagtacaccaaatggaaacagaaagttagatgctgcatatctccaagcaatggagaagcaagatgcctgtcctatatttctttttttttcggtaaaatgctagtgctcagttctgtggggtagctgaaatggttggacctgtcaattttgacaagagtgtggacttttggcagcaagacaagtggagtgggcagtttcccgtgaagtggcacataattaaagatgttccaaacagtcagtttcgtcacattgttcttgaaaataatgataacaagcctgtgacaaacagtcgagatactcaggaggtgaagttgggacagggggttgaaatgttgaccatttttaaaaactatgaaactgatgtgtccatcctggatgattttgatttttatgaagaccggcagaaggctatgcaagaacggaaggca

SEQ ID NO: 12256 - DNA, 529 bp, Glycine max
gacgacgcgtcaggggttcaaaagccatcatggtttctgatgacctgttgcttacctcctctggcgcttgatggccgttttatacggaaatgcaagcaagggtgcttgcagtttgtgattttgaagcccattttagttgttgttacacttatactttatgcaaaggggaaatataaggatggaaatttcagtccaaagcaatcatacttgtatcttacaatcatctatacgttctcatacacaatggctctctatgctcttgttttgttttatgtggcatgcaaggatctgcttcaaccattcaatccagtcccaaagtttattataataaaatctgttgtattcctaacttattggcagggtgtcttagttttccttgccgcaaagtcagaatttgttaaggatgcagatgaagctgctctacttcaagattttttcatttgcgttgagatgcttgttgctgctgttggccacttttatgcatttccatacaaagagtacgctggggctaacataggtggatcccgtg

SEQ ID NO: 12257 - DNA, 1053 bp, Glycine max
gacgatgatgatgatgatgatgatgatgaggtagaatatgaggtgcacgtggtagataagaaagtggttgatggagataataatgatgggaacaaggccaaggagcacgccgcattccgtacccggagacctggttcccggaatccacttgaggttgctaaagagattcagattctatttcagagggcttccgattctggtgcccaaatcgccaagattcttgaggtcggcaagcttccccacaatcgaaagcacgcagcttatcaagcttcttccaagatgttacaagttgttgctccctctttgtcccttgtctcctcccaaccttctacttccaaagatgctgaatccgcctccgctgctaacatggattttaatgttgatctaacaaccggggcacgcaatctttcctctacgctgcagaagctccttctttgggagaagaaactctttaatgaagttaaggcggaggaaaagatgcgggtcatgcacgataggaagtgtcacaggttgaagcgtttggatgataggggttctgattttcataaagtcgattcgactcgaactttgattaggaatctgtccacaaaaattagaatggcaattcaggtggttgataagatttctatgactataaataagataagggatgaagaactgtggccacagctgaaggaattaatccaggggttgaccagaatgtggaaatccatgcttgaatgtcatcatgatcagtgtgaagcaattagagaagccagaatactgggttccattggatccaggaagaagagcggtgatagtcatctccaggcaaccaagcagctcgaacaagagcttatcaattggacattccaattctctggctggataagtgctcaaaaaggttatgttagagcattgaataattggctgttgaaatgtctcctgtatgaacctgaagaaactccggatggcatagtccccttttcccctggtaggattggggccccgcaaatatttgtaatatgtaatcagtggtcccaagctttggatagaatatctgaaaaggaagtt

SEQ ID NO: 12258 - DNA, 657 bp, Glycine max
ctactcttgaagagcattcatctttgattactgatgtccgtttcagtcctagcatgcctcgtcttgcaacatcttcattcgacaaaactgtcagggtttgggatgttgacaatcctggttattcacttcgcaccttcacgggacattcaacatctgttatgtcactagattttcatccaaataaagatgacctcatctgctcttgtgatggtgatggtgagatacggtattggagcataaacaatggcagttgtgctagagtgtccaagggtggcaccacacagatgagatttcagcctcgtctcgggaggtaccttgctgcagcggcagagaatattgtgtctatttttgatgtggagacacaagcgtgtcgatattcactaaagggacacacaaaaccagtggattgtgtttgttgggatccttctggggagttgctggcatctgtgagtgaggactctgtcagggtttggactcttggatcagggagtgaaggggaatgtgttcatgaacttagctgtaatggcaataagtttcatgcatctgttttccacccaacgtacccttcattgctggtcattggctgttaccagtcattggagctgtggaatatgagcgagaacaagacaatgactctgtctgctcatgatggtctca

SEQ ID NO: 12259 - DNA, 401 bp, Glycine max
cggaattccgggtcggaccaagccttccggtgcctataaaaaagggagtagatatggggttggacccttgcaatggttctgtactcaggtatgcgcgcacgaaaggcgacagaggaaaactcaaacaagttttgtgcaatttactgagcaatgctgttaaatttaccgaggaggggcacatagctgttcgagcatgggctcagaagccaagcttgcagagctcaatgattgctactcaccaatacgggtccagtagacttttgtcgcgcttgtgttgccgccaaaatgaagcacgtgatgacgtggaagacttgaacatccaacaagatccaaattgtatggattttactattgaagtggatgacactggcaaaggaattcctaaagagaagcacaagtct

SEQ ID NO: 12260 - DNA, 1585 bp, Glycine max
gggattatatattatatagacacacagagatagaaagagagagaaagagtctaactagaattttttttctctctttcataacctagtgagactctgtgtcagagtttgtgaagtgaatcccataatcatgaagaaaggaaacttgggacttggtctcaaactctcagttcctgtgtctgatcaatctaattttgccaggttcctgactgaaagtgggacttttaaggatggggatctgcttgtcaacagggatggagttcgaattgtctctcagaatgatgtcgaagctccacctccaatcaagcctacagacaaccagttaactttggcagacatagatgtaatcaaagttgttggaaagggaaatggaggggtagttcaattggtgcaacacaaatggactagtcagttttttgcgttgaaggtaattcagatgaatattgaggagtctatgcgcaagcagattgcacaagagctgaaaattaatcaacaagcacaatgtccttatgttgttgtctgctaccaatcattctatgaaaacggtgtcatatcaatcatcttagagtacatggatggaggttccttagctgatctgctgaagaaagttaaaacaattccagagtcttatcttgctgccatctgtaagcaggtgctgaagggtctagtttatctccaccacgaaaggcatattatccacagagacttaaaaccttctaatttgttaataaatcatattggtgaagtaaagatcactgactttggtgtgagtgcaattatggaaagtacatctggtcaagcaaatactttcattggaacctgcaactatatgtctccagagagaatcaatggaagccagcgaggctacaacttcaaaagtgatatatggagtttgggactaatattacttgagtgtgctttacgtcggtttccatatgcaccgcctgatcaaagtgaaacatgggaaagcatttttgagcttattgaaaccattgtcgataaacctcctcctatccctccttctgaacaattttctacagaattttgctcatttatctcagcatgtctacagaaagacccaaaggatcgactgtcagctcaggaattaatggcacatccttttgtcaacatgtatgatgacttggaggtggatctttcagcttacttctcaaatgcaggatctcctcttgcaaccttataaaagtttccctgcttgcaaatgaggagcgtttgcagatgagttgaagaaccagctcctagagtcacttcaaggattctgtatttagttgttgagtgattgagttcaatttgttgagaaactcagatgcaagggtcaagaaattgcaataattgacatttgaagaactttaatgctgaagttaagtatcaggggctacttgcaacaaaatgtttgaaatttatgattgcaacaaaacgtatcactaggatttgcctgagttgctgataatatgatctgatgtacaaattttcatgagatgaaagttttgtcaagctgtcccaaatgaacgttttgagtcacactaggtgaacagttcctcaagttatatttgagactttttatttggtt

SEQ ID NO: 12261 - DNA, 538 bp, Glycine max
cttcagttcgtcaatagtgactgctctctttgtcaaccaatcacaatttagaattttcagtctatcatttttaacttaaatactggttcttatagtgatatatagagagagacaaagagtctaacttgaaagtttttctctttcaaaacctagtgacacttcttctgtgtcagagtttgtgaagtgaaccccatcaacagagtcccataataatcatgaagaaaggaaacttgggtcttgatctcaaactctcagttcctgtgtctgatcaatctaattttgccaagttcctgactgaaagtgggacttttaaggatggggatctgcttgtcaacagggatggagttcgaattgtctctcagaatgatgtcgaagctacacctccaatcaagcctacagacaaccagttagctttagcagacatagatgtaatcaaagttgttggaaagggaaatggaagggtagtccaattggtacaacacatatggactaatcagtcttgtgcgttgaaggtaattcagatgaatattgatgagtc

SEQ ID NO: 12262 - DNA, 289 bp, Glycine max
gtcaatggtgactgctctctgtcaaccaatcacaaaatttagaattttcaatgtatcatttttaacttaaatactgtgagactctgtgtcagagtttgtgaagtgaatcccataatcatgaagaaaggaaacttgggacttggtctcaaactctcagttcctgtgcctgatcaatctaattttgccaggttcctgactgaaagtgggacttttaaggatggggatctgcttgtcaacagggatggagttcgaattgtctctcagaatgatgtcgaagctccacctccaa

SEQ ID NO: 12263 - DNA, 975 bp, Glycine max
aagttatagaaaaggtgcatctgtaattaggatgctgcaaaaccatcattggtgccgaatgctttcagaggtcgctggcttcatatataaaaagacatgcttgctcaaatgctaagactgaggatctatgggctgcacttgaggaacgatctggtgaacctgtgaacaagttaatggcctcatggacaaagcagaagggatatcctgttgtatctgttaaagtcaatgatcagaaattggaatttaatcagtcgcaattcttgtcaagcggtgctcaaggagaaggccattggattgttccaataacattatgctttggctcttatgatgtccacaagagtttcctcttgcaatcaaaatctgaaacacatgatgtcaaagatttccttggttccacacacaaaggtttaaattgttggattaaacttaatgtggatcaggctggtttctacagggtgaagtatgatgagctgcttgctgctagacttagatatgcagtagagaaacaactcttatctgcatcagaccgatttggcattttggatgattcatttgcactttgtatggctcgccaggaatcattgacctccttgattaacttgatgggatcttacagggaggaagttgattataccgtgttgtctaacctgataactataagtcttaaagttcaacgtattgcagctgatgcagtaccagacttactagaatatttcaagcagttctttattaacctttttcagtactctgctgagaggcttggttgggagcctaaaccaggagagagtcatgtagatgcaatgttgagaggagaaattttgactgcccttgctatgtttggtcacgatttaacactggatgaagcaggcaagcgttttcaggcattcttagaaaacagaaatacaccacttcttccacccgatataagatacccggcatatgtagctgtaatgcaacgggcaagcaaatctaaca

SEQ ID NO: 12264 - DNA, 439 bp, Glycine max
cacaatttggacatgtattcagaatcacaaagaaggaagagccaaaaataaggaagaagctcaatactcagtttattatactggaaacccgtaaagatggagtgaaatttaccaacacgaagctcaagaaactaggggaccaatagcaacaaattcttgaggagtataaaagttgtcaaaaaaagttagttgatagagtagttcaaactgcggcaactttctctgaggtgtttgaatctttagctgaaataatttctgaattggatgtattactgagctttgctgatttggcttctagttgtcctactccctacacaaggcctgacatcacttcatcggacgaaggagatattactttagaaggatgcagacagccttgtgtagaggcacaagactgggtgaagtttatgcgaggtgattgtaagcgtgtcagaggaaa

SEQ ID NO: 12265 - DNA, 597 bp, Glycine max
  unsure (1)..(597): unsure at all n locations
ctccccttccaaacacaaacacaaacacaaacacaaacacatcgcaactcaagaaatgaaactagcttggtcaccagagagagcatccaaagcatacatcgacacagtccaatcttgccaggttttccgcgaatccggagtggcggagtttatttcggccatggcggcggggtggaactcgcagctcatagtggagacgtggtcgcagggaggacttattgccaccagcgtgggattagccctggcgaggtctcacacgtgcggacgacacgtgtgcgtagttcccgacgagcgggcgaggtcggagtacgtggagagaatgggcgaggcgggcgtaacggcggagatcgtggtgggggaaccggaggaggtgatggagggtttggtcggcgtggacttcttggtggttgattctcgaaggaaggattttacgcgtgtgctgaggcttgcaaagttgagtaacaaaggtgccgtgttgctctgtaagaacgcgaattcaaactccaagggttttatatggcggagcctcgtggcgaaaggttcttcgcggcgtcttgttcgttcggcgtttcttcctgtggngaagggacttgacat

SEQ ID NO: 12266 - DNA, 648 bp, Glycine max
ctgcgagacttggaaatggcgagttattcattgttttaatggatacagtaggggtccaaatgcaattacagtggggctacctccggcgtgggtggatttatcagaagaaatatcagtaaatgtgcaacgtgcacgcacaaaaatggcagagttggctaaggctcattcaaaggctttgatgccatcatttggagatggtaaggaagaccaacgagctattgaaactctaacacatgagataactgacttaataaagaagtccgagaagagactgcggagactttctgctactgggccttctgaggattccaatgtcaggaaaaatgtgcagcgctctcttgctactgaccttcagaacctctctgttgagctccgcaagaaacaatcaacttatttaaagcgccttagacagcaaaaagagggtcaagatggagttgatctagagatgtcaaatggaagtaaatccaaatatgaagatgatgacttggataatatggtatttaatgagcatcaaatggccaagctgcaaaaaagtgaagcattcacaatagaaagagaaaaagaaatccaacaggttggggaatctgtgaacgagcttgctcagattatgaaggatttatcagtactagtcatagaccagggaaccat

SEQ ID NO: 12267 - DNA, 344 bp, Glycine max
cccacgcgtccgcccacgcgtccgcccacgcgtccgcccacgcgtccaatggcgacgagaaatcgcactctgcttttcagaaagcacagagatgcgttgaagagtgttcgaattccctcattctcttcggcgccgtccaccgcttccggcgccggcggtggccccgtcatcgaattggccaccacttcatttctcaattccaatcgctcttacactccgatcagtaccgatgatcccggcaattcaagtaggggtccaaatgcaattactgtggggctacctccggcgtgggtggatttatcagaagaaatatcagcaaatgtgcaacgtgcacgcacaaaaat

SEQ ID NO: 12268 - DNA, 880 bp, Glycine max
gcgcgacaacctcggctcagtgtctctctgcactgcaaaccccctataacccttcccttcctcgcacttcattccttcgcttcatttatgtatactcttcatgaaaaattaagggaattttcagagagagagagagggagagagtagttatggaaggagaagaaggaggaattgcaacaaagaagagagggaaagagggtgaaactgagacgacgcgctacaaaggaatcagaatgagaaagtggggcaagtgggtcgctgagattcgagaacccaacaagcgttcaaggatttggctcggttcttactccacgcccgtcgcggcggcgcgtgcttacgacaccgccgttttccacctccggggcccctctgcgcgcctcaacttccccgagcttgttgccgcggagggccccgccgccgacatgtccgcagcctccatcaggaagaaggccaccgaggtcggcgccagagtcgacgctctccaccgccagcacccccacgcgctgcctgctggagaattcgccgaccgggttgaccttaataagatgcccgaacccgagaattcggattgtgactactgggacagggattaggagtgttgtttagttgttaatttggagtttttcaaaaacaaatataaaattataaccttgttttaattaatttttttttattggggaaaaggggttagagggcacagcaatggcctatgatgccagggagttgggttgaaaaagagggagtgagccatgttaaccactcaagtaattataatattataatagctactattctactgaagagtaaaaaaagatggatgttaggtgtttttatgagttgtatatgtaagagaagggaccattgggagggaagacgctgt

SEQ ID NO: 12269 - DNA, 1610 bp, Glycine max
tctcgagccgaatcggctcgggggtttttgtttcgcagtgagctgagcctattatcaacatcaacattcaacacaaacaatttcagtgaatcagcacaattttttattttttttgtcttcgtgattattattatttggatcatgctcttcgcttcaattttccttttcaaatccccctgaattttttttctttctgaatcacatcagattcaattgaattataccccctcaatgcaatggtggtctgcaaatgtcgcaaggctactaagttatattgcttcgtgcacaaagttcctgtctgtggggaatgtatctgcttcccggagcaccaaatctgcgtggtccggacttattccgaatgggttatagatggggagtatgattggcctccgaaatgctgccaatgccagtctgttttagaagagggggatggatctcaaacaactcgactgggttgtttgcatgttatccacacaaattgcttggtctcgcatatcaagagttttcctccacatactgcccctgcaggatatgcgtgtccttcatgttctacttcaatatggcctcctaaaagtgtgaaagattcaggatcacgtcttcattccaagttgaaggaagctatcatgcagtctggtatggagaagaatgtttttggaaatcatcctgtatcagtgacagaatcacgaagtcctccacctgcttttgcttcagacccattgattattagggaaaatcatggaaactcagactcagttgatggatactcacctgcaactcggtcagaactacctaaactttcagtgacagatattgtggagatagatggtgctaatccagcaggaaatttcttgaaaaactcaagtcctgttggtcctggggccaccacaaggaagggcccagtccacgttgaacgacagaatgctgaaatttcttactatgctgatgatgaagatgcaaatcgtaaaaagtacacaaaacgaggtccattccaccataagtttcttagagctttgcttcctttctggtctactgctttacctactctaccagtgactgcacctccaaggaaagatgcatcatatgcagcagccgtaacctgggaaggccgtacacggcatcaaagatcatcaaggatggaccccagaaaaattcttctcctgattgcaattatggcttgcatggcaactatgggtatactgtattacagactagcgcaacggggtccaggggatgagcttcttaatgatgaataaatttgtctgccattgagtgagtgctcttaaagtccggagatgttcagcggctcccattttccatattgctggttactgttgcttcttaaatccgtttgccttctttatttggaccagtcgcagtcttggcaaacatacaagtagtagtttgttgataatttttcatctggaatgcctatgacagtgacgtgttacataaaatcctagtcagccatctttgctctttgccctcagttttggtgtccacttggaatgaaattgcatcatattcagattttaatattgttctcttaattggattagttgtctcccccatttcaaaaatcaattaaagccattgttagccggcccgtgttt

SEQ ID NO: 12270 - DNA, 509 bp, Glycine max
ttcttccgcccacgcgtccgcccacgcgtccggaaaaactcaaacggatctcaattgcaaacgcaggaaaggggtttttgtttcgcagtgagctgagcctattatcaacacaagcaataatttcagtaaatcaagacaattttttttttttgtctccgtgattacgattatttgatcatgctcttcgcttcagttttactttccaaatccacctgaataaaattttctgaatcacatcagattcaattgaattatacccctcaatgcaatggtggtctgcaaatgtcgcaaggctactaagttatattgcttcgtgcacaaagttcctgtctgtggggaatgtatctgcttcccggagcacctaatctgcgtggtccggacttattcggaatgggttatagatggggagtatgattggcccccaaaatgctgccaatgccagtctgttttggaagagggggatggatctcaaacaactcgactgggttgcttgcatgttatccacacaa

SEQ ID NO: 12271 - DNA, 773 bp, Glycine max
agagaagatgagggtggaggagttaggtgggttcattgatgatggatatctcaatggttatctttcagtaactcgagcccttggggattgggacttgaaatttccacttggtgctgcatcccctcttattgctgagccagatgttcggctggttacattgactgagggtgatgagttcttgatcattgggtgtgatgggatttgggatgtaatgtctagccaagttgcagttagtcttgttcgccgaggattaagaaggcatgatgacccacagcaatgtgcccgagagctagtcaaggaagcattgcgcctaaatacatcagataatctcactgtcattgttgtatgcttgtcgcccattgaaagcattgttgaatcatgtccaccccaaaggcgaagattcaaagcttgcagtctgtctgaagaggcccgtaataggttgaagagcttaattgagggaaattgattgtaaatgcaattcttgtgtttgataaatgttcctttcataaaaaaattaatctgttttttggctgtttcagagagctaaaaagcagccagcagttttgtagtgatagaaaagggatatttggtgagggggtagagggtctttagacctatttaattgggaggtattttctgggttacgtacttacgttggtatatgtagagacaattgctagctaattttggcggattagattcggtccccaccatggccgttcccattttacattgttgctgcttctgtaaataaaaatgaggggttgtctgag

SEQ ID NO: 12272 - DNA, 713 bp, Glycine max
tagagattttccaaatcagcctccgattgtgtttgactataccgacccaaacataacgagcactacagaattagccttcaaaatcgcacccaaatcaacgaaagtgaagacgttgaagttcaattcaactgttcagattgtacttcaaaacacggccattgtctctgcagagaaccaccccattcacattcacgggttcaatttccatgttttggctcaagggttcgggaattacaacgccactagagacgagcccaagttcaatcttgtcaaccctcagatacgtaacacaatttctgtccccgtcggaggatggtccgttgttagattccaagcaaataatccaggtgtttggcttgtgcattgccatttggaaactcatttgccgtgggggctagccatggctttcgaggttgagaatgggcccactccttctttatcagtgcctccgcctccagctgatcttcctaggtgctaagcgcacgccatgcgttcatgactaaaaacatttatagattggttaatgtttatacacatacatactttcataatgtggatttcttaaaatcatttgtttgattgagaaaaataaggtgtaataaaggaggaaagtttggctattctttcaaccatgtgacttgatggccaattgtactctatcaaataacatatgttaatctgtcattaattatatttttttattttctcgtaaa

SEQ ID NO: 12273 - DNA, 1555 bp, Glycine max
ctaaactagaactttcagtttaaagcaatcaaatatcagctattcgatcttgcgagagactttctagaaaaatttcgcgccccagaaaccctagaggaaccctgattcaatcgattcgctgttgccttcgaatttcgttccttggaagattagggagcaatggcaattgcagccccagggcatctgaacgtgaatgaatcacccatttggggatctagaagtgttgattgcttcgagaaattggagcaaattggcgagggcacatatggtcaggtttacatggctaaagagatcaaaactggtgaaattgttgctctgaagaaaatacgaatggacaatgagagagaggggtttcctataactgccatacgagaaatcaaaattctaaagaaactacaccatgaaaatgtcatcaagctgaaggaaattgtgactgctccaggtcctgagaaagatgaacaggggaagccagatggtaacaaatataaaggtggcatctatatggtctttgaatacatggaccatgatttaactggtcttgctgaccgacctgggatgagattcacagttccccaaattaagtgttacatgagacagcttttgactgggcttcactattgtcatgtaaatcaagtacttcatcgtgatatcaaaggctcaaatcttcttatagacaatgaaggaaatcttaagcttgcagattttggactggcacgatcattttctaatgaccaaaatgcaaatcgtactaatcgtgtcattacgttatggtacagaccacctgagttgctgctaggaacaacaaagtatgggccagctgtggatatgtggtctgttgggtgcatttttgctgagcttcttcaagggaagcctatatttcctggaaaagatgagccagaacaattaaataaaatatatgagctgtgtggagcaccaaatgaagtcaattggcctggggtttccaagataccttattataataaatttatgccaacaaggccgatgaaaagacgtttgagggaagttttcaggcattttgatcatcatgctctggaattgttggagaagatgttgacacttgatccggctcagagaattactgcgaaagatgcacttgatgctgagtatttctggacagatccattaccgtgcgatcccaagagtttacccaagtacgaatcatcacatgagtttcagacaaagaaaaagcgccaacaacaacggcaaaatgaagaaatggctaagcgtcagaaaattcagcacccacagcctcacactcgtcttccccccattcagcagcctggacaacatggccaaatgcggtcaggaccaaaccaaccagttcatggttctcaaccccaagttgcggcaggacctacacatcattatgggaagccccggggtccatctggtgggccaggaagatatcctcccaatgggaacccaggtggaggatacaatcacccaaatcgaggaggtcaaggtggtggtggttatggcagtggaccttatcctcctcaagggcggggggcaccttacgggtccaatagtatgc

SEQ ID NO: 12274 - DNA, 662 bp, Glycine max
aaagctcgatctcgagccgtttaatttattgcccatcctttctttgtcaaacaccaaagtccaaaccattttttgctccgatcaacatgaagttgatcaataaaccatcgcaactacgttccctcttgagccttttctgctccattttgctgctcttggaattagctttcgtggctgcggaggacccttatagattcttcgactggaccattacctatggtgacatttatcccctaggagttaaacaacagggtattcttatcaatggccaattcccaggccctgaaatctattctgttaccaatgacaatttgatcattaacgtgcacaataacttgaccgagccgtttcttctatcatggaatggtgttcaacaaaggagaaattcttatcaagatggagtttatggcaccacatgccccatccctcctgggaagaacttcacctacacacttcaagtcaaagatcaaattggaagtttcttctatttcccatctcttgctttccacaaggcagctggtggttttggagccatcaaaatcctttgcaggccaaggatccctgtcccgtttccagacccagctggtgatttctcccttcttattggtgattggtaccaaatcaatcacacgaagcttcagagtgttctagattttggacac

SEQ ID NO: 12275 - DNA, 1157 bp, Glycine max
gctagtaattacatttggcggttctgtcagataaaaagcagagtgggatcagcaaatccatgtttcattcactcttctaaccaaacccgaaaacagagtacaagatttaaacacgcgaacaccgtgtttgaaaatcgaacataagagaagagggcgcaatcgttagggtttccaagatggaaggcatggttgatcacctggctttcgagcggaacaattcgcagttcgatgtcgacgagatgaagatcgtttgggccggttctcgtcacgcttttgaagtatctgacaaaatggctcgcctcgttgccagcgatccggcattcagaaaggatgatagagttgtgcttgataggaaggctttatttaagaacactttgaggaaagcagcttatgcatggaaaaggattattgagctccgtctcagtgaagaggaagctgctatgctcagatcctttgtggaccaacctgcttttacggatctacattggggaatgtttgttcctgctatcaaaggacaaggaactgaggaacagcagaagaagtggttgcctttggctcataagatgcaaataattggttgttatgcccaaactgaacttggccatggatctaatgttcaagggcttgaaacaactgcaacctttgatcccagaacagacgagtttgtaattcatagccccacattgacttcaagcaaatggtggcctggtggattgggtaaagtgtcaacacatgccgtggtttatgcccgactaattactgatggccaagatcatggagtgcatggtttcattgtccagctgcggagcctggatgatcacttacctcttccaggcataactgttggtgatattggaatgaaatttggaaatggagcatataactccatggataatgggatgctaaggtttgaccatgtacggattccaagaaatcaaatgttaatgagggtttcacaggtaacaagggaaggaaaatatgtacaatccagtgttccacgacaattagtctatggtactatggtatatgtaagacaaacaattgtatctgatgcgtcagttgctttgtcgcgagcagtttgcattgctacaagatatagtgctgttcgaagacagtttgggtcaaaagagggaggtcttgagacacaggtgattgat

SEQ ID NO: 12276 - DNA, 537 bp, Glycine max
actcgagccgaatgggctcaagcgaagaagaagctgtaaagaaacgatgaatgcttcagactcagagaaagaagacgcagaaattgaagcaacagaaactgcacccgatgaagagaatgcgaaattgaagaagaaagagaagaaaaagaagaagaaagcttcgtcgaaggatgcagagaagaagcgcggcgtgtgctatatgagtcgaatcccccctcacatggaccacgtcaagcttcgccacattctctctcagttcggcgatattcaacgaatttttctcgctcctcaagattcttctgtccaagtgtctgccaagaggtcacgtggatcccgagaccaagcatattcagaaggatgggttgaattcggtaataaaagtgttgctaagagggttgccaatatgttaaatggtgaacaaatagggggtaagaagaggtcatcattctactatgatctttggaatattaagtacttaagtaagttcaagtgggatgatctgactgaagaactagccttaaagaaagctattcggga

SEQ ID NO: 12277 - DNA, 306 bp, Glycine max
atcctcagtttccaatcgaccttcaatttccttcattttctggattaaaccgagctcagtttccaatcgaccttcaatttcaaaaattatctgccctgttcagatctcatttgttcagcttgatgaatgcttcagactcagagaaagaagacacagaaattgaagtaatagcaattacacccaatgaagaaaactcgaaattgatgaagaaagagaagaaaaagaagaagaaagtttcgttgaaagatgcagagaagaagggcggcgtgtgttatatgagtcgaatcccccctcatatggaccacg

SEQ ID NO: 12278 - DNA, 652 bp, Glycine max
ggggtggtgatcaggtggttgaagacaggagtggcgaattagaatcagagagaaagaagcggtttttatatttctcgcgcgattcgtttcaggcaagtgcagtgcagagtcgaaacgacgtcgttcattgtgcgatgaaagtagctcaacaagtgttgaatctctgaactctttgggattcgaatcttgagtcgttgatcgtttccggcaatggattcgtggctcaaagccgctgaaggtttatttgaagttgtagatcgacgagcgaaggctgttgccagtgacttatcagaggagcagggtgattctaagtctccagcatcaaatgggcaaggatctcagggcaagaggacaaaatcaaaaccaaaggctcaaaaggcactatccgactcaccaactataattagtgatactactcacgagaaaagtggatctccatcagcacctgtggacatagcaacttcaatagacaaagttgatcctgaaattgatgtgagcgcttccacgtctacaaaccaaccaaaggagccacaacctagcgatgcaacatcacccttgttaggctcttcattatcagaaattctaggcgatgatgttggtaaacatgacacagatgatgcggaagcattagtaaatgatgctgatattggag

SEQ ID NO: 12279 - DNA, 1506 bp, Glycine max
gtcaggtgatgtcattctcttcattgatgaagttcacatacttgttcaggcagggacaattgggagaggaaataagggatctggccttgacatagctaatttacttaaacctgcacttggaaggggtcaatttcagtgtattgcatcaaccaccctagatgaatacagactttattttgagaaagacacggcattggctcgacggtttcaacctgtttgggttgatgagccgagtgaggatgacgcaatcaagatacttatgggtctacgtgagaaatatgaggcacatcacaaatgcagatacactgcagaggctataaaggctgcagttgatttgtcagcgagatacatagttgataggtatctacctgataaagctattgacctcatagatgaagcaggaagtagagctcgtattgaagcctttaagaagaaaaaggagcacgaaactggaatcctttctaagtgcccagctgattactggcaagaaattaaagatgttaagtccatgcatgaaatggagaacaagcttaaatactatggcgcttctagcattgacgataccaatgaactcatactggactcatatttatcttctacaaccaccgataatgaacctatagaagttgggccagaagatatagcagcagttgcttccctctggtcaggaattcctgtacagaagctcacagctgatcaaagaattcttctgttagatcttgagaatcaacttcggaagcgtgtgattggacaagaggaggctgttgctgccatttctagagctgtgaagagatcccgggttggcctaaaggatcctgatagacccatagctgctatgttattctgtggcccaaccggtgttgggaaaacagaactcgcaaaatctttggcggcgtgttactttggatccggaggcagccatggtacgattagacatgagcgaatatatggaacggcatacagtgagcaaattgttaggatctcccccaggttatgttggttatggagagggtggcgttttaacagaagcaattagaagaaaaccattcacactgttattgttggatgaagtagaaaaagctcatccagatatattcaacatgcttcttcagattttagaagatggtcaacttactgattctcagggtcggagagtttcagttaatgatgcactggtggtgatgacgtcaaatgtggggtcgagtgccattgctaagggtcgacacagctccagaggtttcttgattccagatgataaaacaatatcatacaatggcttgaaatcgatggtaattgaagaactgaggtcatattttcgtccagaattgctcaacaggatagatgaagtggtagtatttcaaccccttgaaaagtcacaggttcgtgaagttttggttatgattaatagctcactggtaatattaatagtcacttggtaggctcttagtatatcatttcagtcgtgtttgttagcaataattttgattttctttacagaaactaaat

SEQ ID NO: 12280 - DNA, 474 bp, Glycine max
gatgaaatgaagcttcaaagaagtaagttagataaggagaaacaagaagctgatgagaataaaaaacatcttgaaaggcaaaggatggaaatgcaagaggacatagatgtacttgttgacctcaacaggaagctgaaaaatcagcgggaacaatttattgtggaaagacgacgctttattgagtttgttgagaaacttcggagttgccagaactgtggggaaatgatctctgaatttgtgctttctgatttacaatcctctgttgacattgagaacttggaagtgccatctctcccaaaattagcagctgatattgtacagggagtttctaatgaaaatttagcttcttcaaggcaaaatactggattgtctcctgcaactgatcccaagtcacctgtttctggtggcactgtctcttggctacgtaaatgcacctctaagatttttaaaatcttcccgattagaaagattgaa

SEQ ID NO: 12281 - DNA, 1368 bp, Glycine max
gatagtcagcaattctgaattgtcaaattcacccgctaccttttcccgtgtacgaacgaatccaatccaccaaatcggcggcgacgcctccgctctgtctcgaaaccacagatctgcggcggaaccgccgtctccgactatctccgattgatcttccggtaaagtggaccggagatgccggttgccgcttccgccatttacttcctcaacctccgcggcgacgttctcatcaaccgcctctatcgcgacgatgtcgggggaaatatggtggatgcttttaggacgcatattatgcaaacgaaggagcttggtacttgcccagtgaggcagattggtggatgctctttcttttacatgaggatcagtaatgtctacattgtcattgttgtcagcaacaacgccaatgtcgcttgcgctttcaagtttgttgttgaggctgttgcattgttccgatcatactttggtggagcttttgacgaggatgcaattcgcaataattttgtactcatttatgagctcctagatgaaattatggactttggttacccacaaaatctttcaccagagatcttaaagctttatatcactcaagaaggagtgcgttccccattttcatcaaagcccacagatagacctgttccaaatgcaactttacaagttactggtgctgttggttggcggagagaagggcttgtgtacaaaaagaatgaggtcttcctggatattgtggaaagtgtaaatcttctaatgtcttcaaaaggtggtgttctgcgctgtgatgtcacggggaagattcttatgaagtgctttctttctggaatgcctgatttgaagttgggtttgaatgacaagattggccttgagaaagagtcacaacttaaatctcgtcctactaaaagtggtaaaactattgagcttgatgatgtcactttccatcaatgtgtaaatttgacaaggttcaactcagagaagacagttagttttgtgccacctgatggtgaatttgaactaatgaagtatcgtatcactgagggtgttaatcttcccttcaaagtattgccaaccatcaaggaacttggtcgatcacggatagaagtgaacgttaaggtaaagagtgtttttgcgtgcaaaaatgtttgcacttggggttgtagtcaagattcctgttccaaaacatactgccaaaacgagtttcacagttacatctggccgggcaagatactatgcctctattgattgtctcgtttggaagattagaaaattccctaggcagactgagtcaaccttaagtgcagaagttgaacttatctccacaattacagataagctatcttggactagaccagcaattcagatggagtttcaggt

SEQ ID NO: 12282 - DNA, 309 bp, Glycine max
attcccgtgtccgatcgaatccaatccaccaaatcggcgacgtcgccttccgctacagatccgcggcggaaccaccgtatctgactatctccgattgatcttccgataaaagtggaccggaaatgccggttgccgcttccgccatttactttctcaacctccgcggcgacgttctcatcaaccgcctctatcgcgacgatgtcgggggaaatatggtggatgcttttaggacgcatgttatgcaaacgaaggagcttggtacttgccctgtgaggcagattggtggatgctctttcttttacatgagga

SEQ ID NO: 12283 - DNA, 479 bp, Glycine max
atccaacacactcttgtcttgtgatcctcttcttcttcattctccctttttttgccctagattagatcctttctcttccaatcattaattaattagattagatttgatttgatttgatttaccttaatccttcgtctgctttttccttccctcaactccaccattcctgatttttctgcatcagtctattcaagttcattgtagggtgtatatccttgattttgtgtgggtttgagttagggtgcatgtgaatgaaaaggagatttgctggaggtgatgcatttgcatagatgaaggcagaaaaagtttggcgtttaggcagcatgggtgatatgcagatactgcctgggtctcgccaccgtcctcccatgaagaagccgatgtggattattgtcttggtgttgtttgtctgtgtctttctaatctgtgcttatatctacccaccgcagagcagttcagcctgttatgtcttctctttc

SEQ ID NO: 12284 - DNA, 526 bp, Glycine max
acccacgcgtccgcccacgcgttccatctctcacatcatttcccactctcgcgtttcctttatcatatttatattctttggttattcaattcatattacgccatgtcccagttgaacggagcctactacggcccctccatcccgccgccgaaaacttcctaccaccgtcctgggcgcggcggaggcctcggctgctgctgcgggtgcctcttcagcctcatcttcaagctcatcctaaccgtgatcatcatcattggcatcgccgtgttccttttctggctcatagtccgtcccaacgtggtgaaattccacgtcaccgaggccaccctgacgcagttcaactacacccccaacaacacgctccactacgacctcgccctcaacatcacggtccgaaaccccaacaagaggctcggaatctactacgaccgcatcgaggcgcgtgcaatgttccacgacgcgaggtttgattcccagttcccggaaccattctaccagggccacaagagcaccaacgtgctgaacc

SEQ ID NO: 12285 - DNA, 479 bp, Glycine max
ccctctcgttcgatctctcacatcatttcccactcccgcgtttcctttatcatattcttattccgccatgtcccagttgaacggagcctactatggcccctccatcccgccgccgaaaacctcctaccaccgcccagggcgcggcggaggctgctgctgcggctgcctcttcagcctcatcttcaagctcatcttaaccgtgataatcatcgttggcatcgccgggttcgtgttctggctcatagtccgtccgaacgtggtgaaattccacgtgaccgacgccaccctgacgcagttcaactacaccgtcaacaacactctccactacgacctcgccctaaacatcacggtccgaaaccccaacaagaggctcggaatctactacgaccgcatcgaggcgcgtgcaatgttgcacgacgcaaggttcgattcacagttcccggagccgttctaccagggccacaagagcacgaatgtgc

SEQ ID NO: 12286 - DNA, 428 bp, Glycine max
atgcgatacagtggttggaggggaaccagttggcggaagtggatgagtttgaggacaagcagaaggagttggaagggatctgcaaccccatcattgcgaaaatgtaccagggtgctgctgctagacctggtggagatgttcctacgggtgatgatgacatgcctggtgctggtggtgctggttctggcgcgggacctaagattgaagaagttgactaagcttgtgcatgtgactaactcaaaaactttggttaggttcttgttatttggtctaataatgtaagttttagtgatgatgtaaggtttcaggaatcgtgaataaggtcttttttgcttcatgtgatagtgtaatatcagagatggagttgagattaatgtaattttttatacagtttgggcttttaaaaaaaaaaaaaaaaaaagggcggc

SEQ ID NO: 12287 - DNA, 965 bp, Glycine max
ttcacatagctatcgtataagatttttccactctgcttccttccaatcttaattgaaggacagcttcagacaaattgtgaaatttaataaagagccaaagatgcccttgtacagaatctgaactgcttttgtctcaaggtctttctgcccttgcaatttgcaaaagtttcaagaaagcttataaaaggagagaacatctgtttttatcaagctctgatggcagggttaaattttgaagccacatatactgacaaccatgatattctgaagatatttgcagctgaaggtgttgaattccttttatcttgtgaaggaaaggtacccgtatcagaatgcaatgggaaaattatatgcctatttttcactgcaaactggtgtagaccttgcagagctttcattccccgtcttgttgaactttatgaaacactgagaaagaggggaataaatctagagatcatcttcatctcctttgaccgtgatgaggatggatttaaagaacacttcaagaacatgccatggctagccgtcccatttgatgtaagtttgcacagaagactgattgacagataccgaattgatcgaatcccatcattcgttccattatgttcagatggcataaccattgaagaagacttgattggatgcattgaggattatggtgctgatgcatttcctttcacaaggaagaggcatgaggaattgaaagccatagatataaggaagcgtgaggaagcaaacttggaagaattattgggacacaaagggtgccactttctcatctcaggagatgatagaaaggtgcccttattccctgcttatagactagctggtaaaaccataggcctttattttggggcctattggtctcctccttgctgcgccttcactgtccaacttaccgatgcatacaacaatctcaaggtggaaaaaggcgactgctttgagaatgtttcaatctcaacaga

SEQ ID NO: 12288 - DNA, 497 bp, Glycine max
ttgactcgtgggggagactcaatctcttccttctctctctatctttatccgctggtattcttcttcagctgcagctgcaaggtttcaagaaagcttataaaaggagagaacatctgtttttatcaagctctgatggcagggttaaattttgaagccacatatactgacaaccatgatattctgaagatatttgcagctgaaggtgttgagttccttttatcttgtgaaggaaaggtacccgtatcagaatgcaatgggaaaattatctgcctatttttcactgcaaactggtgcagaccttgcagagctttcgttccccgtcttgttgaactttatgaaacactgagaaagaggcgaataaatctagagattatcttcatctcctttgaccgtgatgaggatggatttaaagaacacttcaagaatatgccatggctagctgttccatttgatttaaatttgcacagaagactgattgacagataccaagttgatcg

SEQ ID NO: 12289 - DNA, 469 bp, Glycine max
tcgtccacgcgttcgagaatgtacagtgagcttatttcaaagagtattacagaaggtggaccttttgcatctagaacatcctacgtcaaacttctacgttcggttaagagggagacacttaagctgattgagacattcttggataaggcagaagaccagccacaaatcggcaaacaatttgtgccgccaatgatggatcctgttcttggagattacgccaggaatgttcctgatgcaagggaatcagaggttttgtcactttttgcaacaattgtaaacaaatataaagctgcaatgattgaagatgtacctcgcatatttgaagctgtttttcagtgcacacttgagatgattacaagaaattttgaagattacccagagcatcggctcaagttcttctctctactccgtgccatagccactcattgttttcctgcattaatctgcttgtcaagtcagcaactgaagc

SEQ ID NO: 12290 - DNA, 543 bp, Glycine max
cccacgcgtccgctaaaaattccatttagggacttcccaaacacgtcactaatcgtatcaacaattcaccatgcgcttgagctgcaatggatgccgcgttctccgcagagggtgcaccactgagtgccccattcgcatctccctccaatggatcaattcccctaactcccaatccaacgcaaccctcttccttgcaaagttctatggccgccaaggcctcctcaccctcctcaccaacgctccctcacaactacaacaagccgttttaaaatctttgctttacgaagcatgcggtcgaatagtgaacccggttctcggctcgaccgggttgctctccaccgggaattggcatttgtgcgaagccgcggtcaaagccgttcttaatggcgcgccgattgagcaggctcctttggacggcgccacaagcctgcagctcaaggcttgtaatattcgccacgtggcaaagagtgataaatcgtgcggctctgatacgcttcgcaaggtgaagtctcgcaccaccacgttcaagcgccgagccgcaaa

SEQ ID NO: 12291 - DNA, 530 bp, Glycine max
gttcaaagcaaggagcttttcgagacgatggtgaggcacccttgcttcaaagacacccctttggtgctagtccttaacaagtatgatatctttgaggaaaagattagcagggtgtccctaaatacatgtgaatggttcagcgatttttgtccagttcgtgcacaccataataaccaatcactggcccatcaagcctacttctatgttgccatgaaattcaaggacctttatgcatccctcacagggaaaaaactctttgtggcacaagccagggcaagggaccgagtaactgttgatgaggcattcaagtacataaaagagatcctgaaatgggatgaagagaaggaggagaatttctatggtccacctgaggattcattttacagcacagacataagctcctctccctttatcagacaagagtgaatgagtgtccataaaacaatatattattatttggctgttgaaaagggttaaaaatgtaacgtgctggccagcttgtgttctgtgatcctatatgtattttaaat

SEQ ID NO: 12292 - DNA, 407 bp, Glycine max
ctttggaatggaatgaaacctcttcttccctctctcctaattctctctcactacatccatcctcgtaaagcaaaacaacctcttacctccgttcaagtttcacacgttcttccactatgtcctggttgagacacctctcctccaagttctcctccaccaccatcacaagcacgcgccgcttcacttccctgtcccggttcagtacctcgaccgctccggctcgtcatgcgggcctggggcccactcaggcccatgagaaagcccaaggtggtggtgctgggctcccggttggcccgggtggccgcttagaaagggctcgacactgcaatctacgacgtcgtttgcgtgatcccttgcatccacatggtcttcacgcctctcttggcctccacggtgtgggaactttt

SEQ ID NO: 12293 - DNA, 676 bp, Glycine max
acagaatatatggagttgggatcatcgtattacttgatacatttgaacggtcaaaagaagaagcttgattggcggagaagactgcggatgctgcgtgacatatgcaagggtttgatgtgcatacaccgaatgaacgtgtgtcaccgtgatctgaaaagtgcaaattgtctagtgaataagcattggactgtcaaaatatgtgattttgggctttcaagaataatgacagagtctcccatgagagattcttcatcagctggaacgccagaatggatggctcctgagcttattcgaaatgaaccgttcacagaaaaatgtgatatcttcagccttggggtgataatgtgggaactctgtaccttgaacagaccatgggaaggagtaccacctgagagggtggtttattccgttgcgcatgagggttccagattggagataccagaaggccctctaggcaggctgatttcagagtgttgggcagaatgtcatcaacggccaagctgtgaggagattctttctcgtttggtggacatcgagtactccttgtgctgaagcaatatcttttgtacatagaaaactttgggtagagttgttacattgtattatcggctgatgttgtggactatttgtgaattttgttctttttcgcagaacatgcgaaatatgaatcgatatc

SEQ ID NO: 12294 - DNA, 476 bp, Glycine max
gcaaggtgtggctttggcgatcttgaggggtgtgattgacttcaagagggaaccttggccgcaaatatcggagagtgccaagagccttgtgcggcgaatgttggagccggatcctaaaaaccgcttgacagcggaacaggtgcttgaacatccctggctgcaaaatgcaaagaaagctccaaatgttccattaggagatattgtcaggtcaaggcttaagcagttttctgtgatgaatagattcaaaaagaaagctctgcgggtaattgcagaacatttatctgttgaagaggtagaaataatcaaagacatgtttacattgatggatactgacaaagatggcagagtaacatttgaggaactgaaggctgggttgaggaaagttggttcacaattggctgagccggagattaagatgctgatggaagtggctgatgttgatgggaatggagtacttgactatggagagtttgtag

SEQ ID NO: 12295 - DNA, 789 bp, Glycine max
  unsure (1)..(789): unsure at all n locations
ggcgtgacgtcantgctaaccgcacacgctccttgcttgcaagccatggttgcagatggctctagtctcatgcttttattacaaatgcgtcactcagccccaagttgtcgtgaaggctctctccatgtgctctatgcattggcaagcacaccagagctggcctgggctgctgccaagcatggccgtgttgtctacattcttgaattgctcttgcctttgaaggaagaaattccactccagctaagagctgctggcagcgtccttgttggggaagcttgttagccaaccaatgcacggaccaagagttgctatcacacttgcaaggtttctccctgatggccttgtgtcagtaattagggatggacctggtgaagctgttgtagttggccttgagcagactacagagacaccagaacttgtatggacgccagcgatggcgacttccttatctgcacaaatttccactatggcatcagagctataccgtgagcagatgaaagggcgtgttgttgattgggatgtgcctgagcaggcatctggacagcaggaaatgagagatgagccacaggttggtggcatctatgttaggctgtttctgaaagatcccaaattccctcttagaaaccctaaaaggttcttggaaggtctactagatcagtatttgtcgtccattgctgccacccattatgaggtgcaagttattgatccagagctttctttgctcctgtcggctgcactggtttccttactgcgtgtgcatcctgcactagcagatcatagtggatatct

SEQ ID NO: 12296 - DNA, 759 bp, Glycine max
  unsure (1)..(759): unsure at all n locations
cagagagagagagagagagagaagggtttgagagagatggggaggaggatactgaatgatgccttgaggagtatggtgaatgcagagaggagagggaaagctttggtggaactcaagccaatctccactgttatgtcttcctttctccaaatcatgaaacaccacgggtatatcaaggactttcaagtctatgatccgcatagagtggggaggataagagttgaactacaaggtaggattaacgattgcaaggccctttcgcaccgaaaggaccttaaggcaagggacattgaagcctacagattgcagactcttccaacacatcagtggggttatgttgtcattacaactcctgatggcattttggatcatgaagaggccattaggaagaatgtaggtggccaggttcttggttactttcactaaaatgatcattactgtgctgttttggccaggtattaggttctgctatgtttccacataaacattccataaatgttttatgcgattacagaattttttctcttcctgtatgaatgttataacatggctgctcatgcatgatgagtatgatggattggatttgatgctttgtggaaatttgtcctgtttttgataaatggtgtactagacatgaatggttattatatccttagtttgtaatctatttcaaattcaaattccatgtagtcatcggataattcaatacaaccattctatgcactggtttctttttttcccccnnnaaannnnnnnnat

SEQ ID NO: 12297 - DNA, 1590 bp, Glycine max
atttgtgacgcaagaagaataaaaattgttagtggtagtgggcgggggaatatggatggggaactacacataatgttatttccgttcccaggtcaggggcacttgataccaatgagtgatatggcgagagcatttaatggaagaggggtgaggacaaccatagtgaccactccactcaacgtagccactattcgtggaacaataggaaaagagacagagacagatatagaaatcctgacggtgaaattccctagtgcagaggctggtttacctgagggatgcgaaaatacagagtcaatcccctcccctgacttggtactgactttcttaaaggcaatcaggatgttggaagcccccttggaacacctactccttcaacaccgtcctcattgccttatagccagtgctttcttcccttgggcatctcattccgccactaaactcaaaatccccaggcttgtctttcatggcaccggtgtcttcgccttatgtgcctctgaatgcgtccgactctaccagcctcacaagaatgtttcttctgacaccgacccctttatcattcctcatcttccgggagacatccagatgacaaggctgttgttgcccgattacgctaaaaccgatggagatggagaaactggcctcacaagagtcttgcaggaaataaaggaatcagagctcgcaagctacgggatgattgttaatagcttttacgaactggagcaggtgtacgcagattattatgacaagcagctgctacaggtacagggaaggagggcgtggtacataggtcctctttccctgtgcaaccaagacaaaggcaagcgaggaaagcaagcttccgttgaccaaggagacattttgaagtggctggactccaagaaagcaaattcggtggtgtacgtttgttttggaagcatagccaacttcagtgaaactcagctgagagaaatagcgagggggcttgaggattcggggcaacaattcatatgggttgtgaggagaagcgacaaagacgacaaggggtggcttccagaggggtttgagacaagaacgacaagtgaagggagaggagtgattatatggggttgggcaccccaagtgctaattctggaccatcaagctgtgggagcctttgtcacacactgtggatggaattccacgctcgaagcagtgtcggcgggggtccccatgctcacctggcccgtctctgcagagcaattctacaatgaaaagtttgtgaccgatatacttcaaatcggggtccctgttggtgttaaaaaatggactagaattgtgggggacaacataaccagtaacgcgcttcagaaggcactccatcgtataatgataggggaagaagcagagcctatgagaaacagagcacacaaactggcgcaaatggcaacaacggcgctccaacacaatggatcatcttactgccacttcactcatttgatacaacaccttcgctccattgcaagccttcaaaattaactccccatccctttaccctcgcaatcaactttgcctaataactacttcacatctcaatgcaaataaattgaattgaaaaaaaaaaaaaaaaaa

SEQ ID NO: 12298 - DNA, 1968 bp, Glycine max
gcattatatgcctttggctttattttagaaggtccctcccctgataaacttgtgccactggtgaatatggctttgaatttcatgctcactgctttgatgaaagatccaaataatcacgtgaaggacacaactgcatggactctagggcgaatgttcgaatttttgcatggatcagctctggatactccgattattactccagcaaactgccaacagattattactgtgctgcttcagagcatgaaggatgttccaaatgttgctgagaaggcttgtggtgctctttattttcttgcccaaggctatgaggatgctgcatctgcgtcctctccattgacccccttctttcaagatattgttcatgctcttctcactgtaactcacagagaggatgctggagaatcccgccttagaacagcagcctatgaagccttaaatgaagtagtgaggtgttctaatgatgaaacagctcctatggtggtacaacttgttcctctcatcatgatggagctccatcagactcttgagaatcagaaggtttcatctgacgagaggcagaatgagttacaaggccttctatgtggttgcttgcaggttatcatacagaagttaggatcatctgaaccaacaaagtatcatttcatgcagtatgctgaccaaattatgggtttgtttttgagagtgtttgcttctcgaagtgcaacagctcatgaggaggctatgcttgccattggagctttggcctatgcaaccggtgctgattttgcgaaatacatgacagaattttacaagtatttggagatgggtctccaaaatttcgaggactaccaggtttgtgctatcacagtgggtgtggttggtgatgtatgcagagccttggaggagaaaatactgccttattgtgatgggataatgacccaacttcttaaggatttgtctagcaatcagttgcataggtccgttaagcctcctattttttcatgttttggagacattgccttggcaattggagaaaactttgagaaatacctgttatatgcaatgcctatgcttcagagtgccgcagagctctctgctcatacatctggtgctgatgacgatatgacagaatacactaattctttgagaaatggaattctagaggcatactcagggatcttccaagggtttaaaggttccccaaagacccagcttctgatgccatatgctcctcatgtgctgcaattcttggatagtttgtataatgagaaggacatggatgatgttgtgactaagacagcaattggcgtgcttggagatttagctgatactttgggtagtaacgctggcccgttgattcagcaatctgtgtccagcaaagacttccttaaagagtgtttatcatctgatgatcatttgattaaggaatctgcggaatgggccaagttggcaatcagtcgagcaatttctttttgaggctgttgctatttcctggcttctagttctcttgcatacatttgcatttgttgcgtgtgggggtctcaactgcatacatgagttgggtcatcaccatttttgggaacaggtgttcggtcctttggttgtctgcatttcatgtcagcaacatggtcatggagtctgctttttcatttttatttttttaaaatttattgttctgcattgctatggaggaagtcggtgggtgatgaccaatctttctgctaacttggcagaaaagatgcggtttcgtacaggaggagaaacagggtgaaatggggggaaggagcaagaaaggagatatcccatgatatctgccaataccgtaactattgggcttgcatgagttattgaatgttttggagtctatggtggtggtccagatattatgtcctttactatttttttttccttttactattggctgtagagtgaaacaatcatcttagtccatccatgtgtttgggacaaggtaatgcaacatattttagc

SEQ ID NO: 12299 - DNA, 508 bp, Glycine max
catttggatgcacgccatctaacaatccgatcacctgcgagtggtaaatatgatcttgaaattgttacagatatttgtccacagaaaaacacatcattagagggactttacaaatcatctgggaatttctgtactcaatgtgaggctgaaggcttccgtaaaattacattttatcaggatcgacctgatataatggcaaaatatacagttcgcattgaggcagataaatcactgtatccagtgttattgtctaatggaaacctagctgaacaaggtgacttagaggatggcaggcactatgctgtttgggaggaccccttcaagaaaccttcttatctgtttgccttggttgctgggcaattgcagagcagagatgacacatttatcacccattcagggcggatggtgtcccttaggatatggacacctgcagatgatgtacctaagactgtacatgctatgtattctctgacagcagctatgacatgggatgaagatgtttttggac

SEQ ID NO: 12300 - DNA, 648 bp, Glycine max
  unsure (1)..(648): unsure at all n locations
gcaagacttagggttaggttggttttgttaatactacaacatcaacacttctacagattcttttcttttcttttctttctcttcttggtttggttgctggaatactatggaatctaatccaacaaccatggacgcaaaacgcgaactcgaagtggaagactgggaactgctccacccaaacgacgacgattcaatcgtgttcggtgggcccccactcgactctatcctccccgatcacttctcccttaatcccaattccagttgcagttccaattccaattccaattcctcctccgaggtcgatcgcaacttcgacgattcctatgttgccaatcagatattcccaaattccaccctcgcaccctggaacggggattccgattccgacaccaccgccaccaacgcccccgtggtggcgatggccgaggccgaggccgaggctgtggtggaacatgatgaggaacagaaaaaaatggaaggagtggaagagaaagatgatgatgaggaggatgagggggaggaggaggaggaggaagaagaaaangaaaaagagaagagattggtgtggtggaagagtccttttggggtgagattggtgaccttgcttgcttcctgtggcttttgcgtgcgcgtgttttggacttttct

SEQ ID NO: 12301 - DNA, 1094 bp, Glycine max
ggaagtgtaaacatgctaaaagaccaatctcaatacctcaaactctaaacactgcatatttaattatcataccaccacccacccttctcccatccctcactctctcgacgaaaccctaagcttcccctttctttcactctcatcagatcctttcgtcgttgcgcgaaaccctatctctgaaccagcaaacatgtctgcagccatggatatgtcgctcgacgacataatcaagaacaacaaaaagtctggatccggaagttcacgtggccggacccgaccctccggatccggacctactcgccggctccccaaccgtgccgccaaccgcgccgcaccttatgcccccgctaaggcgccggaggcaacgtggcagcacgatttatatgcagatcagcatgtggctgcggcggggtaccctgctcaaggtggtcgtgcggcttccatagaaactgggaccaagctttacatttcaaacttggattatggtgtttccaatgatgatattaaggaattgtttgctgaagtgggtgacttgaaacggcatgcggttcattatgacaggagtggcagatcaaagggtacagcagaagtagtattttcacgacgagctgatgctgtatctgctgtaaagagatacaacaacgttcaattagatgggaaaccaatgaagattgaaattgtgggaacaaacatttccacacctggtgtagctcctgctcctaacggagctattggaaattttaatggagttcctcgaagtggacaaggaagaggtggggcattaagaaggccaggaggaagagggcaaggcattcgaagggatcggggacggggaagaggtcgtggtggaggaggccgtggtgaaaaggtatctgctgatgatcttgatgctgatttggagaagtatcatgcagaggcaatgcaattgaactgaaggaattggccatattttattttctagctattacatctatgattattaggaacttggtgatggaacaccatgtgtttatgtatcttttgcactggcctactttttagggaaagggaatggatttcccaagttaaaacgtttagacttgccatatggagtt

SEQ ID NO: 12302 - DNA, 558 bp, Glycine max
acgagattggattaaggccgctaaattctccaaatacagtttctggtatgggttcgtatgaccagctcatccagcaatatcaacagcaccaaaatcagtcccagttccgccttcaaatgtcagctgtaaatcagtcttttagggatcagggcatgaagtctattcaaactgcacaaccagcaccagatccatttggtttgcttggcctgttaagtgtgatcaggatgagtgatcctgacctgacatctcttgctcttggaattgatcttactacactggggttaaatttgaattcatcagaaaatcttcacaagacctttgggtctccatggactgatgaatcagctaagggagatccagagtttacagtgccacaatgttattttgccaaacagccacctgctctacatcaaggttatttttccaagtttttcggtggaaacattgttttacatattttatagcatgcccaaagatgaagcccaattatatgccgccagtgagctttacaacagaggttggttttatcacatagaacatcgtttatggttaataaga

SEQ ID NO: 12303 - DNA, 879 bp, Glycine max
cacgaacaagggtgtgttctgagtcagcttcggcaacggttcctagcggcagcaccaaacaagtcgagtcgacgcaagctgcattgctttctcaatataaataagtttaattcgagacgtcatcttactctcacctgaaaaccattcattcattgatcaaactcccaaaacaatggcttctttcaatctctcttattcttcctcaccagccctctcatgtccccgggcgagcaaacaattcaaattattcaatgatgtgccttttgtccgaatgaattctaaatttccctcaagtgacaatgctattgggagaattaaagctaagttgatctctggagggggtgatctactttcctatccaaatggcaatggcattgtgataggtaaaaatctggttggtgatgaatctgttcgaattgaggtacagccgaatagaacactggcagcagacacagggctaacaagcaatgttttctctattgacaacgatgaatttgatttggacagccccacagcaggttttgcttccatttctgaggcaattgaagacattcgccagggaaagatggtagtggttgtggacgatgaagatcgagaaaatgaaggagacttgataatggcagcacagttggcaacacccgacgcaatggcttttattgtaaagcatggaactggtatagtttgtgtaagcatgaaagaggaagatctggatagattggaacttcctttgatggtgaacagtaaggacaatgatgagaaactctgtacggcattcactgtgacagtggatgctaaacatggtacaaccactggggtgtcagctcacgatagggcaactacagtcttggcccttgcgtctagagatctactccagcgatt

SEQ ID NO: 12304 - DNA, 680 bp, Glycine max
tgctgttattgaaataacagagtgggtggaagttcctagaaagaatttgaccatagagaattcaaccgtttcatcaaatgtttcagctgaatctgctgcgggtaatagttctgaagaaaacaacgaaagcgtgcaaactgatagtgggattaataagacatccaacattagttcagaggagcaagctgctgctgagcctgctacagagaaaaagctgaaaaagcggacctttagggtaccattaaagattgtagagaagataactggatttggaatgtctctatcacaagattttcttgctgaagccaaaagaaaactacaagtactagataaaaaagatgcagacagaaaaagaacagctgagttaaagaataatttagaaggatatatatatactaccaaggaaaagattgaaacgcttgaggagtttgaaaaagtttctacaagtgaggaacgccagtccttcattgagaagcttgatcaggtgcaagattggttgtatacagatggtgaagatgccaatgccacagagtttcaagagcgtctagatcagttaaaagctgttggagatccaattttcttcaggttaaaagagcttacagctcggccagcagcagttgagcatgctaataaatacattgatgagttgaaacagattgttgaggagtggaaagcaaaga

SEQ ID NO: 12305 - DNA, 1299 bp, Glycine max
cccacgcgtccggccacctcttgtgtggcctaatcttcagggaagaagttcagttggtgtcttccatatttgcacacagcattgtctatgcttttaggacctttgagcaagtttgggaggagctttgtgttgatatcaaggaaggtgtccttaacagcaaggtcacagtgccctccattagggaagccatgtctaagctcctaaaacctgaccctgagctggccaacttgatccacaacaagtgcatggggcttagcaactggtatggcctaataccagagcttttccccaatgttaagtatgttcatgggatcatgactgggtcaatggaaccttatttgagaaagccgaggcattatgctggactgttgcctttgttgacttctgactatggatcttctgaagggtggataggaacaaatgtgaaaccaacagtaccacctgaattggccacctacactgtgcttcctcaaattggctactttgaattcatccctttgagagagctagaggaaattaagggagatgctagtttcctttgtatggagcctaagcctgtggggctcactgaggtgaaagttggtgaggagtatgagattgtcatcactaatccagcaggcttgtaccggtaccgacttggtgatgtggttaaggttatggggttccataattcagctccagaaataaagttcgttcggcgtagcaatcttctgcttagcatcaacatagacaagaacacagagaaagatcttcaattggctgtggaatcagcatcacaattgttggcagaggagaaattggaagtagttgactacactagccacatagatttatccaaagagccagggcactatgtaatcttctgggaaataagtggtgaagcaagtgaagaagtgcttggtggatgctgcaactgtttggacaagtcttttgttgatgctggctacacaagctcacgcaaagtcaactgcataggtgccctcgaactccgagttgttcggagaggaacattccagaagatacttgagcattcccttgcactaggagctgctgtgagccagttcaagacatcaagatgtgtaggccctacaaacaccaaagtgttgcaaatattgaatgaaaatgttgtcaagaactatctcagtactgccttcaattgagttgtaagaatagctatatcgatctatctatctatatatagatatatttatatagttccctttctcaattgaataaaaactttgccttgtttttctacttttcatttccatgcttaattctttctgttctgcctgacac

SEQ ID NO: 12306 - DNA, 767 bp, Glycine max
gtacttgaagggtttcactgaagggacgatgattgttggggaatttgctgggagaagagttcaggaagctaagcccttgattaggaacaagcttttagaaacaggccaggctattatctacagtgaaccagagaaacgggtgatgtcaagatctggcgatgagtgtgtggtagccctcacagatcagtggtacattacatatggagaatcagaatggaagaagctagctgacgagtgcctttctaacatgaacctgtattctgatgagacacgacatggatttgagcacactttaagctggttgaaccagtgggcttgctcacgatcatttggtcttgggactcgcataccgtgggatgaacagttcctagttgagtctttatcggattccaccatttacatggcgtattacactgttgcacaccatttgcagagtggtgacatgtatggatccggcgagtctgccatcaaacctcaacaactgactgatgatgtctgggattatattttctgtggtggaccatatcccaagtcaactgatatatcatcatcccttttagaaagaatgaagcgtgagtttgaatattggtatccatttgatcttcgagtctctggtaaggatctcatccagaatcatcttaccttctgcatttacaaccatactgcaattatggccaagcatcactggcctcgtgggtttagatgcaatggacacattatgctcaattctgagaaaatgtccaagtccactggaaatctcaggactt

SEQ ID NO: 12307 - DNA, 1116 bp, Glycine max
  unsure (1)..(1116): unsure at all n locations
ttcgtccttgcaaacaattcattttcgaacgaacgtgtcacagaattctcgccttttccgaatatggcatcgcgcgtcagcattggcaatctcacttcctccgcgccgtatattaattcccctcattttcgctcacaacttaagctttccagcaactcctctttgcacaagccactcatgcgcgacaagactgtgctggtaaccggcggagccggttacatcggcacccacaccgttcttcagctcttgctcggaggttgcagaaccgtcgtcgtcgacaatctcgacaattcctccgaggtttctatccaccgagtcagggagcttgccggcgaatttgggaacaacctctcctttcacaaggtggacctacgggacagggatgcactagagcaaatttttgtttccacacaatttgatgctgtcatacactttgctggactgaaagcagtaggagaaagtgtgcaaaaacctttactatactataacaacaacttgactgggacaatcactctattggaagtcatggctgcccatggatgcaagaagctcgtgttctcttcttcagcaactgtatatggttggccaaaggaagttccatgcacagaagagttccctctgtcagcaatgaacccatatggacgaactaagcttatcattgaagaaatttgtcgtgatgtccaccgtgcagagccagattggaaaataatattgttaagatacttcaacccagttggtgcacaccccagtggttatattggggaggatcctcgtggaattccaaacaatctcatgccatttgttcagcaagtagcagttggccgacggcctgcactgacagtttttggaaatgattataatacaactgatggcactggggttcggtgattacattcatgttgttgatttagcagatgggcacattgctgcgttgcttaaactagatgatcctaatataggttgtgaggtttataacctgggaacaggaaagggaacatcagttttggagatggttagagcttttgaactggcctctggaaagaaaattccacttgcaatggcgggtcggagacctggtgatgctgaaattgtttatgcatcaacagaaaaagcggn

SEQ ID NO: 12308 - DNA, 592 bp, Glycine max
ccttcgcgtccgttcaaactttcttccaaacgaacgtgtcacaaaattctcgccttctccgaatatggcatcgcgcgtcagcattggcaaccttacctcctccgcgccgtatattaattcccctcactttcgctcaccacttaagatttccaacaacccctctctgcaaaacgcttcgcataaggtacttatgcgcgataagactgtactggtaaccggcggagccggttacatcggcagccacaccgttcttcagctcttgctcggaggtttcagagccgtcgtcctcgacaacctcgaaaattcctccgaggttgccatccacagagtcagggagctcgccggcgaatttgggaacaacctctcctttcacaaggtggacctacgggacagagctgctctagaccaaatattttcttccacacaattcgatgctgtcatacattttgctggactgaaagcagtaggagaaagtgtgcaaaaacctttactatactataacaacaacttgactgggacaatcactctattggaagtcatggctgcccatggatgcaagaagctcgtgttttcatcttcagcaactgtatat

SEQ ID NO: 12309 - DNA, 490 bp, Glycine max
aatgaacccatatggacgaactaagcttatcatttctgacagagggaactcttctatagcttggaacccatatggacgaactaagcttatcattgaagaaatgtgtcgtgatgtccaccgtgcagagccagatgggaaaagaatattgttaagatacttcaacccagtcggtgcacaccctagcggttgtattggggaggatccccgcggaattccaaacaatctcatgccatttgttcagcaagtagcagttggccgacggcctgcactgacagtttttggaaatgattataatacaactgatggcactggggtatgctctgactgacttaaacttatgcactgaaatttttccatgatgggcacattgctgcgttgcttaaactagatgatcctaatataggttgtgaggtttataacctgggaacaggaaagggaacatcagttttggagatggttcgagcttttgagatggcatctggaaagaaaa

SEQ ID NO: 12310 - DNA, 436 bp, Glycine max
ctgcacgtgtcgcacaatactcgcattgcccgaatcttggatcacgagttactagtggacatctcagttccaccgcgcctgagatccatacaacactacgacttttcacaacttaagctttccagcaactcctctttgcacaagccactcatgcgcgacaagactgtgctggtaaccggcggagccggttacatcggccacccacaccgttcttcagctcttgctcggaggttgcagaaccgtcgtcgtcgacaatctcgacaattcctccgaggtttctatccaccgagtcagggagcttgccggcgaatttgggaacaacctctcctttcacaaggtgctcctcctccttctattgcctgtttcattcaattttgatttgttcggtgcctttttctcgtaaacaaagattatttcgcttcgtggcttgtgtttt

SEQ ID NO: 12311 - DNA, 807 bp, Glycine max
ggaacatttggatatttggccccagagtactttatgcatggagttgtggatgagaaaactgatgtatttgcttttggagttttgctgttggagctcataacaggtcaccgtgctgttgattcgaatagtagacaaagtcttgtcatctgggcaaagccactgctggacacaaacaatgtaaaggatttagcagaccccagattaggagaggaatatgatcttactgaaatgaagcgcaccatgttgacggcttccatgtgtgtccaccatgcatcctccaagcggccatacatgaatcaggttgtgcttctactaaagggtgaagagacaattatagaaccaaagaaaaatttagttgcacagaaatctctcatgttagaggcatgtgacctagaagattatacttgctcaagttacttgaaggacctcaatcgccacaggcaattaatcatggagtaaactaaacaaattataactcattagtgggattttattgttttcccctatgtatatttgttgaaaggatggagtgatattttgtagcagtgtgtgtggtctaatccgaagtcacaagccaagttggcttgttatttagccttgaaatttagggagcgttactcaagaagcaaaatcatagtttttggctttggattaatgcctgagaaccactggttttcaagcaacaatgtagtgttagaaatgatgcagtagggtttgtgtaacttttttattctgcagtgccattcaacacatggatgttccacccatatgaaagtagtaaaaatgaaaaaaaaaaaaaagggcggc

SEQ ID NO: 12312 - DNA, 427 bp, Glycine max
gaacaatccaactcttttcttattgcttgttgcgttctccctcgttttcgcggccgtgtcggcctcttcggacggcggcaacgaggaaccgctgatcatgcaggtggtcgatggcggtgacgtccggctgggagcagagcaccactttttggagttcaagcgcaggttcgggaaggcgtacgattccgaggacgagcacgattacaggtacaaggtgttcaaggctaacatgcgccgcgcccgccgccaccagagtctggacccttcggcggctcacggcgttacgcgcttctccgatcttacgccgtcggagttccggaacaaggtgttgggtctgagaggtgtgaggttgcctttggacgcgaacaaggctcccattctccccactgataatcttccgagtgattttgattggagagatcacgga

SEQ ID NO: 12313 - DNA, 484 bp, Glycine max
cctgcgcctggctttggcttctgctcctttctctctcttcacacttcaatggatattctttcttgaattctcatctgggttcattccctttttcatgctttgactgaatcttcacactttcaagtagttggttgtgtggtggtacctgataaaacttaaaaaatctcttccctttttgtgtcagaaccatgggttgttgtctgagtaaaaaagggtcagagccagaagaacacattggttacagacatgttgctggtgctggaggtgctggtgtgtacaacaatcacaagagccatgaaccctttgccacccaaaccaaaccccctcctcaccaaccttaccaattacctgagaaacatgctcctcctcaggcaccttggaggcctccaccaagcccaaaacatgtccacaaccatgacacaatcactgggaagccatttgaggatgttaagcagcactacacacttgggaaggaattggggag

SEQ ID NO: 12314 - DNA, 549 bp, Glycine max
ctcgagccgtcctcctcctctgtctctctctctctcttcacacttgaatgaatattctttcttgaattctcatctgggttcattccttttctcatgcgttgacaaaatcttcacactttcaaagttggtacctgataaaacttgaaaataaatcttccctttttgtgtcacaaccatgggttgttgtatgagtaaaaaagggtcagagccagaagaacacattgtttacagacatgttgcgggtgctgggggtgctggtgtgtacaataatcacaagagccatgaacccccttctcatcaaccttacccattacctgagaagcatgccccttggaggcctccaccaagcccaaaacatgttcacaagcatgacacaatcactgggaagccatttgaggatgttaaacagcactacacacttgggaaggaattggggagaggccaattcggggtgacttatctctgcactgagaattcaactggttttcagtatgcctgcaagtccatttcaaagaggaagcttgtgagcagagacgacaaggaggacat

SEQ ID NO: 12315 - DNA, 764 bp, Glycine max
cggtctaaaatcatttcttatattaggaggttccttgatgaccttgatttcttggaggttgaaacaccaatgatgaacatgattgctggtggagctgcagcccgtccatttgtaactcatcacaatgatcttaacatgaggttattcatgaggattgctccagaactgtatcttaaggagttggttgttggtggactggatcgtgtgtatgaaattggtaaacaatttaggaatgagggcatagatttgacccataatcctgagtttactacctgtgagttctatatggcttataaggactacaacgacttaatggatataacagagcaaatgttgagtggtatggttaaggaacttaccaaaggcagctataaaatcaagtatcatgctgatgggattgacaaggaacctattgaaattgactttactcctccttttagaaggattgacatgattgatgaattagagaaggtggcaggcctaagtattcccaaagacttgtcgagtgaggaagctaatcaatatttgaaggacacatgcttgaagtatgagatcaaatgtcctccccctgagacaactgctcgtttgttggataaacttgttggtcactttttggaagagacgtgtgtaaatcctacattcatcataaaccaccctgagatcatgagtcctttagcaaagtggcacagatcaaaacgaggcctgactgaacgttttgaattgtttgttaataagcatgaactttgcaatgcatatactgaatt

SEQ ID NO: 12316 - DNA, 726 bp, Glycine max
cggctcgacccacgacgtccgcggacgcgtgggaaaaaataatggcaaggaaggtgggtttgaattttatagggtgctccatcgttgcaatggttttcataattggtgtggctgaagcaacagattatatcgttggtgaaggcttcggatggagcgttccctccaatgagagcttttatacagactgggctagcaccaagagattcttcgttggtgacaatctcattttcaacatcagcggagagcattcggtgggaattagaacagaggctacttattatgagaattgcaacaccagcttattaactggtttcacgttcataggcgtcaatgggagtaattcgatgtttcgacataatattattcctccaactgggcctcgctatttcctctgcaccgttggaaatcactgtgaaagaggccagaagtttagtatcagcgttgagtctcatcctgattccgctgctcctactacactgtcattcagaatcttatctgcatttctctctagcttggctgtgtatttcttcactgttactagttagttactttgtcgtgtaactctacgaggattttgcattcttgttcctagcaattctttgaacatattcactatagatattataggattgctgggttgtttgtttcaataaatgttgtactgctacttacaacatactattgtaactttaaatttaataaagacgttacttccaattattttgg

SEQ ID NO: 12317 - DNA, 631 bp, Glycine max
cccacgcgtccgcccacgcgtccgcccactcgtccgatataactcaccaacaaccgcaaacacaaacacagacccttcccttccttcctccctccctcattcccttcttcaatttcatcaacacaaccatcaatttcatcaaccatcgcataataatagtattatcatgatagccgtggcccgaaaggacatggaccggatcaagggcccgtggagcccggaggaggacgaggcccttcagaagcttgtggagcggcacgggcccagaaactggtcgctcatcagcaggtccattccgggccggtctgggaagtcatgcaggcttcggtggtgcaaccagctgtcgccccaggtcgagcaccgggccttcacaccggaagaggacgagaccattattcgggcccatgcccggtttggtaacaagtgggccaccattgcgcgcctcctctcgggccgcaccgataacgccatcaagaatcactggaactcaaccctaaaacgcaagtgcgcgttcttcatgatggcgggtgatgaagccgtcgccgtgagtccgaggccgctcaagcgatccttcagcgccggcgcggcggtgcctcctaccggaagcccctccggatccgatttcagcgag

SEQ ID NO: 12318 - DNA, 753 bp, Glycine max
ctcacgcgtccgcccacgcgtccgctcagccacagccacaacacacaaacacaaacccttcgttcctctctcgttcccttcttcaattcgatcaaacacagaatagtacttttttattatgatggccgtggcccgaaaggaaatggaccggatcaagggcccgtggagcccggaggaggacgaggctcttcagaagctcgtggagcggcatgggcccagaaactggtccctcatcagcaggtccattccgggccggtctgggaaatcgtgcaggctccgatggtgcaaccagctgtcgccacaggtcgagcaccgggccttcacgccggaagaggacgagaccataattagggcccatgctcggttcggtgacaagtgggccaccatagcccgcctcctctcgggccgcaccgataacgccatcaagaatcactggaactcaacgcttaaacgcaagtgcgcgtccttcatgaccgccgatgaagccgccgccggcggcttcagcccgaggccgctcaagcgatcgttcagcgccggcacggcggtgcctcctccaggaagcccctcaggatccgacgtgagcgagtccagcgctgctcccggcgtggtctctgtctctgtctctccttcacaagtgtttcgccccgtgccggttcggccggttgtcgaaacggcgtcgttgcaagacgacgccgatgccgactccgaggatgctggacctactacctcgctgtcgctggctctttccggggt

SEQ ID NO: 12319 - DNA, 442 bp, Glycine max
gcattttatagccaaaatctattccagaaggatatcttcagtgcaattggttggatacctgctgcaaaaaccatgaatgccattgacgagggttacagaattgcaagggcacaaacacttattgccctatgtagtacaggtcctggctactggttcacagtggctctcattgacaagattggaagatttgctatccaattgatgggattcttcttcatgactgccttcatgtttgctcttgccattccttatgaccactggactcatatagataaccggataggattcgtggtgagctattcattgaccttcttctttgcaaatttcgcacctaatgccaccacattcgtcgtgccggcagagattttcccagctagattccgatctacttgccatggaatctcatcagcattcgagaagctcggagctattgctggtgcat

SEQ ID NO: 12320 - DNA, 489 bp, Glycine max
tttcacgcgtccgtgcaacaccagcatccatggcaagtaggaggtgtctgcgagcgttaacgcaaaaaaacgacaccgtttctcttccgaaacgcatcctctctccgctcactcaccgtgcctccgtttcccaacgccaacgcttcttcccccgttttcaccgtacgcgcctctgtcttcgcgcaatggccccacctccgctatttctcttccgagaaaaaagacgaccacagcgacgaagacgatgatggcgatgaggattacgatgatgaagaagaggattatgttgatgacgacgacgatgatgacgtccctgtgtcgagagggaaaaaagtgtacactgcggaggagaaggaagcggaagccgcggcaattgggtacagagtagtgggtccccttcaaaaggacgaagatagccgttttaagccttacgagcctggttttgctgttgttcagattggttcgcaccagtttaaagtaagcaaccga

SEQ ID NO: 12321 - DNA, 698 bp, Glycine max
cggctcgagtgcatgtgctgcagtttgccagtcttggaggaatatgtgcaaggacatcgttacgagcccagagttttgtggcaaacttacattccctgtgtccttgaagcagcctgggccacgggatggaatcattcaatgttttatcaaaagagataaatctaatttaacataccacctattcctttgtctcagccctgctttgttagttgaaaatggaaaattcctcctttctgctaagaggacaaggagaacaacttacacagagtacgttatttccatggatgctgacaacatctctagatccagtaacacttacattggaaagctgagatcaaattttcttggtacaagattcattatatgcgatacacagcctccatactcttctgcccatatatgccctcctatgactgggaagacgagccgtagattttattccaaaaaggtctcgcctaaggtcccatctgggagttacaacatagctcaggtaacatatgaattaaatgtgcttggaactcgaggcccaagaaagatgcactgcgttatgcattcaataccagcttcagcactagatgcaggtggcactgttcctggccagccagagcttcttccccgttccctggaggactcgtttcggagcatctcgttttcaaagtctctagatcattctattgagttcagcagttcgcgatttt

SEQ ID NO: 12322 - DNA, 778 bp, Glycine max
cccacgcgtccgaaaatattttcttctatctcatcctttcttttagttttatttttatttttttatcttgggtaaaaaaaatcatgggtgttttcacttctgaaagcgaacacgtttcccccgtctctgctgcaaaattatacaaagctattgtcctagatgccagcaatgtcttcccaaaagcattgccaaatttcattaagagcgtagaaaccattgaaggagatggagggccaggaaccattaagaagcttactcttgctgaaggtttaggttatgtgaagcaccacgtagatgcaattgacacagaaaactatgtgtacaactatagtgtgattgaaggcagtgcattgtcggagccattggagaagatatgttatgagtacaaactggtggcaaccccagatggaggatccattgtgaagtccacaagcaaatactataccaaaggtgatgagcaactcgccgaagaatatgtgaagactggcaaggagagatctgcaggtttcaccaaggctattgtggatttcattcaggctaatcctgattacaactaattaagtcaccaattataattatgtctcagttttattaattatggtcattttgtgttaatttttttccttcttgtctgtgttgctttaatttccaataaattattgttgactttgcttatgagaaaagttgagatatacagaggaaaataatattgacgcttgacatatcgactgggcttatgatcttagtcacgttggttcatcctcaagacctgtctttt

SEQ ID NO: 12323 - DNA, 473 bp, Glycine max
atttctactttctttagctgccaaacgaaacttcccttgttcctgttcctgtgttctccttgcagctccaaaattctatgtggtggtgcagatggtgatgattactgcttggatcactgaccttttcgcttgtatgggtggttgttttggatgctgtgtgaaacccacaccaattattgccgtggatgagcctgcaaagggactaagaattcaggggcagacagtaagaaaaccacacatatcagatggtttctggagttcaagcacttgtgatctggataacagcaacattcaatctcagagaagtatctcgtctgtcagtacattaaatcaaattctctatcatagcggtggaacttctaccccaggcgccaatcctgaatttgtaaacccaggtcttcttctttggaatgagagcaggcttcagtgggttggaagtggcaaatctaggaagcataaccaacaaaaaagag

SEQ ID NO: 12324 - DNA, 774 bp, Glycine max
aacaaattgaagcactatcagaagaagaacgtggtcaaattatgccgactttgtcagagagattaaagctttcaaagttgcagccaatttccacagatggcatggacatgggtacagaaggtggtggtgctgctggactgaaggttgaggagaaaaaggcagagaaaacagcttttgatgtgaagttggagaaatttgatgctgctgcaaagatcaaggtgattaaggaggtaagagcatttaccaacctaggattgaaagaggccaaagatcttgttgaaaaggttccagttgtgctaaaacaaggagtcacaaaagaggaggcaaatgaaataatagaaaaaataaaagctgctggaggagttgcagtcatggagtagaattttgattgttggttgagatcacaattcttcatttccaatatgtttttaagttgccatacgcgtggtgaatgactgttggaagaaaattataaaggcacgaagcagatttaagggttaataaccaattgttgaataatctatttgaatcaattttttcttagttgagttttctggttaattactgtatcacttagaactgctgtgttggtttgacatttgtaacactcgttttgcctatcctctgctcaaatattttcttccagagtgaaatatttctgggatcatagggaaaattactttatggaatttcttttagttatttgagattcctgtgcttgatatactaaacttggtggtcttctttggactggtgcctggtggacctcttatg

SEQ ID NO: 12325 - DNA, 438 bp, Glycine max
attgtttccttttgagacccgacgacagtacttttattctaccgcatttgggttatctcgtgcactgtatcgacttcagcagcagcagggtgctgatggtcatggatcaacaaatgaaagagaggtcagggttgggagattgcagcgtcaaaaggttcgtgtctctcgaaatcgcattttggattctgctgctaaagtgatggagttgtattctagtcaaaaggctgtacttgaagtagaatattttggtgaagttggcaccggtctgggtcccacccttgagttttatacaattctaagtcatgatttgcaaaaagttggactgcaaatgtggagatcctagtcttcagacaaacatcaaatggaaattgatggagatgaaaagaacaagaacagtgcaagctccgggcctaatttggctggagatggggaacttgt

SEQ ID NO: 12326 - DNA, 647 bp, Glycine max
atttttcttctttcggactcagcatcgtccccctccactggcgcaaccccaagaccattctcccgatggccctctccattaacaaccatccgcctcgacgactccgtctcctcctcatccgcgtcactctcctcctcatcatcagcatcgacaacgccatcagcaccctcactgtgcccattgttaatcccaaagggccgatcctcctcagcgccgtcaatctcgccgctcccagggtcatcctcttcctcctcctcctcctcatcctcctcctcgtcgtcactctcgggcctctcgttctcctccgcgtccatcttgtccaagtacttcaacgacttgatcaacccgaaaaccctagatcgatagtccttcacgcgcgtcacggggcactcgtacagatccagcgacaccagcttcaactgcgcgagcggcgcgagatcctcaatgtactgaatccgattgttcgacaaatcgaggtcgcgcagcgaatccagccccgcctgcacgagaaactccagcccgccggcgatccggttgtcggagaggttcagcttctgcaaattccacagccgcggaaactgctccagcgacgaaacgccgacgttcgctatcgataggtgctgcaggttctggaaccgcaccagaag

SEQ ID NO: 12327 - DNA, 1025 bp, Glycine max
agttagaattatatataaatataatggcggaatttacatccaccaccactaacactaacagtaacagcggtctcaggttgaaagccaaagtagccatagtcaccggaggtgcaagtggcatcggcgaacgacggcgcgtgtgttcgcggagcaaggcgcgcgtatggtggtgctcgcagacatccaagacgagcttgggaatcaggtggctgcgtccattggaacccagcggtgcacctacatccactgcgacgtggcagacgaagaacaagttcaaaacctcgtccaatcaacggtcgacgcttacggacaagtggacataatgttcagcaacgctgggatccttagtccctcccaacagacggtgcccgaactggacatgtcccaactagacaggctgttcgcggtcaacgtacggggaatggcggcgtgcgtgaaacacgcggcgcgtgcgatgttggaggggcgcgtgaggggaagcatagtgtgcacggcgagcgtgggtgggagccacggtgggccaaatgcgacggactacataatgtcgaagcacgcggtgttggggttgatgcgttcggcgagcgtgcagcttgcggaacacgggataagagtgaactgcgtctcacccaatgggttggcaacgccgttgacttgtaaacagcgagggatgagcgaggaggaggggcaagaggtttaccggaaatacgcgagattgcaaggagtggtgctcacgcccaaacacgtggcagacgccgtgttgtttctcgtctctgatgactccgcctttgtcactgcccttgatcttagggtcgacggtggctttactttgcctagtatatcaatttcaaattctatactattgtaagacattgaagctcttgccaatttatgagcaacaacattggcttatatattgagttttagcaataatgtgacatgagcctacaatttcaaatctgagttggttgtaacacctctttcacttctggcttgcaattaattaacttcattgatcatgttatggt

SEQ ID NO: 12328 - DNA, 1612 bp, Glycine max
cccacgcgtccgcccacgcgttcggactataacaacagccaagcgcattggcctatatatatcaacacaaaaactctttgattcagaaacatacatatatattcacacaaatatccatttatatatacatatatatagttctatatggcaatgacaacggtggtgtttgtcttgtgcatctttgtagtgttgaatgcaagtgcctctgatgccactcgcttattgctgaacaaaactgcaacaggtaacgtgtccagagagaagattgagagatacttacttgaaaatggactcggccagacaccccccatgggatggaatagctggaaccactttggctgtgatattaatgaaagtttaattcgagaaacagctgatgcattggtgtcatcgggccttgctgctttgggatacaaatacattaatttagatgattgttgggccgaacttaatcgagaccatcagggaaatatggttcccaaggcttcaacatttccttcaggaattaaggctctggctcattatgttcatgggaaaggtttgaagttggggatatattcagatgcaggaaatcaaacttgcagtaaacgtatgcctggatcactaggacacgaagaacaagatgcaaaaacatttgcttcttggggagttgactacttgaagtatgataattgtgaaaataatggtatattagccacagaaaggtatccaccaatgagtgaagctttgttaaaaactggaaggccaatcttcttctctatgtgtgaatggggatggcaagacccagcaacttgggccaaaactgtgggaaatagttggagaacaacaggggatattgaagataactggaatagtatgacttccatagcagatgcaaatgacagatgggcatcttatgctggaccgggaggatggaatgatcctgatatgctggaagttggaaatggagggatgaccacagaagaatatcgtgcccatttcagcatatgggctttagctaaggctccgttattggttggttgtgatattcaagcaatggataataccacatatgaactgataagcaaccgagaagttgttgcagtaaatcaagacaaacttggaatacagggaaagaaggtgaaaaacaataatggtttggaggtgtggacaggtcctcttcgtggtaacaaggtagcagtgatcttatggaacagaagttcatcaaatgcaacagtgactgcatgttggtctgacattggcttggaaccaggaactatagttgatgcaagagatttatgggagcactcaacgcaaacatcggtttcaggaaaaatatctgctgaactagattcacatgcttgtaagatgtatgtcctgactcccagaaggtattaatttcgagtggcagagaagaagataaacacacaactatattggcaaaccatttaaagctgcaggaaccacaaataaagcaaacagattattttttttcaattagaaagacaagtataatgtataagactataagttatacttaatgtataagtctttgaccttccggttgtatttgcaatttggttgcactgaggaccactttattttaaggaaataagtttttcatgtttcaaaa

SEQ ID NO: 12329 - DNA, 995 bp, Glycine max
ggcaatggattagtaaaaccaaagcaccctgatttcaaacgcaaggatcgcaattctctctggcttggcaaggatgaaaagtggggttttgcctaaattggaaggacttcaatttgatgttccaactgctatatccaaaaaaggtgatggtggtgagccctgtaatgatttggtgcaaaactatgctaactggtgggataatagattacataagaggaatgcaaaagctcccgatttcaagcacaaagaaaccggtaaagggttgtggcttgattcttcatcagagtgggttttggaaaaattgccgccacctctgaagcctaaacaaagtgtagatactgaaaggacactggtttcataagcaatggacagtgaagtagaaaatggagtcattctctttgttacacttccatataactttgcccgtgagaagttggctgctgagtatatttgtagagaactacgtgaggcagatgaaacaaatttgcttcaggaagaacgttgtctgattttcttttttttacttggtgaatcgaccctttttttaatacaatgtgtggatattgcttactagatactccatagtagtttatgattttcataatttatttagtttaatgtgtttttactcattttcaattgatagaagaatgaaggtgctgattgtcacatgctgaaaatgaataaggctctgtttggaaaaacttctcaataagcacttatagaagaagaaaataagaagggatggcaagacccagcaacttgggccaaaactctgggaaatagttggagaacaacaggggatattgaagatacctggaattggtgagcatactcacattcgtgcttttattggacacttgacaaagatattggcagaacaaagctactatttaggttgtgtgaaagcagaaggatctacatacaacatgtgtgttgttctgcttttatttaatgtaacatcttatgtggatgcaagatctaaatttaattat

SEQ ID NO: 12330 - DNA, 444 bp, Glycine max
gactctaggattgctctggttggaccaatggagctgggaagagtacgttactgaagctaatgactggtgatttggaacctctagatggcatggttcgacgccacaatcaccttcggattgcacaatttcaccagcacttggctgagaagctagacttggaaatgtctgccctccagtatatgataaaagaataccctggaaacgaggaggagaggatgagagcagccattgggaaatttggactgtctggcaaagcgcaggtcatgcctatgaagaatttatccgatgggcagaggagccgtgtgatattcgcatggttagcttatagacagcctcacctgctacttttggatgagccaacgaaccatttggatatagaaacaattgactcattggctgaggcattgaatgaatgggatggtggcatggtgcttttagccatga

SEQ ID NO: 12331 - DNA, 1012 bp, Glycine max
agaacatgttttttctggggcgttagctggtatatgtgtcagcctttgtctgcatcctgttgacacaattaagacagtcattcaagcatgccgtgctgaacacaggtccatcttttacattgggaagtcaattgtttctgatagaggtttgctcgggccgtcccgtggaattaccacaaacattgcatgttcagctccaatttctgcagtttatactttctcctatgaatcagttaacgcagctttgcttcctcatcttccaaaggagtattgttcttttgcccattgcgtgggaagtgttgtgcaagcattgccacctctttcatttttactcccagtgagcgaataaagcagcagatgcaagttggttctcattatcgcaactgctgggatgtattggttggaattatcagaaatggtggtttttcctccctatatgcaggttggagagctgtactattccggaatgttccacattcaattatcaagttttacacatatgaaagcttgaagcaagtgatgccatctagtattcaacccaactcgtttaagactgtagtgtgtggaggattagctggatctacggctgctttattcacgactccttttgatgtgatcaagactagattacagacacagattcctgggtctgcaaatcaatatgatagtgtgctccatgccctttacaaaattagtaagagtgaaggattgaagggcctgtacagggggttgattccgaggttgattatgtacatgtctcaaggatcactgttctttgcttcatatgaatttttcaagaggacattttctctggaagcaccatatcccactgatttatgcattcaggacaatgatgggaatgctgaagagtgaagacagcaaaaactttgaattaacaggtccatcgttgggttttccagcagcagtttccccaagtcctgagcattcttgataactagatagtgtgcggaagaaaagtttaattgtgccacaagatgtaagcagtttcata

SEQ ID NO: 12332 - DNA, 562 bp, Glycine max
ggcggctactttagaatcagccttcatcctcttcgcacctcaacggttctccaatagccatcgtttctctgcaaaagcaccgatctccatcaagctccatgcttccacctcccttttcttctcttccaagtcctccttcaaaacgggaagactctgcttccagttatgctccactttgcaagaggtagcagcaacagaagaaacacctgagcctatcgcaaccaacagacaacgtaaagaagctctacgtggttaacttgtcttggtctctgacggcggcagacatcactgacctctttgcccaatgcggaaccgtaactgacgtcgagataataaagagcaaagacgggaggagcaagggctatgccttcgttactatggcttccggggaagaggctcaggctgctgttgataaatttgactcttatgaattatcaggacggataataagggtagaacttgcaaagagattcaaaaaacctccttctcctccacctcctcaaggtccccgtcctggagagccacgtcatgtattttatgcatccaaccttgcatggaaagc

SEQ ID NO: 12333 - DNA, 480 bp, Glycine max
ggcggtgaaagtgacagaggaggcatattcacccatcacaattacgcacatcccaagcggagaccagcacgaagaacaaaactagctcggttggaccaattcgaagcgaacttagacggagagagtgacagagaatgatgttggacggaaccgaagacgaagagaagtttctcgccgccggaatcgccggccttcagcagaattccttctacatgcaccgtgcattggactcgaacaatctcagggatgctttgaagtattcggctcagatgctctccgagctcaggacttccaagctttctcctcacaagtactacgaactatacatgcgcgcctttgatcagttaaggaagctggagatgttctttgaggaagagactcgtcgcggttgctccattattgatctttatgaactcgtccagcacgccggcaacattttgccccgattgtaccttctctgtacagtaggatcagtataca

SEQ ID NO: 12334 - DNA, 416 bp, Glycine max
ggcatattctcccttctcccaagcggagaccagcacgaagaactatactagctcggtcggaccggaccggtagttaagagagggatcgaattcgaagcgaagttagacggagaaagcgagaatgatgttggacggaaccgaagacgaagagaagtttctcgccgccggaatcgccggccttcagcagaattccttctacatgcaccgtgcattggactcgaacaatctcagggacgctttgaagtattcggctcagatgctctccgagctcaggacttccaagctttcgcctcacaagtactacgaactatacatgcgcgcctttgatcagttaaggaagctggagatgttcttcgaggaagagactcgtcgcggttgctccattattgatctttatgaactcgtccaagacgccg

SEQ ID NO: 12335 - DNA, 1007 bp, Glycine max
ggccgatgcgttggtgcagggctccattgttggctccgcgggcgagctgcccgataggtatatgcaagctgtcatcgccggcactgctgcttctggagtgcttgtttctgccctgaggatatttacaaaagctgtttacccacaagatgcctctggcctgcaaaagagtgcaaatctctacttctctgtatcaattgtgattgtcttcgtatgcatggttttctacaacatggtgcacaaacttcctgtgatgaagtactataaggaacttaaggttgaggcagtcactgcaaatgaagacaatggtcccctgactggacctgtctggaggtcaactgtatggaatattgtgcggagaatcaggtggtacgggtttggcattgtgctcatttatgttgtgactctggcaatatttcctggttacattacagaggatgttcactctcaaattcttaaggattggtatccaattctcctaattgctggctataatgtgtttgatcttgttggcaagtgtctgactgcagtttacctcctacagaatgcaaaagttgccataggtggttgcatagcaagattgttgtttttccctctcttcttaggttgcttgcatggtcccaaattcttccggactgagattcccgtgacaatactgacttgcctgttagggcttactaatggctacctaaccagtgcattgatgattctgattcctaaaattgtaatgttgcagcatgcagagactgcagggattgtgagtgtattattcttagtttttggtctagctgctgggtctgttatagcttggttttgggtcatctgaccaagcaatttgtgttaatttgggaacttcgatacgtgtcttgtggcttcactcaatcagaagtcaaaactgggatgaatttccttcatttgtttcctgaaaatgtggaaatttgtaagcttatatgttgatataataatgttatttgtcaattctaatgaaaaaaaaaaaaaaaaggggggcc

SEQ ID NO: 12336 - DNA, 1282 bp, Glycine max
ctcgaccgaatcggttcgagcggtctcgagcggctcgagcggcacgagcggctcgaggtaccacttgcacaacaaattgacaaggtcaagcgagcactaggggactatcttggtgtcaaggttcatgcttgtgttagtgggaccagtgttcgtgaagatcaacgcatcctctcaagtggggttcatgttgttgttggtactcctggacgtgtatttgacatgctgcgcaggcaatcattgcgctctgataacatcaggatgtttgtattggatgaggcagatgagatgctctctcgaggtttcaaggatcagatctatgatatttttcagctgctgccacctaagatccaggttggggttttctctgccacaatgcctcctgaagccctggaaatcacaaggaagtttatgaacaaacctgtgaggattctagtaaaacgtgatgagcttaccttggaggggatcaagcaattttttgtcaatgtagacaaggaggactggaagctcgagacactatgtgatctttatgaaactttggcaatcacccagagtgttatctttgtgaacaccagacgcaaggtagattggctgacagacaaaatgcggagtcgtgatcacacagtttcagccactcatggagatatggaccaaaacacatgggatatcatcatgcgggaattccgttctgggtcctcccgtgttcttattaccacagatcttttggcccgtggtattgatgtccaacaagtctcacttgttataaattatgatctgccaactcagccagagaactatctccatcttattggtcgtaggacggtttgggagaaagggtgttgctatcaattttgtgactggggatgatgaaaggatgctgtttgacatccaaaagttttataatgtgcagattgaggagctgccagccaatgtagccgatctcatttgatttggtcttcccatcattggtatgctttttgttatggaggccgctgtcattattttatttttcacggcccagggcctttctctagcaagacttgaacttaaccccaaaccggtgatttgaatttgccattcttctctctaattttgggtctagcagaatgcgttgttgcaattttgttgcttgcttgtttgtttgtcttattactaaagattgtagattgctgctttctctttctctgtgttttgttttaatatccgtgaggtggttctgtaaatttgaaacttgtttaacgttacgttggaaatatactggatttattttcattatcaccccgtt

SEQ ID NO: 12337 - DNA, 707 bp, Glycine max
ctctccgacgccttctctgttacgtcctcctctcacagccacagccacagccacaaccacaaccacaaccacaacccttcgagtttcgagaaccctaaccccacaaccccctctcacaaactcactctttttcatcgttcgataattcgaacttcctccatctttcccgaagtttgctatcatggctgggttggcgccagaaggatcacaatttgatgctcgtcaatatgatgctaagatgaatgagttacttggaactgatgggcaagatttttttacttcttatgacgaagtttgtgaaagctttgatgctatgggattgcaggagaaccttctgaggggtatttatgcatatggttttgagaagccctctgcaattcaacaaagggggattgttcctttctgcaaggggcttgatgttattcagcaagcacaatctggaactggaaaaactgctaccttttgttctggagttttgcagcagcttgattacagcttagtagaatgccaggcactggttcttgctcccactcgtgaacttgcacaacaaattgaaaaggtcatgcgagcactaggggactatcttggtgtcaaggttcatgcttgtgttggtgggaccagtgttcgtgaagatcaacgcatcctctcaagtggggttcatgttgttgttggtactcctggacgtgtatttgacatgctgcgcaggc

SEQ ID NO: 12338 - DNA, 508 bp, Glycine max
gggctaaagatgatcttggaataggaacaaaaattccaagattgcatcttttctaacaaaggaaattgccaaaagattgcctcgcccatcagtcagttgatgtagccagatagcagatcaggaagggatctgcattagctttggatccttcaaaactatatagtgtatggattgtgttttatgtaaattgtgattagatatttatgtggtcgctttgcatcaacctgtaataataatatcctggaggccatgtcacatagatgatgcgtatgacgctatgctttgtgagacccacacatacgagtcgtgtctgttatgatttcatatcccttgacttgtctcttattgattggtatgcctaattaaggctataatatcaatgatgccaagtgagacgcccatgcatttggatttggttgttacagaccatgctttgtgagaaccactaatcaatgctaaattgaacatatttggatgttggtggttttataaatttacattgcgtctt

SEQ ID NO: 12339 - DNA, 534 bp, Glycine max
gtgtgaacgagtgtagaagaagatgatgaggatgatgaggattttaacagtgatgatagcattgatgaaggaatggaaataattgcaaaagaatatggagttaaaaggtatggttggcttgtttacatggataagaaggctaaggaggaagaaaaaaggcaaaaagagttgatcaaaggtgatcctgcaattaggaagctgagtcgtaaggaaagaaggaaggcttctcagattgaaagggagagagagagagaagccacacggatatctggaactcgtgtgctgcatcatgatccctaccggtggaaaatattgatattttcatccttcagattgagcgaagaatatatgatattgtgctccttctaacgtatgggattgctgattattcttccttgccactcataatgttgcactcaatatatatatatgcagggaaacaaggcaaagtcctacatatgaagcctattctcgatctagaaggtcaaggtctccgttgcggtcatactctccgtcgcattcaaggcgttattc

SEQ ID NO: 12340 - DNA, 3009 bp, Glycine max
ttttagttttttcatttctggcaccagcaacaagagtctctacttgtgagattttcttttcattttccgtcgtagttcaatcccctttcgttcctcacttttagggtttccaatttctccgatggcgcccgatcctaatcgcgccggcactagcgccaggccaacgccgccaaagacgacgccgtcgccaaaaagaaggtcgaaaacgaagatctgtccgatgaggatttggcgctgaagcagcaattggagttgtacgtggagagggttcaggatcctgaccagggattgcagaaggttgcactcgagagcatgaggcaagaaattcgaacttccacgagctctatgacttcggttcctaagccgttgaagttccttcgccctcattatggcactcttaagacctattatgaaactatggtggagtctgatttgaagaagtacctggcggatatattgtcggttttggcactcacaatgtctgctgaaggagaacgagaaagcctcaagtacagattattgggttccgagggtgacattggttcctggggccacgagtatgttaggaatctagctggagaaattgctcaggaatacacaaaacgacagagtgaagaggcccccatagatgatctcatggaacttgtgcaacaaattgttgcttttcacatgaagcataatgcagaacctgaagctgttgatcttttgatggaggttgaagatctggatatgttgagtggacatgttgacaaaacaaattttaaaaggacttgcctatatctcaccagttctgcaagatacctcccaggaccagatgatatgctagttttggacattgcatattcaatttacaaacaatttgaagaatatccaaatgcactccaaattgcattgttcatggataacatgcagcacgtgagggaggtgttcacctcttgtaatgatgtgctgcggaagaagcaattctgttacatgcttgcacgtcatggaattacttttgagcttgatgagaagatggtttcagacgatgaggacagagaattgttgcaggaaatcataaacaattctaagttaagtgaaggatatctcacccttgctcgtgatattgaagtcatggagcccaagtcccctgaggatatatacaaggcacatttgcttgatggccgggctagtgctggtgcaagtgttgattcagctagacagaaccttgctgcaacttttgttaatgcatttgtaaatgctggctttggtcaggataaattaatgactgttccatcagattcttcaagcagtgcttcttctggaaattggcttttcaaaaataaggaacatgggaagactagtgctgcagctagtctgggtatgattttactctgggatgttgactcgggacttgctcaaattgacaagtacttccatagtaatgataatcatgtcattgctggtgcattactgggagttggaattgtgaattgtagtatcaagaatgactgtgatcctgcaatggcacttctaggtgactatatagataaagaagacacttcaatcaggattggtgcaattatgggtttgggaattgcatatgctggttcccagaatgagcagttacgggagaaattgacaggtgtactgaacgattctaaagcttcacttgaggtgcttgcatttgctgctatttctttgggcttgatctatgtgggttcttgcaatgaagaaattgctcaagcaattatatatacactaatggaccggagcgagtcagagttgggagagccccttacacgacttttacctctcggtctgggtcttctatatcttggaaagcaggacagtgttgaggcaactgccgaagtttcaaagactttcaatgaaaaaattagaaagtactgtgacatgacactcttatcatgtgcctatgctggaactggaaatgttctcaaggttcaaaatctgttgggtcattgttcacaacatcttgataaaggtgaaactcaccagggtcctgctgtgcttggaattgctatggtagctatggctgaagaattgggacttgagatggcaattcgatcattagaacatcttctacaatatggagagcagaatattcgccgagcagttcctttggcccttggtctactctgtatatcaaatccaaaggtcaatgttatggataccttaagcagacttagccatgatactgattcggaagtagctatggcggctgttatctccttgggtctgataggtgctggaacgaacaatgctcgaattgctggcatgcttcgcaatctttcaagttattactacaaggataccagccttctattctgcgtgcggattgcccaaggtcttgtacatttgggaaagggcttattaacacttaatccatatcattctgatcgcttcttactgtcaccgacagcacttgctggattaattaccatgttgcacgcatgcctagacatgaaagctattgtgttgggaaaatatcactatgttctctacttcctcgttttggcaatgcagccaaggatgttgttgactgtggatgagaacttgaagcctctgtcagtgcctgttcgtgttggacaagccgtagatgttgttggacaagcaggtcgtccgaaaacaatcactggctttcagacccactccacccctgttctcctggctgctggggacagggctgagctggcaacggaaaaatacattcccctatcaccaattcttgaaggtttcgtaattttgaaggagaatccagattacagggaagagtgagaggaaccacggtagtgatgcttttttcttttgttccaagtgtctgaacagtagttagttaaaatgtatttgaaattgtgccaaaatgtagaagaaattatttttaaaatcatttcttcgtttggatagaaagatgatcagtgaatcctctagctctcgacagtttttaatttctattgatccgggagcataatcttgcacgagtactcaaccatgaaatatcgattgatt

SEQ ID NO: 12341 - DNA, 514 bp, Glycine max
acgacagaaggggacagaacgaagctgctatcgataacatatttcacttgagacagttatctttatctacgcaagagaagaatagaaaatggatatcaggttgatggatttggactctccattgttcaacactctgcaccgaatcatggatctgacagaggacgcagagaagaacttgaacgctccgacgcggacatacgtgcgcgacgcgaaggcaatggctgcgactcctgcggacgtgaaggagtaccctaactactacgtgttcgtgatcgacatgccaggcctgaaatccggggacattaaggtgcaggtggaggatgacaacgtgcttctgataagcggcgagaggaagagggaggaggataaagagaaagaaggggctaagtatttgaggatggagagaagggttggcaagttcatgaggaagttcacgcttcccgagaatgccaacaccgatgctatctctgccgtctgccaagacggtgtgctcactgtcactgtcaacaagctg

SEQ ID NO: 12342 - DNA, 1540 bp, Glycine max
gttctcagtttacaataacgtagaggtagtggccaataataatattgtgatggagggtggaagtggagataaggtggcgggagctgaagaagaaccaatcacaacttctgtccctgagagggtacaagtaggtaactctcctatatataagatagagaggaaattgggtaagggtggttttggtcaagtttatgttggccggaggttaagtggtggctctgatcgaacaggtcctgatgcggttgaggttgcacttaagtttgagcacagaaacagcaaaggttgcaactatgggcctccttatgagtggcaagtatacagcactctgaatggctgttatggcattccctgggttcattacaagggtcggcaaggagatttctacattttggtcatggacatgcttgggcccagtctttgggatgtatggaattctgttggtcaacaaatgtcaccaaatatggttgcgtgcattgcagtagaggcaatatcaattcttgagaagctccacttgaaagggtttgtgcatggagatgtgaaacctgaaaactttttgcttggtcaacctggatcagctgaagataagaagttatatcttattgatcttggtctggcttctagatggaaggatgcatcatctggtctacatgttgattatgatcagagacctgatatattcaggggaacaataaggtatgctagtgtacatgcacatttaggtaggactggaagtcgaagggatgaccttgagtcactggcatacacactagtatttctcataaaagggagattaccttggcagggttatcagggtgacaataaaagttttcttgtttgtaagaagaaaatggccacttccccggagttgatgtgctgctttgttcctgctccatttaagcagtttcttgaagctgttactaatatgagatttgatgaggagcccaattatgccaagcttatatcactttttgaaagcttgattgaaccatgcactccgttgagacctattagaatagatggagctttaaaggttggccaaaagcgaggaaggatgcttataaatctggaagaagatgagcaacctaagaagaaagtgcgattggggagtcctgctactcagtggatatcagtgtataatgctcgccgtcccatgaagcagagatatcactataatgttgcagacactaggctacggcagcatgtagacaagggtattgaggatgggttgtatataagctgtgtggcctctgcagcaaatctgtgggctctaatcatggatgcaggaacaggtttttcttcacaagtttatgagttatccccggccttcctgcacatggactggattatggagcagtgggagaaaaattactatatcagttcaatagctggcgcagttaatggaagttccttggttgtcatgtccaaaggaactccttacacgcagcagtcctacaaagtgagtgaatcatttcctttcaaatggataaacaagaagtggaaagaaggattccatgttacctcaatgactactgctggcagt

SEQ ID NO: 12343 - DNA, 679 bp, Glycine max
tgtgaactggccaaaggaaaaccttaaactgtctattcatactcctgtcagttttgagcatgactttgttgaagaagaaaatgccactgagcctagagactcctccaacaagcttctggtgggacaacttccaaattcagaacatggaaatacagtttggaatgctaaaataatcttgatgaatggacttagtaggtctgcgttggaggagctgtcatctgataaaattgtagatgatcgcattcctcatttttgcaatttccttagatttgcggttcttaagaaggatcattctttcatggcagttggtggtccatgggaacctgttgatgggggtgatccatcgattgacaataactctttaatcaaaactgccctcagatatgcaaatgatgttattcaacttgacttacagaattgccaacattggaatccttttcttgagatacattacgatagaattggcaaagatggtttctttagccacaaggaaatcactgttctttatgttcctgatttgtctgactgcctcccttcgttggatgaatggcgtgacaagtggcttgcccacaagaaagctgtggctgaaagagagcgtcaactttctttgaaaaaagagaaatcaagagataacaaggaagtatctaaagataaatcagataaaaggaaggattctact

SEQ ID NO: 12344 - DNA, 552 bp, Glycine max
cctcaggcgtccggtaacgcttccgaagcttcagttacgacgaggattcaagtttttggcagttaaaggatgggctctcacctgaggctgatgttggttatgtgggatctctcaaggctgatgttgatgcaaatgagcaagagaaagtttcccttcagttgctggaggaattcaattgcgtgcctacttttattccttcagacctctacaaacaattccatgatggtttctgcaagcaacaattgtggcccctattccattacatgttgcccatgtatccaggcaatcgccgctttgataggtcacagtggcaggcttatgtttctgctaacaagatatttgcagataaagtcatggaggtccttaatccagaagatgattatgtatgggttcatgattatcatcctatgggccttccaacatttctgcgaaagcggtgtagtcgagtcaggcttggttttttcctccacagtccatttccttcatcggaagtttataaaactctgcctgtcagaggtgaaattttgaaagcattgcttaatgcagatttag

SEQ ID NO: 12345 - DNA, 464 bp, Glycine max
tcgtagatgatacctgtacatcccttaatgtcaaattccctaattctcaaaatctcgggtcgtcttctcctctttcaaatgttgaaccaacttctgttactaatgaacactctaacactgtttctgacttaaacagatatccaagtgaactgtccagtacctcttcttctcactctcacactgtcacttctccttcttataatcatgttcttcccccacaaaatgtccatcctatgcataccagattcaagtttggaattcatcaatctaggctgcatccttcactgtttatggcacattgtgaacctaagacagttaaacaggctcttgctgacccttaatggtttgctgctatgaatcaacagtatgaggctcttcttaacaataaaacatggcatcttgttcctcttcccaaagacaaacaagttgtgggttgtaagtaggtcttcagaattaaggagaat

SEQ ID NO: 12346 - DNA, 493 bp, Glycine max
tcgagtatgcgtccgcccacgcgtcctcagtgtcgtagggtttcgctttccattttctcaccacaccatgttaaccgcagtcctcagaagaaccagttccaccctctcaaggcgcggtttccccgccgccttaatctctgcctccaccgccaccgccaccgccaccgccggcaaccacttccggctactctccgctgccgtcaattccagaaccttccactccaaccctggccccttgaatttccgcgcctcttcatgtcaccgcgcggaatacgccgtggacgatttcccttacgaagaagggtccaaaggaaacgccgacgaaggcctcgagatcgcgaagctcggaatttcgcaggatattgtctccgctttggccaagaaaggcatcaccaagctcttccccattcagagggctgtgttggaacctgctatgcaaggtcgtgatatgattggtcgagctagaactggaactgggaagactcttgctttt

SEQ ID NO: 12347 - DNA, 441 bp, Glycine max
  unsure (1)..(441): unsure at all n locations
cccacgcgtccgcaccatgttaaccgctatcctcagaagaacctgttccactctctcaaggcgcggtttccccgctgccttaatctccgcctccaccgccggaacccacttccggccaccctccgcggcctttatttccagaaccttccactccaacactggccccttgaatttccgctcctcttcatgtcaccgcgcagaatacgccgtcgacgatttcccttacgaagaaggctccaaagggaacgccgacgactaaggcctcgagatcgcgaagctcggaatttctgaggatattgtctccgctttggccaagaaaggcatcaccaagctcttccccattcagagggctgtgttggaacctgctatgcaaggacgtgatatgattggtcgagctagaactggaactgggaagactctngcttttgggatacccatcat

SEQ ID NO: 12348 - DNA, 1852 bp, Glycine max
tcgaaactttttagaaaaataacatataaaacacacaacggaactttggaaccatgtgaacacacccaccctttattttcgcattcgaagttgcgctagcacattcgttgtggaattcgaagaccacacccccttttctttccttttcctgtttttgacacgtatttgaaagtctgctgctatgtgtggaatttttatcttcctaggagcttataaataagccagggaaagccactaagatattcccatcttcatttcttcatttatttatattgtgtgcttttgatcttggagcaagacttcaattcatatacaccaaagacacatactatcttcataagcaaaggactcaaagtaatagttttctacaaaaaaattgaagtttggggggggatctacatctctatgggattatcactttccttactctcatcagcctgggaagaaatcgttagacattcactatttggtctgtctttgaacttcacttttggttccaaagatggggctatgattttgagatcaggtagcttcaagataagagaatcagaaactacttcaaagggtgcctctaccaccaacttttcaagcaaattgacggattgcaggcccgaacacatggtcctcgaaccaaacctttcgtgcattaaagatatggagatcatggaatcaaagagcagtgaacaacaattgcagcaccagcctgtccctgttctctctctgcctaaagaagtggttttctcttcgccaagaccggttagtgagcttgatgctgcggctactaagcttcaaaaagtctacaagagttaccgcactagaagaaaccttgcagattgtgctgttgtggtggaagaactctggtggaaggcattagactttgcttctcttaaacggagctctgtttcattctttgatgtggagaaacacgaaaccgccgtgtcacggtggacaagagcaaagacaagagcagctaaggttggaaaaggtttgtctaaggatgataaggcacaaaaattggccctccaacattggctcgaagctattgacccacgtcatcgctatgggcacaatttgcacatgtattacgatatttggtttgagagccaaagcacccaaccatttttctactggttggatgttggagatggtaaagaaataaatcttgagaaatgcccaagatccatcctacaacgccagtgcattaaatatcttggaccaaaagaaagggaagagtatgaagtaattgttgaaaaagggaagctggtgtacaaacaagatgggaggcttgtggatactgacggaaagtccaaatggatatttgttcttagcaccacaaggtccttgtatgtggggcgcaagcagaaaggtgcatttcaacactctagctttctagctggggctgctacaacagctgcaggaagattagtggctcaacaaggtgtacttgaggctatttggccatatagtggtcactatcaccctacagaagagaactttaaagaattcataagctttcttgacgagcacaatgtggatctttctaatgtcaagaaatgtgccatagatgacgatgctccttcaattgttgggtccaattcatttattgacattaatgaatcacaacaaattaataagggtcctactctttcttcttccaattatgtcaacaacaatagtgtcactattaatgcagcaattaacaaagagattgaaaagaaggtggtcgctccagttcttgacgtgcccaagaggctaacatgcaagtggtctactggggctgggcccaggattgggtgtgtgcgtgactaccctggacaccttcaaacaagggccttggagcaagttaacctat

SEQ ID NO: 12349 - DNA, 929 bp, Glycine max
cattcatttaaattacgatatcaagcagttgaaattatgagcccagaggaagaagcacgtcagatagtagcagcaatgaggattcaacatgcctttcgcaactatgagtcaaagaaaaagatggcagccgctgctcggattcagcttagattccgtacatggaagtaccgtagagaatttctcaatatgcggcgtcaggctattaaaattcaagctgctttcaggggctttcaagcacggaagcaatatcggaaaatcgtatggtctgttggggtgcttgagaaagtgatcctgcgttggcttttaaagagaaaaggcttccgtggtctccaggttaatcctgccgaggaggagacacaggaaagtgatacaattgcagaggaggatttctttcgcaccagccggaaacaagccgaagaacgtgttgagaggtgtgtcatacgtgtgcaggccatgttccgttctaagatatcacaagatcaatatagatggttgatgctgacacataatcttgctatgctggatgatttagaagatttcctaaattctgaagatgacatgttacccaagacatagcttggtgccttttccaaaacaaggtttccccatatttgggatgtagccaactcctgtgacaaactagtgtgtagtgatagcttggtgtcttcttttgtataggaagcagatcctgtaaattacctagtgtagattttgaacccatgaccctttcatattgctttaatgtcttgaatgggtcgtccgtgtgtaattaagcttccctatgagggatgcttctaatgcaagatcaaggtttgtaactttgtttttggtgaaaaatcaagtttgtaacttaaataacaagccttcttagatttgaattgacataattgttgttggaactcttctatgtaataaattaagagtccatt

SEQ ID NO: 12350 - DNA, 645 bp, Glycine max
tctcgagccgaatcggctcgagagcacattagtgaatatgctgattctggtttgaggaccttactacttgcagatcgtgaacttaatgaggaagagtacaagaaatttagtaaagagtttacagaggccaagaacttagtaagtgaagaccaggagcagattgttgaggggatagtgcaaaatattgagaaggattgaattcttcttggtgctactgcagttgaagacaaactacaagatggggttcctgaatgcattgacaagctagctcaagctgggattaagctatgggttttaactggtgataaaatggagacagcaattaatattggatttgcttgtagtttactcagacaaggtatgaaacaaattataattagctcagatactccagaaactaaatcatgggagaaaatggaggacaagtctgctgctgaagcggcaattaacgtcaagtgttcttcgtcaactaagggagtcaaaggcattgctttctacagcagatgaaaactatgaggccttagccctgatcattgatgggaagtctcttacttatgcactagaagatgatgtaaaggacttgtttcttgaacttgccattggctgtgcgtctgttatctgctgtcgttcatctcccaaacagaa

SEQ ID NO: 12351 - DNA, 939 bp, Glycine max
tgtgcttgtgtttcaattcattcttcggttgttctctatttgcgttttctcattttctttctttcgttctcttccgtggaacgagtagtagaaacttgaaatcaaaaggcagcgggggaaaaagaaaagagagaagtagggttcgaaaatggcagcagaatcatcagagggcgaagaagaaaccaagttaagcggaggtaaccaattgctcatagttgacgatgacttaacggaaatgggaaagaaagccgcttggagcgtgagttcctgcaaacccggtaacggcgtttcctctctccgtgacgacaatctcgaaacttattggcaatccgacggagggcaaccccatttagttaacattcagtttcagaagaaagttagacttcaattaattgtgctgtacgtggatttcaagcttgacgagagttacacgccgagcaaagtttccatccgtgccggtgatggttttcacaacttgaaggagattaagaccgtggaactcgtgaagccaactggatgggtttatctttccttgtctggagttgatcctagggatacctttgtgaatactttcatgttgcaaattgctgtgttgtcaaaccatctcaatggaagggatactcacgtgcggcagatcaaagtttacgggcctcgaccgaaccctatcccacatcagccattccaatttacttcaagggaattcatcacctactcttctataagatgagagtttatggaaggatttgatgaagccaccaagtgttaaatcaaaggatgcttcccactaagttattatagcatctggaaggtctgaaaccaaatcactacagaccgaaatgtcaaaaatacatttcacttcaatagtattcttaaaaattgtcatatcagtaaatgtggccatcagtgattcagtatcctttgtgtcttgctagtatttat

SEQ ID NO: 12352 - DNA, 631 bp, Glycine max
cccacgcgtacggaatcacatgcacacccttcggttgctactatggccaaaactgttcggtctggggccaacattgtctataacggaaatcccttaaatgacctctctatgactgctttcctggacaaattcatggagaagaaagcgaaacgaagcacatggcatggtggttctcagattgaacctgccaagcagatggatgttaacaaccaattgattggagcagaaattcttttactagctgaggaagatgtacctcctgaggatcttgtcttccacaagttctacacaaacaatatgagttcgctcttctaaaccgaagaatatgaaaaagaagtcagctgatgaggaagcagctgaggagttgtttgatgttgataatggtgaagttgatggtggggatgagagtgacaatgaagagattgagaatctgttggattccactgatccaactttgggaccagacagtgactatgattatgatgatttggatgaagtagccgatgaggaagatgaggacttgattggtgatgttagtgatgcagagattaattcggagatggatatagatataccctctgatattgatgaggaagagactgatgatgctccaattgatgatgacgacgac

SEQ ID NO: 12353 - DNA, 636 bp, Glycine max
gcgtgataccgacataccgtgaacatgcccatacgtgatcacagagattctggtaaacacgtgcagtgtttcaaaagttactaacggacacagatccaagcagttgcgacttgcgagatgcattcgacgaagagtagcaccagcgataatatcaatatcaatatcaaatcaaaagataaagaaatccatcgatgctaccataactaccgaaagaagagaaagcgtccttgccaagacgctgtggctcccaccacggaagacgacaactgctgcaccaaggccgccgccgcatcacacggtttcatatccgttatagggcggcggcgcgtgatggaggatgcagtgaaggtggttaccggtttggtggcggcggaacaacactgtggcggttacgatttcttcgcggtttacgacggccacggagggaccttggtggccaacgcttgccgcgacaggctgcacttgttgctggcggaggaagtagtgagggggaccgcagcagacaaagggctggattggtgccaggtgatgtgttcctgtttcatgaagatggacaagggagttggtgaggagaacgatgatggcggcggaaacaccatgggttcgacggcggcggtggtggtggtcggaaaggag

SEQ ID NO: 12354 - DNA, 368 bp, Glycine max
aggaaaacaaaacaaaaataaaagtgaagccggtgcgcgctgcctgataccatgtgcatgcccatacgtgatcacacatgcagcttttcacacagtaataacggccacagttgccagatgcattccagcaacgccaaagaagcgaaagcgtccttgcgacgacgactgctacaccaagcccgccgcatcacacggtttcatatccgtgatagggaggcgacgcgcgatggaggacgcggtcaaggtggttccaggtttggtggcggcggaacaacgctgtggcagttacgatttcttcgctgtttacgacggccacggagggaccttggtggcaaacgcttgccgcgacaggctgcacttgttgctgg

SEQ ID NO: 12355 - DNA, 410 bp, Glycine max
cttccgacgcagccaccgtctttcagcacttcatcccaacaatgtccacgcttccgaagcaccaacccgaagcgaaaccccaagatctccctccggatcaaccagcttcggcgccctcggatgcaaaacccgaagatcttcatccgaaccagccaggttcggagtctcccgaagccaaagcagagggggaagaagaggatgaagaagaagaaggagagtgcgggttctgcctcttcatgaagggtggtgggtgcagagacgagttcatagggtgggaaaattgcgtccaggaggccgaaaacaacaacgaggacctcctcgagaagtgcgcccaggtcaccgccgctctcaagcgctgtatggacgcccactccgactactacgagcccatgctccgcgccgagaagctc

SEQ ID NO: 12356 - DNA, 637 bp, Glycine max
ctcacgcgtccgctcttgcatgcactgctatcacccttttctttcaacatgtctacaccagcagaatactacaggtctctaccacctgtgagcaagacctatggagtggcctgtttgatgaccacttctgcatattatctgcaactctatgatgcaaggaacatagcacttgattatggcccagtgtttaaaagccttcaagtttggaggcttatcacaaatttcttctttcttggctcattttcattaccatttgcagtccgtctgataatgatagcaaaatatggtgtttcattggaaagagggccctttgacaagagaactgcagattatgtttggatgttcatttttggtgcattctcacttctggtgattgcagctgtgccatttttttggtatccattcatgggaatttccttagttttcatgatcgtctatgtttggagccgcgagtttccaaatgcacgaatcaacatttatggtgttgtatcattgaagggtttttaccttccatgggctttgctagctctggatttaatatttggagatcctataaagccagacattgtaggtatgattgcaggacatctatactacttcttaacagtgcttcaccctctcgcaggaggaaagttca

SEQ ID NO: 12357 - DNA, 938 bp, Glycine max
caaaacttgatggggatttttggggagctacgtgtagatgtagctttgtaattataatcatccattacaagagaacactgctgataattatatgattgcatggtaatttttattgcagaaaatactcgtgcagcttatcctatagagtacattccaaatgcaaagttaccttgtgttggccctcacccaaagaatgtcatacttttggcatgtgacgcatttggtgtactcccacccgttagcaagctaaacctggcacagaccatgtaccatttcatcagtggatatactgctttggtggctggcacagaagaaggtattaaggagcctcaggcaactttttcagcttgttttggtgcagcattcattatgctacaccctacaaagtatgcagcaatgcttgctgaaaagatgcagaagcatggtgctactggatggcttgttaacactggttggtctgctggaagctatggtaatggaagccgtattaaactacaatacacaaggaaaatcattgatgctattcactccggaagtctcctgaatgcagagtacaagaagactgaaatttttgggcttgagattcccaccgaagtggagggtgtcccttcagaaattctggatcctatgaacacttggtcaaacaaaaaggcctacaaggagacactattgaagttggctggattgttcaagaacaattttgaaaccttcaccaactacaagattggcaagggcaacaacaacctgacagaagagattctcgcagctggtccaatcttttgagacaatgttatgcaacatgttgtgtggttgggaatgttatgggtggtagataaaatctttccttagaataaaatattgtaccattggtttggttgggctcaaaatgtcatttctagtcttcctccaaaaatgaagtttattttctagtctttaat

SEQ ID NO: 12358 - DNA, 1123 bp, Glycine max
cgagggtcgctctccaagggacaagcgcgtcgtcaaggatgatcttactaagaacgacctttggtggggaaagggttctcctaacatcgagatggacgagcacagtttcatggtgaacagagaaagagctgttgttacttgaactccttggacaaggtcttcgtcaatgaccaattcttgaattgggacacagagaacagaatcaaagtccggattgtatctgccagagcttaccattcattgttcatgcacaacatgtaagtgaaaactaaagaataatttaccattggcaacagttctagttgcaattgtttctctcttcttccttcaatccagacaaaaggtataaggccccccgccagataagtgccctatcgttgaaagccttaattaatttatacatataatggggtacataatatacatacatccctgatgaaagtggaggaaaaggttccctccaaaatagtgcatgctagtttagtttagtgtacaaagtggataactgggtgggtgacaggtgtatccgccccactcctgaagagctggagaattttggtactccggacttcactatatacaatgctggacagttcccctgtaatcgttatactcactacatgacatcctccactagcatagatcttaatcttgctaggagggaaatggtcatcctcggcacacaatacgccggggaaatgaagaagggtcttttcagtgtcatgcattatctcatgcctaagcgccaaatcctctccctacactccggatgcaatatgggcaaagatggggatgtggcactcttctttggactctcaggtatagtatcagccgatcaccggttgaaatcggtataatgtggctccacacagctaccctaccatatgttccttcccctcttactactactcagccatactcaatactccactgcttgttaattatcaactatgttgtatgcttacacatggatgttttgtgttatggctacttgtgtctccatttttctacaatcctaatggatccctttgttctcttttttactattgtttgttttaggtactgggaagaccactctttccaccgatcacaataggtatttaatcggagatgatgaacactg

SEQ ID NO: 12359 - DNA, 1320 bp, Glycine max
  unsure (1)..(1320): unsure at all n locations
aaaggatcattcatcacttcaaccggggcattggcaacactttctggggccaagacaggtcgctctccaagggacaagcgcgtcgtcaaggatgatcttactgagaacgacctttggtggggaaagggttctcctaacatcgagatggacgagcacagtttcatggtgaacagagaaagagctgttgattacttgaactccttggacaaggtcttcgtcaatgaccaattcttgaattgggacacagagaacagaatcaaagtccggattgtatctgccagagcttaccattcattgttcatgcacaacatgtgtatccgccccactcctgaagagctggagaattttggtactccggacttcactatatacaatgctggacagttcccctgtaatcgttatactcactacatgacatcctccactagcatagatcttaatcttgctaggagggaaatggtcatcctcggcacacaatacgccggggaaatgaagaagggtcttttcggtgtcatgcattatctcatgcctaagcgccaaatcctctccctacactctggatgcaatatgggcaaagatggggatgtggcactcttctttggactctcaggtaccggaaagaccactctttcgaccgatcacaataggtatctaatcggagatgatgaacactgttggggtgacaatggtgtctccaacattgaaggtggttgctatgccaaatgcattgacctctcacgggagaaagagccagatatttggaatgcaatcaggtttggcacagtgttggaaaacgtggtgtttgatgagcacgaccgagaagttgattactctgacaaatcagttacagaaaatactcgtgctgcttatcctatagagtacattccaaatgcaaagttaccttgcgttggccctcatccaaagaatgtcatacttttggcatgtgacgcatttggtgtactcccacccgttagcaagctaaacctggcacagaccatgtaccatttcatcagtggatatactgctttggtggctggcacagaagaaggtattaaggagcctcaggcaactttttcagcttgttttggtgcagcattcattatgctacaccctacaaagtatgcagcaatgcttgctgaaaagatgcagaagcatggtgctactggatggcttgttaacactgggtggtctgctggaagctatggtaatggaagccgtattaaactacaatacacaaggaaaatcattgatgctattcacttccgaagtctnctgaatgcagagtaccagaagactgaaatttttggcttgagattccca

SEQ ID NO: 12360 - DNA, 650 bp, Glycine max
tgtttctacagatgagcccactcctattgttgtagtaattcctggtctaactagtgactcttcatctgcctatctcaaacatcttgcatatcatacagcaaagtgtggatggaaagttgttgtcagtaatcaccgaggacttggaggtgtttcaatcacgtctgattgtttctacaatgctggatggactgaggatgtccgcacagtggttaattatctacacaaagagaacccaagggcacctttgtttgttgttgggactagcattggagctaatattctgataaaatatcttggtgaggatggtgagaatattcctgtagctggagctgtggctgtttgctctccttgggaccttttgataggagacagatttataacccgtaggcgtgtgcagaagttttatgataaagcacttgcaattggacttcaaggttatgcaaaattacatcagcctcatttttctcgccttgctaattgggaagggattgaaaagtcaatttccattcgagattttgatcatcatgccacccgcattgttgggaagtatgagactgttgacacgtactatagacgctgcagcagttctacttatgtgcaatctgtttcgattccacttctctgtattagtgctctggatgatccagtct

SEQ ID NO: 12361 - DNA, 414 bp, Glycine max
cccacgcgtccgaatgaaatgtattatattggtgggaattctgagagtgtggaacaagatgtgatgcattcttataacatggcatttggtggtggtggatttgcaatcagttatgcattagcagctcaactagccaaaataatggatggttgtctaagtagatacttctatttttatggttctgatcaaagagtctgggcctgtattcatgaaattggggtgccccttaccagagaaaatggattccaccagtttgacataagaggaaatccatatggttttctagcagctcaccccttggtaccacttgtatcactccatcaccttgaccaattcagccccttctttcccaaccagactcaattacactcaaatgaaaaagctcatcagtgcataccacattgaccctgcccg

SEQ ID NO: 12362 - DNA, 608 bp, Glycine max
ttggaaaaacacacacacaaacaccctttgagttcattaacctcttcagaaaaaacaacaacaacaacaaaaaaaaacatcatcatcaaaaaaacttccgagagtttaatggcaacacgcgtgatccctccaagaatcctcaagaagctccgttacaacacaacaaccaagccactcaacgctgcccacccctcaatctctccagtcatcgccccaccgtcactcttcgagaggtcgccgtcccctgtcgcggatgctgtttcaacaacatccacgactatggagacggcgaatctcaacctcgacgacgcggagcggcttttcgcgtcagtatcgacggaaaagctgctccggtcgtccgcggttttgcatgcgacggcggtggggcccatggtagacctgggaatgtggttgatgaagtctccggtgttccagaccgggctgccgaaggatctcatcatggccgccacgaaggagacgttcttctcgcacttctgcgccggcgaggacgccgccgccgccggacggagcatcagcgcgctcaaggaggccggcttacgtggcatgctggtgtacgtgtgtgtaagacgctcatacaaaggatgggt

SEQ ID NO: 12363 - DNA, 1524 bp, Glycine max
ctcgaaattcggttcgaggttcttccttctaacgtttttcctcctattctattctttctccacctcttctctcccctgtcttcttcttaattaccctccctcattgcgtgcaccccccaaaaaataagaagatatacataaaaataaaacacaccctctacgtgtccacactctctgatcacaacacacccgcttaattaaatctctatatataaaccccttcaggcactccactatgacgggcaaagaaatttttcataagatgaaggaaaaagttttgggatcatctgatcccgattcaggtaaaggaaagagcaagatgaagaagcacataactcatggctttcacttggtaaagggaagatcaggtcatgccatggaagactatcttgttgctcaatttaagcaagttgacaacaaagagttgggtttatttgcaatatttgatggccactctggtcacagtgtacctgattacttgaagtctcatttgtttgataatatcttgaaagagcctaacttctggacagaacctgctgaggctgttaagagagcatatagtataactgattctactattttagacaaatcaggtgaattgggtagagggggttcaactgcggttacagcaatattgatcaactgttacaagctactagtggccaatattggggattcccgggctgtcttatgtaagaatggcgtagccaaacaactatcggtggatcatgaaccaagcatagaaagtgaagatataagaaacagaggtggttttgtgtcaaacttcccaggggatgttccacgtgtcgatggtcagttggcggtgtcaagggcatttggtgacaaaagcctgaagatacatttgagctcagaaccatatgtaactttggagatgatagaagatgatgcagagtttcttatactagccagtgatgggttatggaaggtaatgtcaaatcaagaagcagttagtgctatcagagatgttaaggatgctagatctgcagcaaaggtgcttactgaagaagcaaagaacaggaaaagctcagatgatatctcttgcgttgttgtgaaatttcagtgatcagtaaactcacatagtatatttttatctacgaacttgaaagtgtaacatatactttagtgtaatgttgataccttttaggtgttattatgtcatgccattcagtgtgtgatatttaatcttctttaatttcatacaaatgaaactgctgagaacgtgttgtttgatgtaccaatgttcaaaaggatttagttttggattgtgtagaccaaaataattcgtatgaatgcaaggaagtttggtcagtctctatcatcttgaaaagccttctggaaattcattagccatccatttgtgcctctgaaacacctatgcttgtattttgatacttcacctacttgtattttgagcgaaatatgtgtgaagtattcagtgctagacttataatttatatgttgcttttattaatgttttaaaaagaatatatttaatttgaaaaa

SEQ ID NO: 12364 - DNA, 1446 bp, Glycine max
  unsure (1)..(1446): unsure at all n locations
acatctctctccagatggatcaatgcttgcctatgtaagagcctctgagttgcatgttctgaatctcttgtctaatgaatcaaagcagttgacccatggggcaaaggaaaatggtttgactcatgggctggcagaatatatagctcaggaggagatggatagaaaaactggatattggtggtcactggacagtaaatatattgctttcactgaagttgattcttctgaaataccactttttagaattatgcaccaagggaagagctcagtcggtttagaggcacaggaagaccacccttatccttttgcaggagcttcaaatgttaaagtgcgccttggggttgtttcagtagctggaagctccattacttggatggatcttctctgcgggggcacagaacagcaaaacaatgaggaggaatatttggcaagagtcaattggatgcatggaaacattctcactgctcagatcttgaacaggcaccacactaaaataaagatcgttaagtttgatattagaacaggtcaaaggaaaaatatattggtggaagaaaacagcagttggatcaatatacatgactgtttcacacctcttgataaaggagttaccaaattttcgggtggatttatctgggctagtgagaaaacaggatttagacatctttatcttcatgatgcaaatgggacttgtttaggacccatcactgaaggtgaatggatggttgagcaaattgccggtgtgaatgaggctacaggtctaatatattttactgggaccttagatggtcctctggagtccaatttgtattgttccaaactttttgttgatggaagtcaaccacttcaggtccctgtcagacttacgcacagcaaggggaagcacattgtggtccttgatcatcatatgcgaaattttgttgatattcatgattcccttggttgtcctcctagggtgttactgtgctcgttggaagatggaagtgtaatcaagcctttatatgagcagtcatttacaattccaaggttcaaaaagcttcaacttgagccaccggagattgttgaaatacgggctaatgatggcactacattgtatggagctctgtataagcccgatgcttcaaagtttggacctccaccttacaaaactatgatcaatgtttatggtggtccaagtgtacagcttgtttgtaactcttggcttagtacagttgatctgagagcacaatatttgagaaaccaaggcatcttagtttggaagttagacaacagaggaactgcgagacgggggttgaaatttgaaagctatttaaaacacaaacttggtcaaattgatgctgatgatcagctaaccggagcagagtggcttgtcaaacaagggcttgcanaaggtggtcacattgggttgtacggatggagctacagcgggtatctctctgccatgacact

SEQ ID NO: 12365 - DNA, 1616 bp, Glycine max
aacacaaattcctttttttcttggcactttatgtccttgccatcggcgacggaggtcacaagccctgcgtccagaccttcgccgccgatcagttcgacgaggacacgcctgaggagaaggatgccaagagctcattcttcaactggtggtacttggggattgtggctggctcaactgcttctgtttttgttgtcatatatcttcaggacaatgttgggtggggagtggggctaggagtgctggcaggggtgttggctttggcattggcactcttcttgttgggaatcaaaaggtacagaaaggaaggccctgcagggagcccattcaccaggctggcccaagtctttgtcgccgcatcgcgcaagtggcgcgtgcaggccacgcacggtcaccacaattattgctatgacgaggatgaggagcatcatgagccccataatcatctccatgttcaacccaaaatccacactctcctccatactcatcaatatagatttttggacaaggcagcgatcatagatgaaattgatgccaagacgaagacaagagacccttggaggctatgttcagtgacacaagttgaggaagtgaagcttgtccttcgtttgattccaatatggctaagttgcttaatgttcactgttgtacaagctcaagtgcacacatttttcatcaagcaaggtgccacaatggtacgtaccataggaccacatttccaagtcccaccagcatcgctccaaggcctagttggagtcacaatactctttgctgtgccattctatgaccgtgtctttgtgccactagcaaggaaaatcacagggaaacccactgggataacagtgctacaaagaattggggtaggacttttcttgtcaatccttaacatggttgtgtcagcacttgtggaggccaaaagggttggtgttgcaaaagagagtggcctaattgatgacccaaaagcagtgttaccaatcagcatttggtggctgcttcctcagtacatgatcactgggatctctgatgcattcacaattgtggggctacaagagttgttttatgaccaaatgcctgaggcacttaggagtttgggggctgcagcatacattagcattgtgggggttgggagctttgttggcaacattgttatagttgttgtggagggtgtgacatcaagggctggtgagaagtggctaggaaacaacctcaatagggcacaccttgattacttctattgggtcttggcagggttgagtgctgttaatttgtgtgtttatgtgtggcttgccattgtttatgtgtacaaaaaagttgatgagggtcatcaaactagtgaccaacagggttctagccacaagaaatacaaacctggagtgtgaggggaaaaaaaattactgtttggcttctgatatatgcagcgaatgccaaacataccaagtccaagatgagagttaagtatagattaacattgtaattccaataaatagtaatcttagttgcatcttagagagagaggctaatagtttaaaactagttatatttagttaaaactataaatatttgaaggccttcccccgcattgtataaaatcattagagttaatataaaatttaattctg

SEQ ID NO: 12366 - DNA, 466 bp, Glycine max
tgcgaagttgaagagttcgggagctaaggtttcaatgccagttgcttctaatgaagtgcccagaagttcaagccacattgaaaaggtaaaaagctcccgttctgttcagcaggagaaagaactactgccttccgttccttcaggaccctctttgggagattttgttctttggaaaggagagccaacaagcccatctcctcctccagcatggactacctgattctgctaggattcctaaaccaacatcattaagggacattctaaaggagcaggagaagaagtcctctgcagtactcccaaaccaactgcctacccctcaaaaatcacagcctgcccaagctgcacggagtagtggttcttcacgcccaatttcagcttcatctccatcaaaaactgcaccttctagccagataaactcccaagcttctctgtcaaaatacagaggggatgatgatttgttttgggg

SEQ ID NO: 12367 - DNA, 819 bp, Glycine max
actcgctccatttcagtcggcaaactttgatgctaaccacagaaacacaacacaactcgctccatttcagtcggcaactctggaaaaagtcaaatcattccggaaaaaacaataattaaacttttttttttctctagacttaggacctgagatagatcacgttgcatctgaaaatattttcattcattagagagaaaaaacaagaaagtgttcgttgaatctgttgaaagtggtgacttgatttgatttattcacataaccaatttatcatctctccgatctttcaatggattctgacttctggacctcgcgtcttgctgccgctaaacgccaatacacgcttcagcatcaccatccaaattctcacttagatcggttgggaatcgatgattttgatgtggaagaagaggtgagacctgattttccttgcccgtattgttatgaagactttgacatcgcgtctttgtcttctcatcttgaagatgaacattcttgtgaatcaagagtcacgatttgtcctatatgctccgttaaagttgcacgggacatgttaaatcacataacgctgcaacatgggcatttatttaagttacagagaaggcgcaggttaagaagagtcgctattccaaacagtcagacattgtcacttttgggtcgagatcttcgtgaggctcatctacaggtgcttcttggtggtggtggtggatatcggtcaaacagtgcagcagtgtctaatgctgctgctactgatccattcctatcctcatttattttgaatttccctgcttgtgaagcagaagaaatttcagaatctgtggt

SEQ ID NO: 12368 - DNA, 748 bp, Glycine max
agtagcaccagcattagatacggctgcagctacactatttgaccggtatccaccatcacgttccaccaccaagaagcacctgtagatgagcctcacgaagatctcgacccaaaagggacaatgtctgactgtttggaatagcaactcttcttaacctgcgccttctctgtaactttaataaatgcccatgttgcagcgttatgtgacttaacatgttccgtgcaactttatcggagcatataggacaaatcgtgactcttgattcacaagaatgttcatcttcaagatgagaacacaaagacgcgatgtcaaagtcttcataacaataggggcaagggaaatcgggtctcacctcttcttccatatcaaaatcatcgattcccaaccgatctaagtgagagtttggatggtgatgctgaagcgtgtattggcgtttagcggcggcaagacgcgaggtccagaagtcagaatccattgaaagatcggagagataatgaatagatgaattggttatgtgaattattcaaatcaaatcaaatcaccaccttcaacagattcaaagaacacttgtttttctcttttctctcaaatgaatgaaaattccagaatgatttgactttttccagaattgccgactgaaatggaacgagttgtgttgtgctgtgtttttgtggttagcatcaaagttgagattattaaacaaatgaaaagagattgatgtcagactttgtcttaagatacacacacg

SEQ ID NO: 12369 - DNA, 409 bp, Glycine max
ggcactgatcgtgcaaggagtctgaccacttggagtctgaatgtgtatttgtagcataacgaagtgtaacttacgaagctgagataaagcttggaagtggtttgctctcataaaattataatagtttagagactataaaacatcaaaacaatttccggacgcgtgggtccaaattctcacttagatcggttgggaatcgatgattttgatgtggaagaagaggtgagacctgattttccttgcccgtattgttatgaagactttgacatcgcgtctttgtcttctcatcttgaagatgaacattcttgtgaatcaagagtcacgatttgtcctatatgctccgttaaagttgcacgggacatgttaaatcacataacgctgcaacatgggcatttatttaagttacaga

SEQ ID NO: 12370 - DNA, 519 bp, Glycine max
cttcctctctttaaatcctccaccagccaacaccctttttctcccctaactctctcacagatccaaaacccaaaaaagagaatagagtgagagaaagagaatcatggaattagaacaaaaccagagatgggaaggctatgtgaactggaggaacaagcctgctctcagtggctgcaatggtggcatgcttgctgcctcctttgttttagtggttgagatattggagaatctggcatttctagccaatgcaagcaatttggtgctgtatctgaggcagtacatgcacatgtccccttcaaaatctgccaacaatgtcacaaatttcatgggaacagtcttcctccttgcccttcttggacgtttcttatctgatgcttttttcaccacttatcacatctacctgataagtgcagtcattgaattcctggtatgcaccctatattaattttcatctctctctgtgtcactacttgcgaatataacacttaatttaaattctttcagcatattacataatat

SEQ ID NO: 12371 - DNA, 899 bp, Glycine max
  unsure (1)..(899): unsure at all n locations
aattctcgggtcaagcgtcggatcacgcgtccggaggctatcangcangagcttaaggaattgcacccgaatgaccccaaaattgttgtcctcaaacatggattgtggaaagtaaagggaattattcangtttctagatctatangtgacgtatatatgaaacatgcgcagtttaaccgcgaacccattaatgcaaaattcagactccccgaaccaatggacatgcctttcttgtctgctaatccaactattctttctcatactctccaaccaaatgattccttccttatatttgcatcagatggtttatgggagcacttgagtaatgatcaagcagtggatattgttcacagcagtccacgcgcgggtagtgccaagagacttgtcaaggctgccctacacgaagcagcaagaaagcgtgaaatgcgatattcagacctttacaagattgacaagaaggttcgtcgccattttcacgacgatataactgttattgttttattcttaaaccacgaccttatatccaggggcgcagttctaaatacgccactcacaattcgaagtgctctcgatcactgactcttatgatttgtaaacatgcttctcttatacgggtgttctggcaactgtgccaattccagaaaatacaccattggcacgttgctagaatataccattcatagtgctgccacgtatggttactgataccgagacaacttattgatgacgcacgaacttgtaacacttgttagaagtttatccatgaaaatgaaaaagagaaaaagaaaaaaaaaatatcagaaaagtaacttttgattagcaatttgtcaaatcccttgcccatatttacataatgctgtgattagaaggaagtgcttgatctaatttccgtgtaaatt

SEQ ID NO: 12372 - DNA, 1280 bp, Glycine max
acgcaaggaattaaaacatttattatttagatataaagtggtagagatgcatttattaataattagaagcatcacttgcgtactagtacgtagtacattgaggtcggtgcaaattaaactaattaaaaccatatatatgtaatgagatacccttaattattctgagtaatcagcaccgagtttatgatccactgtttcaattgaaactgagttggtatttaggtgatttgtcaggcctgaagagaccaaagtgtcgttcgatttcaggaccatccttctggttttcatcaaacatggcaaagaggtaagtctctatgggtccactaggcctcttgggggttccacctttggcatgattaatcaaattgcggtaataggttcctgcgttttgaacagttgctccaactccaccttcagatggccaaccactctcagacacaacaaccttcacatttggtgcccctactttctcaagagcagcgtatagagaatccaacaatgcatcaaacaggttttggtacccaacctcgttgttaccatgtttagtaaacaaggcatagtcaagaccaatgctttgttggttgttaacataggcgaagtaagggtacacgtttgcgagaagtggggctccatttcttgctaaaaagtttacaattggtcttatgtatgaacttgcactactgctgaaaacgccatcttttggtgggtaagagttgccaagtaaagtggtgtctattgctgttgacaccttcatttggccttgtaaattggcggcagaaattgctttctgaatgttttcaagtgctggaagtacagaccctgctaaagagtcaccagggtgaatttcgttaccaactgcaatgtacttgaatttcacgttttgtgagtatgctttcacgtacttgttgacccaatttgtggcagctccagcgttggtgagagattgaagttggtcattagggacaccgaggatcacctctatgtttgaacctctgagggcttgaaggactccttcgtctggatagtataaacggattttgcctattctgtttgatttgtaaagatccaccactgcttgctttgttggtagattgtttccatttcctccataacacacaccaacagattgtgcccccgtaaattctactccagtggaagataatattccaagaagcagcaatatggcagacatggcggtgttgcctcttgagaaaatcatattgaatatgattatgcagaagatccaactactattatgaactaaactcttcaacactaac

SEQ ID NO: 12373 - DNA, 1747 bp, Glycine max
ggtcgcgtgggttcgggtgttctgcgtttttgcgaatccgatttggcctcaattccgccattcctttttggattcgtctttttttttcttcttcttctttttcatggaccgcagagtctatcaccatcgtcctgctcctttggcacatgcttctccccctgaatactttgtcctccaggggaacacaacttataaagacgatctatatttaaggaagaggacagggatgcgtcggtggctttgttgcacatgtcaggtggaagagtcttacccatcaaatgaaaatgagcacctgaaaagcccaaggaattatggagatggaaatcaaaaaggctcaaaggtgtcagctcctgtcaagcctgaaacacaaaaggcacctccacctattgaagctccagccttatctttagatgagctgaaggagaagacagacaactttggttcaaaggcattaataggtgaaggatcgtatggaagggtgtattatgcaaccttaaacaatggaaaagcagtggctgtgaaaaagcttgatgtttcatctgaacctgaatcaaataatgagtttttgacccaggtttccatggtctcaagattgaagaatggcaattttgttgagttgcatggttactgtgttgaaggaaatcttcgtgtacttgcatatgagtttgctactatgggctctcttcatgacatattgcacggtagaaagggagttcaaggtgctcaaccaggaccaactcttgattggatacagcgagttagaattgcagttgatgctgctcggggattggaatatttacatgagaaagttcaaccaccgattatacacagggatatcagatcaagtaatgtgctaatctttgaagattacaaggccaagatagccgactttaacctttctaatcaggcccctgacatggctgcacgccttcattcaactcgtgtattgggaacttttgggtatcatgctccagaatatgcaatgactgggcagttgactcaaaaaagtgatgtctatagttttggtgtggttcttcttgagcttcttactggcagaaaacctgttgaccataccatgcctagaggacagcagagtcttgtcacatgggctactccaagattaagtgaagataaagtgaaacagtgcgttgacccaaaactgaagggagaatacccccctaaaggggttgctaagcttgcagctgttgcggcgctgtgcgtgcagtatgaagctgagtttaggccaaatatgagcattgttgttaaagcactccaaccacttctgaagtctcccgctcctgctgctccagaaagttgaagcaaataaaatcgcttagatgtctgcatcgtctgcacagttcgattcagttatctccagatttcatcaaatactgcggatatatctatacatctatatttttttaaaatttttgtttgagattggatgtgtaggattgaattggcttgtttcttgttgtcattgttaaattccatgtatttatttcatcgcacttgtagtgccgagtctgctgacacccattgagccataatgcaacaataggtttgggttgtgtgggtaaatgttgtttgtcacttaacgttaatgccctccatattctttatttgtttcttgctatcaaactgagctgatacttgccttgaaagacctactatatttgtgggacctctctctctctctcgctttttgcggtgtgtttacaggattataattattgttcttgtaaac

SEQ ID NO: 12374 - DNA, 422 bp, Glycine max
ggatgtcccatctcaatacctggctttggcttctctttattattccttccttccttcttcgcatcaacaaaccctaacatagcatcctaagatacagagactatcaccatcgtcctgctcatttggcacatgcttctccccctgaatactttgtccgcctggagaacacaacttacaaagacgatctatatttaaggaagaggacaaggatgcgtcggtggctttgttgtacttgtcaggtggaagagtcttacccatcaaatgaaaatgaacacctgaaaagcccaaggaattatggagatggcaaccaaaaaggctcaaaggtgtcagctcctgtcaaacctgaaacacaaaaggcacctccacctattgaagctccagccttgtctttagatgagctgcaggagaagactgacaacttt

SEQ ID NO: 12375 - DNA, 387 bp, Glycine max
  unsure (1)..(387): unsure at all n locations
atacaccacaccacacctggctttctctttatcattcgttccttcctttcttcgcattgacaaaccctaacatagcatcatcctaaggcacatgcttctccccctgaatactttgtcctccaggggaacacaacttataaagacgatctatatttaaggaagaggacagggatgcgtcggtggctttgttgcacatgtcaggtggaagagtcttacccatcaaatgaaaatgagcacctgaaaagcccaaggaattatggagatggaaatcaaaaaggctcaaaggtgtcagctcctgtcaagcctgaaacacaaaaagcacctncacctattgaagctncagccttatctttagatgagctgaaggagaagacagacaactttggt

SEQ ID NO: 12376 - DNA, 335 bp, Glycine max
ctcttctcttggggtgggcctattggggtgttctccgatttggcctcaattccgccattcctttttttcttttcttttattcctcttttaatttctttttctttttcatggaccgcagatacagagactatcaccatcgtcctgctcatttggcacatgcttctccccctgaatactttgtccgcctggagaacacaacttacaaagacgatctatatttaaggaagaggacaaggatgcgtcggtggctttgttgtacttgtcaggtggaagagtcttacccatcaaatgagaatgaacacctgaaaagcccaaggaattatggagatgcaacc

SEQ ID NO: 12377 - DNA, 994 bp, Glycine max
tagaaacgcatacgcgcaatttctgttgttcagagctcttcaggaagaaaagaaaaacagagaaaaccaaaccctaattagaaacgatttcggaatccctaattcgcaaatcgcaaccctagttgtgctgtgcgttgttgtagtggtttttggaagaggaggcttgagctaaacgctgcgtttcgacgacgatgatcgtgagccagaacatggtgacggaggcggaaattatttgcaagcagaacattccgatgttggacgtgaagaagtaccaccttcgcgtggcgcaagagctcggcgttaacgttaaggtcgtcgaggtttctcccacctctaacggcgttcccgtcttcggccacgtacgggtttcttctgaatcggtttccaccgaaacgactcgttttgaatcggttatgggttgctctgagatgattgaagaatccattatagagactcctgctactgaatttacaccgaatgttcgatctggttgctgtgctgatattggaccgagggggtctatggatgatgagcatattcagatagatgatctagcagcccaccttggatttgtgttcaaacaccctatgccgagtgcattctatgcagtttttgatgggcatggagggcctgatgcggccgcctttgtgaagaacaatgctatgagattattatttgaggatgctgatatgctgcaatcttatgatgctgatgcactttttctgaagaagttggaagattctcatcggagggcattttctgggcgcagaccttgccttggctgatgagcaaagtgttagtagttcctgtggaacaacggcgttgaccgcccttgtacttggcaggcatttgatggttgctaatgctggtgactgtcgagctgttctttgtaggcgaggagttgccgttgatatgtcccaagatcacaggccaagttatttaccagaacgaaggatagtggaggaattaagtggtttcattgatgatgggtatc

SEQ ID NO: 12378 - DNA, 1045 bp, Glycine max
actaatatttttctctcttcctctgtctaattctgaaacaaaacaatgaaacattgagtggcaagtttactgtgtggaatgttcttctgctgataataatgaagtgtttctatttctcaaacggaggagaagacgaggattccgtggcgggagcggcggcggcgagttcgcgcggcggctccacctcgcgcgtgtcgtgggctcgttcgctgagcctgatggacacgcgcagcagcagccgctcccacttcgactccgagtcgacggagttctccgacacggtggacttccaccacttcctggcgcagcgccgcgccaacgatctccgtctcttctccttctccgacctgaaatccgccacgcgcgccttcagccgcgccctcctcgtcggcgagggaggcttcggctccgtctaccgcggcttcctcgaccaaaacgacgtcgcgatcaagcagctgaaccgcaacggccaccaagggcacaaggagtggatcaacgaggtgaacctgttaggtgtcatgaagcaccctaatttggtgaagttggttgggtactgtgccgaagacgatgagagagggattcagaggcttttggtttacgagtttatgccgaataagagcttggaggatcatctccttgcaagagtgccatcgacgataatcccttggggaaccaggttgaggatcgcgcaggatgcggcgaggggtttggcgtatcttcacgaggaaatggattttcagctaatatttcgggattttaagacatccaacatcttgctggacgagaatttcaatgcaaagctttctgattttgggctggctaggcaaggaccctcagaagggtctggctatgtttcaacagcagtaaggatttgtctatactcttgagaaaactcattatattgacaatattgcatcatagtactaacatcagaatagtgtgcctgctggcagcttattttgagtaaattaactatatttcaccatattcaatgtgaatgattctaatttataaaaagttacaatgataatctgaagtctgaatc

SEQ ID NO: 12379 - DNA, 1239 bp, Glycine max
cgacacgacacgacacttgtgttcaaaccatgacttgtatgcaaccaagacacccccaaattaaagtcactgtttcacaattcagttcataccaactcatcactataaaaattgcaagagcccctctgtctctgtagccattcttttccaccacaagataagaaaaaagaaaaaatgtttgcagggaaaggggctgtttggttctccagagcggtggcgttggcagcaatcgcggtggtagcttgcgttgggcttacacaggcccaacccgaggccaggttcaagtgcaacagcgcgaacatccccacgtgtcgcgcgctcataagctactctcacccgaacaccaccaccctcggcgacatccaaaagctcttcaacgtgaaacacatcctcgacatcgtgggagcgaacaacctcccaagcaacgccacaaaaacatacgcggtgggccccaacgaggttgtgaaggtccctttcccgtgcaggtgcagcaacaacacgggactctcggaccgtgttccgctgtacaggatcaagaagggggacacgctgtactacatcgcgacgacgacgttcgcgggtctgatgaagtggccgcagatccaggtggccaataacatagccaacgcgaataatatcacgaccggggacatgctttatattccgctgccgtgtagctgcgacgaggtgggtgggaagagtgtggtgcactatgcgcatcttgtggcgccgcagagcaccgtggaggggattgcggaggagtttggtaccactcagcagatactgctcaaccttaatggaatttctgaccccaaaaatcttcaggcagggcagattctcgatgttcccctccaagcttgttcctcgaatgtgaaaaatgattcattggactatcccttgcttgtcccaaatgctacttacgcctatactgcccatgaatgcgtcaaatgcaagtgtgactccagtaacaatttcatattacaatgtgagccatcccaactcaaaccaaaccaactggtctgtttgcccctctatggaatgctcagccaacgtcttgattggcaaaaccatttcctcagattcctgcaatcgcacaacctgcgcctatactggttatagattccacaatatctctgcagaagctgtaactgagaacacttgtgctgtgccgccgactccgagggttcaggaggatcaactggttctgattcaggagcgtcaaggagcaccttgcaaggc

SEQ ID NO: 12380 - DNA, 805 bp, Glycine max
gggtccccatataaataaatgacgtaatttattgaatgaaagtgtaggtgcttgctttatataaatttaaaagttgacggaaaagtcttattgtagctgtttggttataaaattgaaaaaaaaagacgggaaaatagaatggacgcagatagtgattgagaattgggaattgcgatggatgggagaaacggaagcggaagcaggaggagtggggaagcaggaggaatggggaaggcgataatcgcgttggtaattgggagtcttgtgtactatcactgtgcctaccgcaattctacccttgtctctcttttttccgatgtcttcatcgtccttctctgctccctcgccattctcggtcttctattccgacaaatgggcatccagagagtgcgaacgcgatcgtggcatgggttggccaatacgattggtggcgccgagtcagtgttcagggtggcggctactgggcacgacaagaggctgtttctgaaggtcattctttccctatatctcttctctgctcttggaagactcgccagagggattacagttgcctatgccggactatgcttgttttgtcttaacatctttgccgagtgctctcaatcaattacctttttcgggagaactactgaaactgaagaacaagaccccatcatctaattgtaacaaaactactcattttcgctattgtatgtcttccccgtcaagaataaatcatctttgctgcactattcttttcaggtaagcctttactttccaacgatcaaactaagcattttatgataaaaaataaaatactgcttgt

SEQ ID NO: 12381 - DNA, 493 bp, Glycine max
ggtagctgtttggttataaaattgaaaaaaaaagacgggaaaatagaatggacgcagatagtgattgagaattgggaattgcgatggatgggagaaacggaagcggaagcaggaggagtggggaagcaggaggaatggggaaggcgataatcgcgttggtaattgggagtcttgtgtactatcactgtgcctaccgcaattctacccttgtctctcttttttccgatgtcttcatcgtccttctctgctccctcgccattctcggtcttctattccgacaaatgggcatccaggttcctgttgatccccttgagtggcaaatatctcaggagagtgcgaacgcgatcgtggcatggttggccaatacgattggtggcgccgagtcagtgttcagggtggcggctactgggcacgacaagaggctgtttctgaaggtcattctttccctatatctcttctctgctcttggaagactcgccagagggattacagt

SEQ ID NO: 12382 - DNA, 1163 bp, Glycine max
ttgacagcggcacctacctgtacttgtattattttggtattcgtataaatgttttcctctttctctcttctcttctaaatctaattcgaatcttcgccagttaatagaaactcaactttgagtagataatactgctggatgtctcgtctctaattattgtatttggaaaatagttttgagttgaggatctaatcattaccagatttaatatacttggcaaatggggtctgaaggtcctacgacaccgacaacaacaattcatgtgacaggatttaagaaattccatggagtttcagagaatccaacagaaacaattgccaataatttgacggagtacatgaataagaagggtttgccaaagagattagttattgggagctccagcattcttgagactgctggtcaaggagcacttgtgccactgtaccagagattacaatccgcggttaatgccaaggactctgaatcttcaaattccaataaaattatttggctgcattttggggttaacagtggtgcgacaaggtttgctatagagaaacaagctgtcaacgaggctaattttcgatgccctgatgaaatgggatggaagccccagaaagtccccatagttccttcggatggtggaatttcacgaacaagggagactacacttcctgttgtggagatcaccaaagccttggcagagaagggatatgaagttatggtatcagatgatgcaggcaggtttgtgtgcaattacgtttactatcattcccttcgctttgccgagcaaaacgggatcaaatcccttttcgtgcacgtgccactcttcgtgacaataaatgaagagactcaaatgcaattcgcagcttccttgttagaggtgcttgcctctatacctcagtagtaccattacacttagaccctcaaaagtgggagcccctatatctctgttctggtgtgattatgcttatgaaagtggatgaatgtaccttgaataaaatatttattataataaaaatattgtatttaaatggaaacggtttaatgaaaatggcatatgtagtagaggggcatttgctctcattggtaaatgtttctgattaaaggttccagcacattgtgatgacagtttgatatcttcaatgtttcccttgtgaataaatgttcattttctttat

SEQ ID NO: 12383 - DNA, 970 bp, Glycine max
tacggctagaagacgacagaagggggttgtgtgaaagtgactcccacttcgccttctcttctattctattctatattctttgtctcttctattttttctctaaataaatctaatcggaatcttcaccatttaatcagagctttgagtagataagactcgtggatgtgtcatctcctttattcaacgttgaatattgttattattccttcctggtattaaggaaatactctttcgttgaagctctgaatattaacagagcatcatcggcagatggggtctgaaggtcctccagcagctgtgacagttcatgtaacaggtttcaagaaattccatggagtttctgagaatccaacggagacaattgtcaataatttgacggaatatttgaagaagaagggtttgtcaaaaggcttagttattgggagttgcagcattcttgagactgcaggtcaaggagcactcattcccctctaccagacattgaagtctgccattacttccaaggaatcagaatcttcaagttccaataaaattatttggctgcattttggggttaacagtgccgcaacgaggtttgctatcgagcgtcaagctgtcaacgaggctaccttccgctgccctgatgaaatgggatggaagccccagaaagtccctattgttccttcagatggtgcaattacacgaatacgggagactacccttcttcctgtggaggagatcaccaaggccttggcaaataagggctatgatgttatgacatctgatgatgcaggaaggtttgtgtgcaactacgtttactatcattcgcttcgctttgcggagcagaatgggactaaatccctttttgtgcacgtgccactcttctctacaatcaatgaagagacacagatgcagtttgctgcttccttgctagaggtacttgcttcgacatgccagtaacatccggctcatgcaaatgtcaggtgttgcc

SEQ ID NO: 12384 - DNA, 383 bp, Glycine max
  unsure (1)..(383): unsure at all n locations
tgaaatcttagattttcttgcaagattatgtcaagaccctttcttgcctcctctcattaggataactggctttgccaaatttgcaattttttttttgggttcagttacatggggtgctctttttaccttctctaatttgttttccttgtaaaaagccttgaaatttgatggagtatattattgattgctattactctatgcaattcatcaaaatagttttggattgtgagatgatttctatgcatatgatccacctcataggagaatagttaaatttttgtgccattttttcacttaatttgcctcatcatttaatgcangtattaaagaaatactctttcgtgaagctcttgatataacagagcatcatcggcagatgggtc

SEQ ID NO: 12385 - DNA, 351 bp, Glycine max
ttttgcacgtgccacttttctctacaatcaatgaagagacccaaatgcaatttgctgcttccttgctagaggtacttgcttcaacatgccagtaacatccgactcatgcaaatgttctggtgttgccatgcttatgaaagtggatgagtgagtgtactttgaatgagatgctttaaattatgattacaagatgctgttttgaaatggaaaaaggtttattgcaaatggcatgtgtagcagaagcgtttgctttcatcagtaaatgtttctgattaaaggcttcaacaaattgtcaagacatgttgacatcttcagtcttaccttgtgaataaatgttcattttccttgtca

SEQ ID NO: 12386 - DNA, 335 bp, Glycine max
actcaattaaccttctttttgcgtcaatcttgatatcttagatttgcttgcaagattatgtcaagaccctttcttgcctcctctcattaggataattggctttcccaaatttgcaagttttttgggtttacttacatggggtattgagaaaatactttttcgctgaagctctgaataacagaccatcatcgacagatggggtctgaaggtcctccagcagctgtggcaacagttcatgtaacaggtttcaggaaattccatggagtttctgagaatccaacggagacaattgtcaataatttgaatgaatatttgaacacgaagaagggtttgcc

SEQ ID NO: 12387 - DNA, 463 bp, Glycine max
tgcttgcattattattctcaagcattaagcaatgcctggactttggtacgcgcatcatggcttttaagaagttacatgaatattttgactgaggacttcttgcttaaggtttcttatttactctcctatgttgcttttagagaatctagagtaagcattgtccatctttaatgcaggtagatgcagtggtctacttggtagatgcatatgacaaggaacgatttgcagagtctaaaaaagagttagatgctctgctctctgatgagtctttgactactgtccctttccttatccttggaaacaagatagatattccatatgctgcctcagaagaagagttgcgttaccatttgggcctgaccaatttcaccacgggcaagggaaatgtaaatttgtcagactctaatgtccgtcctatggaggttttcatgtgcagtattgtgaagaaaatgggttacggaga

SEQ ID NO: 12388 - DNA, 2378 bp, Glycine max
atttcagttaccttgaaccacctccacttccaaacagagtctattattcagagagaattccaagggagcaggcagatttgctgaaccgatctacaaagtcagatgatgctcatggttctcacttactcatgtcagatttgctttctgacttcagccagaaaaattcaattacagaatccactgacatgttgcacaatgggaatacatcaaatctgaacatgatgtccagctcagcaggaaagcctttgcaagcagatggccataccattgatgatggatttgccccgccacagacatacaaacagttgcctgatacaacaattaaggtgaatccaaagttatcacagcatgtgaattctgagtcgaagcaagtgctagaagataataaagtttctagaaatgaggatcaggttcttagttctgaaaacgaaaccaaaggcaccgaacatcttgcatttcatcaagttccttctgttgaacaaaatcagaatctagcatctaaacttccagacctcaatttggctgaggtttctaccagggagtctgataatgatactaaggtccaatcccagacttttcctttaactggaaacacaggccaagatgtttctcaagattttcccccagaagctaaatccagacctactcagggtgacattctgattgatatcgaggacaggtttccccgtgatttcctttatgacatgttctccaaagcaataatttctgaagattcctcaagcattggtccattaccaacagatagagcaggtttgagcttaaatatggacaatcatgagcctaaacgttggtcatattttcagaacttggctctagaggggtttgataatgtatctctaattgatcaggataatcttggtttttcgtctgctgtgagaaaagtacaagagggggatagtaaatctcagccatctgctcctcaaccagctggtggtgttttggcaggacgcacagattcccacctaaatattggtgaagaaaatcagaaaaatgtacctgtagcaactaaaacagaagcaagtatctttcaccaaaaatatgagcattcccaactaaagggcaatgaaaataagaacatggatgccataatggaaaacatacgaccacaggagtctgaataccaggatgacaagaatgaaccgaggaatgtggttgtagcaggggaatttgacaccagtactgtgcagttcataaagaatgaagatcttgaagagttgcgagagctgggttctggtacctttgggactgtgtaccatggaaaatggagaggaacagatgttgcaattaaaagaataaagaagagctgcttcactggtcgatcatctgagcaagagagactgactgtagagttctggcgggaagctgacattctttccaagcttcatcatccaaatgtggtggcattttatggtgtagttcaggatggaccaggagcaacaatagcgactgttgccgagtacatggtggatggttctcttaggaatgtattgcttcgcaaggataggtatcttgatcgtcgcaagaggctgataattgcaatggatgcagcttttggaatggaatatttgcactcaaaaaacattgtgcattttgacttgaaatgtgacaatttgctcgtaaacttgaaagatcctatacggccaatatgcaaggttggtgattttggcctatcaaagattaaacgaaataccttggttactggtggtgtgcgtgggactctaccttggatggcaccagagctgctgaatggtagcagcaacaaggtctctgaaaaggttgatgtgttctcctttggcatagtattatgggaaattctgacgggtgaggagccatatgctaatatgcactatggtgcaatcataggaggcattgtgaataacacattaagacctacaatccctagctactgtgatcatgaatggagagcactaatggaacaatgttgggcacccaatcctgcagccagaccatccttcacagaaattgccagtcgtttgcgcataatgtctgcagcagcagctagccaaaccaaaacacagggcaataaagcatctaaatgagttacattgttatcttggcatctcttaatggtgatccatggaagtaaattatacaaggttggttccatacactgtagggtttttttcttcttctttttcttaccataataatccaatactacaagtgcagagttgttgtataccaatgttttactacaagtgcaaaaaattgtcattcaattcctgtatattggatattgtttttcttgttcctttataaattcttgtaattgcaaacattataatcggtattactcgtctagacggcagcgttagtgatgtgctgctagatatttc

SEQ ID NO: 12389 - DNA, 614 bp, Glycine max
ggtgttcgtggaactctaccttggatggcaccagagctactaaatggtagtagcaataaggtctcagaaaaggttgatgtgttctcttttggcattgtcttatgggagattcttactggtgatgagccatatgctaatatgcactatggtgcaatcataggaggcattgtgaataacacattaaggccaacaatccccagttattgtgatcttgactggaaaacactaatggagcagtgttgggcacccaatccagcagtcaggccatccttcaccgaaattgctcgccgcttgcgtgtgatgtctgcagccgctagtcagatcaaaggacagggccacaaggcatctaaatgaaaatcaacagatttgatctgattgccacacacggttcattcaattatgctccaaaaaaatatatattattgttatacaagggccaacaataattgtttgtattgtagttttctggtccctgctctttttgtatttgattgtgaatatgtatgtgtgcatgtgaaaaaccacatatatagactgtgcaaattaacatttgacttaatgctatttccacagtgaattttggactgccaaaaaaaaaaaaaaaaaggaacggg

SEQ ID NO: 12390 - DNA, 500 bp, Glycine max
  unsure (1)..(500): unsure at all n locations
tcctcctgatccttctttagtaggagagtttgatccaagtaccttccaggtcataatgaatgatgatcttgaagagctgaaggaactgggttctggtacctttgggactgtgtatcatgggaaatggcgaggtacagatgttgccattaaaagaataaagaaaattagcttcactggtcgatcatctgagcaagagagactgactgtagagttctggcgggaggctgacattctttccaagcttcaccatccaaatgtggtggcattttatggtgtagttcaggatggaccaggagcaacactagcgactgttgccgagtacatggtggatggttctcttaggaatgttttgcttcgtaaggatgctgcttttggaatggaatatttacanctcgaaaatattgtgcattttgactttgaatgtgacaattttgtcgtgaacttgaaggatcctatgcggccaatatgtcaagggtggtgattttggcctatcaaagatt

SEQ ID NO: 12391 - DNA, 859 bp, Glycine max
tttcacgctttcgcggggagctagctgcaagttttctcatgatgagcaagcatgccttattcatatacacgcggttctgccatggatgcgtcaccctgtcgacatcactcgctgtccagaactccccgtctgtagtgttcctttgatgaaacgcaggttacagtcggtactggaggagaacatgggaatttccaagctgttccctgttcaggtcgcactttggcaagaaacggttggaccgggtgactttgagcgagacctttgcataaactcgcccaccggaagtggcaaaaccttggcctatgctcttcccatcgttcaaaacttgttcaccaaccccggtggccgcctccgtgctttggttgtagttcccacccgcgaccttgctttgcaggttaagcgcgtcttcgacgcccttgcatcgccgctgggtctccgtattggcttggctgctggtcaatcttcgcttcgccacgagctttctagcctcatttatctacctggagaagacgatggtccagatcctgggtttttgtctccgttgtggttccaaagcaaggtcgacatattggtagcgacccctggaaggctagtggaccatgtcaacaagttgtcattgaagcatcttcgttatctcgtggttgacgaagcagatcgattgctacgtgaggactaccagtcctggttacctactgtgcttaaattaactcagtctaggctggcaaagatagttttatctgctacgttaactcgggacccaggaagacttgctcaacttaatttgcatcaccctttattcctgagtgctgggaaaatgcgttatcggctcccagaatatttggaatgttacaaactgatc

SEQ ID NO: 12392 - DNA, 737 bp, Glycine max
aagaaaatggaagcaccagaaactttctttgagagcttgccctaccagtttgacagttcatcttgttgggcaagctctcaaagaaaatggaagcaccagaaactttgagagcttgccctacaaggtgaaccctcaaactggttacattgattacgataagctcgaggaaagggcgcttgattttcgccccaagatacttatttgtggtggcagctcctaccctcgagagtgggattatgccaggtttaggcacattgcggataagtgtggagctgtgttgttgtgtgacatggcgcagattagtggcataattgcagccaaggaatgtgtgaatccttttgattattgtgacattgttacttcaacaactcacaagagtcttcgaggtccaaggggaggcataattttttatcggaaaggtacaaagccaaggaacagagggattcttctaagtcagggacatgaaagtgatcaatatgactttgaagaaaagataaattttgctgtttttccatcgatgcaaggggggccacacaataaccacattgctgcgcttgctatagctttaaaacaagtggctactcctgagtataaggcatacatgcagcaggtgaagaagaatgcccaagctttagcatgtgctttactgagaagaaaatgccgtctagtaactgggggtacagacaaccatctaatactttgggatttaaggcccctgggattgacaggtaaatttt

SEQ ID NO: 12393 - DNA, 471 bp, Glycine max
atcatagttgacattgatggagttgcaagatttgccagaaggatgcattgcaaaaatactgtcatacaccactcctgtggatggatgcaggctctccttagtttccaaagcctttcgttctgcagctgaatcagacactgtgtgggattgttttctcctttccgatttcacctctatcattcctatttcctctacctctaagaaggatctctatttcactctctcagaccatcccaccatcatccaccagggtagaaaaagtgttcaattggacaaaaggaccggaaagaagtgttgcatgctttccgctagaaatctgaccattatatggggtgatactgttcaacattgggagtggacaagcctgccagagtccaggttccaaggagttgctatgcttcaggctgtgtgctggtttgacattagtgggagcataaatactcttaccttgtcctcaaatactcattatgc

SEQ ID NO: 12394 - DNA, 764 bp, Glycine max
  unsure (1)..(764): unsure at all n locations
aggggcggtgaaagctatggttgtggctttggggaatgaaggagttgctgaggaagcagctggtgccttggccttgattgttcggcagcctgttggcgccatggcggtggtgagggaggaagcagcagtagccggattgataggaatgatgcgttgtggaacgccgagaggtaaagagaatgcagttgcagcattgttggagctgtgcaggagtggaggtgcagctgcaactgaaagagtggttagggcgccggctttggttggattgcttcaaaccttgctctttacaggtacaaagagggcaagaagaaaggcagcttcactagctagagtgtttcagagatgtgaaaatgcatctctccattatggtggattaggtgtaggttattcatttgctagcgattcagcttcaaccagaaatactacaacctttgtgagtgacgtttcacttccaatgtccatttctgttcctgttttatagtggtaatactcattctcatgtttgttgtgttcccgatttttgttgtaactctattgattctttcattgaaatttaaagtcatcaagtataggaataccagatatgtattctaagacttagagaatgatgcgttgttgagcagttagcttcaacccatttgtaatggagttattgccacacagaatatatactgttntaaagtctaattattagaccatttcaggcgttctattttttctgaacttcactcctcccgttggcnatttattggattnttaagagt

SEQ ID NO: 12395 - DNA, 436 bp, Glycine max
acaaattacaactgaagatcaagatttccactacaaagttacattatactaccaatttctcactcaaaacttagggaaaatgattgagatacttctgaatttgcagctgttagctcctttcttccttttcttcatctttccagtgtttttcttcttctttctcacgtcctcatgtcctactaaaggaagcatcactatcccaaaaccatacccactgattggtcactacttagacctcaaaggcatcggcaaccgccgtatccagtggctatccgacatcgtcaaaatctcaccggctaccacgttcaccctccaccgccccttaggccgccgccgagtcatcaccggcaaccccgccaccgttgcgcacattctcaagacccgtttctccaactaccaaaagggctacaccttcattcacaccctctccgatttc

SEQ ID NO: 12396 - DNA, 314 bp, Glycine max
attacaactgaagatcaacatctcccactacaaagttgatactctcattcagaagtcaggaaaatgattgagaacatacttctgaatttgcagcttttagcacctttcttcctcttattcatcttcccagtgcttctgttcttctttttctcgtcttcaggttccaaaaagaaagaggcaagcataaccaccatcccaaagccatacccacttattggtcactacttagacctcaaaggcgtcggtaaccgccgtatccagtggctatccgatatcgtcaaaatctcaccggccgccactttcaccctccaccg

SEQ ID NO: 12397 - DNA, 919 bp, Glycine max
cccacgcgtccgccagaatccaagggggttcctgctagtgtacagatatttgcttgtggaaatgcgtctcaaagtcaacctgttgctcgacgtagttttttccgatgttcaaccacccaacttaaatggaatcatggctcaactgggcttctagtggtggtgcagtcagatgttgacaaaactaatcagagttactatggagaatcaaagttatgctatctgaccacggatgggatgcatgaaggacttgtgcctcttcggaaagatgggcccattcatgatgctcagtggtcatattctggcttggaatttgctgttgtatatggatttatgcctgctaaagcaactctgttcgacaagaagtgcaatcctctactagagcttggaactggtccttacaacactattcgctggaacccaaaagggaaatttttgtgtttggctggctttggtaacttgcctggtgatatggtattctgggattacattgataagaaacaacttggagccactaaggctgaatggtctgtgactagtgaatggtctccggatgggtgctatttcatgacagctacaacagctccaaggcttcaagttgacaatgggatcaagatttttcactacaatgggtcattgtacttcaagaagatgtttgacaaattgtaccaggttgattggaaaccagagtcacctggtaagtttggtgatattgccgaattaattaagtctctaaatttggtacaacttgaagataaaaaaccatcaggtcaaggaccaccaaagtctacccagacttctacaaaggcctcttctgccaaccccacaacacaaaaacctgctgcatatcgtccaccacatgctaagaatgcatttgctattcaggcagagttgtctggagagactactgcagaaacactga

SEQ ID NO: 12398 - DNA, 478 bp, Glycine max
tcgaccgcacgcgtccgatacatttgattatgctcgccactttctttcttgctgcagtagaatgctaggtctggacggtgaatctaagcgaggagatatagggcttgattactttggccgcactatatttattaaaattttgcctgtaagcattcacatgggtaggcttgaatctgtgttaaatctttcttctacatctgctaaactaaaagaggttcatgaagagtttaaggataagaaagtaattcttggtgttgatgacatggatatttttaagggcattagtctgaaacttctagctgtggagcatctgctgcagcagaatccagatttgcagggcaaagttgtcctagttcatattggaaatcctgcaaggggctctgggaaggatgttcaggaagcatagaacgaaacatattcaattgcccagaggatcaacgatacatatagctcaaataattatcagccagtcattctc

SEQ ID NO: 12399 - DNA, 579 bp, Glycine max
tgaataggagataggattttttgtgcgggctaaggcagacacattcatcatattcttcaaaaaaagaaaaaacagtcttagaaatgacacgatccttggtaatggcttcttcatcaatgtcatgtccgaagctggggaattgtgcagtgtcacatacaaagttccaagcttttcatctctcttcaatgttctctccactggatcgaggccttttctcaccttggagtggtttaaagcatctgggtatctcagctaaaccaaaacctcttcttcacatagatagaaagggagggtgtaagggtaaagtggtatatgcttctctctttggggttggagctcctgaggctttggtaattggggtcgttgctttgttggtttttggccctaaaggtcttgctgaggttgctcgaaatctgggaaaaacattgcgtgcatttcaacccaccattagagagcttcaggatgtttcaagggaatttaagagtacacttgagcgggagattggtcttgatgacaatttaagtcctacccagaacacatacaattccaatgtacgtaataccacaccaacttcatcat

SEQ ID NO: 12400 - DNA, 722 bp, Glycine max
aatttgaaagaaatcttataaaaagaagggacaaacattatgagaaggctcctatatgtagggagagagggaggtagtagctgatatctagcacacagtatatgtaattattgaataaagtagtgataattgactttgcattgcagcagaaaatatggaattctacatgtccagagcatgtgttggaaaatctgaatggttgcacggaagattgtaacacagaacaggagcaagaagctattggttttaaggtgaagaatgcaatgctgtatccgcgtgaagtggagaaaggactatggccagaagattattctctttctgatcatgctagactcacagctgtgttttcaccagcaaggatgagatgttctgcctcacaaaactgaatgtacttcatggcactaatagtcttagcccacagaaaaatattcaattttgggaccagtttggtgtaggggtaaactgaagtgatactttttttcactttcatttttagtcccctaccaaacatgtcatgccataattagtgattagtctgtcttgtatatgtgtttggagtcaaattaaagtagtgttgtgctgtaatcagttttggtaagccctggccatgttttttttctctggtaatgggataacaatgtaaagatatttttgcaatgtagaagtggatgtgcatattatgtatttccttctcactgtttgaatccattgattttgacaag

SEQ ID NO: 12401 - DNA, 1018 bp, Glycine max
gttaacatgtatgacgagagacttggggatgctggctacaatctcttcaagctcgcgcgaaccaacaatcgcggagatggtctgctgactgctatacgtaaagaatgtctaagagttatggattataaagagttgcttttaaacgattgtggcgatcgcgttgctcagttgttacatgttcagtcagctaccccctttgtacaaaacccaaaaggcagtgttccccaagagtttctgattgtgaacacccacttgttatttcctcatgattcaagtctgtgcgtagtgagattgaatcaggtttaccaaatattgcaatatgtggaattgtatcagagagaaaacaggctcaaacccatgcctattatactctgtggtgactggaatggaagcaagcgtgggcatgtttacaagttcctaaggtcacaggggtttgtatcatcatatgacattgctaatcaatacagtgacagttatgcagattctcacaagtgggttagtcaccgaaatcataggggaaatatctgtggtgttgacttcatttggctttgcaatcccaaccaagcacgtaaacctttaaagacaagttgggctgaagctgtatttagtatactaaaattccagttacgaaaagcatcgttatctgaagatgatgcatttgcctttctgaagggtgacaactatgctgattctgtgacatattttagcttctccgaagcacttcggcaggtgaagttaattggtgtgccttatggactacgttttcaacagttgcaagatctatggaatcaagcagatgctgatggaaatggtgtcatagactttgaagaattcaagcagaaaatatggaattctacatgtccagagcatgtgttggaaaatctgaatggttgcacggaagattgtaacacagaacaggagcaagaagctattggttttaaggtgaagaatgcaatgctgtatccgcgtgaagtggagaaaggactatggccagaagattattctctttctgatcatg

SEQ ID NO: 12402 - DNA, 861 bp, Glycine max
aacgtttgagaattgaattcgttcagatttgaaaatgtgggttaaggttgttcttcttctccttgcagcactttctctttttcacttagccgcagcttctcttaatcgtagcagtttttcagcagatttcttctttggaacagcttcttcagcttaccagtatgaaggtgcagcacgtgaaggtggcaagggacctagtatatgggacaccttcactcatagccacccagatagaatagcagaccacagtaatggggatgttgccattgattcataccaccgctacaaggaagatgtggccatgatgaaggatattggattcaatgcctacaggttctccatctcttggccaaggatactacctcgtggaaacctgcagggaggagttaaccaagaaggcatcacatattacaacaatctcataaatgaactgatagcaaatggacagcagccctttataactctatttcactctgatttccctcaagctcttgaagacgaatatggtggttttcttagtcccaaaattgagcaagattttgcaaattatgcagaagtatgcttcagggaatttggtgacagggttaagcactggattacattaaacgagccagtgctatatagcaatggaggttatggaagtggtggatccccacccaatagatgctccaagtggtttgctaactgcactgctggtgattctactaccgagccctatttagttacacaccacctcattcttgctcatgctgcagcagtaaaggtctacagggagaagctccaggcttctcagaagggtcaaactggggtaacactgaattctgcttgggttgcgccactttctcaatcaaaagaggacag

SEQ ID NO: 12403 - DNA, 642 bp, Glycine max
  unsure (1)..(642): unsure at all n locations
gtcaaatctactcttgtgccagggtgtggtctccacccccgtctgtcccaatgggcgctggcaactgccaggtatcccttcgagacctgtttgaccgggcagtcatggtgtcccactacatccatgacctctcctcggaaatgttcaacgaatttgataaacggtatgcccagggcaaagggttcattaccatggccctcaacagctgccatacctcctcccttcctacccctgaagataaagaacaagcccaacagacccaccatgaagtccttatgagcttgattcttgggttgctgcgctcctggaatgaccctctctatcacctagtcaccgaggtgcggggtatgaaaggagccccagatgctatcctatcgagggccatagagattgaggaagaaaacaaacgacttctggaaggcatggagatgatatttggccaggttattcctggagccaaagagactgagccctaccctgtgtggtcaggactcccgtccctgcaaactaaggatgaagatgcacgttattccgctttttaatacctgctccactgcctgcgcagggattcaagcaagattgacacttaccttaagctcctgaatngcagaatcatctacaacaacaactgctaaacccaca

SEQ ID NO: 12404 - DNA, 514 bp, Glycine max
cctcgagccgaatcggctcgagtattgcacagagagaaataatacacatatagcagagttagaagctgagcagctatcagaaatatccacaacacagctgagaagttcattttcaaaatggccggtggggtggttcctgtggatgcatcaccgattggaaatggcttcgttggcaagataacgctctcagttatcatcacttgcatcgttgctgcatccagtggactccttttcggatatgacctcggaatttcaggaggtgtcacaacaatggtaccatttctggaaaaattcttcccagatatattgagaaaagttgctggtactgaagtgaacatgtactgtgtgtatgatagtcaagtgttgacattgttcacatcttctctataccttgctgggttagtgtcatctctcgcagctagtcgagtcacagcagcatggggtcggcgaaacaccatcttaattggtggcgttacatttcttattggtggtgcccttaatggaagtgctgaaa

SEQ ID NO: 12405 - DNA, 702 bp, Glycine max
gttccattctgaaaagtaaaaaaatacaaaacaaaaattgaaaattccaagttggggttctcacgatttcgattcaccctttctcccacaaactccgattcttcttgtaaacagcggtgccaggtgttaatctagaagttgatataggatgggggcaatgatgtcgaggttctggttcatgttattccctgcaaaagagtataagattgttgttgttggattggataacgctggaaaaaccactaccctttataaattgcatctgggtgaggttgtaacaaccaatcctactgttggtagcaacgtcgaagagctcgtctacaagaatatacgatttgaggtctgggatcttggtggacaagaaagactgaggacatcatgggcaacatattaccgaggaactcatgctgttattgcggtgatagacagcagtgatagagccaggatctctatcataaaggatgaactttttaggttgctggggcatgaagatttacaacattctgtcattcttgtctttgctaataaacaagatatcaaggatgctatgactcctgctgagatcactgatgcactctcacttcacagcatcaaggatcatgattggcatatacaagcttgctgtgctctctcaggagaagggctgtatgatggtcttggatggattgcccagcgagtaactggcaaagccccaacatgatg

SEQ ID NO: 12406 - DNA, 505 bp, Glycine max
gaaaacaaagggggaaaaattccaagttggggttctcacgatttcgattaaccctttctcccacaaactccgattcttcttgtaaacagcggtgccaggttcgatctttgcgttcgtcatgtttctttttgcacgtttcatcgatctgctaacttgacatttgatccgacgcaagctcgttgcttttttgtattggaaatcagattttcagatacccttttgtgttcccaattaatgggttttgtctggcgattgtatgggtgttaatctagaagttgatataggatgggggcaatgatgtcgaggttctggctcatgttattccctgcaaaagagtataagattgctgttggtggattggataacgctcggaaaaccactaccctttataaattgcatctgggtgaggttgtaactaccaaccctactgttggtagcaacgtcgaagagctcgtctacaagaatatacgatttgaggtctgggatcttggtggacaagaaagat

SEQ ID NO: 12407 - DNA, 325 bp, Glycine max
ctcacgatttcgattcaccctttctcccacacactccgattctccttgtaaacagcggtgccaggtctgggatcttggtggacaagaaagattgaggacatcatgggcaacatattaccgaggaacgcatgctgttattgtggtgatagacagcagtgatagagccaggatctctatcataaaggatgaactttttaggttgttggggcatgaagatttacaacattctgttattcttgtcttcgctaataaacaagatatcaaggatgctatgactcctgctgagatcactgatgcactatcccctcacagcatcaaggatcat

SEQ ID NO: 12408 - DNA, 512 bp, Glycine max
ggtatctatgatgttgaacatttcatcaaaacactgaggtatgatgtaaagattgttgaaagcattccagagaatcagaaaaatggcaaaaagaagaaaataaagccatttcagcttcgccctcctagagatgctcctgtaagttggtatactactgatgctctgaagaaaatgaaagaacatggtgccatctatcttactcccttttcacatcgcttagctgaagaaattgacaatcctgagtaccaaaggttgaggtgtagagtcaactatcatgctttaagatttaagccacatatcgtgaagctaagtcaatcaatagttgaaaagctacgcgcacaaggtcccttcatgtccatacatcttcggtttgagatggacatgttgtcatttgctggatgcttcgatatatttacacctgaggagcaaaagattttgaagaagtaccgaaaagaaaattttgcacctaaaaagacttgtctattatgaaagaaaggcttttgggaaaatgc

SEQ ID NO: 12409 - DNA, 923 bp, Glycine max
tttggtttgcacgccttcattggcctagggttcaacgagcgcaacgaggccttcgatttcaacgtcgcgctctccgatcacgagaagtacgtccgccgcgagcacgagaaggaggccggccacggtgccgccgccgccgccgaggagtcgcagatcgacattcaccccgccgtcaatcacaggctcaaggaaggggaaaccattaggattaatgtgaagcacaaatcaactagtggaactggcatgctctcagctgctggcctaaccagtgggcatgctgcgacaccaaagccaaaaatcgtgagtcttgctcccccaccaagtggagctgggaaaatcaggtctcctcttccacccccaccaaatgatccagttgctgctcggactgcttccaccagtcgtgctactggtcctaaagggacatacgaaagtgtgaaacattctaccaacgctttatcagatttttctcaactacagaaaaatcttccctcaacgaccacctctggatcgaccacagcttcaggatgggcagccttctgattatatatatgagcattttaacaatgaggcttttattattctctgatttttttggttctttattttgagaaaagaaacagtggaagaatctgcagaaagagatttcataagtaaagttagcacaaagtaccaagtaattcgattgcttgaggaatgaatatcctggaaatatttatgtttttctttgtttgtaataacagttttctcatatctctataaaaagaatcaccccccgaattttcttacccccgaaaagaatctttctttgactgaggtgtgcttgtgattttatgttcaagggactgttccggatgtcatgtgtcattgtaataattataattacaaagtgacaatgttcatttcaacaaatgctatatgttgtt

SEQ ID NO: 12410 - DNA, 590 bp, Glycine max
cggaggccaccgtcgtctctcaaagtaagcccttccctttccatcgttcacagcggcgcctctggttctctcactccgcaaccaaacgacacccatcttcgtgtcgtctccctgaaacgacaccgccaccgaagcagaaccctaaaactttgcttcagcgatgcagcacgacgaggtcatatggcaagttatcaggcacaaccattgcagttacatggccaaaattgcgacggggaatttttgtagaaacccttacaacgtgactggggtttgtaaccgaagctcgtgccctttggctaatagtcgctatgccaccattcgcgacgacaatggagtgttttacctttacatgaaaactattgaaagagctcatatgccgaaagatttgtgggaaagagtaaagcttcctaggaattacgagaaggcacttgaaatcatagataaacatctgatgtattggcccaaacttcttatacacaagataaagcaacgtttgaccaaaatgacacagatgcggatacgtatgaggaaacttgctttgaagacaagggagaaaataatgacaactccaaggaaagagaaaaagagag

SEQ ID NO: 12411 - DNA, 704 bp, Glycine max
gtggcgcagtggctcagttactctttcaaaaccctgaaaatccaaaatcagccatggtttcaaatggtaggatgctgtgttcaagcttgattacagcacctccgtcatcctccctctccagaactactccatcctacttctgctcatttccttctcgtagaatcatcttcacgccaagaattggatcatctccggccccggcccaggcccaggcccagcccaaggaagccaagctctggggtggcaggttcgaggagggcgtaaccgacgttgtggagaggttcaccgagtcgatctccttcgacaggcagctctacaaacaagacatcacgggaagcagagcacacgcttcaatgctcgctcaccagggtttgataaccgtgagtgacagagactccattctccaaggtttggacgaaatagagaggcgcattgagaatggagagttcaattggagagctgacagggaggatgttcacatgaacattgaggccgcgctcaccgacttgatcggtgagcctgccaagaagctccacactgcacggagccggaacgatcaggtcttgacggattttcgcctctggtgtcgcgacgccattgacaagatcctcgtgagcatgaaacagcttcaggtctcactgatcaccctggctttgaacaatgagggtctcattgttcctggttatactcacttgcagcgcgct

SEQ ID NO: 12412 - DNA, 240 bp, Glycine max
atgggttcaataggtacggtgtgttcatgcttcattacagcacctccgtcgtcatcttccctctccagtacaactccttcgttctgctgcgcatttccttctcgtagaatcatcatcacgccacgaatgggtccatatccggcccaggcccagcccaaggaggcccagctctggggtggcaggttcgacgatggcgtaaccgacgttgtagattggttcaccgagtcgatctccttcgac

SEQ ID NO: 12413 - DNA, 605 bp, Glycine max
caacccagcacaaaaatggagacccacaaaaatggagaaccaacaaccggcacctatctccgtgacactgctacatctgctatccaaaacttcgctcccatcaacaaaatccaccaacatctctgcgcgtttcacttttactcatatgacatgagccggcaagtggaggcacaccatttttgcgcgcaccagaacgaggagatgaggcagtgccttatctacgacagccccgagaagaaagccaggctcatagggctggaatacatcatctccgaaaacctttacttgacactccccgaccaggagaagcgtctgtggcactctcacttgtacgaggtcaagagtggcctcttcttcatgcctaaggttcctgctctcattcagcgcccagacatggagactgtctgcaccacttatggcaaagtctttcatttctggcaggtcgataagggtcactctcttccatttgggatacctcagctcatgatggctctcactagagatggccagatctatgatcacctcctccaaagttctgcagagcgcatggggatagactatgaggaagaaagaaaagcgagagaatatatgacagggccagttca

SEQ ID NO: 12414 - DNA, 457 bp, Glycine max
cgagaagaccacagaaggggatagcagtccctcattctcgtcatgtcacgtttctctcgggacctggaactcaacacactcttcgaaactctggatctgttcttctgcttctaagagacaacattctcttcttgaatctcaatctctcggaaactaaaccctaagaacagacaaagatggtttacaccatctcgggaattcgatttccggttcttccttcgctgcacaactcccgcttccgtggcgatcgcagaactgcgtctcttcccgtttttctcagaaacaactccttctctcgtaaaacccttgctctaaaatcttcccatgattctgattccttgtcttctgcgattgccgaatctgataaagtacttattcctcaagatcaagataactctgcattcttgacagatcaacttgaaactcctgatataacctcagaggatacacagaactt

SEQ ID NO: 12415 - DNA, 611 bp, Glycine max
gggagtttccttggcggtttaatttgtcttagggttggcgatagccccagctggatccgaggctaaaagctagaaactttatctgttgcgttgtgctatggatagacaagaaaatttgttaccatcctccatgcccagccagctgttatcaattgacgaggaactatggcgaatggctgaagagagggcacaagagatactatggacaattgaaccaattgtattatctgaggtgaacagaaaagatgttattgattatgttcagaggctgatcagaggttactatggagcagaggtcttgccatttggttctgttcctctaaaaacctatcttcctgatggagatattgacttgacagctctcagtcatgaagatgcagaggaggatttggcacaagcagtatgcaatatacttcaaagtggagatgaccctgagtaccaagtaaaagacatacaatatattcgtgcacaggtccggcttgtgaaatgtacagtgaaaaacatagcagttgacatctctttcaatcagatggctggaatatgtactctacgctttttggagcaggttgaccaactttgtggaaagaaccatatttttaaacacagtatta

SEQ ID NO: 12416 - DNA, 899 bp, Glycine max
cccacgcgtccggtttttgtgtgctcttggattggttgttagaatggagggtcagagtaagggtagttttaatgtgatggaagggagtgagggcaaaggaagggagtttgtggtggaaaagtctgcatcatcaatagtgggaacttgtgatttggttctaaggattttggcctttttactaacccttgtggctgctgtagttattgggacagataagcaaactgccattgttccaatcaagcttgtggattctatgccaactttgtacgttcctgttgcagctaagtggcattacttgtctgcctttgtctattatgtgggggcaaatgcaatagcatgtgcatatgcaatactgtctctcttgctcactcttgcaaataggcgtaaaggcaaaggaacgatggagacattgatcactgtgctggacacagtaatggtagctttgctcttctccggcaacggagccgccatggcggttggtctccttggcttgcaaggaaactcacatgtgcattggaacaaagtgtgcaatgagtttgggaaattttgtgaccaagtggctgcttcccttttcatatcactgcttggatcaatagcattcctcttgctgctgatagttcctcctgttttgagacttaaacagacaacttaaggtgcctaggagtctttaatcactgaatcaataaatttaatgtggttaattatccacaactttattttatatgttatgtgtgagaattaatagtattatggtggcaccctaagcccaatagactgactacattgtaatgtgagacaaacttgtcctttttttaggaacatgtaatgggtttatttggattatagcatatgaatgtatgctagacattcacctttctatatggtgttagaatttgacc

SEQ ID NO: 12417 - DNA, 560 bp, Glycine max
  unsure (1)..(560): unsure at all n locations
gaagaaatagataaccatcaaccgcaaccgtgtaaatttctggaactttccaccatgatcgagatcctacacctgtagaacactaacttcaatacccgaatgatttaaacaccgtattccttcgacaccattatcatcaacaacctcaaaattccaagcacaagttctctgagttgttttgtgagatagcacatagcatagcaaggaaggagtattacaaccgaaaccctgaagaaaaaaagagtagaggaagaaaaaacacctgcaccaccaacgatgggtgtggattactacaagatcttgcaggttgataggagcgccaaagacgacgacttgaagaaggcttataggaaacttgctatgaaatggcaccctgataagaaccccaacaacaagaaagaagctgaagctaagtttaagcagatttccgaagcatacgaggtacttagtgatccccaaaagagagcaatctatgatcaatatggagaagaaggtctgaagggtcaggttcctnctnctgatgctggtggtgctggaactggaactatcttcttcttcac

SEQ ID NO: 12418 - DNA, 469 bp, Glycine max
ccatcatcatcaactacctcaaaattctaagcacaatttctctgagttgttttgtgagataatagcacatagcataacaagggaaggagtattaacaaccgcaaacctgaagagaaaaagagcagcagaagaagaaacaccaacgatgggtgtggattactacaagatcttgcaggttgataggagcgccaaagacgatgacttgaagaaggcttataggaaacttgctatgaaatggcaccctgataagaaccccaacaacaagaaagaagctgaagctaagtttaagcaaatttccgaagcatatgaggtacttagtgatcctcaaaagaaagctatctatgatcaatatggggaagagggtctgaagggtcaagttcctcctcctgatgccggtggtgctggaactggaactactttcttctccacaggagatatgccgggatcgtttcggttcaatccgaggaat

SEQ ID NO: 12419 - DNA, 847 bp, Glycine max
tgttatttggtgagtcaatcggagttgttggagcagctgggcttgtacttggtgtcataggacttgtactgctcgagttacctgccctatcatttgatgaaagcaacttctcactatggggaagtggtgagtggtggatgctacttgcagctcagagtatggcaattggcacggtcatggtccggtgggtctccaagtactctgaccctgtcatggctactggatggcatatggttattggtggtctcccacttgtgctattcgcagttcttagcaatgaccccgcagtgagtttgagtctcaaagagtacagttcgactgatatattggcactcctctacacatccatttttggaagcgcagtcagctatggtgtgttcttttatagtgcaactaaaggtagcttgaccaagctcagttcacttacgtttttgaccccaatgtttgcttcaatttttgggtttctctatcttggtgagaccttctctcctgtacaactagttggggccttagtcactgtggctggaatatacatggttaacttcagtagcacatctgaatgaattgtcattttcgcctggttccttcaaccttattccaatgaaaaacaactctgggaattagatgttttccatgaactcaaattgggaacgataaaagcaagtttggacatggagaggagaaattgcagtgatatacaacttggagcccttgtgctcatgctagtgtaaatacaattttgttttgttagttaatttaggcctcgagcctcttcctatgcaatatataccaaaaacttgaagttacctgggcagaacacaagccttatatcggaataaattgtttc

SEQ ID NO: 12420 - DNA, 471 bp, Glycine max
aattatacctaggtttcaggttcatcaagcattttcttattcctttgtagtgcattggaatggaagatcagggtcagcagcagcagcagcagcatcaagtgggggcaaagagtccaaggcaaggcaccgagaggagtgaagcggttcggtcaaggtggactccaaggccagaacaaatcctcatactcgagtccatcttcaacagtggcatggttaaccctccaaaggacgaacccgtcagtatagggaagcttctcgagaaattcggcgccgtcggcgacgccaacgtcttctactggttccagaaccgccgctccagatcccgccgccgccagcgccagatgatgcaacagcaggctactgccaccgccaccgccaccgtcaccacctttgatcaccctcagcctcagactcagactcttgttaatgttggtggtgcaattccacatgatcaccacaccttgggaaacc

SEQ ID NO: 12421 - DNA, 645 bp, Glycine max
ctcgaccggttgagtacaccgtggccaggtcacgctttagctttgacgattttgaagcgtatcaggctttgtcacacagtgtaagagaccggttgattgaacgcgggcgtgatactcatgtgtacgtcaagagaacaaaacctaagcgcctctacttcctttcgcttgagtttcttatgggtcgttccttgtcaaatagtgtcatcaatcttggcatccaggatcaatatgcagaagccctaagccaacttggatttgagtttgaagttgtggcagagcaggaaggagatgccgccttaggaaatggtggccttgctcgtctatcagcatgccaaatggattctttagcaactttggattatcctgcatggggttatgggctgcgatatgaatatgggctgtttcgtcagatcatagtggatggctttcaacatgagcaacctgattattggctgaactatggaaacccttgggagatagaacggattcatgtaacatatgaagtgaagttctatgggactgttgaagaggttgagatgaatggagaaaaacatcaagtttgggtccctggagagacggtagaagctgtggcttatgacaacccaatacctggttatgggacaagaaataccatcaaccttcgac

SEQ ID NO: 12422 - DNA, 507 bp, Glycine max
atggataatatcgtgtggcagactccagcgaatcccccgcaccctaacgattacgtctttcgaaacgggattcgatacgttagaccatactacttcgaattcatcgctcatgttaaaaatcggtgggcagggaaaaccattgtggatttgttcgctgaggaattcaaaggtcgaccttatgagtattatgttagtgcagtgaaatgtggaaggattcaagtggatggtgagatggtaccggtttcatacatagttaaatcatctcaaaagataagccatttcttacacaggcatgaaccacctgtgatggcttgtgaggttcctgttcttcaaaaagatattgatgcgctaactgtttgtaagccagcatatgtcccttaggtgcacccatgtagtcaatatcggaagaacactgttgttggcattcttcaagctagagcatgggctgacccctttatttcctggtcattagactggatcgccttgtctcaggacttcttaatttgg

SEQ ID NO: 12423 - DNA, 617 bp, Glycine max
  unsure (1)..(617): unsure at all n locations
agactttaatattttttgatctcatttgttactgccctcattggattctatgatttatacaaaaatgttcctgttctcaaggcaactgcatctcgtatatgtgggcctcttcttgattggattgaaacttgggagatggtttcaagggtcaaatacttaggcacaatgctgtttctacataacttccagaaggctgttaggtggtttcttgcctttacacataccatgcgatcatttttttcctttcttgttcaacctcttgtagagtcattggtggagatttttggatttcttctcccaagcttcaagtttttgtttgaattagctgaaagcatcttttctgtcatttggctcgtagtggatacttcttttgatatagtgggaaatgtactggagctgctcttttcaccattttggtttgtcctcaatgttgtttggagcattgctactatgtagtcttatatcctctattttgggttctctgggaattcctatatgctcctgttcgtcttgtcctggtgatattcggttttgtggcttccatatgttcacacattngtaatatgcttggcaacacgtggcagtttgttagtaagattttccagtttgcagcatct

SEQ ID NO: 12424 - DNA, 503 bp, Glycine max
gactccgaagtccccattaaattcaaaattgaaaaccgaaggaaaactcagcgtgtgattgaaatttgaagagtgtgaagatggcgatggaagtggagcagaatcagaatcatcaattagggtttcccttctggaaaccgctccgtcgcaggttcggacccgaatctcctttcttcgctcatggcaacctcgaacgggaacttctcgccaaacagcttgctttggaattaacagaagagaaacaacagcttgagaaatggatgcaagaggaagaaggaagggaagtcttttgtcccattgtgggttgtggtgcacgcttgacctcaatggaggactttgaaaatcactataatgcaaggcatactgcatcctgttctgtgtgctccagagtttacccgacatcttggttgctcagcatacatgtatctgaagtgcatgattctttccttcaagcaaaagttgcacgtggctatgatatgtacgaatgcttggtggaaaggtgt

SEQ ID NO: 12425 - DNA, 711 bp, Glycine max
  unsure (1)..(711): unsure at all n locations
cccacgcgtccgcatgtgctgtgttgtgtttatgcattggtgattactgattagctagcagggagcatcgtccccttctccaaagatcgtataaccttcaatccatcttcatctccggtgagtcaagttgcagctactttggcatcgtattttctgggtcagttctgtcgaattccttggtccaagactttgcagctgaaccagcagcatggcgggtcagtcctccaatgaaggctccagtactggaaacatttcagcagaatgttccgattcaactgttcagctcaatatcaagactctagattcccgcatctacagttttcaagtggacaaaaatatgcccgtctcgttgttcaaagagaaaattgcaaatgaaattggtgttccagttaatcagcaacggctgatatttagaggaaaagtcttaaaggatgagcacgctctttctgagtattatgttgagaatgggcatacattgcatttagttgaaagacaaccaaatcagtcgcaggcttctggtacgagttctggtgagtcaactggtacaagtggtaaccgaggaaatgatgtaggctcaggggctcctcgtaatcatgttgggcaaatttcacacagtgttgttcttggaacatttaatgtgggcgaacaaggtgaatgaattgttcatgatctcactcnggttattgggcatgttttaaactctattggaaa

SEQ ID NO: 12426 - DNA, 544 bp, Glycine max
acgcgtcaacgcgtgatcaacccttacggctccgcagcctacaactttgtcaccatgggcgcttacagaggtggcctcgacacgttcgctatcataggcatcgcttcgaagcctcttcacgtctacgccaaacccacctacgagtgcgcgtggttctcactcgccggagacaacaaaaaagtttcctccaccgtcggttacaagatcctccccgactggggctacggccgcgtctacaccgtcgtcatcgtgaactgcaccttcccggttcccgtaaacgccgacaactccggcgggaagctcgtcctcttcgcctccacctccggcggcggcgacgccagcttcaacaccactgatagaatcgaagctctcacggaacaacctcgcaccgctcgacacaacctttgttcttcttcgaaagccccaaatacgattaccttgtactttggggtctttcgctctacggggaaccttgaacccgcaaccgcgttgaaggaagtgcgatcggcgtaaccacgtgaaacgttcttcgggacccaaaatc

SEQ ID NO: 12427 - DNA, 732 bp, Glycine max
  unsure (1)..(732): unsure at all n locations
ctgcctcagcagcactaaatagtgaattctttaccacagagccctatgcttgtgaaccatcaagtttgccagggtatcctcccagcaaagaattggatgtaaaactgagagatgaagaagcaagaaggcaaaaggctctaaatgggaaagctagtgcagttgatggtgcaaaaaaagtcagagtacgtgagcgtgaacgtggtcgggctgttccagcccctgaagccaacgcagagatccaaacaaacttagataggtggagagttgtgacccatgcaaatgcaaaaagcaagagtgagaaatttccaccttcctcatcaagatggagctgttggatacccacaagatgcatcaaataaaggacctgtttcatttggcgccccagacactttcttctcttcagggatatttaattcaaaaccttctggacatgttaggaatcatgctgctgcagggcttcacagagggaggaaaactaagaaagatgagtcccagatggcatcatcatggaaattcatgcgtccattcaagccatcaacaggtggactttccatggatttattatttaggagcaaataatcaatcagtttcttttgattttggcttcctagaatatgagggtagtgatgatttaggccttgatacatcttcttttgcatttcgcaatggttttcattttttttgtgtcgctcctcattttttgtatttcattccgcacanagttgttgtata

SEQ ID NO: 12428 - DNA, 966 bp, Glycine max
ggtgatagaaaaaggaggaacgcagaccgaggcgtttccagttcgataggtgaggaggaagtttaggattcgtggtggtagcaattaatttacgtttatgaatggttgggaactttagttcttttgatttgaggtatttttgtttgatgatgctctgtgagtgtgattggttgctcatgcgataacactttcccttctgcttcagtggattgctggaaattgttcttactgatttacatcgactgactgacttgtttctttttactgttattggaatgagaaatttgtggactatttcatgttctgatttcaaattctagtttaatttggttggttgagattgtggaagtctatttgtggttgcttttgcgacaaaggaggaacgcagaccgaggcgtttccagttcgaaagggaaatgaaagtgtctttgttggtgaagggtaggtgagagaaacgaaaggggtgtgtgttgggttgaataggtatagataggatcaatgagcaacaacaacgcaggaaaggtggtgtgtgtgacgggtgcttctggtttcatagcttcatggatcgtcaaattccttctccaacgtggttacactgtcagggccaccgttcgcgacccatctaaacccgaaaaggttgatcacttgctcaaacttgatggtgcaaaggagaggctacatctctttaaggcagatctgctggaagaaggttcctttgactctgcttttgagggttgtgatggtgtctttcatactgcttcacccgttcatttcattgttactgatccacagaatcagttaattgatccagcgattaaaggaacccttaacgttgttaaatcatgtgccaaatcgccatctgtgaaacaagttattttaacttcttctgttgctgccgttttatataatggaaggcctcgtacccccgaggttgtagttgacgagacttggttttcggatccagac

SEQ ID NO: 12429 - DNA, 794 bp, Glycine max
gcgattaatagtgaaccctaagtgaggatacactatactccggtagccgctgtgttggtgagtgagttgtggtgctttttttgaaagatgaggccgattctgatgaaaggtcatgagaggccattgacgttcctgaaatacaacagggacggcgatctcctcttctcctgcgccaaggaccacaaccctaccgtctggtttgccgacaacggcgaacgcttgggcacttatcgcggccacaacggcgccgtttggacctgcgacgtctcaagagattcggctcgactcatcacgggaagtgccgatcagaccgccaagctatgggacgtgcaaagcggcctgcaattatacaccttcaacttcgattccccggccaggtccgtcgatttctctgtcggcgataagctcgccgttatcaccactgaccccttcatggagttgccctccgcaatccatgtcaaacgcatcgctaacgatccatcccaacagactggggaatctgtgcttctcattaagggtcctcagggaagaataaatagggctatttggggacctctcaacagaaccattattagtgccggtgaagatgctgttattcgtatttgggattctgagacgggaaaactgcttaaagagtcagacaaggaatctggccataaaaagaccgtgacatcacttgctaagtctgcggatggttcgcatttccttactggctcccttgacaagtctgctaggctttgggatactagaacattgactcttatcaagacctatgtcacagaacggccggtcaa

SEQ ID NO: 12430 - DNA, 474 bp, Glycine max
ctgcgttcctgtgaacagcggaagaatacaccgccacacgctgcaggccctttaccttgtgcttcctgcgttcctgtgagaacccacgttctctaacgcgcttctccttcaaagttcaaattcctatacatttgcgtaatcgcttctcaaatctcaacaaaagtattcccaaaaaaccctaattattattattaaacatgaggccgattctgatgaaaggccacgagaggccactgacgttcctcaagtacaacagggacggcgatctccttttctcctgcgccaaggaccacaaccccaccgtctggttcgccgacaacggcgaacgcctcggcacctaccgcggccacaacggcgccgtttggtgctgcgacgtctcaagagattcgggtcggctcataacgggaagtgcggatcagaccgccaagctatggaacgtgcagaccggtcagcagttgttcaccttcaatttcg

SEQ ID NO: 12431 - DNA, 319 bp, Glycine max
tgcagtcggctcgagataatattaataagcgaatgttgaaccctaactgaggatacactcgcaccggtagctgctgcagccccttgtgagtgagtgttctgaaagatgagaccaattttgatgaaaggtcatgagaggccattgacgttcctgaaatacaacagggacggcgatctcctcttctcctgcgccaaggaccacaacccaaccgtctggtttgccgacaatggcgaacgcttgggcacttatcgcggccacaacggcgccgtttggacctgcgacgtctcaagagattcggttcgtctgatcacgggtagtg

SEQ ID NO: 12432 - DNA, 397 bp, Glycine max
cgggtcggccacgcgtccgaccaagcgtccgtggaagaagctttgaaaatgcgtgaaatgatggaggctaagggattgtaccctggagttgttacttttaattcaattttgcgcaagctgtgccaagatggcaggataagggatgcaaacaaactcttgaatgagatgagtgaaaggaaaattcaagctgacaatatcacatgcaacacactaattaatgcttactgcaagattggagatttgaaatcagctttgaaatttaagaacaagctgttagaagctggtctaaaacctgatccatttacatataaggcactgagtcatgggttctgcaagacgaatgaactagaaagggctaaggaattaatgttcagcatgcttgatgcctggatttaac

SEQ ID NO: 12433 - DNA, 1565 bp, Glycine max
atcaatatcaatccacaatccttacccacctctgcttcaccctcacaattttcccatcaaattttttgtaaaatttccaaatctattattagtactatcatctactacaccttttaccccaatcaaaaccaacacaacgccacaaaaaaaaaacagtacaaagaaaaaaaaacactctcacatacactgtacccctgtaccacatcattattgtttagtattttctttttaccttatcactatacccgcttcccctgtttcctctgttctagttcctctggctattgggtgcccttgttttgcatttttgagaggcttttcggggtgcccatttgctgaatttgagtctgagaggttgttttggcattgcattatagagttgttgagggaagttgagggatttattggtggggtgggtttgaatggggattgagaggaccttggctgatagaaaaggaagagactcttgtgaattgccgagagaaaccattgccagcagcaactcaaggaggaaccggcggcgacagaggaagaagccgccggttcagaagctcttcgagacttgcaaggttgtgtttgcctctgcggggacaggctttgtccctccccatgaggacattgacgagttgcaatctgttctagatggaataaagccagaagatgttggtttgagaccagatatgccgtatttcaggacaagtgccacacagagagtgccaagaatcacgtacctgcacatttatgagtgtgaaaagttctcgatggggatattttgtttgccaccttctggggtcatccctcttcacaatcaccctggaatgacggttttcagtaagctactttttggcactatgcacatcaagtcatatgattgggtcgttgactcgcctcctgaatctcctacaactctcaaaccatcagaaaaccaaggtcctgagatgaggttagccaaagttaaggttgatgctgatttcactgctccttgcaacccttccatcctttatccagaagatgggggcaacttgcactgtttcacagcagtgacagcatgcgcagttctagatgtgcttggtcctccatattctgatgctgaaggcagacactgcacatactaccacgatttccccttttccaacttttcagtggatggattatccataccagaagaggaaaagaatgcttatgaatggctacaagagagggatgaacttgaagacctagaagtaaatggaaaaatgtacaacggtccaaagattgttgagagctaataatcttatttatcctctcacatcacgtacaccatctttcagtttctgtgatcagttgctgctgctgctgccaccacatactcttacagaaattttttctatcaatttctttcttttaagtagagaagcaacgcttgtgttcttgtaccttttttctttatctttagtgtttttgttttcttaatggaacatgaaaggcacttgccatgcacttggtgctgtttttcagtctatagttctttttatgtacataccaagaaacagaaaaaggacaagttaaggaggtgcaatgcaatc

SEQ ID NO: 12434 - DNA, 415 bp, Glycine max
gcaggaacaaagtaatggttttggaagcagaagaagaagttggcggtggtgagtttgagcatctccctgaaggttgcatagcgaatatagtttcgttcaccactcctccagatgcctgcgttctctctttggtctcttcctccttcagatctgcctcagtaaccgacttcgtatgggaaaggttcctcccctccgattatcaggctatcatttcccaatcttccaagccctccactctcaccaattactcttccaagaaggacctctacctccacctatgccataaccccctcctcatagacgctggtgaacagagctttgcactcgactaactgaacggcataatatgctgcatgctctcagccggagtctctcatttgttgggggagacactcccaggacttgaagatggact

SEQ ID NO: 12435 - DNA, 519 bp, Glycine max
ccttcccctacttcatcaccatcaacacatacacctggtgatggattaagtgcagcaggcagcatgcagcatgtccaaaagagcatgatgatgtatggtacagaggcaacaggaggccttgcatcatcgtcgaatttgctggacgacatggatcgatttggagatgttgatgctttagatgataatgttgaatcctttctatcaaatgatggcggagatggtgggaatctctatggaacagtgaaacaaagtccagctgagcaacagaaagagtcttctaaaggtttcacctttgctgaagttggttgcagaagaacaaggaacagcaaagttacttgttgtcacttttcttcagatggaaagtggctagccagtgctggagatgacatgaaggttgacatctggaacatggacactttagaaacagagagcactcctgcagaacacaaatcagttattacagatgtccgttttagacctaattcatctcagttggcgactgcttcaactgataaatct

SEQ ID NO: 12436 - DNA, 829 bp, Glycine max
acgattagctttggtcgtcgggtgactgaaggatatggaatgacagagagtacttgtattatgagtttcattgatgagggtgacaaacttggtggtcatgttggctctcctaatctagcctgagagataaaacttgcggatgctccacaaatgaactatacatctgatgatcagcccaatccccgtggtgaaatttgtgtcaggggtcccattgtttttcggggctatcacaaagatgaagcccagacgagagatgtcattgatgaagatggatggctacatactggagatattgggacgtggttacctggtggtcgtctcaaaattattgataggaagaagaatatctttaagttggcacaaggcgagtacattgctcctgagaagattgaaaatgtatacgccaaatgcaaatttgtggcgcagtgctttgtatatggtgatagcctaaattcttctttggtagctgttgtctcggtggatcatgataacttgaaagcatgggctgcttcagaaggaataatgtataatgatttggcacaactttgcaatgattcaaaagtaagggcagctgtcttggctgagatggatgctgccggacgagaggctcagctgagaggttttgaattcgtaaaagcggtcactttggtgctcgaaccatttacgttggaaaatggcctgttgactccgacattcaaggttaagaggcctcaagcgaaggaatatttcgcaaaagcaatatctgatatgtacagtgagctctcaagaactgatacttctcagaaaacgttgtgaaaattgagagtctccccccatcaccaaccacaac

SEQ ID NO: 12437 - DNA, 501 bp, Glycine max
atttgtatacacgttatctttactttttctcttcatcacagttcaatctttactcaaagaatatagaagatgaggaagaattgcaacttggagcttcgccttttccctccttccctctccgatcttcgccccatgatggaagcagaagttagtgagagaccccaacaacaggtcgcccaccatcaacagcaacagcaaccacaaccacaacatccgctgaccattttctatgatggcaagatttcagtttcagatgtcacagagcttcaggccagatccatattaatgctagcaaataaagagatggagaaaagagtgatgacaccaacggggtcagaaccatcttcaccaatattactgcaatcacctcataacatgtatagccccggcactggactttacatgaaaagatcactgcagaggtttctccagaagagaaagaatcgtgtgcaagaaacatgcccataccatcacgagctaattaatgttaaattatcaaaa

SEQ ID NO: 12438 - DNA, 703 bp, Glycine max
ggcctgaaaaaccatcatctgtgtttactaagagaagttcccagactgccacattacaacataagaaaccagcttctagtgttgatgctgaaattgtaggtggatcaacgataagttctcaggctatgctgaagcaagaggtttctactgcatcgtcaaagggcactactcttaaagagggtgatcgagtaaaatttgttggtaactttccttctgccgtctcatcactgccaaattatccttcaaggggacctagctatggctcccgaggcaaagttctgcttgcttttgaagataataggtcttcaaaaattggggttaggtttgataaatcaattccagatggcaatgatcttggaggcctttgtgaggaggaccgtgggttcttttgttctgcaaatcatttactacgggtagatggttctggaggggatgacgcggacaaagttgcaatcagtgatatctttgaggttacctccagtcagagtaggagtggtccactggtgttgttcttgagagatatagagaaggcaatggttgggaactatgaagttttgaaaaataaatttgaaagcttgccaccaaatgttgtggtaattggctctcatactctgcttgacaatcggaaggagaagacccaacctggtggccttctgtttaccaagtttgggagcaatcagacagcactacttgatcttgcttt

SEQ ID NO: 12439 - DNA, 545 bp, Glycine max
attttgcacactcacgttcgctgccgttcccaaacactttctctctctaaagctgaaacttcgtcactgcaacaagacaagcactcaaagtgcttcgagttcgtcactgatcacgtttcggcaatgcaccgcgtgggtagtgcgagtaacggaaacaattcaactcgccctcgcaaggagaagagattaacctacgtgttgaatgattctgactgacacaaagcattgtgcaggcataaattgtctggctctacttacatctgctgcatctgatgggtctgattatctcttcactgggagccgtgatggcaggttaaaacgatgggcactagctgtggatagagcaacatgctcggctacctttgaatctcatgtcgattgggttaatgatgctgttcttgttggtgatagtacacttgtttcttgttcttcagatacaacccttaagacatggaatgccttgtcctttggaacctgtactaggacactccgacaacactctgactatgttacttgccttgcagcagcaggaaaaaatagcaata

SEQ ID NO: 12440 - DNA, 657 bp, Glycine max
cgacccacacgtacgcccgcgcgaccggctcgagcaaaaccgagcgagttgttgtgactgactcagtgagtgagcgagcgagcgagttactcatggcgaacgcggcgcttcggaacgtgaaggtgctcccgaactcggcgaatatggaggaagcgcgtcaccgagtcttcgaattcttcagaacggcctgcagatcgctaccttccgttatggaaatctacaacctctacgacgtcgtttccgtctccgaactccgctcctccgtcgcctcccagatccgcaacaacatccacgtcaccgatcccaaagtgatcgatatgctgcttttcaaggggatggaagagctgaagaatgttgtggaccattcaaagcagaggcatcatattattggtcagtacgtagttggtcggcaagtgcaggattcagccacaaaagacccggacacctctacttttctgaagaatttctacaacaccaattacttctgaagtttggtcatgagctgtgttctgtttcctcaaataaagaattatcttaaaacgttttttatgtcaatactggatgagataatacttttggtttcagaccaaactgctgtattcatttttcctggcttaatttaagaaagtggtgtttgccgaaaaaaaaaaaaaaaaa

SEQ ID NO: 12441 - DNA, 504 bp, Glycine max
tcggctcgaggcgtgtgtcacatatagtccatttctctcatcgcaattaaccagttcccctcttcgtgctagggaagtgctgtaaacttcacaggcagtccatgaccgagcgagttgttgtgactgactcagtgagtgaccgtgcgagcgagttactcatggcgatcgcggcgcttcggaacgtgaaggtgctcccgaactcggcgaatatggaggaagcgcgtcaccgagtcttcgaattcttcagaacggcctgcagatcgctaccttccgttatggaaatctacaacctctacgacgtcgtttccgtctccgaactccgctcctccgtcgcctcccagatccgcaacaacatccacgtcaccgatcccaaagtattttccattttttatttattttattttggtttggaacgttttcttaatctgatgaggtctaaggcagtgtttggggatttttattttacttattcattcgccgccgttttagtgttagaagatagtc

SEQ ID NO: 12442 - DNA, 697 bp, Glycine max
  unsure (1)..(697): unsure at all n locations
actttaatcactagtaatagtgattaatttcccagtaagtaatacacatagttctcttatctggtgcaagtgcaacaatcaagtactcatcagcatgggaatgttgttgttgttgttgtcttactctctccttttcctggttctattccttacactgaaatcccttttccaaagcagaaaattgagaaacctaccaccaggtcctcctcctcttcccataataggtaaccttaacctcctcgaacaacctattcaccgtttcttccaacgcatgtccaaagaatatggaaacatcgtttccctttggttcggttcacgtctcgccgttgtcatttcctcaccaacagcataccaagaatgcttcaccaaacacgacgttgccttggccaaccggctaccttctctctcgggaaaatacatattctacaacaacaccaccgtagggtcctgctcccacggggagcactggcggaacctccgccgcatcaccgccctggacgtcctctccacgcagcgagtccactctttctccggaatccgaagcgacgagacgaaaaggttggtacagaggttgctggccaagaactccaaggagggttttgcgcgcgtggagataagctccatgttcaatgacttgacctacaacaacatcatgaggatgatatcanggaagaggttttacggagaggagagtgag

SEQ ID NO: 12443 - DNA, 399 bp, Glycine max
ataacactgacagacagcatagtctctggtgcaagaatcaattgagcaagcatgggaatgttgttggtggtggtctcatacgctgtccttttccgggttctattcctcggcgtgaagtttgttttccaaagcagaaaattgagaaacataccaccaggtcctcctcctcttcccataataggaaaccttaacctcctcgaacagccaatccaccgtttcttccaacgcatgtcgaaacagtacggcaacgtggtttccctctggttcggttcacgtctggccgttgtcatctcctctccaacagcataccaagaatgcttcaccaaacacgacgttgccttggccaaccggctaccttctctctcgggaaaatacatcttctacaacaacaccaccgta

SEQ ID NO: 12444 - DNA, 515 bp, Glycine max
ggaagcgtacgtcaaatgttgtttcctgttaactaacgaagacgacaaagtctgttttgctggcaactacacctcactgaagcttcctcaaccgaaccccacgccacgctacgacgcgtcgtttcattattattcatagtcttcctttgcatgcgccaccatcatcaattcaattccaatgggtaatatctgcgctcgtttgaagtcgaagccgccgccgcaatcctcagccaagaagcgttcctcttcccgccgagagaggaggctcgacgacgccgcgattcgcgagcaggccatcgccgccgcgattctcttcaagcagcaccagcaacagcagcaattcgatcgctccacttcgcttcggtatccgaatggagtctccaagaagaataacagcaacaccttgccaaggagttcgagttccatggcaaggtccctcaccgaccctcttcttcaacctcaccagcttctcaatcagggtgtgaatgtcgatgatcttgagacaaatcatattg

SEQ ID NO: 12445 - DNA, 670 bp, Glycine max
  unsure (1)..(670): unsure at all n locations
acccgtccgcccacgcgtccgctcactgaaacttcctcaaccgaaccccacgccacgctacgattcgtcgttgcgctttcttcctttatattttatttaatttcgtagtcttcttttgcatgcgccaccaacaccatcatcaattgattcaattcaattacgataagaatgggtaatatctgcgctcgtttgaagttgaagccggcgccgcaaccctctacgaagaagcgttcctcttcccgccgagagaggaggctcgacgacgacgccgccattcgtgagcaggccatcgccgccgcgattctctttaagcagcaccagcaacaacagcaacagcagcagcagcaattcgatcgctctgcatcgcttcggtatccgaatggagtctccaagaagagtaacgccaacgccttgcccaggagttcgagttccagggcaagagtccctcaccgaccctctccttcaacctcaccagcttctcaatcagggtgtgaatgtcgatgatctcgagacaaatcatgttgtccttgttcatggaggtggcttcggngcatggtgttggtacaaatccatagcacttctagaagaaagtggttataaagtaactgccatagatttaactgggctcggtgtgagttcatttgatgcaaacagcattacaagtctgtcg

SEQ ID NO: 12446 - DNA, 699 bp, Glycine max
acgcgtcaggtacaattaaagcatatgtgtctaacaatttatctcttggagaacggcaaattgctgcacagtttcaagaaattccattagatcttcgtatggtggaagctgagcgaattggatttgatatgctgaaggcaaccgcagttgacaaaattccctcagatttagaagggatggaagcatcaatgcaacatctgctagtcttgattgatgacatctacaaatatgttgacgatgttgtggaagggcgagtggcaccagacaacaaaatcgggagatttatatcagaagctgtaggttcccttcccaaattgtccccatcagtttttgataagcttgtgaatgacagtttgcaggatcacttgcttttgctgtatttatctagtatcacaagaacgcagcttagcttggctgaaaaattgaacacagctgctcagattctgtgattcttccgcttgtttatcgccgaagtcaaatttttctgagtttcttttcttgtcttatttccagaaacgtggaatgtcagcgttttatacttcacttttacttcgcttatttttttatttatgttttgtgctggtctttgctaggtaagttcacttattgtccaaggtatgcagtgtagcgttcacttgttatttttcatgtaatctgtatttgaaagaaaatgagcaaaaagctttctctccattatct

SEQ ID NO: 12447 - DNA, 1224 bp, Glycine max
gactctggaaagaatggggatgtttttccttgactcttcggtgtacacgccaagtgctccgccactttgtctgccaaatggaattgattatagttcttacaaagaggtcttggaagctgaaccccctgagtggctccctgatagttctactactgtttgtatgcaatgtagtgctcctttgactgcgattacccgtggtagacatcattgcaggttttgtggggggattttctgtcgaacatgtacaaaggggcggtgtttaatgcctgttgggttcagggaaagaaatccccaaagggtttgtgatgcctgctatgatcggcttgatcctttacagggcgttctgatcaacaccataagcaatgccgtacagggggctaagcatgatgtcacggactggacttgtgctagaggatggattaatcttcctattggtttatctatggagcatgagatttataaagcatctaatacattaagaaactactgtcaggtggccaaatccaatcctgagaagtccatccctttaactgttcttaaaagtgccaagggcctagcaattttaacagttgctaaagctggtgcactggtctcttacaaactgggcactggtttggttgttgctcgaagatcagatggatcatggtctgcaccgtcagcaatattctccctgggtttaggatggggtgctcagattggtggtgaacttatggattttatagttgttcttcgtgatatgaaagctgtgaagacattctgcagtcatatgcatttttctcttggtgctggttgtagtgctgcagcagggcctgttgggagagtgcttgaagcagatattcgtgctggtgacagaggctctggcatgtgttacacttacagttgcagtaaaggtgcatttgtgggagtttctttggaaggaaatatagttgcaaccaggatggatgccaatttgcgcttctatggtgatccttacctcaccacatctgatattctactgggaatggtggacagaccaaaggctgctcaacccatgtatgccagtcttcaagaactatattcctgtttacgattctaagctggtttcaattgcagaattgcaagtgatgtgataaatagtgcctgatgtatatacagttctagttcgtgcatggatttgtgaaatgtaattccagaagtcctctatatttggttcatatggatgagggatctcctcataattcggtt

SEQ ID NO: 12448 - DNA, 1570 bp, Glycine max
  unsure (1)..(1570): unsure at all n locations
ggagcacatatatagaggaatcttgttcatctttgatcgccatcatcttgaacatgcaggctttatatgtgctaaggcccaatcatgtgtnnttgtgggaggttcacgctccagtggtgacagaaatggggatgcctactcaagatttgccagtcttagaagtccaagtcgtattccaccgtccccgaggaggttttctcgaggagggccaatggattctggagggagacataggggtggaaggggccatgatagtttggctgggacaaccgttaaagtacgccaaggtccctataaaggttaccgtgggcgtgttatagatgttaaaggcacaacagttcgtgttgagttggaatcccaaatgaaggttgtgacagttgaccggaaccatatatctgacaatgtggctgtaaccccatatcgtgatacatctcgctatggaatgggaagtgaaacaccaatgcatccttctcgaactcccttacatccatatatgactccaatgagagatcctggagcaacacctattcatgatggaatgagaacacctatgcatagccgagcatggaatccttatactccaatgagtcctccaagggataactgggaagatggaaatccaggctcttgggcagccagtccacagtatcagcctggaagccctccttcacggccatatgaagccccaactcctggtgctggttgggctagcactcctggtggaaattatagtgaagctggaacaccgcgggacagttctgcctatgccaatgctccaagcccatatttaccatcaacacctggtggacagcctatgacaccgagttcagcatcttatcttcctggcacccctggaggacagcctatgactccaggcacaggtggtatggacatgatgtctccagttttaggtggggaaaacgaagggccatggtttatcccagatatattggtcaacgtacacagggctggagaggaatctattggagttataagagaggctctcccggatggctcttacagggtaggtcttggatcaagtggtaatggtgaaacgattacagcccttcctaatgaaatggaggctgtggtaccaagaaaatcagacaaaataaagattatgggtggggcattgcgtggtgcaaccggcaagttgattggtgtagatggtacggatggaattgtaaaggtagatgacacattggatgtgaagattttagacttagttattttggcaaaattggctcaaccatgatataaaaagcttatgtagagaaattactttaatgccatatcttttctcgtgtcaactgttgctaggggttttgtctgtctataattcgctccctgcacctttgtccgcccaagtgacaagttccaactgcagataaacatttgcttctaacaaataccactataaattatcgttttccttacattagggtaaccggtaagaatagggatggaatcttgagaattgttgttatcttcacaaatatggaactgagcatgggtactttttcaaatgtggatatgaagatgagcaatgtagtattctctattcattatc

SEQ ID NO: 12449 - DNA, 501 bp, Glycine max
atattattctcacgactagtgctatatctaaggcgatatcttccaaggttgaaacaaacacatcctcttttctcttatcatggcttctcacaacatcaaaatccacgaccacttaagggtttcccctccctcagcaacagaaatatccctctctctcactttcttcgacctgttctggctcaggttccaccccgtggaacgcatcttcttctacaccctccctacaccccattcaaatccatccattttctattccaaacttgttccaaagctcaaaacatctctctctcgcactctccaacacttcccccctctcgccggcaacgtcgtttggcctgataacaccccaaaccccaccgtccaatacaccccaggggactccgtttcacttgtggttgctgaatccgaagctgatttcaaccacgtgttagataactcacctcacgaagcatcagagttacgttgtttagtaccccacttggattcatcggattctcatgc

SEQ ID NO: 12450 - DNA, 491 bp, Glycine max
tttgactctctctctctcttctttaaacacccctttcttgtccgctccatcgcctcttcaccacactttctctctcactcacagcacggtggggacgaccatggttagagacgatctatgcatcaccgttcccagcttcttccgctgccctatctccctcgacgtcatgaaatcccctgtcagcctctgcaccggcgttacctacgaccgttccagcatccaacgctggctcgacaacggcaacaacacctgtcccgccaccatgcaggttctccaaaccacagatttcgttcccaaccgaaccttacagaggctcatccagatctggtctgactcggtcaccctccgagtggactcgcccgagtcacctacctccacccagtccgaatcagtcctctccaaggaccaaatcctcgtcgccatcttcgagttgcagactcactgcgcgaaccgcttcgactcgctcgccaaaatcgcgcgtttcgcgcaag

SEQ ID NO: 12451 - DNA, 1022 bp, Glycine max
gcaccggtcaccgctacgcgtacagtgccggtgaccagttgccggtgcacgtggattggagggtgaagcccacgcgtccgcccacgcgtccgcagggaagttgtggaagttgttgggcgttctcaacggtggccacagtggaagcaataaacaagatagtgacagggaagtttgtgtccttatctgaacaagaacttgtggactgtgacagagcctacaatgaaggatgcaatggtggccttatggactatgcattcgaattcatcattcaaaatggaggcattgacacagacaaagattacccataccgtggctttgatggcatctgtgatccaactaagaaaaatgcaaaggttgtgaacattgatgggttcgaggatgttccaccgtatgatgagaatgccttgaagaaagctgtcgctcatcaacccgtaagcattgctattgaagcctctggcagagatttgcaactttatcaatcgggtgtatttactggtaaatgtgggacaagtttagaccatggtgtggttgttgttggatatggctctgaaaatggtgtggattactggctggtgaggaattcatggggcactggatggggtgaggatggctatttcaagatgcaacgcaatgtgagaacccccacgggcaagtgtggaattacaatggaggcctcctacccagtgaagaatggtttaatctctgctaattcagtttatgaaagcactgaggtgtatgttagcagtgcttgatataacaaccttcatcgttatttatgatctttggaattgggaagaggaacaagtgctcaagttgcaaatgtttctgctatctttgatgcttctattgaatatgtctgttgggctattcttgtacatatatttcttcaagttaaaaaactgaacctgattatcaatttgtactggttttcactcattgttattccatttgaatgttttatctgaaatccttaatgatatggatgcgctagttatatttctgaaaaaaaaaaatattatttt

SEQ ID NO: 12452 - DNA, 770 bp, Glycine max
cccacgcgtccgtaatgatggagattttgctcaaaagctttcgcatccttcatcaaattgggcaagggaatacattgcagcaggtgatggtttacttcacaagaggcacttaatagccataagcgagggaactactgttgagggtgtcctttgtgtgcctgatgttgtggagttacttccacgtcagccagagatgcaaagaactcgaattcgcattgtggttcatgaaggtaggaaacatgaagttcgtgaactcgtcaaaagagctggacttgagattcattcattaaagcgagtacgcattggtgggtttagacttccaccagaccttgggttaggaaagtatattgagttaaataaaacgaatctcaaccgcattggggtggaagagctaataaagttgcttcttaaattactggagctagaaacattcctcattcttattcatattagaacagctctgaagctattttcaaagtgttgttcagcacttgtttgatttgagctattgaattctgataccctggcagtgcacactactttccggagtgtttaacgtgaagccaatatcatgctcttgcaatcagcatatatgtatagtctagaagaactgggagaagattttaaactactgcttagaagagatatgactttttccgatggacgtgaaccaacccggcggattgctggtatctttattgaaattgttgtaaacggtgattacgtgcctgtatgtaaaatgatacaagtttaacctagagcgcctgttc

SEQ ID NO: 12453 - DNA, 1590 bp, Glycine max
gtctagaatattcctatctgaaattaaaaaaaaaaaaagaaattgtcttgctcatagggaggacgtctataacctgtcgacattgaaaataacaaataatataaattgatagacgaaaagagtagcgggcagtgacaaagcaaaagcgtggagtgggtcttgcgttgtgttggaatcccaaattcatttctgtttctcattctcaattcttcttctattctcattctgatttgccacacacgcagaaaggttgaaaatagtgggacttgattcactggaggtggagaaagatggctaacaacgcagctgcttgtgctgagagagcaactagtgatatgctcattggtccagactgggcaatcaacatagacttgtgtgatatcattaatatggaccctgggcaagcaaaggatgctttgaagatactcaagaagcgtttggccagtaaaaatccaaaaatacagcttctggctctttttgtattggagactcttagtaagaattgtggtgaaagtgtatttcagcagatcattgagcgggatatcttacatgaaatggttaagatagtgaagaagaagccggatttaaatgtgagggaaaagatactgattttaattgatacatggcaagaagcttttggggggccaactggagtttatcctcaatactatgcagcatataatgaattgaagtctgctggagttgaatttccaccacgagatgagaatagtgtaccattcttcactcccgctcaaactcagccaattattcattctgctgcagaatatgatgatgctactattcaggcttctcttcagtcagatgcatctgaccttagtttgctagagattcaaaatgctcaaggactagctgatgtattgatggaaatgcttagcgccttgagtcgtaaagaccgtgagggtgtgaaggaggaagtgattgttgatcttgttgaccagtgccgttcataccaaaagcgtgtcatgcttcttgtgaacaatactacggatgagcaacttttaggtcagggattggcactgaatgacagccttcagcgagtactctgtcgacatgatgacattgtgaaaggaactgctgattctggtgccagagaagcagaaacttcagttctaccacttgtaaatgtaaaccacgaagatgatgaatcagaggatgattttgctcaactagcccataggtcatcacgtgatactcaggcacagaatcaaaaaccagcctatgacaaggcagaaccagggaggataaacccactcattcccccaccaccagcatcaaagaagccggtctactctggcaccggcatggttgactatctcagtggtgatacatacaagacagaaggatctcctgaaaactcagaacccacttcaattgcagctccccttcattctagccctaatccaacctcatcaactattccatctctgtcttcctctcgtcctcatgccatgagtacctcatctccaattttgagcagccagcctgtgtatgatgaacaaccatcttctgtggacaaatcttcagagggtctgcctgcagctccctgggacgctcaatctcctggcatca

SEQ ID NO: 12454 - DNA, 416 bp, Glycine max
cccacgcgtccgccacgcttctctccttccttcaacgtcgctttccactgtggccaccgggtgaacattttcaagtttgtggacacgctttaatgtacagaagcagcaatattgtggccagggtttttgatcgtcaaatttgcactcctgctcctggcactagtgtgtaatttaattcttgcaggttcatcatgctcggcgattctatgaaaatttggtaccaagtcacacagtatatgaggtcgagtgcccagaccattcatttcgtaaattcactgatgatggccaataccttataagtttcagcagaaatcatcaggagttgattgtttataggcctagatggctttctttttcatgcaaggatgaagattgtgataaacatgatttgccatcaagagcaaagagatttgaca

SEQ ID NO: 12455 - DNA, 701 bp, Glycine max
cccacgcgtccggttttccatcaaactcaaacataacagggaaatcatttggatttacgggttgttcggaaccaatggctcttaatagaccccaagatacagtttctaatgtcacaggcaaatgaagataaaacatctggagacttcagagaaatgggatttcggcttgcccaggaagtgatcttgttcctgaaaaagaagatggataaagcttcaagaaatggaaacttgaaagatatcaagcttagctttgttggtcattctattgggaatctcattatcaggacagccttgacagagagcgtcatggagccatatctaagatacttacatacatatgtctccatatcgggtccacacttgggttatatgtatagttcaaactctctattcaattcagggttgtggatattgaagaagctcaagggcacacaatgcattcaccaacttaccttcacagatgaccctgatcttgagaatactttcatctacaatctttccaaggagaagacactggctaacttccagaatgtgcttcttttgtcctcacctcaggatggctatgttccataccattctgcgagaatagaaccatgtccagcagcttctttggatttctctaaaagagggaaaatcttcctggagatgctgaataattgcttggaccagatccaagctcacactaacgatagggtggtcat

SEQ ID NO: 12456 - DNA, 480 bp, Glycine max
cttcatgtctcaaggcaaagggttaaaggtggaggttggatcatggattccatgtcaaatgtgtcaaaaagagaccctgctgcacagttcctcatcatcttcagaagcaaggacacaattggattgcgatcccttgctgctggtggaaaattattgcagatcaatagaagaatggagtttgtatttgctagtcatagttttgatgtttgggagaactggactctagaaggttccttacaggaatgcagactggtgaactgtagaaacccatcagctgttttggatgtacgcgttgagattttggcaactgtaggcgaagatggagttactcgttggcttgaatagagtgattgtaggtctgtaatactcaaaagggaggagcttgtaaattactccagtcccgtgacttaatgatctttcaaatgtctctttgtgaaagattggaatgtattcatagtgtagagcataattttttatttt

SEQ ID NO: 12457 - DNA, 1175 bp, Glycine max
cccacgcgtccgcttcttcttcttcctctttgcatcgcttcttccttcatcacttatcttcatctgcttctgtcacatcatcaagcattctcataccgcttctcagtttctcattttcccaatcgcagctaaaaaatcctctgtacccttttacccttttctcaataagcagaaattaggaaacgcaacaatggctcaagcggttgaagaatggtataagcagatgcccgtcatcacgcgctcctatctcaccgctgctgttgtcaccactatcggatgctcccttgatataatttctccgtatcatttgtacttgaaccctatattggtggtgaagcaatatcagttttggcgcctggttactaatttcttgtactttcgtaaaatggacttggatttcctgtttcatatgttttttcttgctcgttactgcaagcttcttgaggagaactcgttcagggggaggactgctgatttcttttacatgctcttatttggtgccactgtattgactggaattgttcttcttgggggcatgataccttatttatcagagtcgttcgcaaaaataatattccttagcaactcattgacatttatgatggtttacgtgtggagcaaacaaaatcccttcattcacatgagcttcctgggtctctttactttcactgctgcctaccttccatgggttctcttggggttctctgtactcgttggtgctagtgcttgggtggatctactggggatgattgctggtcatgcatattattttcttgaagatgtttatcctcggatgacgggtcgtaggccgctaaaaacaccatcattcatcaaagcactatttgcagatgacccagttgttgtggcacggcctgctaatgtcagatttgctcccccacctgctgaagaacttcaccaagattgaatgaatgcccatcaaaatggttagaggattagcaacggaacagcaaagcggttgaccgtgtaatatatagattttaaacatcttttttcgcgtgcatttgttaattaattaggatttaaggggcaactatgtcgaatgttcagagttttaactgaatgagatcctcttttctcatcgtaatttgtcagacactaccttgtagatatttatatactcttgtattccacaaagtttttttaagctcattaag

SEQ ID NO: 12458 - DNA, 1186 bp, Glycine max
tggcaccttgtttggttgcacacttcaattatcttaccattattaaattctcatcatctctctcagctaaatcttcttctccaccatctcttcgcccataacctaattagtgctcaatcacaaaacatcaatttctctatgatcatgatgatgatgatgggttcaaacacaaaaccccttgtgcacctttctcttctaattttggttctcttttcttcttcaaccgaatccctgagatttgaaatccaatccgggcacaccaaatgcatctccgaggatatcaagagcaattccatgaccgttggcaagtaccaaatcgttagccccaacgagggtcaacctctgccagatgcccacagattcaccgtcagggtgacttcgtcttatgggaacaactatcactacggggatcgcgttcagacggggcattttgcgtttgcggcagtggaggctggagattacatgacttgcttttgggctgtggatcacaaccctgtggaaacgttgactgtggattttgattggaaaacgggtgttgcagccaaggattggtctaatgttgctaaaaaaggccaagttgatgtaatggagctagagctaaagaagttgcaggatactgtttcctccattcatgaggagatgttttatcttcgtgaaagagaagaagaaatgcaggaactcaacagaacatccaacagcagaatgttctggttgagtttgctttcgctctttgtctggttatccgtagcagggatgcaactatggcacttgaagaccttcttcgagaaaaagaaacttatttaaaattttgtgatagtttttttacatttttcttatgtgctcttgtaacatataccagcattaatttatccaaaggatacgcataacggtagtcagtataatctcagaatatttcctttgttaaacgcaaatcagagttatggcaacacgagtttcagaggaaatgttggcgttcttcagtttagggccttttttcgttttcttgttttaaattttaaataaaaaaccattaagatgtgggaatacttcgggaatcttattggggagtcaaatattctaattatgatgattaccttgtagatgattatgcaacacaacatatattcccccctcaaatcaaatcagaggggtgagtgaatagatttccaaaggatggatttaacca

SEQ ID NO: 12459 - DNA, 890 bp, Glycine max
caggaatggcgggaaattatctattcaatcctctgtttttgttctgggcaagggagagaaccattatattgcttatgtagaggatatgtatgaagacaggaggggacagaaaaagatcaaagtgaggtggtttcaccataatcaggaagtcaagggtgtagttcctgtacgaaatcctcaccctcgggaagtttttatcacaccttattcccaagtcattagttcagagtgcgtagatggttctgccacagtcttaactcgtgaagactttgaaaaatgcatgccttttttttcccccacttcaagggacagaatacatttgtgctttaggcagtttagaagcaacaaaatcaagccctttgacttgagtaaattgcgtggttactatgctcaaccaattctttcttgcttacaccttgattcaatccagcaccctgagttcctagcaagagaagatgaagagttgagtgcaggtgatgatgtgaaagtaggagtcaagaggaggaggggtgataaggggtctcctcagtcttggataagtcgccagggggttaggaagttaagtagaaataagcaaatgatggtatacaaaaccttccaggttgcaaattatgcaagatcagaaaggagattgctttctcggaagcaggttgagtgtcaaccttggtctaaccacacatacaaggttgatgacaagatagagttactttgtcaagatagtggcatcagaggctgctggttcaggtgtacagttgttcaggtagcccggaagcagttgaaagtccaatatgatgatgtccaggatgaagatggaagtggaaatcttgaggaatggatccctgctttcaagttagccaggcctgataaacttgggatgaggcattctggcc

SEQ ID NO: 12460 - DNA, 514 bp, Glycine max
ctcaggaagtatcccaccccaacaatgttttccatcacccaataagaatgcattgttgatgacatccttaccacaagactcacagtttcagcaacaaatagaccagcaagctagtctcttacagaggcagcagctgcagcagcagcagcaacagacacagttgcaatcatctccgttgcagttattgcaacaaagcttgtcacagagggcaccacagcaaccacaaatgactcaaatgtctcagcaaaacagctcagaccaacaaccacagttgcagttgctacagaaattgcagcagcaacaacagcagcagcagcagcaacaacaacaacagcaacaactgctttccacttctagcccacttttgcagtctcagcttctacagcagcaaaatactcatcaacaaaaccagcaattgccgcagctgcctctatcacagggtcatcagcctcaacaagcttggcaacaatgctttctcaatggagaagcttttcaatggcaacaactactcttc

SEQ ID NO: 12461 - DNA, 546 bp, Glycine max
gagtctgatagatgggggagagagagagagttcaaggcagctaccggagagagagagggagaaagagaaggagatcgcacttaacacatcacacagcaagagaaagagtaatagaatcgtggttcgtttgcagaagaagaggttaagagaaggagtgaccgaagcgaagatgttacccacagcttccaaaggacgttcttcttcctcctcctcttcctctcgacctaacaatcccatgctgcttccctacctccgcagaatcatcaagtggcaacaaatggatattgaatatactttttggcaaatgcttcatctatgtacgtccccgaaagttgtctatcagcatactaaatatcacaaacaaaccaagaatcaatgggcacgtgatgatcctgcatttgttgtgatctgcagtcttcttttggcagttgcaactttggcttattgtgcggcgtatgaccatagtactgcacatacacttcttggtatcttctcagtgttggttttccactttatattgactggtgtatttctggcaacattttg

SEQ ID NO: 12462 - DNA, 426 bp, Glycine max
gggagagagagggagaaagagaaggagatcgcacttaacacatcacacagcaagagaaagagtaatagaatcgtggttcgtttgcagaagaagaggttaagagaaggagtgaccgaagcgaagatgttaccaacagcttccaaaggacgttcttcttcttcctcctcctcctcctcttcctctcgacctaacaatcccatgctgcttccctacctccgcagaatcatcaagtggcaacaaatggatattgaatatactttttggcaaatgcttcatctatgtacatcaccgaaagttgtctatcggcatactaaatatcacaaacgtaagtctctgtctcattaatatctttgttcttctgatttattgatacacatttctgaacagtgattggtttaacaatgtttattaagcttctgttttact

SEQ ID NO: 12463 - DNA, 596 bp, Glycine max
gatttcgatcatctttattttttagaatatccccacttaacatggatcagttaacactagcatttccatttttactaacacttcatctgttagtatcaggtgtagtagcaacaacatcgttcacactggttaacaaatgcgactacacagtgtggccaggcattctctcaaacgcaggaatcgccacgcttccaacaacaggtttcgttcttcaaaccggagagtccaaaaccgtaaccgctccaacctcttggggtggccgtttctggggccgcacactctgcacgcaagactccgccgtgaaaattctcttgcctcagcggcgattgcggctccggcaagctcgaatgcgccggaaacgccgccacgccgcctgctaccttagccgagttcactctcgacggcgccggaggcctcgatttcttcgacgtgagcctcgtggacggttacaacgtgccgatgctggtggctccccagggtggctccggcgataactgcacgagcactgggtgcgttggggacctgaacggcgcgtgtccttcggagcttagggttacgagcgtggatgggaaacagagcgtggcgtgtaagagcgc

SEQ ID NO: 12464 - DNA, 1280 bp, Glycine max
  unsure (1)..(1280): unsure at all n locations
cgtgctttttattaaaataccctccttccttcctaccataccatactgcccagtttcttctccatctaccacttggctttcacgtttaccttcgcagcgctctttctctctgaaccctaatttacacacactccctttattcgatccctctctccaaccatggcgatcaactcttccaagaatccagatggttctgtccaaaatgcaatgccttcgtatttttattctccaccactagatgtttctgctgcatttccacaagcaacaccagcatcaacgtttcctccttgtgcttcagattattttcaattggacaacttattgacagcagaggagcaagccattaggaagaaagtaagagagtgtatggaaaaagaaattgctccaataatgactgagtactgggagaaggccaaatttccatttcatgttattccaaagcttggtgcattgcgcattgctggtggcacaatcaaggattatggttgtcctggtctttctatcactggaagtgctatagctgtggcagaagttgcaagagttgatgcaagttgttcaacttttattttggtccattcatccttggcaatgctcactattgcattatgtggatcagaagctcagaagcaaaagtatttgccttctttggcacaattgcaaactgtagcatgttgggctttgaccgaacctgactatggaagtgatgctagtgctttgaagaccactgccacaaaggtggagggaggttggatcctggagggtcaaaagcggtggataggaaacagtacatttgctgatgttttggttgtctttgctaggaatgcatcaactaatcagataaatggatttattattaaaaaggatgctcctggtttaacagtcacaaaaatagagaataaaattggactcaggattgtacaaaatggagacattgttatgaggaaagtttttgtccctgacgaggaccgaaattgcaggagtaaactcttttcaggacacaaacaaggtacttgctgtttcacgcgtaatggttgcttggcaacccattggtatatcgatgggcatctacgatatgtgtcacaggtacctaaaggagaggaaacaatttggagcaccattagcagctttccaaatcagccagcagaaacttgttcagatgcttggtaatattcaagctatgatacttgtctggttggcgcctctgcaaattgtatgagagtggtaaaatgactccaggtcaagctagcttgngaaagtcatggatcactttgagagcacga

SEQ ID NO: 12465 - DNA, 867 bp, Glycine max
tccgctacttggattcattggaaggctggatcaacagaaaggcattgatctcatagccggggcggttccttggatagtgggccaggatgtgcagctagtcatgttgggaactggaaggccggacttagaagatatgcttaggcagtttgagtcccaacaccgtgacaaagtcagaggatgggttggcttttcggtcaagatggctcaccggataacagcaggtgcagacatattgctgatgccatcaagatttgagccatgtggattgaatcaactctatgccatgaattacggaacaattccagttgtacatgctgtcggtggattgagggatacagtgaagccttttaatccatttgaagagtcgggccttgggtggacatttgacagtgcagaaactaacaagttaataaatgcattagggaactgcttgttgaccttcaggcagtataagcagagctgggaagggctccaacggcgagggatgacgcaggatcttagttgggacaatgctgctcagcagtatgaggaggttcttgttgctgctaagtaccaatggtaaattcttggcttctactctacctaagcagactgatcaatatggagtgctctcatgctgagtgatatcaaggtctgtgcagggaaaggacttggtcaagttgttaaaaccttcatgttgcaggtcctggaggaacatttttgcccctaaactaaggattatgtaataatacacttgttatatatgtcatgtctggcacatacctatgtagctaaaacatcaatccagcaatatataaaataaggttagaaactttattgtcctttttggcttaataaagtagagtattaccccttcccactgagcat

SEQ ID NO: 12466 - DNA, 681 bp, Glycine max
gagcaagatgtgctggatccacctgaagattgttttcgcataaggttgatcattactctgcttgaaacttgtgggcattactttgatcgtggctcttctaagaggaaacttgatcgattcctaatacacttccagaggtatattttaagcaaaggggcactgcctctggacattgaatttgacttacaggatctgtttgtggacttgcgtcccaatatggttcgttacacttctatcgaggaagtgaatgcagctctagtagaactcgaggaacatgatcggattgtttctgctgataaggtcagcagtgaaaaacattctggcactgagaagcctttaattacgaccacttccactactgcagtggctggcaatggacaaagcattgataatggtaccgtacaaaatgaagtgcaagatgataatgacagtgagactgattcagggagtgacacaattgatgtggagggacatgatgaagagttggatgaggagaatcatgatgatgggtgtgagactgaggatgatgatgatgatgatgatgatgggcctggaccagcttctgacgaggaggatgaagtccatgtgagacaaaaagtgaccgaggtggaccctctggaagaagccaatttcgatcaggagctcaaggctgtagtacaggagagtatggaacagcgaagg

SEQ ID NO: 12467 - DNA, 505 bp, Glycine max
gtttgtttgttcaaactattttcttctttttttctctgacgcgtggaaatgatatgcacgcacgcttctgtgggagaggaagtaggaaatagcagagtttagactttagactttagagtcagtgtacgcagaagagtaaaatcgattggcgatgatggagttgaaagagattcagagactcgaaggccacaccgataaggtttggagcttggcctggaacccgaccaccggtcacgccggtatcccactcgtcttcgcttcttgcagcggcgacaaaaccgtccgaatctgggagcagaacctctcctctggcctctgggcctgcacggcggttctggatgaaacgcacactcgaactgttcgatcttgtgcttggtcaccgtcgggtaagctattggccactgcaagcttcgatgccaccactgccatttgggaaaatgttgggggggattttgaagtgggtttctactttggagggacacgaaaatgaaatcaagtgtgtgtc

SEQ ID NO: 12468 - DNA, 627 bp, Glycine max
tgaacttcaattccgggctcgacgcactcgtacgctgcaattgaaagttatcagcagtcaactaatcgactgctcattttgggattcagtggagctttaacagaaccagttgagaaaacaggtgatcaaattaaagaaatggaactgaaggttcatccaaaattgagacaacctttgacagcactatgcagtgatccaaataccacagttgttgtgctcagtggaagcggtagacaagtcctagatgataacttcaaagaatacgacatgtggttggcagctgagaatggaatgtttttacatccttcaaagggtgagtggatgactacaatgccagagcatctgaatatggaatgggttgatagtgtgaagcatgtttttgagtacttcacagaaagaacacctcggtcacattttgtttttgaagaaagggaaacttcacttgtatggaattacaaatattcagatgttgagttcggaagactgcaagcaagggacatgctgcagcatctctggacaggtccaatttctaatgcatctgttgaagttgttcaagggagccgatccgttgaggtgcgagctgctaatgttacaaagggagcagctattgaccgcattctaggtgag

SEQ ID NO: 12469 - DNA, 696 bp, Glycine max
cggctcgagtcgctcaatggagaacaccgagggatccagatctgcgacgaacggggtgctgcctctggcgcgcaaggtggcattgattaccggaattaccggccaagacggttcgtacctgacggaattccttctagacaagggttacgaggtgcacggtctgatccgtcgctcctcgaacttcaacacgcagcgcatcgaccacatctatgtggatccccacaacgcccacaaggcccgcatgaagctccactacgccgatctctccgacgcctcctccctccgccgctggctcgacaccatcctccccgacgaggtctacaacctcgccgctcagtctcacgtcgccgtctccttcgagatacccgactacaccgccgacgtcgtcgccaccggcgccctccgcctcctcgaggccgtccgttcccacatctccgcctccggccgctcccacatccgctactaccaagccggctcctccgagatgttcggcgccacccctccgccgcaatcggaaaccacccccttccacccccgctccccctacgccgcctccaaatgcgccgcccactggtacaccgtgaactaccgcgaggcctactccctcttcgcctgcaacggcatcctcttcaaccacgagtccccccgccgcggcgagaatttcgtgacccgcaagatcacgcgggccgtgggccg

SEQ ID NO: 12470 - DNA, 1053 bp, Glycine max
acgaggaaataccaaatatgagggtaatggggagagcttgctttactaatttccctagccacactgctttccgtggatttggtggtcctcaaggattgctcattgctgaaaactggattcaaaggattgctgtggaactcaagatgagtccagaaaagataagggaaattaattttcaaggagaaggatccgttctgcattatggccagatagttcagtacagcacactagccccactgtggaatgaacttaagttatcctgtgactttgcgaaggcacgtgaagaagttgaccaattcaatagtcacaaccgctggaggaagcgtggcattgctatgattcctaataagtttggtatatcctttacaacaaagcttatgaaccaggcaggtgctctggttcaagtctatacggatggaactgttttagttacccatgggggtgtcgaaatggggcaaggtttgcataccaaagttgcccaaattgctgcttcagctttcaacatccctcttagttctgtcttcatatcagatactagtaccgacaaggttcctaatgcttctccaacagcagcttctgcaagttctgatatgtatggagcagcggttttggatgcatgtgagcaaataatggaacgcatggaacctattgcttcacagcataacttcaactcatttgctgagctagttggtgcatgctatgcagagcgaatagacctttctgcccatggattttatattactcctgatattggttttgattggacgacaggcaaaggaaaaccttttagatatttcacttatggggctgcgtttgctgaggttgaaattgacactctgactggagattttcacaccagagtggcaaacatatttttggatctaggttattcgctgaatccagcgatagatgttggacagatcgagggagcttttatccaaggtttgggttgggtagctttagaagaacttaaatggggagatgaagcacataaatggatcccgtctgggtgcctttacacatgacgacctgcagcttataaaatgccctctg

SEQ ID NO: 12471 - DNA, 852 bp, Glycine max
gtcacagaagttgcagcttattctgttccagccaagtgttcaccggagaaaagtcacaagaaagaggaatacaattactctgatgtcaacagtgaccaggaccattcatctgatgaaaaataccatgcaaaaattgacaagcattcaccatcaagatattcagttgcgcaaaaggatctggcatcaactggaggttcatatcagcaggaagattggcacactgatttactcgcttgttgttctgaaccttctctttgtatgaagacattcttctacccttgtggaacattttcaaagattgcttctgttgcaagaaacaggcccatatcctctggagaagcatgtaatgacttgatggcatattctttaattttgtcttgttgttgctatacttgctgcgtaaggaggaagcttcggaagatgttgaacatcacagggggatttattgatgatttcctctctcatttgatgtgttgctgctgtgcccttgtgcaagaatggagagaagtggagatccgtgggcttagtggttctaagaccaaaacaagccctccaccctctcagtacatggaatcttaactaacaaatgagattatcatttggttgttggggattcaaggttccttgaagatcatattaaaatagaggctatttggctattagaattctcacaggaaggcaggaattatgtatttttattcttaccgcccctgacctcgttttaactatgtatagtaattttattttgttggactcgaaaaaggttgcttttagatatagttgatggtgtatcataaacctttttttttttttgtttccctggtttaatatagtctgaattaatttcttggc

SEQ ID NO: 12472 - DNA, 527 bp, Glycine max
agacattacaatactcaaaatttgacaaattgcagatctgctctgtaacaagacagtgtctgattccaaggtcaaccttcgccaatggctagggacagaaactctcgaattggaatttctgtggtgatgttgttatgcttcgcggctcatttttatgtgttgcccctggcagaggctgtgtggttaacactccccacttcggggactaagtgtttgtctgaggaaatccagtcaaacgttgtcgttttagccgattactatgttgttactcaagagggtgggcttcaaacactttctgtcaaggtaacatctccttatggaaataaccttcaccacaatgaaaatgccacacaaggacaatttgcatttacaacagctgagagtgggaactacgtcgcgtgcttttggatggatggtaaacatcaagaagaagcaactgtaagccttgactggaaaacaggaatttatgccaaggattgggagtctgttgcaaagaaagaaaagatagagggtgttgaacttgagct

SEQ ID NO: 12473 - DNA, 454 bp, Glycine max
cggctcgagcctgagaataggtatccctgtgcatatgatgatgggtggacagctcttaagtgggttagttctacatcttggcttcagagtaggaaggataagatagttcatatctacatggctggggatagctcgggtgggaacattgtgcaccatgttgccctcaaagccatggagtcgggaattgaagtgtttgggaatatactgctcaacccattgtttggcgggcaagaaagaacagagtccgagaagcgtttagatgggaggtattttgttggagttaaggatcgagactggtattggagggcttttcttcctgaaggggaagatagagaccaccatgcatgcaacccgtttggccccaagggcaaaagccttgaagggataacctttcccaagagccttggggtggttgctggtttaagacctggtcaggactggcagttgggttatg

SEQ ID NO: 12474 - DNA, 493 bp, Glycine max
agaaaggatgcgtggctttatcatatcataataggtgagcagccgagatctgttgccggtggcatcaaggaaagtaagagtttagagtttgaactctgtttatccaatgcacaaagcgtagatctctgtgttataatggaatacaggaaaatcaaagacgaggatgaagttagggatgcgggcgttgaggacgttggaaaatcatttttgctgtcagtcccagataacgatttgacttccgagggagaaaccaaaattgacagccacagggagaaagtaaagtggaagcgcaagtcagttgttacacttgcattgactgttcttactagttcgcaagccattctaatcgtttggtccaagagagctggcaagtatgagtatagtgtcactactgctaactttatggtggagactttaaaatgtgctatatcccttgtggccttgggaagaatatggaaaaaagacggtgtcaatgatgacaacaggtttgcta

SEQ ID NO: 12475 - DNA, 252 bp, Glycine max
cagaaaggaagcgtggctttatcatatcataataggtgagcagccgagatctgttgccggtggcatcaaggaaagtaagagtttagagtttgaactctgtttatccaatgcacaaagcgtagatctctgtgttataatggaatacaggaaaatcaaagacgaggtcagtcttttttcgcatatttcttcaattaatagtacgattttgatgcattgttgttgtaggatgaagttagggatgcgggcgttgag

SEQ ID NO: 12476 - DNA, 928 bp, Glycine max
ccgcagtttcactgattccatcttcatcttcttcttcactctcttgctctcagtctcagactatttttctgaaagcatttcaaatggttgatagcaatccttcctctggatcacccgaagaaacacaaaatcccaacccagatgggaatgcacctgttgaaagtgatcttgcattggagaatctagcccaaaaagttcaagaatctctctctctggaaaaaagacacaaattttgggaaacccaacctgttgggcagttcaaggatataggggactccagtttgccagaaggcccgattgaacttccaatccccttatctgaggtcaaacaagaaccatacaaccttcctgaccactatgaatgggttacttgtgacataaactctgaggagacgtgtgatgaggtatacaaccttcttgctcataattatgttgaggatgatgagaatatgtttcgatttaactactcaaaggaatttctgcgctgggctctgcaacctccgggttatttcaagagttggcatattggtgtccgtgttaaaagttccaagaagatggttgcctttataacaggtgttcctgctagaatccgagttcatgatgaggttgttcatatggcagagatcaattttctgtgtgtccataaaaagcttctaacaaagaggcttgctcctgtcatgatcaaagaggtcaccaggaaggtgcatctggaaaatatgtggcaggcagcctacactgccggagtagttctttctacacctatagcaacttgtcaatactggcacagatctttgaatcccaagaagctaactgatgttggtttttctcggcttggtgcacgaatgacaatgagtcgaaccatcaagctttacaagctaccagaatcaacaatcaccccagggtttaggaagatggaaattcatgatgt

SEQ ID NO: 12477 - DNA, 935 bp, Glycine max
cccacgcgtccggaaatcgcttgctaccctaacaccgtcctctcttggcgttctggcgtggaaaaggacccggatgaagtgctgcagtcccacactgtttataccaatgtttccaaaggggttcttgccaagtccaaggatttaatttcagcttttggcaccgatgaccactccaaaatttgcttagatattttaaagaaaggggagcttcaggtagctgggaaagagagggaatcattgttatcgagtcagttcagggatattgcgaccattgtgatgcacaagacttacaatcctgagactcagcgtccatacactatcagtatgattgaacgcctcatgcgggaaatccattttgctgttgatccacacagcacctccaagaagcaggctctggagttaattcaagagcttcagaagcacttccctataaaacggtgtccgttgagaatacgtgctactgctcctgatgaccaggtgcctgaacttttaggaaagctgaatgaatggaatgccactggtatttctaaagaaggatcttctgctgttatttttgaattggaacctggtctatataaggattgtcatgactttgttatgaataagatgcatggaagatttgaagttcttgcacactctctttatgtggagggggatacccaagtggagcaatacaatgattatgaggatatacctgaagccttgcccaaagaaacttatgattctgtgcttaaactgaatgagaaacttcaaaagcaaacaatttcatctactagtaggcctaccgagggacaacaaaagcaaaacaagtgcagcacatgtaatgtttctttcgatgactctaagctgtacagggaacatcacaagagtgaatggcacaaacacaatatcaagcgtaagacaaggcaactcccaccacttactgaggaagagtg

SEQ ID NO: 12478 - DNA, 1311 bp, Glycine max
cgacaggcgttagttacacgaagcttgtgaagtgccacgttagagaacagaacactcttcttcttctctctggaaggaacaggctcttcttcacgagaaattattactctctctactttatcattagcttttatttcagtgtttgactttttgcgttgttgcttcgttgtgtgtgcactcggttctgtttggcgtctggacaaaaaacatgggggaagaagaagaagaagaagtgagcgtcaccgctttgcatcatccaaacagcggaaacgatgatcagagcctcgaattcgatatatatcctttgagcagttactattttggatccaaagatgctgttccctccaaagacctcaccttagttgatcgtgttctcaggatgaagtccaactatgctgccagtggaatacgaacctgcgtggaagctgtcttactggttgaattgttcaaacatcctcatttgttgctgttgcaaataagaaattccatatataaacttcctggtggccgattaaggccaggtgaatcagatactgatgggttgaagcgtaagctggcaaggaagctctctgtgaatgaagatggggacgggtcagaatgggaggtgggtgaatgccttggaatgtggtggaggcctgattttgaaacattaatgtatcccttcattccacctaatgtaaaaaagccaaaggagtgtaccaaagtcttccttgtgaagctgccagagagtagaaagttcattgtgcctaaaaacatgagggtgcttgcagttccgttgtgccaagttcatgaaaatcacaagacatatgggcaaattatatcaggggtcccacagctgctgtcaaaattctctttcaacatgatagaatcttgatacctgattgcaacctattttatcatccagggtgaagggactaaggctttgctcgttagaatcctctcctcatgtcgcgtccagactccagacacagacttgtatatatcatggctttctagtttctatacgaaaaattatactgtaatgttgaaaatagctacatgtatcatacttgcatggttagtgtgaaattttcttcagagtaatggagttcgattggttctttaattttgcctttgttttcacttgacatgataattgataacataggcatcatataactgttagcattatgcttctaagtttcttggaaaacatagaaagtaaggaggttaggtcttcattaagaactggctgaccgagataacagctagttcatcagcatattacttgatgccatgctagtgtattcagtaaaagactttggacttttc

SEQ ID NO: 12479 - DNA, 626 bp, Glycine max
aacagcccagaagagggtaccggtggaggggatgaaggacagagacagaccaaagcaaacaaacaaaacagccaccgccattccaattcgaagaagaatagtagttcaagagtttgttggcaaccatggcgatgcgcgacctcgtttctggtgccgcggcatgtggcgactcttcttcttcttcctcaaaccctctcgcttccctcgccaacgcccttattggctcttcgtccaaaactcaggagaggctgaaggagattcccacatccactcctactgaccctgcttcccaattttactccacagctctccccgccaatcagcttcccggctccgaattcgataagcctctattgaatttaaactcccaggcttcggagtttttgcataggttccgtggctccactggccttgaggagacatgggatgagatacagcgtgatggggcggctgcccaaatgcgccaactgccaccggggattcaacagccgccgttggatgggacaccgcagagagttctatcaaacattttgcattcatttcttgatagcagccgtggtggagtgccttttcatcctgctccacttccgatgttgggtttatctgaaggtgataaacaatgcata

SEQ ID NO: 12480 - DNA, 1219 bp, Glycine max
cgttgtttgagaatgcagcgcattgcaggtggtaaattccatctaaagctaaatattggtgcgagacgcccattcaaccataccgtaccagcagaggaaagagagaaaatttcagaacaaaaaagaagcagaggaaaagagagatagagagagaagaaaagctgtgaagagaagagtctgaaatctgaatcataaataattggtttttgagatgaagaactgcgagttgtgcaagcttccggctcggactttctgcgagtcggaccaggctagcttatgctgggactgcgacgccaaggttcatggagccaacttcctcgtggaaagacacacgcgcacgctcctctgccacgcgtgccagtcgcccacgccgtggaaggcctccggcgccgccctcggaaacaccgtctcgctgtgcgagagatgcgccggcggaaccaccgaacaaggtcaagagagccaaggaggcaatgacgacgacatagacaccgacatagacaccgacgatgaggatgactacgatgagagcgaggacgaggttgccgccgacgaggaggacggagacaaccaggttgtcccttggtcctccgagccgccgccaccagccccgagctcttccagcagcgaagaatcggttagccggtgcaacaacgtggacgaggtttcgaccacattgaaacgccgtcgccaggaggacaatgattttcagggttggaattcgaataattggggatgtgaacggagcgaagtggagagaggaggttggttggttcggttgcggcggagaaccgccgatgatgtggcggttgagcaacggagtgctagagcggcgtctccagacggttgctgtggtgatagagcatctgaagacgtttgatctgaagggacacgaggaatctcaaccgcgtgatctacggggccgtaccattggatattatttatgggctctttgattattaactttctctaacgttacagcactcaggttttgataatggcaatcaagtgtatggatcgttttttttattattcctattattttttgttttgatattttgaggatcatggttgtgggggtgatgtaactctttacttctattttattgttgtaaaataacatttttttcttcttctgtttataagtaggtgaggatgctttatgttgtgatgaatacataggaaaaaccacgaagcaaatgaatgtgattccttattcatg

SEQ ID NO: 12481 - DNA, 447 bp, Glycine max
tcgtttactcgtgcacacctctcatttccccacgacccattttcatttttccaaaaagatctcaactttgcttcaaactagaacactccctctttttacgttcccgtttcatgggcatctcttggaatcgggaaccatagacatcgccatggaaaaggacaagtctcacactcacagctttcttcacagtatcgtcaaacacttcaaattcggttcaccgaaagagcgaaacaatgaagctgacgtacaccaaatggctgcacaggagcagaagatctttgcctacgaaaccttgacagctgcaactaagaattttagtgctattcataagcttggtgagggaggttttggaccagtctacaaggggaagctgaatgatgggagagagattgctgtgaagaagttatcacacacgtcaaaaccaagggaagaaggagttcatgaatg

SEQ ID NO: 12482 - DNA, 541 bp, Glycine max
caaattaacaaccattgttcgttgtggcagtagcaaaacaacacctttttgaaacccgaggttcagagagaaaagaaacattttccaaattaatggggcgttggatgaaaccagaggtttaccctctattggctgcaatgacctttgttaccggcatgtgtgtgttccaactaacaagaaatgtgctcgggaaccctgatgttaggattaacaaaactcggagaagcatggcagtgttggagaacagagaagagggagagaaatatgctgagcatggcctgaggaagttccttcgtactcgaccaccagagattatgccaaccatcaaccacttcttcagcgaggataaatgaaagagtgtcacacgtagtagaataccaaaataattcaacttatggaagaaaaatcaaagtttctaaatctgtcaagcagcttgcatatgaactttgtcatattacgtgttgtttgatgtctcttcgcgtcttgtaattgtcgccatcaaaatgaaaaataaaatttttgtataattttgtttatataa

SEQ ID NO: 12483 - DNA, 1046 bp, Glycine max
cacgggattcggctcgagtctgcttaatcgaactattcagattctaaaaaatgagttggtggtgggctggagcaatcggtgctgccaagaagaaattcgaggaagaggaaccgccgcgaagcttccagagcgtgggcctggtgatcggcgtgacgggcatcgtgggcaacagcctcgccgagatcctccctctcgccgacacccccgccggtccatggaaggtctacggcgtcgcacgccgcccccgtccgccgtggaacgccgaccatcctgtcgagtacatccagtgcgacgtctccgatcccgccgacgccgaagccaaactctccgccctaaccgacgtcactcacgtcttcttcgtgtcgtggaccaaccgctccaccgaagcagaaaactgcgaagttaacggcgctatgttacagaacgtgcttcgcgccgttatccccaacgcccccaatctccgccacgtgtcactccagacaggcggcaagcactacatcggacccttcgaattcatcggcaagatcgaatctcatgaacctcccttcgcggaggatatgccgcgtttggatgcgcccaatttttattacacccaagaggatattctttttgaagaaaccgctaagaaagagggtttgacctggtcagttcacagaccccaagtaatctttgggttttcgccttacagtttaatgaacatgattgggacgctcagcgtgtacgccgcaatttgcaagcacgagggtgttccgctgagattccccggcacgagaggcgcgtgggagagttattcttgtgcctccgatgcggatttgattgcggacagcacatttgggccgcggttgatccctacgcgcggaacgaggcgtttaactgctccaatggcgacgtgttcaggtggaagcatctttggaaggtgctagcggaacagtttgggattgaggcgtatgggtttgaggaagtaggtctgagtttgtcggaattgatgaaggatcagggtcctgtttgggatgagattgtgagtgagaatcagcttctgcctacca

SEQ ID NO: 12484 - DNA, 640 bp, Glycine max
aaaccccctcaaataaacctcaactcattgtgtgaccaaagttattattacattgcataatcaaccatgtcaatgaagttgtacgcttcccttacctttgtggtgtggcttttcatggccacatcgtccctagcccaatacgttctcgacacaaaccgcgaacgcgtcgacagcgatgatgagtactacatccggccagccataacggacaacggagggcgtttcacattgatcaacagaaacaggtcgtgtcctttgtacgttggtctcgaaaacaccgacacgccactaggctatcctgtgaaattcacccctttttcccgcaacaacaacgatgatgacgacgacgacataagggtgaatagggacctcagagtggcgttcgatgaagtttccacaacgtgtgtgcaatccacagaatggagagtgggtgagaacgacacgaggagtggaaggaggcttattatcactggccgagacgaaaccacgggatcatacggtaactattttagaattgtggaaacagaaaatgttggtatctataacattcagtggtgccctaccgaagtgtgccccacttgtagattcatttgtggcactggtggtattctgagggagaatggaaggattttgtttgcct

SEQ ID NO: 12485 - DNA, 673 bp, Glycine max
gaattccgcacattgttactgaacacacaaaccctctcaccaaaccttcatcgatctctttgtttttttataaattataatattgatacgaagttgtttctgtaaatagcaattcagagaccttaaaggtagtgagtattttcctccttacttaatctattgtgtgatcaaagtcgttattattaaattagataattgataaccatgtcgatgaagctgttattagcttccctatccatttcggtgtggcttttcatggcaacattatcccttgcccaatccaacaaccgctacgtctttgacacacatggcgaccctcttgaaactgacgatgaatattacatcaggccggccataacagacaacggagggcgtttcacattgatcaacagaaacaggtcgtgccctttgtacgtcggtctcgaaaacaccgacacaccgcagggctacccgatgaaattcaccccttttgccaacaaggacgacgacgataacgtgagggtgaacacggacttgaaagtgacactggtgcaagtttccacaacgtgtgtgcaatccaccgaatggaagttgggtgagaatgacacgaggagtggaaggaggctcatcgtcactgggcgagataatgggatacaaagtgcaggtaactattatagaatagtggaaacagaaa

SEQ ID NO: 12486 - DNA, 465 bp, Glycine max
tgaataatgtttgttgagcaatctgaatctctgcttacacacccaattcatccacaggtcatgatgaacaagaggccattaaccgccgtctacaacaaggcgctccccgatctttgcaatcgagaactcggccaccttcccccaaggaatttcgctctccgtcttggcgcctccgaggatcttgtccttcgacttgaattactgaggaatctgcaaaaacacagaggttgtgtcaacactgtgagcttcaatgcagatggtgacactctagtctccggttccgacgattggggggttattctctgggactgggaaactggccgcattaaactctccttccattctggtcattctaacaatgttttccaggccaagttcatgcctcactctcatggatcgtaccattgtcacctgtgctgctgatggacaggtgagacatgctcaaattcttgaaaatggacgagt

SEQ ID NO: 12487 - DNA, 373 bp, Glycine max
cgcgaggattccactctctgtatttctgacacaagctgtgttgtgtctcctttggtgaggatgaacaagaggaaggcgcttccagatctttgcaatcgagaagtcggccgcctatcccccagaaatttcgctcctccgtcttggctcttccgaggatcttgtccttcgacttcaattactgaggaatctgcaaaagcaccgaggttgtgtcaacgctgtgagcttcaatgcagatggtgacatgcgggtctctggttccggggagtgtgggatgagtctctgggactgggaaactggccgcattagactctccttccattctggtcattctaacaatgttttccaggccaagatcatgcctcactctgatgat

SEQ ID NO: 12488 - DNA, 686 bp, Glycine max
ctctctctctccaaaatctaatctttctcatctgggtcactgaattaattccccttttcaacttgctgagcggttgcttagcgtgatgatggctgttttctgtcacaacaatgagtgctctgaataggactattatttccttcaacaaaacttcatccttcaatcatcgaaggactctcggcattgcaagtcccagagtgattcataacaaccgcttcggatgtgtctctctgaggcttcaggttcttatcatcactgtctctgtggtttccttctttgtagccgtaggtggttacatgtacgtgcttccaagccttagccgcgcgtttttcaatggccaagttcccttattatctgaacataacagcaacggatcagtgagagaatgtgatgtctttgatggaagctgggtgcaggttaaagatcacaccttgtacaatgccacagagtgtccttttgtggaacgaggattcgattgtttagggaatgggaggggtgacagggattatcttggttggaggtggaagccgaggagttgtgatattccaaggtttgatgtgcgtggtgtgttggaaatgttgagaagcaaaagggttggttttgttggtgattcaatgagtaggacgcagtgggagtctcttgattgtatgctcatggctggtgttgaagataagaggggtgtttat

SEQ ID NO: 12489 - DNA, 459 bp, Glycine max
cccacgcgtccgctacgtgtttgctcttagcactattttagatcttatatgctttgggtatcaaccaaatgaagacattagagatgccattgacgccttaaagaccgcagatatggataaacaagatttagatgatgatgagaaaggggaacaacaaaatttaaatatagcacgaaatatttgttctatcctaaaacaagttgatccaattagaaccaactattggatttggcgcaagagcagacttcctctatcagcttagtaaccaaagtaattaaagggcaactctgtgttatgtgtaacctagtttattgaaactggatgtttatttattattattttttatgttgtcatgtatctgtttgtgcaaatttatctttttgtcatgccattactggcatttgagtgtaaggattgaaagccatgcagaataagaaatttaagtttttttttccgttg

SEQ ID NO: 12490 - DNA, 1254 bp, Glycine max
gatgaattgttctttatagatattcttcattgtgtatatacatttggtaacctcttgtctgactttgttttgacaagttgctgacccctgtgttgacaaactacggcatttgaacttttttttcttttcaataccgcaggcctattctacagtcggaacacctgactatattgcccccgaagttcttctgaagaaaggatatggcatggaatgtgattggtggtccctgggagcgataatgtatgaaatgttagtggggtatccgcccttttattcagatgaaccaatgttgacttgtagaaagatagtaaattggagaagttatttaaaatttccagaagaagttaaactttcggcagaagcaaaggatcttattagtagactcctatgtaatgtggaccagaggcttggaaccaaaggggctgatgaaataaaggctcacccatggtttaaaggtattgaatgggacaaattgtaccaaatgaaagctgcttttattcctgaggttaatgatgaattagatactcaaaattttgagaagtttgaagaggttgacaaccaaactcaaccttcctcaaaatcaggcccatggagaaagatgctgtcatctaaagatgtcaactttgtcgggtacacatataagaactatgaaatcgtgaatgatgatcaactacctgaaattgccgaattgaagaagagcacaaaacctaagcggccatctatcaagaccctattttatgatgaatcggctacaactgctaatcaacctgcccaagggagcttcttaaaactcttacctactcaaccggaagttcctgagaagagtgaatctcaatgatcccaaatagtaacattttacaggactcttgcatggccattgaggtatgaccaaatgctgagttgaaaactgattgttttagtctttcccacattcttttgttagtttggcgtggatagttatgggagcaaaggctctgaaactttgtggttttggatagctgggttttgggttgactgggatatttgtctgtagaaaaagctttgaaggtatgtattctttacatttttggttggtgatgtattcttttgttccccatttatcaagctgcaatgtgttgaaaatccaagttaattcttgtaattaagttactgctgaagtgctgacaaggatgtacaattctcacatgtagagattcattagtttgtaaggtaacatttccgttcttatcttacttcaaaaagtataatttttac

SEQ ID NO: 12491 - DNA, 2016 bp, Glycine max
cccacgcgtccgcttttttcaggttgaacatgtcaaagctgagagaaatctacttgctgaggttgacagcaattgcattgttaaactttattgttcctttcaagatgaggactatttatatctcataatggagtatctacctggtggagatatgatgacattgctgatgcggaaggatatactcacagaagatgaggccaggttctatgttggggagactgtcctagccatagagtcaattcataaacataattatattcatagagatatcaagcctgacaacttgctgctagatagaaatggccacatgaaattatcagattttggattatgtaaaccgctagactgcagtaatcttcaagaaaaggacttctctgttggaattaacagaagtggagccctccaaagtgatggacgtcctgcagctcctaatcgaacccaacaggaacaactgcagcattggcagaaaaatcgacgaatgcttgcctattctacagttggaacacctgattatattgctccagaagttcttctgaagaaaggatatggcgtggaatgtgattggtggtctcttggagctataatgtatgaaatgcttgtggggtatccacccttttattcagatgaaccaatgttgacttgtagaaagatagtaaattggagaactactttaaaatttccagaagtagctaaacttgcggcagaagcaaaggatcttattagtagactcctatgtaatgtggatcagaggcttggaaccaaaggggctgatgaaataaaggtgttgtggcgcacccatggtttaaaggtattgaatgggacaaattgtaccaaattaaagctgcttttattcctgaggttaatgttgaattagatactcaaaattttgagaagtttgaagaggctgacaaccaaactcaaccttcctcaaaatcaggcccatggagaaagatgctgtcatctaaagatgtcaactttgttggttacacatataagaactatgaaatcgtgaatgatgatcaactacctgaaattggttcgtacattttcaattttatgtgtatatttgtttatgttttgtttaaacccttttatctcattttcatcatttttgttttgtaattagaaagttcctctttaatatattgcttctaatactcttagattcctttgctcctgtgacatttctgaatctaatggaagggttggtgctctatcaattttattgcactaaaccttgtctatttgagcttcatattgtggggctgaacatgaggtttttattgctaggggatggaaaaatttatcaagtaatgcacttggataaacttgcacatactttgaatgttccagattgtgtacatactttgcatagtttgtgcaaatgtattttaccctctattaattaatgtactgttgtctactttcgtaagttttattgacagtttttggcttgtcgaaacccattttattgtggcctttaatgcaacaagcctttggaaaaaaatgatgcagcttgctaaagaaagaaaaagtatatatgttattgctagttgctgccccttgcaaatttctcgttgatgcattaattgactataatttcaataaaatgtgattttgctgaagatcatgctgctgattcttgctgtttattattgcttatgcgtttgttattttgattaccccccaacaccaaatttattgttcttttccaaatagatttatcattgtactaatcttaacaagcaatatgggtatgttgttatcagctgaattgaagaagaagagcacaaaacctaagcgaccatctattaagaccctatttgatgatgaatcagctacagctgccaatcaacctacccaagggagcttcttaaaactgttacctactcaaccagaagttcctgagaagagtgaatctcaatgatcccaactagtaatattttacaggactcttacatggccatggaggtatgaccaaatgctgagttgaatactgattgttttagtctttcc

SEQ ID NO: 12492 - DNA, 443 bp, Glycine max
gtttgatttgttctccaagcaacgccttcctctaccttttctttgccgtttaaaccctagcagagggtttaagctcgcgccacacgaagcttctccatgatccatttggaaggcgcattctaagccatggctgcttcaaggttaacctcatgcgtggcggtaacttccgctgcggtggtttccatgtccaccttctccgatcgtgcctacgccgattcttactttcgactcccgttcttctcttctaaatcttccagtgagccctcgccgccgaatcagccctccgactccaagtccgagcctccgccgcccgatgaacctaacaaatcgggtggcttcgacccggaatccttagaaagaggagccaaagctctccgcgaaatcaatagttctccctactccaagcagctgttcgatttaatgcgaaaacaggaggaaactcg

SEQ ID NO: 12493 - DNA, 453 bp, Glycine max
tccacgcgtccgcccacgcgtccgcgcaaagtagcaaacttccctggttatggctatggagaacgccgggaatttagaagcggccatagaacaattgctgaatgcggagaagcaagcgaggctcgccggcgacgtcgccgccaccagaaacgccgtcactgaaattttacggatgtgcttcgaagcgcgtgcctggaaaaccctcaatgaccagattgttctcttgtccaaacgccgtggccagcttaagcaggctgtgacagcaatggtccagcaggctatgcaatatattgatgagacaccagatcttgaaactcgtatagaactcatcaaaatcttgaacagtgtatctgcaggaaagatatacgttgagattgagagagctcggttgatcaagaaacttgcaaaaatcaaggaagaacaaggacttatagctgaagctgctgatttgat

SEQ ID NO: 12494 - DNA, 770 bp, Glycine max
cggacgcgtggggagagaagtagcaagaatccttaatgacatatttgagattcctgatatgcccttgaaggcaagaaaatttgtggtgaaggtgtgtgatgtggtgactcgtagagctgctcgattggcagctgctggtattgttggtatcctgaagaagattggtagggacgggagtggtggcatcacaggtggacggagtagaagtgatatgaaaatgagaagaacagttgtggcaattgaagggggattgtattctaaatatacattgtttagggagtacttgcgtgaagctctaaatgaaatattgggacaagatattgccaagcacgtaattctaaaggtcaccgaagatggatccggcattggggctgcactgcttgctgcctcttattcatcctaaactgtggatagagggtacacctgctataaaatatatataaattgtttgatatttatatatatatgtgtgtatatatataatatatatataggcacacacacacgtatagccatgtaaatcagaattaattctccatatttaatatctctgtataaaggaaggtttcgtctattctttgaccaagttatcttcatttatatgattattattatttttttatcgttgtgtgttttatggcttttatctgttgtcagttgagaacatttggatgtaatactatactctcgtcctaggactaggagtactatcttgagattgaaattgcttatacgtcttgttttcttatcaataaattatttagtccgca

SEQ ID NO: 12495 - DNA, 582 bp, Glycine max
cccacgcgttcgattccaccaattcacacatgcaatcccatcattgataattcaactttgggtgtgtcaaccccttactactaaagcatccctcccataatcccaatataaataccccccacaaaattcggtgaggcaaaaaaaaaaaaaaaaaagaagaacacttaccttaatttcgccaaatcaaccaaagacaaaaaaaaagaatccaaaggaacagaagagaaagcttgaagctatggggaacaccatgggaaggagtaaaaaggccaaggtgatgaaggtggatggagagacgttgaagctgaaaacaccagcgagagcaaacgacgtcgtaaaggactacccgggccacgtgcttctggactccgaagcggtgaaacatttcgggcttcgggccaaacctcttgagccgtaccaggaactgaagcccacaaagatttactttctcgttgagttacccaagattcagcccgaagaggaaaaaacggcgctaccgaggagggtgcgatccagtgggatacgcggcatgaacgcctccgataggctccagcttctcatgctctccaaacgctccgtttc

SEQ ID NO: 12496 - DNA, 553 bp, Glycine max
cccacgcgtccgatcgggtctctctctctctctttccctgatcatcaaaatcagaaagaattgggggaatggagaacaaccagcaacaaggcgctcaagcccaatcgggaccctaccccggcgccggcgccggcggcagtgcaggtgcaggtgcaggcgctcgcgcgcccccgttccagcacctgctccagcagcagcagcagcagctccagatgttctggtcgtaccagcggcaagagatcgagcacgtgaacgacttcaagaaccaccagctccctttggcccgcatcaagaagatcatgaaggccgacgaggacgtccgcatgatctccgccgaggcccccatcctcttcgccaaggcctgcgagctcttcatcctcgagctcaccatccgctcctggctccacgccgacgagaacaagcgccgcaccctccagaagaacgacatcgccgccgccatcacccgcaccgacattttcgacttcctcgtcgacatcgtcccccgcgacgagatcaaggacgacgccgcgctcgtcggggcaacggcaatggg

SEQ ID NO: 12497 - DNA, 1595 bp, Glycine max
accaatttcaccgagtcaaatggatccaagacactttcttccaaccttggagatggttgggcgccctttaatggatcagctgggacatcccttcttggtcaattggatgttgcttttcttgcagtctatgcttttggaatgtacttttctggacattttggtgataggtgtaatttgaggatctttctaacggtggggatgataggaactggcttgtttacttcactgtttggggtagggtactggggaaacatccacaacttctactattatttagtagttcaaatgattgctggattgtttcaatccactggatggccgtccgtagttgctgttgtgggtaactggtttgggaagagcaagagaggggtgatcatgggaatttggaatgctcacacttcaattgggaacattgctggttctttgattgcttctgccatgttgagctatggatggggttggtcctttgtggtgccgggactaataactgctttcatcggtttggcggttttccttatattgccggtcacacccgagtcagtaggagcaagagaggaagatgaattcagtggtcctattaaaagtggagaagaagcggcagagcctctgttaaggcaagagactccagttgaggagaaagaagcagttgggttcatagaagcatggaaaattccgggggttgctccctttgctctctgtctgttttttgccaaattggtcgcatatacgtttctctattggctcccattctatgttagccacacagcaattgatgggaaatatctatctagtgagacatcaggaactctatccactttatttgatgttggaggggtgctcggtggaattctagctggccacatttctgatcacttagaggctagagccattactgcagcaagtttcatgtactgtgcaatccccgctctcttcttctatcgaagttatgggcacgtttctttgattgtaaatggagcattgatgtttgtcactggcatgtttgtgaacggaccttatgctcttataactactgcagtttcagctgacctgggaacacataaatcattgaagggtaattcacgagctcttgcaactgtcacagcaatcattgacggaaccggttctattggggctgcagttggacctttgctaacaggttacatatctgcaaagagctggagtgctgttttcacaatgttgatggcagcagctttaattgcagggctgcttttgaccaggctagtagtgtctgaggtggccacaaagattgaagagtcgaggtctaatagagcacaagactgttcacttaatgtataagaataaccttgaagggtcacagcgatcttatgttgctgtatgtgtagtgtaggagtgcctataaagtctcattcacagcttcacttcgttaaattaaagaggagcatgcccaacagtgtttgtacattgtgtgatatacccaattaccaactctagcatagtatcatccctacacacaagctattcaagaattccttgtagcctttgaattttggaaattgaccacattgtttggaggtcaagaatgaaacttgtctagtgagtttacaaattagcat

SEQ ID NO: 12498 - DNA, 421 bp, Glycine max
caggaatgcaaggaaagtgtagtgatggagagagagagcgaaaaggcgaaaccgcacttgatcttcgcgtacggcacgttgaagcgaggctttccgaaccactatctgatggaggagttgaggagcaaagacgacgccgttttgcttggcagctacgtgacgaacgagccttatccgctggtgtgtgggccccacgggatcccatacctgatcaaactacccgggtcggggcatcgcgtgaagggcgaggtctatgccgtgtcggaggaggcggtggttgtgctggacgagttcgaaggcgtgagcgcggggtattacgagcggttagcggtgacggcggcggaggaagaaggaagggggaaaggtggaggcggaggcgtattggggacacaggagattcggtgaagtgttgtggaagatg

SEQ ID NO: 12499 - DNA, 1041 bp, Glycine max
  unsure (1)..(1041): unsure at all n locations
cgcggttccggagcttccgggggagatcaccatcaccaagatgcagctcccccaggcaccgaaacacgacgacgttttcaccaagcttctagacgaggtcatcgcttcggagctcaagagccacggcgtgatcgccaatagcttctacgagctcgagccggtttacgccgatttttaccggaaggagctcgggagaagagcgtggcatttgggaccgggttgtttgagcaatagggacgccgaggaaaaagcatgcagaggaagagaagctgctattgatgaacacgagtgtctgaagtggcttgactcaaaggaaccaaattcagttgtgtatttgtgtttcggtagcatgacagcgttctccgacgcgcaactcaaagaaatcgctttaggtttggaggcttcagggcagaatttcatatgggttgtcaaaaaagggttgaatgaaaaattggaatggttaccagaagggtttgaggagagaattttaggtcaaggaaagggtttgatcataagaggttgggcaccccaagtgatgattttggaccatgaatccgttggagggtttgtgacacattgtgggtggaactcagtattggagggggtgtgtgcaggggtgccaatggtgacatggccaatgtacgcagagcaattttacaatgctaagtttttgacggacatagttaagattggggtgagtgtaggcgttcaaacgtgcattgggatgatgggaagggaccctgtgaagaaggaaccggttgagaaggctgtgaggaggatcatggttggagagcagccagaggaaatgaggaccagagcaaaagagcttgctcgaatggcaaagcgtgctgtgtaggaaggaggatcttcttacaacgatttcggctcattgatagaggaatttgaggtcgcgtgcctgttgatgattgttgtgtcatgtatgcatgtaaacttaggccggtttgtgggaaattgctgatgaccgatttgctaataatacccgcggaagttgcttnnnnnnnnnnnnnnnnnnnnnnnnnn

SEQ ID NO: 12500 - DNA, 1047 bp, Glycine max
agctgttccatcttcaaaaccgtgggctcggatcttcaaaatcaaaacgaatttccattcgttatcatataaatacctcatcttcatccccaaaaccactttcagtttcagaacacaaagcaatggtggcgctcctagtggcaactacatccgaccctgcttccatcaacccggccaacgcgcttttgggcatgcccgggtggaaacccggtccccatttccaggatgatatgaagagctatgtgaatgaaggggtgagggtgttggtacatgggaagagcatagttgcggaagatgagttggacaagaggtgggaagaagttactggggaggttattgatgaagtgatcttcttcagcaagcacactgctgcctccaacaagcctgccctgactgttcaccctattggagttcctcatttgcgccaaggcgatgttcccccccaaggcggcagacctggatgggcagctcttccaaatcctaggatggggccttggcttcgccttttgaaaaaccttgcccaagctcataatcttgtccctgaatttgagattactttagaggccactcaccatggaccgttgaccaataagccaaccatgtttttggagattggtagtactgaagactattggaagagacaggatgctgctcaagttatggcacagttagtatgggaaggacttggacttggaggtgtgtcagatgtaggaaactggagcagggagaatgataacaagaaaatccttcttgggataggtggtggacattatgcacctcggcatgtggatgtagtattgaaagataatgtatgggtgggtcacctactttctggatattcgctgccaatggaagatccaaaccagtcaaaaggagaaaaaaatgtggagattggtggaacatggagacagtctataaaagctgcatatgaagccacttattctgcatttcctggtggtgaaattcttgcacatctagaccacaagagtttcaagggctggcagaagaatgccataacaggattccttgcggagaaaacattaaaat

SEQ ID NO: 12501 - DNA, 241 bp, Glycine max
cagtcaaaaggagaaaaaaatgtggagattggtggaacatggagacagtctataaaagctgcatatgaagccacttattctgcatttcctggtggtgaaattcttgcacatctagaccacaagaagaaggcatgttatggcatatgttgaaagttaagaaaactaagtatgattttagctgtgccaaggagtttcaagggctggcagaagaatgccataacaggattccttgcggagcaaa

SEQ ID NO: 12502 - DNA, 449 bp, Glycine max
atatctctatctctctctctcttcgtttgaatgcaaacatggcatcttcaccaaccttaataccctttctcctcatcttcttcctcttccacttccacttccaccgttcctcctccctccccctctccgtggagaaccccgaagatgacgtcatagtctcgtcgccgaagggaaccttcaccgcagggttcagccccgtgggggagaacgcgtactgcttcgcgatatggttctccacgcaagcgacgacaaagaccgttgtgtggatggcgaaccgcgatcaaccggttaacgggaaacggtccacgctttcgctcctcaagacggggaacctcgttttaaccgacgcgggacagttcgatgtctggtccaccaacacgctctcctcgaagacgcttgagctgcatttgttcgacaccggcaacctcgtactccgcgagcagagtaat

SEQ ID NO: 12503 - DNA, 503 bp, Glycine max
ctcgagccgaaacgctgcgaacaacaaccacactctctacaaaattgatggtcccaccgacgagcgggtgccggaatcggaggccatgaacggcggtgccaccaccgccaccttccgatccatcctcgacaagcccctcaaccagctcaccgaggatgacatttctcagctcactcgcgaagactgtcgcagattcctcaaagaaaaagggatgcgcaggccttcctggaacaaatcgcaggcgatccaacaggtcatttccctgaaagcgctgctggaaccttccgacgatgatactcctcctcctcctcccgccatgcaccaccgtagtcatgctcctccccctccacctcaacctcaatctcaagtgaatttgactgaacctcctcctccgcccaaggcttcgccaactgaagaatcctcttttcatgctgctgaagacattcagaaacctgcgtcgtctgggggaaaacccttcggaactaatgacaccaacaccaacg

SEQ ID NO: 12504 - DNA, 657 bp, Glycine max
gtcgacgggcacatgtattttatttccatcaagaagacattgacccacagacgccacaaagtgtgaacgaggctaactttcgtatcagagtacccctcaatttttgcagctgctgcttcctttttattgtttccttcgcttggagaacaacgttaagcagacaaaggatatctctttttctttccaaagaaaatttattattctcttttgcacaattcaactccaaaaccggatctacttcttcaaccgcgtcattcatttcaaccttcaagctacggaagagcgatgaactcatgatattgattagcatctaaaaatgtttattcttcgtcaccatacaaatctcgctatagtcctcactatcttcatagcttgcacaacaagagcacaaaacctcaccacctgcaatggcaaatgcggggagcacacccttcagttcccttttggcttctcccaaggttgtccaatccagcttgactgttccaacgaccaagtccaacttcgcagcgaattcggtgaatttctggtccaaaacgtaacaaacagcaacatattcgtaaatctccctgcaaaatgcaaccgttccatggaatcaattcagccaatttttactgagaattttgccccaacgattaacaatagctttctggtgcaaga

SEQ ID NO: 12505 - DNA, 398 bp, Glycine max
  unsure (1)..(398): unsure at all n locations
tcgttnttatttaaaacaatttttcccccattaaaaacttgctattggttctcttgtatgagccagcatttattgagatggatggccacccacctgtatcgatcacagcttttaattctcatttaatccgtcatctgaacatactatgtcatattagtactatgtttcttcttctaatttcccaaaaggctaaaattcgggcaattcaagctgaatctttgttcttattttcagctacggaagagcgatgaactcatgatattgattagcctctaaaaatgtttattcttcgtcaccatacaaatctcgctatagtcctcactatcttcatagcttgcacaacaagagcacaaaacctcaccacctgcaatggcaaatgcggngagcacacccttcag

SEQ ID NO: 12506 - DNA, 430 bp, Glycine max
gagcattttctcccgaatatggactcttttcccaaaaactcgacttcagacagacttctaattccaactgcatctgccagatatttggagaatgggcttcagatgattgaattccttggaagagtagtgggtaaagctctatatgaaggaatattacttgattactctttctcccatgtctttgtacaaaagctattgggacgatatagctttcttgatgaattatcaacacttgatccagagctatacaggaaccttatgtatgtcaagaattatgacggtgatgtcaaggagctctctcttgatttcacagttactgaagaatcattgggcaaaaggtatgtggtggaacttaaatctggtggcaaagatatttctgtgacaaatgagaacaagatgcagtacatacatgcaatggcagactacaaac

SEQ ID NO: 12507 - DNA, 427 bp, Glycine max
aataaaagaaaaagaaaagcacgttaaagattgtaataatttgtaaaaactatggctagcgatggcagcgaagagtttaggctagtgtcaccggcgttcagcaacgaggggaagttacctcggaactacactgacgagggccagggtgcgaaaaagaacatatcccctccgttggagtggtacaacctgccggaggggaccaagaccctcgccctcgtcgtggaggatatcgatggatccgattcagatgggcccatcatgccatggacccactgggtcgtcgcaaacatcccggccacggtgaagggcctgccggagggattctccggcaaggctgccgagatgggcggggattacgcgacgatcaaggaggggaacaatgacctgaagaagaccggttggaatgggcccaggctgcccacgcctg

SEQ ID NO: 12508 - DNA, 458 bp, Glycine max
ggaggagtggcgttgccagtgacattcgcgtacccatgtttcatgtggcttaagacaaagaagccaaagaagtatagtgccatgtggtggctcaattggttcttggggacattgggagtggctttgagtgccatattggttgcggctagtttatatgtcatcattgatactggtgttaatgtgagctttttcaatcctcagtagtctcacatatagagtgggaaaatgtactaggaaaatgatgttgggaggtaattaattagtaagagaattgctaaggttttctttctttctttttttgagaaattcaaatttgtgaccccactttgtagttctaggttgatttcgcctaatagtgatatttgtataaatatcattaactgcataaggggaggggaaggtaaatcaagattgtataaattttcttgttctgcaaattgaaaaatacttaagagttt

SEQ ID NO: 12509 - DNA, 406 bp, Glycine max
gtgcgggttccaagcacgactaaaatcaccgtcatttttctcacaccgacagtttcaaaaggcaaaggaagagttcgcatgaatcatggtggagattcacgaagaaatcaacccctttgatcaagaagaaaatgaagacattggagaggaagaaatcgactatgaccagcttaagaagcggatgtggaaggatcggatactgctgcagaagatgaaggagaaacggcccaaagaagagccagtccaagaagcaaaacaagaagcatctaggcggaagaagatgtcaagagcgcaagactcggtcctcaagtacatgatgaagattatggaagtttgcaatgctcaaggttttgtgtatgggattgtccctgaaaagggaaagccagtgactggttcttctgacagc

SEQ ID NO: 12510 - DNA, 543 bp, Glycine max
atttgatagcttgcttaggtggtgaggagaaaacaattcaatttatggagaacatgagcctaacagaatccagcattcctcttctgaaagaagcctatgcatatggagttgtagagcacccatttcccttaaatatcttcttggaggattggaatctaggccctgagttctatcaatctgtgaaaattggcattgtacaatatatgatactgaagatgatctgtgcaatagtggcaataattcttgaatcttttggggtttatggagaggggaagtttgaatggaaatatgggtatccttacttggcactagttcttaactttagtcagacatgggccctatattgccttgtacagttctatgctgttattaaagataagttgaaaccaatcaaaccattggcaaagtttctaacttttaagtcaattgtcttcctgacatggtggcaaagtgtggctgttgcatttctttcttatatgggagcttttaggggatcattggctcaggagttgaaagcacgtattcaagactacatcatctgta

SEQ ID NO: 12511 - DNA, 1136 bp, Glycine max
tctctcacgcgtccgagcctccatatccgccattgaattcttcttccatttctcttttttctgcatacccatttcgtttttcttcccaaatggccctttcttgctccaaagttttaagcttttatctctcgcccgttgtgggtggtggtgatgttccgaaaaagctcactttttcttcttttttgggtctttctaagggtgttggtggaagcaggagctcgagggtgtgtgctgcttcaaatgcacccgcaccactcgctggggtcatatttgaaccatttcaagagctcaagaaggattatcttgctgttccgattgcacacaatgtttccttggctcgtcagaactatgcagatgactctgaatctgcaatcaacgagcagatcaatgtggaatacaacgtttgcctatgtgtaccacgccttgtttgcgtacttcgacagagacaacatagctctcaaaggacttgcaaagttcttcaaggaatcaagtgaagaagaaagagagcatgccgagcagcttataaagtatcagaacattcgtggtggacgagtggtgctgcacccaatcacaagtcctccctcggaatttgagcattcggaaaaaggggatgccttgtatgccatggaactagctttgtctttggagaagttgacgaatgagaaacttctgcacgttcacagtgtggcagatcgtaacaatgatcctcaactagcagacttcattgagagcgagttcttgtatgagcaggttaaatcaattaaaaagattgcagagtatgtgactcaactgagattagttggaaagggtcatggtgtgtggcactttgatcaaaggcttcttcatgatgaagatctataatctttgaacagcctctgttttctatacatatggtcctatgtgaagttatcaccgtgttgttctgtttgtagtaatagtgaataagtgtgttgttctgtttgtagcaatagtgaatagtgaataagtgttcctctcctaggtgataaaaatgtagggaactttgtccttgtattatagttgttggtagaatggtagtagtagtattattatgtgcaatctcatatatgtttgtaccaccccatcattttattagaaataaaaaatgacgttcggtt

SEQ ID NO: 12512 - DNA, 508 bp, Glycine max
  unsure (1)..(508): unsure at all n locations
agaagatgaacacgaagttgtctgatgtatctgctgagccggagcatgtaactgaagattgtcagtctgatttctttccaatgcttcgttctggagcttgtactgatattggattccggtcaaatatggaagatgtatatgtttgtgctgacaattttatggtggattatggactcaagaaccatatagatggacccagtgctttctatggggtatttgatggacatggtggaaagcatgctgctgactttgcttgtcatcatctgccaaagttcattgttgatgacgaagatttccctagagatattgaaaggatagttgcttcagcatttctgcaaacagacaatgcctttgcagaagcttgctctctggatgccgcacttgcatctggcaccactgcattagctactcttgttatgggaaggttgctgggtggtggcaaatgctnggagattgtcgagctgtgcttgtgcccgtcgtggaaaagcaattgaaatgcaagagatca

SEQ ID NO: 12513 - DNA, 1291 bp, Glycine max
tcgttcataaatatgacagtgcacactcactctgaaacccctcctagccgctcgaccctacttctacttccctttgttctcaaaccttatcccttatcctcccaaaaccaaaccatgtctacctccgcagcttctctcgcactcccaaccctcactctccgaactcgacaacctctctgttctccccaatgcttctcctcgtccctctccctcacccctaactccaaacccatttccatttccgccgttttcctcaaaacaacgctgtcgtcgtcgtcgccgttgtcgctgtcgtctcgcttcgttccccatgtctctgtgttggagcaggaggaggacaccttcggcgacggagacggccccagcttctcccgcgaccttaagctctttgtcgggaatctccccttcagtgtcgacagtgcgcggctcgcggagctcttcgagagtgcggggaatgtggaggtggttgaggttatttatgataagactactgggaggagcagggggtttgggtttgtgaccatgtcttccgttgaggaagctgaagcggctgctaagcagttcaatggctatgaacttgatggaagatcattgagagtgaattctggaccacctcctgctcggaatgagagtgctcctcggtttagaggtggttcttctttcggttccagaggtggtggtccttcagatagtgaaaaccgtgttcatgtaggtaatcttgcttggggtgttgacgatgtagcacttgagtctttgttccgtgaacaagggaagaaggtcttggaagctagggtaatctatgacagggaaagtggacgatctagaggctttggattcgtgactttcggtagccctgatgaggtcaacagtgcaattcagtccttaaatggcgtggacttgaatggcagagctatacgagtctcattagcagattccaagcccaagcggttctgaagcttttcatctatacccgagagaggatttcggtagttgggacttgggagttatacagctgcaagatgtcattggcaatcagtttggacaagaaatacacttacatgcattgagactagatgtacacacagtttcaatatctgacagaggagaatatatcagtgtctcttgaagtttaaatgtatgttccaaatttgattgttgtcatttgtaactgatttgtagtccgtattttcactatagaagtagatgtctcaaatatttattggttaccccgttccaacattgttgtggaagaattttataattgcaatgtgcctggaaaattatctaccac

SEQ ID NO: 12514 - DNA, 631 bp, Glycine max
  unsure (1)..(631): unsure at all n locations
ccactctgaaatcctctcctttcgtgataaaccctacttctacttcccccctttgctctcaaaccttatcacctaatccttatcctcccaaaccagaaaaccatgtctacctccgcagcttccctcgcactcccaaccctcactctccgaacccgacaacctctatgttctccccaatgcttctcctcgtccctctccctcacacccaacaacaaacccatttccatttctgctgtttttctcaaaccaacaactctgtcgtcgtctcgcttcgttccccacgtcgtggtgtcgtcggatttggggcaggaggaggacaccttcagtgacggagacggccccagcttctcccccgaccttaagctctttgtcgggaatcttccgttcaacgtcgacagcgcgcagctcgcggagctctttgagagtgccgggaatgtggaggtggttgaggtgatttatgataagactactgggaggagcagggggtttgggtttgtcaccatgtcttcggttgaggaagctgaagcggctgctcagcagttcaatggctatgaacttgatggaagagcattgagagtgaattctgggccacctcctgctcggaatgagagtgctcctcgntttagaggtg

SEQ ID NO: 12515 - DNA, 560 bp, Glycine max
ctagggtaatctatgacagggaaagtggacgatcaagaggctttggatttgtgactttcagtagccctgatgaggtcaacagtgcaattcagtccttaaatggcgtggacttgaatggcagagctatacgagtctcattagcagattccaagcccaagcagttctgaggatttagcttttcgtctatacccgagagaggatttcggtatttgggacttgggagttatacagctgcaagatgtcattggcaaaaacagtttgggaaagaaatacacttacatgcattgagactacatgtacacagtttcaatatctgacaggcttcttcctagatgagtgtctgttgaaagtttaaatgtatgttccaaatttgatggttgtcatttgaaactgatttgtagtccgtattttcactatagaagtagatgtctcaaatttattggttaccccgttccaatattgttgtggaagaattttataatcgtgatgtgcctggaaaaaaaaaaaaaaaaaaaaaaaaaaaaggggggccccccactaaggagcctcttcccccggga

SEQ ID NO: 12516 - DNA, 885 bp, Glycine max
ctcgagccgaatcggctcgagactcaatatagtgcaacctttgctgtggtagtggaagcacacaaagagcacaacgttacatatagtaactatggcgagagtgggtagaatgaaacttggttcagaagggtttgaagtgtctatgcagggacttgggtgcatgggcatgtctgcattctatggtcctcctaagccagagcccgatatgattgcactcatccaccacgccgtccaaagcggtgtcacttttcttgacacttctgatgtctatggccctcacaccaatgaactccttctgggaaaggctttgaagggaggggttagaaagaaggttgaattggctaccaagtttggaatcagctatcctgaagggaaatgggagatccgtggtgatccagcatacgtgagggatgcttgtgagggcagcttaaagaggcttggtatcgattgcatcgatctctattaccaacatcgtattgatactcgtgtgcctattgaagtcacgattggggagcttaaaaaacttgttgaggaaggcaaaataaaatacattggtctgtctgaggcctcggcttcaacaatcagaagagcacatgcagttcatccgataacagctgtgcagttggagtggtccctatggtcaagagatgtggaggaggaaatagttccaacatgcagggaacttggtattggaattgttgcatatagtcctcttgggcgaggattcttgtcattgggaacaaagttgcttgagaatttggcacaagatgacttccggcagactctgcctagatttcaacctgaaaatttggagcagaacaagataatattcgcaagggttaatgaactggctgcaaagaagagatgtacacgatctcagcttgc

SEQ ID NO: 12517 - DNA, 484 bp, Glycine max
gatattatcttgcttttgtacaaaatttgaaatagaaataatctgtgctgtggtagtggaagcatcgagaacatcgcagcgatggcgagagtgggtagaatgaagttgggttcacaaggcatggaggtgtctttgcagggacttgggtgcatgggcatgtctgcgttctatggtcctcccaagcctgaccccgatatgattgctctcatccaccacgctgttcaaactggtgtcacttttcttgacacttctgacgtctatggtcctcacaccaacgaactccttctaggaaaggctctgaagggaggggtgagagatgacgttgaattggctacaaagtttggaatcaacgttgctgaagggaagagagagatccgtggtgatccggcatatgtgagggctgcttgtgagggaagcttaaagagacttggcatcgattgcatagatctctattaccaacatcggattgatactcgtgtgccta

SEQ ID NO: 12518 - DNA, 441 bp, Glycine max
tgctttcccaaatccctctcttatacaaagtcaaaatctatcgtaagaaaagagaaagcgaatcggagaagaagaaaaatggggttggctttgttagcttcgaaggccgtgagacccacatcaaggctcctcttcggttcccaaaaccctagcaccttcctcctccgaaccatcgtctccaagccccagcttcggaatcccgaagccaccgccgcgcatccggagcagccgccgcctgccgatctcccgccgcggactccgctcgccggcgcccgcgtccacttcccaaaccccgaggactccatcgaggttttcgtggacggctaccccgtgaaaatccccaagggaatgaccgttcttcaagcctgccaagtcgccggcgtcgacatcccgaggttctgccatcacagcagactctccatcgccggcaattgccgcatg

SEQ ID NO: 12519 - DNA, 613 bp, Glycine max
ccgtccgaaagctgggaattcggtttggaaggatcagcacgacactgagcatcagcaatggcaagcgcaagtgttggtaaagaactgacgctgtattcgtattggaggagctcttgttcccaccgagtccgaatcgctctcaacctcaaagggcttaaatacgaatacaagcccgtcaatctgctcaagggagaacaatctcgccctgagtttctccagctcaatcctgttggttgtgtccccgttctagtggatgaccacgttgttctctatgactctttcgccattattatgtatttggaagataagtatcctcacaatcctttgctccctcatgatatttacaagagagcaatcaatttccaggctgctagtgttgtttcctcaacaatacaacctcttcataacttgagtttactgaactacattggggagaaagttggccctgatgaaaaacttccttgggcccaaagtataattagaagaggctttaaagcactggaaaagctattgaaagaccacacaggaagatatgcaactggagatgaagttttcctggcagatattattttagcacctcagttacatgcagcatttaggagattcaacattc

SEQ ID NO: 12520 - DNA, 2144 bp, Glycine max
ctaagtacggcaatatcatatggagaatgaaaataacaggaagacagataaagagtggcttagtccaaaacctcacacgactccctttgttgcgttgtgtttcctttcgccgaaaccctcgctcgcaacttctacagaatccctttcaccatggatattgaggaggacatccgttctttacagctcgattcagcagaagacaataatggggtggtaaatgcagaggatggaaggccagaagaagttgagaaatctgataagatggatgaagatccaaagcaggatgttgaggctgagccaaaggctgttgaggctgagccaaaagtgaaggataaggaggttccttctgttcaagatgaagaagatgaaccagagatgacaaaaagacacttgaatgttgtgtttattggtcatgttgatgctggtaagtctacaactggaggccagatacttttccttagtggtcaagttgatgagcggactatccaaaaatacgagaaagaggctaaggacaaaagtcgagaaagctggtatatggcttatataatggacacaaatgaggaggagagggtaaagggaaagacagttgaagttggaagagcacattttgagactgaaacaacaaggtttactattttggatgcacctggtcacaaaagctatgttcctaacatgattagtggtgcatctcaagctgatattggagtgttggttatttctgctcggaagggagagtttgaaactggatacgagagaggtggacaaactcgtgaacatgtccagcttgcaaaaacgctgggtgtgtctaagcttcttgttgtcgtcaataaaatggatgagcctacagtgcaatggtcaaaagaaaggtatgatgaaattgagtcaaagatggttccatttctaaagcaatctggatacaacgtaaaaaaagatgtcttgtttttaccaatttctggtctaatgggtgcaaacatgaaaacaagagtggataaaagtgtttgtccatggtggaacgggccttgcttatttgaggcacttgacgctattgaagttccactgcgagatcccaaaggtcctttcaggatgcctattattgacaaattcaaagacatgggaactgttgttatgggcaaagttgaatctggcagtgttcgtgagggagattccttgttggtcatgccaaataaggatccagtgaaagttgttgccatctttattgatgaagatcgtgttaaacgtgctggacctggtgaaaatttacggattagattatctggtgttgaagaagaagacatattgtctgggtttgttctatctagtgttgctaatccaataccagcagttaccgagtttgttgctcagttggtgatccttgaattgctagacaatgctatttttactgctgggtacaaggctgttctgcacatccactctgtggttgaggaatgcgagattgttgaactcttgcagcaaatcgatacaaagacaaagaagcctatgaaaaagaaagttttgtttgtgaagaatggagctgttgtagtgtgccgtgttcaggttaataactctatttgcatcgagaagttctctgattttccccagcttgggaggttcactcttcgcactgaaggaaaaactgttgctgtgggaaaagtcactggtctgtgaatttgtaacaattttgacttgaggacgggaattcctgcccaaattaatggagtggcagctttgaggcataattgacagcatcaagtttaccatatattcatttcggtatttattttgcttttacttggggtggtattcagtgaagagttatttgttgccgctggtgcccatgatgtacttgtatacggccttacaaggcttggatgcttcagtattttgcggttggctgcttccaaccgtgctactcttgagatataatttgaaaatagatggttttaaatcaatctgtcttattagctgtggaatctgatgactattagcccaacagcggttaagcaagtgtcctagtcgcagttgactagcatatttagttttgatagtgatattgtgatttgttttaatgattcatgttgcctagtaaacgtgatggaattttgttgaactggaaatttgcaagttaaaattacaagtccatgttt

SEQ ID NO: 12521 - DNA, 403 bp, Glycine max
gttctgttgtttcaaaattgcaaacgttatccacctcagaccatgcctccgtggtctccatgaacttatttgtggcacttctgtgtggttgtattggccttggccatcttcttgaggagaatcggtggatgaacgagtctatcactgcccttttgattggtgtttgcactggcgtagtcattttgctgtttagtggtggcaaaagctcgcatattcttgttttcagtgaagatcttttctttatataccttctgccgcctataatatttaatgccgggtttcaggtgaaaaagaagcagttttttgtaactttcatgaccataatgtggttggggcctttggccccataaaattctggacccatattacctttgggggcacaccaaatttttagaaggttgat

SEQ ID NO: 12522 - DNA, 1119 bp, Glycine max
cttccatacaacattcgacactccctcacctcctttggcggctctcaatttttcgaaccccaaaccctagtttcatttcgatttcttctctaataattacactcacacatagtttcacgcgtagtgttatcattcatgaacgtattgtttgaaagaagttaagtaaagagagagtagtgggttgtggctcggtggagaaagtagtaaagtaatggaggaatcgttagggcagaaatggaagcagcgagagttcgctttggcatcagtttccgacctctcttcggctccttcttcggcttcgccgggaattgctcgcttcgactctgacggtctccaaattcatcaccaatctcaccagattccattcaatgttgatcctcgaactgttcagttattcaaggtgagtcctgttctatcggtttgcttggtggaaggatccgatgttggtaaaaagacattgtattccaggggagtcacaatccagtttagaaatgatgaggagagtgcagccttccattgtgtagttcaacagtggaagaagggatgtaatgctcaagaaggaaatggacgaaatggaactattacaacttctaaaagcaaatttgatgaaaagatagagtcatcatctgctaaaatgtattttcattattatggacaacttctgcatcagcaaaatatgttgcaggactatgtgcggacagggacctatcatgctgctgttcttgagaaccgtgctgatttcattggtcgtgttgtagttgatgtgggtgctggtagtggtattttgtcattatttgctgctcaggctggtgcaaaacatgtttatgctgtggaagcatctgaaatggcagaatatgcgcggaaacttatagctggaaacccaacactggctcaacgaattacagtgatcaaaggcaaagttgaggatgttgaattgccagagaaagcagatattctgatctctgagcccatgggcaccttgttagtcaatgaaagaatgctggagtcttatgtcattgccagagataggtttctcgttcctactgggaaaatgtttccaggtgtgggaaggattcacatggcacctttcactgatgaatatttgtttattgaaattgc

SEQ ID NO: 12523 - DNA, 425 bp, Glycine max
caaaactagtattttcttagccacacgtactcttccacaatgtcttcctcaaagctcttcaccacttttcttttctcactaaacttagctctccttctccaaacatcttttggagccgaccctctcttccatttctgttcaaattctgagaacttcacagccaacagtccctatgaatcaaacttgaaaacactcatcaactcactcatctacaagaccccttcaactggttttggtgttggctctgtgggccaataccaaaaccaaaaggcatatgcgcttgccctttgccgcggcgacgtgtcggccccagagtgcaaaacttgtgtctctgaggcacccaaagaaatcctcagtcgctgtccatacaacaaaggtgccatcatttggtacgactattgcatgttcaagtacttggacactga

SEQ ID NO: 12524 - DNA, 1186 bp, Glycine max
gtaataagatgccaactttggaggagtatggtaccaatttgaccaagctagcggaagagggaaaattggatcctgttgtgggaaggcagccgcaaattgaacgtgtgactcaaattttaggtcgtcggactaaaaataatccttgtcttattggagaacctggtgttgggaagacagcaattgctgaaggtctcgctcagcggattgcaaatggtgatgtacctgaaaccatagagggaaaaaaggtcataaccctcgacatgggtctgcttgttgctggaactaaataccgtggtgagtttgaggagaggttgaagaaactgatggaagagatcaaacaaagtgacgagataatacttttcatcgatgaagtgcacactttgattggagcaggagcagcagaaggggcaattgatgctgctaacatactaaagccagctcttgcaagaggtgaactacagtgtattggagccacaacattagacgagtacaggaagcacattgaaaaagatcctgctttggagagacgattccagccagttaaagtgccagagccaactgtagatgaaaccatacaaatactgaaaggacttagagagcggtatgaaattcaccacaagctccgctatactgatgaggctcttgtagctgctgcacagctgtcctaccagtatatcagtgatcgatttttgccagacaaagctatcgatttgattgatgaagctggttcacgagtccggcttcaacatgcacagttacctgaagaagcaagagaacttgacaaggaggtgaggcagattattaaggagaaagaagaagctgttcgcaaccaagactttgaaaaggctggagagctacgtgatagagagatggatcttaaggcacagatctcaacacttgtagagaaaggcaaggagatgagcaaggcagagactgaggcaggggatgaaggtcctattgtgactgaagctgacatacagcatattgtctcatcctggactggtattcctgttgagaaagtctcaacagatgaatctgatcgcctcctgaagatggaagagactttacataagcgagtcattggtcaggatgaagcagttaaagccattagtcgggctatccgtcgagctcgggttggactaaaaaatcctaatcgtcccattgccagcttcatcttttctggtcc

SEQ ID NO: 12525 - DNA, 419 bp, Glycine max
aaaaaaaagagtaaagggagaaaacgaaagagagaaagaagtagagacagagagagcagaagaaggatccacatcgttctcttcctctcttctgtcttcttctccttcaacattcccaaacccaaaaagtgatttatgatatgatggagtttggtgtgaatttcattcactgattcaacgattaggatcaactgtcattggtttttttgtgttgggactagaaatgtcaatgtcaggatttgaagggcaatgtagtaatgatgagattagagagaggaggtccgatgttgagaactcagaagacgagaggcggccgtcgagaattgggaacttgaagaagaaggcgatgaatgcgtcatctagattcactcattctcttaagaaaagagggaaaaggaaaatcgattatcgggttccgt

SEQ ID NO: 12526 - DNA, 368 bp, Glycine max
ggagaaaacgaaagagagaaagaagttgagacagagagagcagaagaaggatccacatcgttctcttcctctcttctgtcttcttctccttcaacattcccaaacccaaaaagccagccacattgcaatcgccgaaatttttccacttccgcgaaacggcgtgtcgttttggaatccgagagttttggtttttgctttcgtaggttttgattggggttaccgagcgaacaggtgtttgaacagctacaataaaaaaagtgatttatgatatgatggagtttggtgtgaatttgatttgctgatgcaacgattaggatcaactgtcactggttttgtgttgagactaaaatgtcaatgtcaggatttga

SEQ ID NO: 12527 - DNA, 888 bp, Glycine max
cggctcgagtacactcctcctcttctcacggccagggttttagggcagcttctttctttgagattaagtttcagtagtaatgggtaaggaaaaggttcacattaacatcgtggtcattggccatgtcgactctgggaagtcaaccaccaccggtcaccttatctacaagctcggaggtattgacaagcgtgtcatcgagagattcgagaaggaagctgctgagatgaataagaggtctttcaagtatgcctgggtgcttgacaagctcaaggctgagcgtgaaagaggaatcaccattgatattgctctgtggaagtttgagaccacaaagtactactgcacagtcattgatgcccctggacatagggatttcatcaagaacatgattactggaacatcccaagctgactgtgctgttcttattattgattccaccactggtggttttgaagctggtatttccaaggatggacagactcgtgagcatgctctccttgcattcactcttggtgtgaggcagatgatttgctgctgcaacaagatggatgccactacacctaagtactccaaggcaaggtacgatgaaattgtcaaggaagtttcttcctacatgaagaaggtcggatacaaccctgacaaaattccttttgttcccatctctggttttgagggagataacatgattgagaggtctacaaaccttgactggtacaagggtccaacccttcttgaggcccttgatcagatcaatgagcccaagaggccatcggacaagcctctccgattgccccttcaggatgtctacaagattggtgggataggaactgtgcctgttggacgggttggaaccggtgtcttgaaacctggaatggtggttacctttgcacc

SEQ ID NO: 12528 - DNA, 964 bp, Glycine max
tctcgagccgaatcggctcgagaaaatctgctacggctgttgttataacaagcaccaaccacaacgacttttcttggtctctacttcgcatttccgttctttgcttttctcgggctacgaaaaacgacgtcgttttcccaattttccccggcgaccgggaaatggtggagccggtggagcttcgcggcgaggagcagctctcgttgctgtcagattccagcaatggtgaccggtcgtggcggttgaacttcgacgggtttcagctatcttcggagcacacggagaagcaagtgaaaccccctcgcggactccatgactgttatggggttcttggtcaagaagataatattgcagagtactatcagcagcaggtagaagtgcttgagggctttactgaaatggatgctttagcagagcgtggttttattcctggaatgtcaaaggaggagcaagacaagttagcaagaagtgagacttttgccattagagtgtcaaacgcagcaaacatggttctttttgttgccaaagtttatgcatcaatcagaagtggttccctagccatcattgcatccacgttagactcacttcttgacctcctttctggattcatcctctggttcactgcattttccatgcaaacaccaaacccatatcagtaccctataggaaagaaacggatgcaaccattgggaattcttgtttttgcctctgttatggcgacacttggactgcagataatcttggagtctacccgcacattaatatcttctgaaaatgcattcaacttgaccaaggaacaagagcgctgggttgtgggcattatgctttcagtgactttggtgaaattcctgctgatgatttactgtcgttcttttaccaatgagataattaaagcctatgcccaggatcacttttttgatgtgatcactaatatcattggccttattgctgcacttttggcaaa

SEQ ID NO: 12529 - DNA, 1433 bp, Glycine max
  unsure (1)..(1433): unsure at all n locations
gtcgggctatccgtcgagctcgggttggactaaaaaatcctaatcgtcccagtgccagcttcatcttttctggtccgactggtgtggggaagtctgaattggccaaagcattggctgcatactactttggctccgaagaagctatgattcggcttgacatgagtgaattcatggaaaggcacactgtctccaaacttattggttcacctcctggatatgttggttacactgaaggtggtcaattgaccgaggcagttcggcgtcgtccttacactgttgtactgtttgatgagattgagaaagcccatcctgatgtgttcaacatgatgcttcagatcctggaagatggaagactaacagacagtaagggcagaacagtggatttcaagaacacacttcttataatgacatcaaatgttggaagcagtgtgattgagaaaggaggccgcaaaattggatttgatctggattacgatgagaaggatagcagttataacagaatcaagagcctggtaactgaggagctaaaacaatacttcaggccagaatttttgaatagattggatgaaatgattgtcttcaggcagctcacaaaactggaggtgaaggagattgctgacataatgctcaaagaggtgtttgatagactgaaggtgaaagatattgaacttcaagtgacagaaagattcagggacagagtggtggaggaaggttataaccctagttatggagctagacctctaagaagagccataatgcgacttttggaggacagcatggctgagaagatgcttgccagagagatcaaggagggcgactctgttatagtggatgttgattctgatggtaatgtgattgtgctcaatggtagcagcggagcccccgaatccttgccagagacgcttcctgtataatgcggttaatttgctaatactatgtacttaatttgtttaaaccatagtcatagtatgttttacttgtcaatgtacctaaagtttttaatggaatacctggtaggcctcatcatgttttttgcctataaagcaaatcaaattcagaaaaagggtagcggggttaccagggggatatagggaaaaactgaaaaaggatttgtggggaaggtgaaaatcagcgccgtattcggtataactttggcaccaatgaactattccgtcggaagctgggggtgtttgtatgtttccactggtttgactatgatgtaatattaatatcccagcattactgtaaatgatcattatggcgtattcattgcttgagattgcaatgcatgtaatgacaggtttagggtattagatcnaattgaatacgacagtgtccccaaatcatctatacacaagtttaaaatgtaaggcggatgcggagtgaatcaacgtgattcatgtattatatcggttagttttatgttggccgtc

SEQ ID NO: 12530 - DNA, 546 bp, Glycine max
ggtgtttgatagactgaaagccaaggaaattgatctctcagtaacagaaagatttagggagagggtggttgacgaaggatataatccgagttatggggctaggcctctaagaagagctataatgcgacttttggaggacagcatggctgagaagatgcttgctagagagattaaagagggtgactcagttatagttgatgctgactccgatggtaatgtgattgtgctcaacggtagtagtggtgccccagattcattagaagaagctcttcctgtgtaacgtggttgtcttagttagttgagttgtatttttttctctcttttatttgttaaaagaaaacatagcaatagtttgtttaagttgccaatagacatcaagcttttaattgaatgctgatggcctcagccacgtttgcccataacataatgaacacagcaaggtttgggtggaatgaaaaaatgacattatttctgttggtcctacccttgatatgttgcattgtgaacaattttaatttattgaaagcaagttgttttgtagttttc

SEQ ID NO: 12531 - DNA, 1260 bp, Glycine max
  unsure (1)..(1260): unsure at all n locations
accctggggagtggtggagtaatgggccctcattgcatagtcatgaggtagaagcaacaatgtcgtgacntcttctcatggtatcatacactgatagtggcgtgatcatgaatctcatcgatcagccaaatcaagaattttctatttaanngggacacacctatttatcacattttgtgtggtacccttccacattcagtgaatacanctgttgnttcatgccggatgtgttgccaaagtcaaccctgctgccccacttgacaaaatctgtgttctcagttgtggaatttgcacaggtcttggggccactatcaatgttgcaaaaccaaaacctggttcttctgttgccatttttggacttggagctgttggccttgctgctgctgaaggggcaaggatttctggtgcatcaagaatcattggggttgatttagtttctagcagatttgaagaagctaagaagtttggggtcaatgaatttgtgaacccaaaagaccatgacaagcctgtacaagaggtgattgctgcaatgacgaatgggggtgtggatcgtgctgttgaatgtactggcagcatccaagccatgatctcggcattcgaatgcgtccacgatggttggggtgttgctgtacttgttggagtgccaaacaaagatgatgcattcaaaactcatccagtgaatttcttgaacgagagaactctaaagggtaccttctacggaaactacaaaccccgcactgatcttccttctgttgtggagaagtacatgaatggggaattggaactggagaaattcatcactcacacagttccattctcagagattaacaaggcttttgattacatgctgaaaggggagtccatcagatgcatcattcgaatgggggagtaaatctatatcagaccaatgatgacatgacatggtccctgttgggggactgagttctctttctggttgtgaaaagaagaaaataaatttcatatatgatatatatccctttaggattattgaatttgtgaaaacttgtgagtttgagtgtagagaatgatagggcctttgctgctgttattgtctaatgcatgataaataaaatgtcgtttttttgtcgatttgttgttcttatggtaatttaagtgacagatatgtagtaccacaattgttcaacgcatgtccaatggtgtggggttttggtaaaaaaaaaaagtcacgttcaaatggcttgaacttttatggatttatcaaacttgattttcattana

SEQ ID NO: 12532 - DNA, 418 bp, Glycine max
ctttctggttgtgaaaagaggaaagagaactcagtgccccaaatgggaccatgtcatgtcatcattggtctgatatagatttagctcccccattcgaatgatgacatgacatggtccctgttgggggactgagttatcttctggttgtgaaaagaagaaaataaatttcatatatgatatatatccctttaggattattgaatttgtgaaaactcgtgtcagtttgagtgttgagaatgatagggcctttgctgctgttattgtctaatgcatgataaataaaatgtggtttttttgtcgaaaaaaaaaaaaaaaaaaaaaaaaggggcgcccccaaatagggactccccccccccgggaattaattccggtacggaacctcgggggggaacagttttccccaaaagggggccttata

SEQ ID NO: 12533 - DNA, 379 bp, Glycine max
cggctcgagggctttaaagtggcagcagcatcaagggttacttcctccaggaacgcagtttgatttgtttcgtggaacagctgctatgaaacaagatgtggatgacatgtatccaacaactctttctcacacgatgaagtgggggacaaaaagtcatgcagaatgtgcttgcttttcaccagatgggcagtttcttgtatcatgctcagttgatgggtttattgaggtgtgggattacataagtggaaagctgaagaaagatctacagtaccaggctgatgaagtgttcatgatgcatgatgatgctgtgctttgtgtagactttagcagagattcgaaaatgcttgcatctgggtctcaaaatggaaagattaaagtc

SEQ ID NO: 12534 - DNA, 617 bp, Glycine max
ctcacgcgtccggagaaaacgtaaaaattagggttccgagactgagaatcctggattgctcgcagcccagacccaccttcttctctctttcgttagggtttcgtgtggtctcttgttctctctaacaaccaggagttgggtgatattttgtaaaatgggtgagactggaaaacgatatcgttcgcagagagaccatgatggggacaggaaaaatcaaaagagacaaatgactgatagagatgacaggggcaatgatgaattgattgtctataggatactctgtccagatgaagttattgggagtgtcattgggaagaatgggaaagtgataaattcaataaggcaagaaaccagggcgaaagtcaagattgtcgatccttttcccggtgccaaggatcgggttataacaatctacagctatgttaaggagaaggaaggcgttgagattgatgatgagttcgctggtaaagaacctctgtgtgctgcccaagaggctcttctaaaggttcatgttgccattgcgagttccatagcacctcttggagattccgggaagaagcggaaggatagagatgaatgtcaaatccttgttccatctagccagtctgcaaatatca

SEQ ID NO: 12535 - DNA, 312 bp, Glycine max
aggagaaaacgtaaaacctaattaattagggttccgagactgagactcctggattgctcgcagccttgacccaccttcttctctcagtcgttagggtttcgtgtgctaacaaccaggagttgtgtgatatttagtaaaatgggtgagactggaaaacgatatcattcgcagagagaccatgatggggacaggaaacatcaaaagagacgaatgactgacagagatgataggggcaatgatgaattgattgtatataggatactctgtccagatgaagttattgggagtgttattgggaggaatgggaaagtg

SEQ ID NO: 12536 - DNA, 429 bp, Glycine max
accacgcgtccgcttttctttattttattctcttctgttctccgctacctatggcgaatttcacctcttcctcctcctcctcttcttctcccttacctctatctctaactatgtcacacatttcacctccgtcatcttctgcggctttcgacgacagttccgaggacgcctgcagcatatgtctagagccattcagcacccatgaccctgccaccattaccagttgcaaacatgaatatcatctgcactgtatccttgaatggtcgcagagaagcaaagaatgcccaatatgttggcagttacttatcttgaaagaccctgccagccaagagcttctaaatgcagtggaagctgaaaaacgcttaagttcaagaactgtatattcacatgcattcatggattctcgtagcccccttcaacggcttaaca

SEQ ID NO: 12537 - DNA, 627 bp, Glycine max
gtttccaacacaacacaaagactttctcaaacaaaaccagacggttatctagtcttccaatcttccccctattccctgttcctattcctattttatcaatcaataacataaataacacttcttcttgccttttaatatatttttctctcttcccctcttgtttcacctttcaacacttaattagagacgacccactttccttgcagatctttttccagggaaaagtttggatgttttgtggtaagagttagatgttgagtgatagacggaaaggttgaggtggagctggattatatggatagtctttgttgcttcagctctgtcagtcaggtggtcggagggcgttcttcatgtaactctggcaaaggcaagagcagtcagtcctcagtcaagtatggctatagcctagttaaagggaaagcaaaccatccgatggaggactaccacgtagcaaaatttgtgcagttcaaagggcgagagcttgggctttttgctatatatgatggacacctgggtgacagtgtaccagcctatttacaaaagcatctgttttctaacatcttgaaggacgaggacttctggaatgatccattcatgtccatttctaatgcgtatgagacaacagat

SEQ ID NO: 12538 - DNA, 614 bp, Glycine max
atcaactgaaatctccttttggcacttcacttactataccttggtcaactgaaggtattgagtgcaacaaatgctggctggggccccgtcttcccatatgagttcaactgtcccaacatctcaaggaatatttccaacttcaagaattggaagtggtgaatcccccaatagtggggcctcttcttttacccagcctattgcagatatgaatgaaaatgacgaaacagacttgctctcaatatcatggaatcaggactatggttgctttgctgctggcacaagtcatgggtttcgtatctataattgtgagccttgcaaagaaactttcagacgtgatttaaaaagtggtggttttaaaattgtagagatgctgttccgctgcaatattctagcacttgttggtgctgtagctaattctcactatccaccaaataaagttttgatatgggatgatcatcagagcaggtgcattggtgaatttacatttaggtctgatgttcgtggagtgaaattaagacgcgatcgaattgtggttgttcttgagcacaagatatatgtttataacttcacagatttgaagcttcttcatcagattgagactctggcaaatccta

SEQ ID NO: 12539 - DNA, 374 bp, Glycine max
cccatttcttcttcttcttcctctttttatttctcacataactcctcttttcctcacctcaatctcactttttgttgttgtggttttctcttttgggtcttcagcttttcaagcgaagtctcaaagctaaaaaatttcaggtataacgtctctcaagttttttctggaagctaattagttattattggcaatgagcaatctcaagctaggtgtggacgttgtgggtgctcatgaccttatgcccaaagatggacagggctcatgtagtacttatgtggaacttcactttggtggtcagaaatttgggactacaactaaagagaaagatttgaatcctgtttggaatgagaaattttacttcaatgttactgatc

SEQ ID NO: 12540 - DNA, 396 bp, Glycine max
aaactgttacaccctctacttttcgtaatttctctcatccttctttctttcaagtgcaaaatcgatctctcactgcctcagcaatggctgcagatgatggtgtgaaacctccaactctcgagtttctcagcatctgcaagtctctcctcgccggcggagttgccggaggagtgtcacgaactgctgtagctcctctggagcgattgaagattctgctgcaggttcaaaatcgccaagatataaaatacaatggaacaattcaaggcttaaaatatatatggaaaactgagggttttagaggaatgtttaaaggaaacggaactaattgtgctcgtattgtcccaaattcagcagtgaagttctttagctatgagcaagcttcactgggtattttat

SEQ ID NO: 12541 - DNA, 1304 bp, Glycine max
tggaactgctcggtatgcaagtgttaatactcatttgggagttgaacaaagcagaagagatgatctagaatctctcggatatttgctcatgtattttttgagaggaagtctcccatggcaaggcttgagagctggcactaaaaagcaaaaatatgacaagataagtgagaagaagatgcttactccaatagaggtcttatgcaagtcatatccattggagtttacatcatacttccactactgccgaacgttgcggtttgaagataagcctgattattcttatcttaagagactatttcgggacctattcatccgagaaggttatcagtttgattatgtatttgattggactatgctgaagtatcctcaaattggatccagttctagagcccgaccaagtgggaaaccagtcataaaccccggacaatcaggagacagaatagaacggccttcagggggtttctcaggtgctgttgaggcatttgcaaggaggaatggctctggacttgttctgcaaagtgagcattctaggcataggtcttcagatgatgtgccatcttccaaagacgtgcaagctgattctgagaggcctcgcagctcttctcgtaatggcagttcttcaaaaaagcctgtcttgtctagcagccggccaagctcttctggtgagcctagtgaaagccgttctagccgactggtcttaagcagtggccgactatcaacaactcagagacttcaacctggttttgaatccaaaacatctttatcacgggcttcggcaacaagaggtggtcgtgatgatacactcaggagctttgaactcctgtcacttggttcaggaaaaaggaaatgaagaactgtgtggtcagcagatttcttgtttcaagggtcttagttctgccctgatacctttcctttgagatgtctacacatgttgattacatttgtatatttccatccaatgttgggtcctttcaaggctaaaaagctcattgaaacttgttcctgaagatttgacagactcttctatacctcttcagatgttcttccatgattatttcagcatggacccattcatgaagagatactatgttacttaaggaatttgttaatatatggctacttgtaataaatacatcctctatttttctgttgaaggaaaggagaagcatctgcaaaaatgcttttggatgttttgcacccttctatgcgtattttatacccgtctattttgttccaatgtacatttcagggaatggaaatgtcaatcgttggctccgattatggataaaaaaaaaataataggg

SEQ ID NO: 12542 - DNA, 572 bp, Glycine max
tgcttcgtccaggttcaaagaaaactgcgcaaagcttatttattttatgtaacagtataaaaacagacatcgtaagaattaagaggcttcggtacaatctatggttccttcgtaaccaatcaattttttttttcaccttcaaattcttccaaaatcacgttattcagggatagtatcatggcaactgcaaccatggctactgcagcaggtgcagctgcccttttgtactacacattgaatcggaaattgcagactcacgatgcaatcgacgaagatggtgaagaaaatgggagtgatacgcccactgatacgccattaggtattggccgtgtttctcatcggttaatccaagcccctgcaacatggttggagacaatttcaacattgtcagagactctcaagttcacgtattcggagacacttgggaaatggccaattggggatttggcgtttggcatcagctttcttctaaagcggcagggaaactatcatgttgacagtgaattttgggtacggacagtgtacagctgaaaggatctgagattactgctgaacttaagtatctcttaaac

SEQ ID NO: 12543 - DNA, 857 bp, Glycine max
  unsure (1)..(857): unsure at all n locations
ttcagttttcactcacggacccaacagagtctcggtctcgcgccgccgcgccacgccgtaaacgatgctagatggttgggtgtgtgctttccttttggtgctttattgttctgtggaggtaattgatgcaagtgctggtgatgctgatccgcgctatagggtttgtataacacagtgtcaggaaactggatgcgttgcgcaaagatgctttccaaactgtaaattttcttctgatggagaatttattgatcgcccatggtatatgcaacaagaaccactctatttacaatggaaaaaatgggattgtcaaagtgactgccggtactactgcatgcttgatagagagaaagaaagggagtcacataaccttggacctgtccaatatcatggcaaatggccattcaggcgtatatatgggatgcaggagcctgcttctgtggctttctcagctctcaatctcgcaatgcattttcatggttgggtctcctttttcattcttatacactataaattgcctctaaaagatggaaagaaggcatattatgagtatgctggtttgtggcatatgtatggacttttatcacttaactcctggttctggagtgctgttttccacagtcggtaagttacttatgtggatattttcagtattttgcactgattctaaagaatgattgattgttatgctgtctattggtatttcttagtgcagtgatactacttagttcttatattgaagttttaatcacctggcaaactatgtgacacaaattgaataacaatatatgcatacaacatgctaatgcataaactatntcttatgttaatttttagtatatgattattcctaatacttc

SEQ ID NO: 12544 - DNA, 1178 bp, Glycine max
gtatatatgggatgcaggagcccgcttctgtggcttgctcagctctcaatctcgcaatgcattttcatggttgggtctcctttttcattcttatatactataaattgcctctaaaagatggaaagaaggcatattatgagtatgctggtttgtggcatatgtatgggcttttatcactgaactcctggttctggagtgctgttttccacagtcgagatgttgatctaacagagaaactagactactcatctgcagtcgttctccttgggtactccctcattttagccatcttacggacattcagtattagggatgaggctaccagagttatggttgctgctccattgattgcttttgtgaccacccacgtaatgtacatcaacttctatttactagattatgtttgcgtagtgatggctgtggcacaactttccatgtgggcagtttgggctggtgttagtaaccatccttcgcgctggaagctctggctcgttgctattgctggtggccttgcgatgctcctagaaatctatgatttccctccacatcaaggactttttgatgcacatgctctttggcatgccaccactattcctctgacttacatttggtggagtttcattagagacgatgcagagtttcgaacctctaatcttcctaagaaggccaagtagcttccttttaagctcactcaacgctttaatgatcatgcttatacccacagctaagcctgaatatattatcatcgatggtgcacttttgagtgttcatttcactttctatcattggtataaatttagttggagttttgcctttacatttgggtgaaagatgaagttgacattcttgacgctctcttcaaggccgaaagatcatattggggttttcccatttctctttagcttacttaaaatgtgtacaaaatcttacttcaattggtggagtgattcaatcttgaaggattcttgggtcgcgtatgcatttggactatgaacagaatggaatggaacaattatattcagttctctttgattccaagcattttagtagcatcaaaatctgccctttatttaaaatatgttttttctcagaaaaaataaattcatcgaccctgtgtttggataaagcatttgaagatgggaatgtaattttttaaggcatttcaattaccgttgggt

SEQ ID NO: 12545 - DNA, 389 bp, Glycine max
gtctctcttcaccacgccaccgcgccgccgtgccacctcgccactgcgccgccacccttagtcggccattatgttagatggttgggtgtgtgctttccttttggtgctttcttggtctgtggaggtaattgacgcaagtgctggtgatgctgatccgcgctataggggttgtataacacaatgtcaagaaactggatgcattgggcaaagatgctttccaaactgtaaattttcttctgatggagaatttattgatcgcccatggtacatgcattttcatggttgggtttcctttttcattcttatacactataaattgcctctaaaagatggaaagaaggcatattatgagtatgctggtttgtggcatatgtatggacttttatcac

SEQ ID NO: 12546 - DNA, 517 bp, Glycine max
cccacgcgtccggtgagattttacagtactttgaaacatacattttaatctgtttaggagataaacggcggtggagcaagagagagcaagagagagagagaaggtttggaagaatcgcgatggagggtgaggaaggaggaggcataaggctgagcaagcgaatcgcaaacggagaggttgactacaagacgaaatccggcaccgcctggagccactcctatctcaaccagaagccatggcaccctctttcttaccccaaccaacgccgcaagtggatcgccgaacagacccacgccaatcgccaacgccgcaccgaagaggtttctcgcgagttcgctcaggagcaagagttctttcgccaaaccgctctcatctccaaaaaagagaaggaaaaggtggagctcatgcaagctgttagtttcatgtacgttcgtcctccgggctacaacgccgagagtgccaaagctgctgaaatgaacgacgagaagaaaaaagaggacatgagcaaggggcttag

SEQ ID NO: 12547 - DNA, 973 bp, Glycine max
cgtgttcgaaccggaaacgggtaactggagtgagattccacctccgccagaattttattcggggttacccatgttctgtcagttagtgagtgtcgggtacgatctggttgtgttgggcgggttggacccgaattcgtgggaagcatcgaattcggtgtttgtttataatttcttgtcggcgaagtggcgccgcggggcggacatgccgggtgggcctcgcacattcttcgcgtgcgcgtcggattccgaggagacagtttttgttgccggcggacacgacaacgagaagaacgcgctgcggtcagcgttggcctatgatgttacctcggacctgtgggtcatgcttccggacatggaggcggagcgcgacgagtgcaagggcgttttctgccgcgggaggttcgtcgctcgttgggggttacccgacggagacgcagggaaggttcgtgaagagtgcggaggcgttcgatcccgccacgcggagttggagcgaagtgaaggaggacttcttggattgcgccacgtgtccgaggaccttcgtggacggtggcgatgacgagggggtgttcttgtgcagcggcggggacctgatggccctccgtggggacacgtggcagatgatggcgaccctgccgggggagatacgcaacgtggcgtacgttggggcgtttgatgggacgctggtgttgattggatcgagcggctacggtgaagtccacgtgtcttttgcgttcgatgtgaagagttgctgttggaggaaactggagagcccagaagggttcaggggccatgtccaaaccggttgtgttttggagatttaagaaattggctttttgatttttccatataaacatgatacagttacataagcatagagtatatagtctttgttttgtaaattagcccttttcttacacattagagtttaattgatgaaaatatcccgagtgaaaaatatttttgcctcattgtg

SEQ ID NO: 12548 - DNA, 479 bp, Glycine max
ttgactgggacgtcatattggttgacgggccacgcggggactggcccgatgctcctggcagaatgtcagcgatattcaccgttggtgttctcgccaggagcaaaaagggtgggaaccctaagactcatgtcttcttgcatgacttctctggggaagtggagaaggtttgtgggagtgagtttctgtgcaatgagaatttattggaggcaaatgggaatttggggcactatgtgttggaaaggatggatgagaatagtgtgcagtattgtaagaatcactcgtcttctgggtcaggggctgcttcatcagcataattagttattgctcctctcttcattcagatgcctacaagcttctcagaatcgcgttagtcgcaattgtttcgttgtccctctgggtatttatcttcctttttttttccattgctacattttgtttgcctctggctggagcctgtaaaaaataattcttttttgctt

SEQ ID NO: 12549 - DNA, 391 bp, Glycine max
ttctcgtgcgcgtcagattccgaggggacagtttttgtcgccggcggacacgacaatgagaagaacgcgctgcggtctgcgctggcctacgatgtttcctcggaccggtgggttgtgcttcccgacatggcggcggacgcgacgagtgcaagggcgttttcagccgcgggaggtttgtcgccgtcggcggttacccgacggagacgcagggaaggttcgtggggggggctttctttgcaatgagaatttgttggaggcaaatgggaatttggggcactatgtgttggaaaggatggatgcgaatagtgtgcagtattgtaacaatcactcgtcttcatcaggggctgctcatcaacataattagtaattagttattgctactctcagaatc

SEQ ID NO: 12550 - DNA, 650 bp, Glycine max
cgtagactttggaattctttcattcccaggcggcgatggcggattcttcaagcaactcaaaggatcaccacaacacgcgcgtctaccacccttaccaggacctcaacgtccccatccagaagctctacaacctccccaccgcgccggagcacctcttcccggaagaagccccaggacccaccgctcctggggcgacaacctccaatactacaccggctccggctacctcgccggtgccttgaccggccccgccaggggcaccgtccagggcctccgtgaggctgagtccggcgactccctcaaaatccgactcaaccgagtcctcaactcggggggccacgcgggtcgcagactcgggaactcgctcggcgtggtgggcctcatcttcgcgggactcgagagtgggatgacctacttaaggggcaccgatgacctcgtcaacagcgccgtcgccggactcggcaccggaacgctctttagggccgccgccggaccccgatccgccgctattgccggcgccatcggcgggatcgccgccgccggcgcggtttccgggaagcaagctttgaaaagatacgttccgatctaggaaacaattaggttaacgaccatggggatggtggtacaaattagattaatattttggaata

SEQ ID NO: 12551 - DNA, 538 bp, Glycine max
  unsure (1)..(538): unsure at all n locations
cgcagtgctctctttctcattctcttctctttggcgctgcgcagaagagagagaacgaacgaacgaacgagcataacaccctttaataatctgtggcagtgagtagtgatatgcagcaaggtgatccaacggtcctaagcttgaggcctggtggtggtcgtggcggcggaagcaggcttttcgctcactcgtcctcctcttcctctctctccgccgatctccctctctcccgccctcatgcctatttctctctcaagaccagagattcacggtttgagggtcatgagcgtgtgcgatatagcagagatcagcttttacagcttcaagaggctgttgaggtccctgatgatatactaaagattaaacaagatatagaagctgaactttttggtgaaaatccaagttggggccgtgctgaaagcaatcttcctcatcaattacaaaatcggtattctgagccagataaccgtgattggcgtggtcgttctggacaacctnctgctagtacagatgagagatcttgggaaaacctcagaga

SEQ ID NO: 12552 - DNA, 448 bp, Glycine max
cgcagactctatccattacgggtgtattcctgatgataagtttggtgggttcaaagatgtgggcaccaatgtgtcttgtgttgcttcaaggagggacatggcgacccagatgagcccacagggtagctcacgctcctctcctaatctgaggccttctttctctgcctccaccccatcaaccttgcctgtcacagaattgcggactgttggttcctctaaagtggatattagggatgtgcaggtagatgaacacgttaccgtgacaagatggtccaagaaacatagggccctattcactggcagaggctcagaaaaagtcgaaagctggaaaaaaagaactatgcactcaatcgtcaacttgggacgtttctgaaacgtcaaagcctgcctcaaagacaagaagtgaggaagccaaaatctctgcatgggagaacttgcaaaaggcaaa

SEQ ID NO: 12553 - DNA, 588 bp, Glycine max
cccacgcgtccgagtttttgtgccctttccttcttcttacaatcagaaactctgaatcagacagcgtcgggtttgggaattaactccgtccgacaccgttcacggcgactccgggcaccgttggatttcaattggttcttgtttttgaaccggtggagtaaagaggcatggctgacaaagaggaagagtcggcaatgccaagggacgcgaagattgtgaagtctttgctgaaatcaatgggcgtagaagactacgaacctcgcgtcattcacaagtttctagagctatggtatcgctacgttgtcgatgtgttaaccgatgcacaagtctattcagagcatgctggaaaatctgcaattgactgtgacgacgttaagcttgcgattcagtccaaggtcaacttcagcttctcgcaaccaccccctcgtgaggtgcttctggagttggctcaaaaccgcaacaagataccgttgccaaagactatagcaggacctggtatcccacttccacctgatcaggacacattaatcagtcctaactaccagtttgcaattcctaacaaaaggcctgccgaacctttagaagaaa

SEQ ID NO: 12554 - DNA, 635 bp, Glycine max
cgtgagtggaaaatggcctgcaaaacagcggaagattgctattttggttgatcaagtgaatctgcttcaaaggaagttttcatactgcaatccaaggtttgtggccagacatgatgtcaagtttgcatttaagcttgcaagagatgcaattgaatctcagtccacaagacttgcagaatctgggagtaggagtttgaatgaaacttgtgtcatatgtttggaggaaactgatgttggtcagattttttcagttgatggctgtcaacaccgctattgcttctcatgcttgaaacagcatgtggaggtgaagttgcttcatggaatggtgccaaagtgccctcatcaggggtgcaagtatgagctcctagttgacagctgccagaagttcttgactcaaaagttaaccgagaccatgcagcaacgaaaattggaagcttcaattcctgttgctgaaaaaatttattgtccttatcctacgtgctctgcattaatgtcaaaaactgaggtcttagagtactccaaagatatcactggtcaatctgaacaatctgaacccaagatatgcctaaaatgtcgtggccttttctgttttaactgcaaggtcccttggcatagtggtatgacatgtaatactt

SEQ ID NO: 12555 - DNA, 503 bp, Glycine max
  unsure (1)..(503): unsure at all n locations
cttccatctccttgtgcaaataaagataaaataaaagaaagatatcaggatgaagagagggaacgctgaagagaagttgggggggcccatgttcccaaggctgcatgtgaatgatgcagagaaaggagggccaagagcaccaccaaggaacaagatggctctttatgaacagttcagtattccatctcagaagttcaatccacgccttcttccacgaaaaccaaattcttcttctaacatagttccttccccaacccagggaaatggccatgagagaagttatgtctacccagttcgtttctcttcacatacacccactcatcgagctgaaagttatatttctcgccaatctgatgatggatcaaggtcgaacacttcattggtgcaacttgaacggagaaaaaaagtagatgatgacattcacgtgtacacttgctcggggattgatcaatctaatgatanaacgatggacagtgtanatgggaaaaaattcactcctttcg

SEQ ID NO: 12556 - DNA, 520 bp, Glycine max
gtcttcactactatcctcctggaagggtgttgcattttcagcatttggtttgggagttgtcactctactcatgcacatcttgatcatgttctcacaatctgagcgttcaaccccttccaaggttgcccctacaaaaaagtccaagaatagcgaacaactggaagctagggataacaaacaagactagatcacacacgttacctgaatattctatacataagagaattcttctgaggtcacatcttgaacttgttttgcatttatgtgcttttttttataaaaaaaattgcattaacgtgtgtttagggactcactaccccctttctttatttgtttgctttggaattgtacctcgtatgtgttcagttcttgtattatgtattatgcatatactattcattactttcaaattaattaggatgaatttgtatagactaatatataggaatggggtacaaaaatcctacctaacatcgcagttttttagggacttgtaccctttctggtattggactttcgg

SEQ ID NO: 12557 - DNA, 994 bp, Glycine max
ccaatacaatcaaccaaccccttcactctctctctctctctcttgcaatggctgccattgttttcatccacattgcatcattggtctctctttttgttgcaacaagtgcaagaatccctggagtttacaccggtggcccctggcagagtgctcatgccaccttctacggtggcagtgatgcttctggaacaatgggtggtgcttgtgggtacggaaacctgtacagccagggctacggagttaacaccgcggcgctgagcactgctctgttcaacaacggtttaagctgcggcgcgtgcttcgagataaagtgcgaccaggatccacggtggtgcaaccccgggaacccttcgatcctaatcactgcgaccaacttctggcctcccgaacttcgcccttccgaacgacaatggcggatggtgcaaccctccccgcccgcacttcgacctcgccatgcccatgttcctcaagatcgcccagtatcgcgccggaatcgtccccgtcgcataccgccgggtgccatgcaggaaggcaggggggatcagattcacaatcaacggtttccgttacttcaacctggtgctgatcaccaacgtcgcaggtgcaggggatatcgtgcgcgtgagcgtgaaaggaagcaaaaccgcgtggatgagcatgagccgcaactgggggcaaaattggcaatccaacgcggttctggtgggccaggccctttcctttagggttaccggcagtgaccgacgcacctcaacctgctggaacgtggcaccacctaattggcagttcggacaaaccttcaccggaaagaatttccgtgtctaaatccaagaagaagaagaagaagaagacaagagagaagaaaataacaatactcttaaattaatggctcctggtatttttgagtttgtttgcttcagtttccctgcttctaacttccctctattttcctgggaaagctttggaatgggtggtaaggggttaaaagaaaatt

SEQ ID NO: 12558 - DNA, 583 bp, Glycine max
gaatttctggttttctttctgagtcattattaactagccacctcggatcactcacaatggatgaaagtgaagatggtaggaaagaaacttcatgaatgaaagtagtgcagacagtttcagagcgaactgcgacacctgtgcttaatggtgatatacctgatgatatctgccttaaggattctcttaatgctgcccgtaatgctacacacgctgctgatcgtatatatcaagtattcagaatgcagtcatttcagaggaagcagctagctctgtctgaagatgatgactttggattgtcagatcaacaagctctttctctcctagcttctaaggcgtgcagatctggtcaaggagaggggtgagccaatgctgctgcaatacaaatacagacaaagtttcgtggttggacgaagagaaaagaattcttgattattcgccaaagaattgttaaaatccaggcccatgtaagaggtcaccaggtcaggaagcagtataaaccaatcatttggtctgtgggaatcctgcaaaaggttatattacgctggagacgcactggcagtggattacgtggatttcgaccagc

SEQ ID NO: 12559 - DNA, 544 bp, Glycine max
caagcattcgatactatgttatgcccatcagttgcaaggatccgtgcgttctacccatgaggtctgcggctatactaccgatcttcgctcatagtgctactccagatgcgtacccataattcacactttacattggcgagattgcaccaactgtggaaaatgagttcatgctctctctccttcaattatgtggaactatcaagacctggaaacgtcctcaggatttatcaactggaactcctacaagttttgggttttatgagttcgagtctgcagaaggggttctccgggccttgcgtctccttactaaactgaatattgatgggcaagaactgaaggtcaacgtgaatcaagctatgaaagacattctggagcggtatgttaagacaaaaactgagaacttgaagaacaaaaaaactcaggcaggagtaggtgaaaaaaacgaaggtgaacaaccttctaatgcaaacaaggatgcaaaggctgacacagaacccttaaattaagaggttcttgaatcatcaaacaatgaatcacatgatgt

SEQ ID NO: 12560 - DNA, 368 bp, Glycine max
gatttgcttatggtgtatacatattcactcataatctgctctaatatatttgcatagatgtttttctactctgtacaggaattcctcgttacccccctccttatggaactatggttcgtcctgtatttcctgcacgccctcctggagcagttaacatacctacaatatcacgcccgcctgttgcagggatccctgcagttcgcccaattattccgcctgtagtcagacctgtggtagcccctagtgttactccagctgagaagcctcagaacacagtttacattggcaagattgcaccaactgtggaaaatgagttcatgctctctctccttcaattatgggaactatcgagacctggaaacgtcctc

SEQ ID NO: 12561 - DNA, 1256 bp, Glycine max
ctcgagccgattcggctcgagatacacaacacaacacacacctaacttgtttatgagagctataagtcaccaccttctagtttcactactcgattggagaatctctacctcacgatcccttttttctcttagaaccatcatgtcacaatctgatcattcctctgcttttaccacacccagattagttctcaagaaggttttggccaaatctcaacatgaaggggatggagctgttgttagaagaggcattggaaggagcgagttgaagaacttggatcccttcctaatgttggatcacttctcagtatctcccccagcaggatttccggatcatccacaccgaggttttgaaaccgtcacctacatgctagagggaggcatcactcaccaagattttgctgggcacaagggtacaataagaaagggtgatgttcagtggatgaccgcaggcaggggaatcattcactctgaaatgcccgcagaagcaaacaacaacaagggattgcaactatggatcaatttatcatccagggacaaaatgatggagcctaactaccaagaacttccaagtgagaacatagcaacagcagaaaaagatggggttgaagtgagagtgatagcaggggaagcaatgggagtgcattcgcctgtgtacacacgaacaccaaccatgtaccttgttttctgcatgatgcccggaactcagtggcatcagagcattccagagtcgtggaatgcctttgtttatacaattgaaggggaaggagttttcgggtctccaacttcatccccaactgtgccacaccatgtccttgttttgactcaaggtgatggcctcagcgtatggaataactcttccaagcctttgaggtttgttctgattggaggccaaccactgaacgagccagttgttcagtatgggccttttgtgatgaacacgcagtctgagattgagaagacaattgaagactatcactatggcaggaatggctttgagatgagcaagtattggatgtctcaacagtaatactatctattagatctaaataagaagcatgttttctcaatccttttcagtgtcacaggcgtagttatcaaagtcaaaaagctagtacgagctcaaaagaaaatactactattgcttattctatccttttcatttccatgtaatgaaagcttctagaatattaaaattgctgcccggacaactattggttgtggctctagtcatgatgggtcagcttatcttgattttt

SEQ ID NO: 12562 - DNA, 359 bp, Glycine max
gcgcacatacacaacacacctacctaataccttgtttatgagagctataagtcaccacctttcgctgctgaattggagaatctcggcctcacgatctcttttttctctgagaaatacttgtaccaataccatgtctcaatctgataattcctctccttttaccacacccagattggttctcaagaaggttttggccaaatctcaacatgaaggggatggagctgttgtcagaagaggcattggaaggagcgagttgaagaacttgcatcccttcctaatgttggatcacttctcagtatctcccccagcaggatttaccgatcatccacaccgatgcttttaaaccgtcacctacatgc

SEQ ID NO: 12563 - DNA, 363 bp, Glycine max
gagtcgagggtctgagtgaggtgcttgttgcgtggggggggagacccctattcatttcgtaatcgcagaacattcgaaccagagaagagaacgatgactatatggaactacgtcgtcacagctcacaaacccaccaacgtcacccactcctgcgtcggcaatttcaccagtcctcgagacctctatctcatcatcgcgaaatgcacgcgcatctagattcacctgctttctccccaaggcttgcaggttattttgcataccttctgagcatttattgaagcaaagtttggattatgataactacaagtgcaaagggcatctttctgtgctagttatgctatctgtaatcggtttatagtatgt

SEQ ID NO: 12564 - DNA, 692 bp, Glycine max
gcaaggtaacatatggttgggtagaatagtgcaaaatgtgggggggttttcctgttatagattgacttacagtaagtaatatctgatgaatcatatgttttattggctaatccgttggatgaagcaactttttaatcgggaaattgaactgagactaaagcatgggccttcaatttggtttcttgaggataagtacttcaaaccctaatttgtctgtggacattctaggttcgtcatgcgtttgtaaaagtttattctttttaaagtgtgaatgttatgcatgcaggtgtcttcttatcttcctaatcatctgtcgcaggctaggagggtccctcctttcatatttgaggggcctctctgtcccgctaaggagtatttcttgatgctttgtattttccttttatgttttatattattgatttttcttgtgtctgcatcatcaatgacaattttacgacatcgtcttgtcttttgtgatttagattgtcaagttgtatgagagatgtgtcattgcatgtgccaattatcctgagtattggatacgctatgttttgtgtatggaagccagtggacgcatggatcttgcaaataatgttcttgctcgggcaacccaagtctttgttaggggccaaccagggatacctatttttggtgcccggttcaagggccagcctgaggtatagattgggcca

SEQ ID NO: 12565 - DNA, 694 bp, Glycine max
atagaagagcttgacgtgcactgcaccctaacgctaggcattcggctcgagcaggactgggcctgccttgctgtgatctacaccagaatattagagaatccaaatcaacaattagatcggtatttcagcagcttcaaagagttagctggaaatcgtcctttatcagagttacgaactgctgatgaagctgctgcagtggcaggagttgcttcagaggctactggccaagctactgagggagaagttcatcctgatggtgcagagcgttctcctaaatctgtaagtgctggcttaacagaagcagaagagttggagaagtatatcgccattagagaagagatgtataagaaagctaaagagttcgattctaagatcattggttttgaaacagctatcaggaggccctactttcatgtacggcccctcaatgttggagagcttgagaattggcataactatttggactttatagaaagggagaggggacttgagcaagattgtcaagttgtatgagagatgtgtcattgcatgcgccaattatccggagtattggatacgctatgttttgtgtatggaagccagcggaagcatggatcttgcaaataatgttcttgctcgagcaacccaagtctttgttaagagacaaccagagatacatcttttttgtgctcggttcaaggagcagactggagat

SEQ ID NO: 12566 - DNA, 387 bp, Glycine max
taaagctgtcgaagtctaccatcgtgcggctcaaggggttacatattcagcggacatgtggttgcattattgcatatttgctataaccacatatggggagccagacgctgttcgtaggctttttgaacgaggattagcttatgttggaacagattatctttcttttcccctctgggataaatacattgaatatgagtacatgcagcaggactgggcctgccttgctgtgatctacaccagaatattagagaatccaaatcaacaattagatcggtatttcagcagcttcaaagagttagctggaaatcgtcctttatcagagttacgaactgctgatgaagctgctgcagtggcaggagttgcttcaaaggctactggccaagctac

SEQ ID NO: 12567 - DNA, 317 bp, Glycine max
gagaattggcataactatctggactttatagaaagggagggtgacttttggagcaagcaactttttaatcgggaaattgaactgagactaaagcatgggccttcaatttggtttcttgaggataagtacttcaaaccctaatttgtcagtggacattctagattgtcaagttgtatgagagatgtgtcattgcatgtgccaattatcctgagtattggatacgctatgttttgtgtatggaagccagtggaagcatggatcttgcaaataatgttcttgctcgggcaacccaagtctttgttaagagacaaccagag

SEQ ID NO: 12568 - DNA, 483 bp, Glycine max
gagaattggcataactatctggactttatagaaagggagggtgacttgagcaagcaactttttaatcgggaaattgaactgagactaaagcatgggccttcaatttggattcttgaggatgagtacttcaaaccctaatttgtctgtgggcattctaggttcgtcatgcgtttgtaaaagtttgttcttcttaaagtgtgaatgttcatgcatgcacgtgtcgtctgatcttcctaatcatctgtcgcaggctaggagggtccctcctttcatatttgatggggctctctgtcccgctaaggaattgtcaagttgtatgagagatgtgtcattgcatgtgccaattatcctgagtattggatacgctatgttttgtgtatggaagccagtggaagcatggatcttgcaaataatgttcttgctcgggcaaccccagtctttgttaagagacaaccagagatacatattttttgtgctcggttc

SEQ ID NO: 12569 - DNA, 1119 bp, Glycine max
acactatagatagagcttgacatgcacacgtccttaacctcggatttcggttcgagactgattgtaggtgtaacctttacattgttccaaagaaagaacatggggagcctctaagttcagactataaaggaggttattattgttgttatgatcaaacccagtgcaggttgagggaaggctttgagggcccaaagaggagcctctacctaagatacacagtgaagtgggttgaatggaacaagttcattgtgcctgtaaagatttatatacttgatgtcactgatactttaaaaatatcagatgattctagtggaatgatccctgagcatgattgcaagaccgagtatgaagttgaatcttgcagcactggccaaaagaatggtaatggctgtcttgatgggaagagaacaagcctcccaatgcaaaagggtggttatgtcatatatggggttgctcatcagcattcaggtgccactggatcaactctctatgcacaggatggaagggttatatgttcttcaataccaaggtatggaaagggaaaggaagcaggaaacgaagtagactacattgtaggaatgagcacatgttatcctcaaccaggttctgtaaagataattgatggtgaaactataactctagagtctaactacagcagcagccgtggccacactggagtaatggggcttttctacctattggtggcagaacagcttccacaccaacacttcagatattcttctcgttcttcattttttatgaatataaatagtataattcattgatagataagttgtgagatgcaaatataagttgagtgtcatatcgatggtatcacagtatgtatcacggttaaaagaaatacagaaatacatatcgatggaacatatacttctcatattcggcagcaataggacaacacacgcaagaaccggcaaagagcatattttcaagtttaaggattgtagtaatgtgattatcaattatttgtattggtgagggtttgtaatgtttgtcttaaaccagtcttgcttattatggttgtgtgatatgtaatactatatatatcatgtttgttgtaaataaagtggtcttatataactagaagagagaataaat

SEQ ID NO: 12570 - DNA, 630 bp, Glycine max
gtaggaatgagcacatgttatcctcgaccaggttctgtaaagataattgatggtgagactttaactctagaatctaactatagcagcagccgtgagcacactggagtgatggggcttttctatctattggtggcagaacagcttccagaccaacacttcagacatacctctcgttcttcattctttatgaatataaatagtatatttcattgatagataactagtgaaatgctaatatatttggagtgtcatcgatggtatcaaagtatgtatgacggtcaaaagaaatataatgacagaacttagaagtataattggaaaaatatacttctcttgtcggcggcaatagacaacaaaggtaaaagccggcgaagagcatatttccaagtttgaggattggtgaaatggggtcataagtcatttgtcttggtaagagtttgtactgttgtcttaaaccagtcttatatcattttatcatcttaattgaagtaatgaacccacaatatggagggatcgttacttcaactagtcccatgttctttaaatgcatttcttatttggccatgtgttatgtaatatgtttgttgtacaccaagtaattttatatctttgaagttccttttttatatt

SEQ ID NO: 12571 - DNA, 286 bp, Glycine max
ctagagaaccactttttgccttcttcaaatccctctatgaaagcctttctgcttcaaagtagagtgtttaagaatgattgtgtgaactacttgtcgctcattgaattattgttgtttgaatttcatgtcaatttgatactatatgtaatttagtaacctgggatattaggatatccccaaggaacaaagaatcctaggattttgtttccattttggccatttcagttaataattaaagaaactctattttttcttgttaaaaaaaaataaaaataacaaatataat

SEQ ID NO: 12572 - DNA, 575 bp, Glycine max
ataaatttatattacttttataacagagaaagacagaagtaagataagaagaaagagaaagtgtgagataagatgagtgtgatgaaaaagataaaaataaataaataaattgttgtatgaatttgttttatgaataggatatccttttgtttaaatataggatatgagatcatcaaattttaacaatatctcttcgattttgacaatttttccggattcaagaaacgttgacataacaactaccttttttatttattaataaaattataaagcaataggggtcttagtacctaggattctgaacagtgccatatgttccatccatccatttaggataatgtttgctaaaaggatctatcacctagtagatgtgtatattaattacttaatatttaatgatgcgtgtgagagaactttgatttgattcatgtcattgtgtatcaaattcgatcagttgtagtatgttgtttattaataatgaaaaataagattgcttaaatataagtggagtatttaattttactaataaaaaattgtaattgtaacaataggctcccctttgagctgtatttctc

SEQ ID NO: 12573 - DNA, 732 bp, Glycine max
gagcagcacaaacgtaggctgtgacacaaggcccagactcagttaacaaacaaacaaacctcactttcctaatcttaagtttggtattcatctgtgtcaatgttcatgcatctttcttcctcccagaaaccacttttttctttcttttttgttcttttttcatttcaggttgttcaccagtttgagttgttggatctcctccactgcttcttctcctgatcctgttctgtttcaaatttcaacccaaggagcttgggaacaaactcctgctccttcttctccttggtcataggcaatgggaggtgcactgggaaagagtgaatcacctagaaagggatcgatgccagaaactaagctcgaggctaaaatggttgaagcaatgcagcggagggaatctcaaggaagttccgtgaaatcattcaacactataatcttgaaattcccaaagattgatgagagccttagaaaatgcaaagccatatttgagcagtttgatgaggattctaatggggcaatagatcaagaggagttgaaaaagtgtttcagtaagctggaaatttctttttccgaggaggaaataaatgatctttttgaagcatgtgatattaacgaggatatgggaatgaagttcaatgagtttattgtacttctttgtgttgtctaccttctcaagaatgaccctgcagctcttcatgctaaatcacgaattgggatgccaaagctggagggcac

SEQ ID NO: 12574 - DNA, 561 bp, Glycine max
  unsure (1)..(561): unsure at all n locations
attctaactttggtattcttctgtttcatttctgttcaatgttcatgcatctatcttctatatccaatctgcaacacncagaaaccagtttctttttttcgttgtcatttcaggttattcaccagtttgagctgttgaatctcctccactgcttcttctcctgatcctgttcagaatccaaggagcttgggaacaaactcctgctccttcttcaccctggtcataagttcatgtctttgtttcttcatttcattttaagtaactttccttcttttatttatttgtttgttttacttctacttattattccttttaatatttgtgatatggcaatttatgttgcctctgatcgaaagttatactaagctttctaattagggccttcaaatcttttattcaattttgagattattagttcaattcattagtttgcatgtaattctgatgttggcaggttaaatctattaaattatcaaaattgagttttgtctctatcaatcatatagtgtctattcttgaaaataccgaatctaataacatgcccaaaattgattctctctc

SEQ ID NO: 12575 - DNA, 388 bp, Glycine max
ctttcttctatatccaatctgcaacacccagaaaccagtttctttttttccttgtcatttcaggttattcaccagtttgagttgttgaatctcctccactgcttcttctcctgatcctgttcagaatccaaggagcttgggaacaaactcctgctccttcttcaccctggtcataagttcatgtctttgtttcttcatttcattttaattaccagaggcaccacttctggtttattgataggcaatgggaggtgcactgggaaagattgaatcacccaaaaagggatcagtgccagaaactaagctcgaggctaaaatggttgaagcaatgctgcgtagggaatctcaaggaagttccgtgaaatcattcaacactataatcttgaaa

SEQ ID NO: 12576 - DNA, 324 bp, Glycine max
tcctaatcttaagtttggtattcatctgtgtcaatgttcatgcatctttcttcctcccagaaaccacttttttctttcttttttgttcttttttcatttcaggttgttcaccagtttgagttgttggatctcctccactgcttcttctcctgatcctgttctgtttcaaatttcaacccaaggagcttgggaacaaactcctgctccttcttctccttggtcatagaggcaccatttttggtttattgataggcaatgggaggtgcactgggaaagagtgaatcacctagaaagggatcgatgccagaaactaagctcgaggct

SEQ ID NO: 12577 - DNA, 1116 bp, Glycine max
acgagcacagacacggtgcattccagatatgcatggagtctctctctctgtatgaacacgggagtcagaccttgtcgttccaaccgataaactaagtttcctgaatagagcctgtgttatcaaagatcgggaacaagaaatagcctcggatggttcagcatcaaatccatggaaactctgcacagtagatcaagtagaggaactaaaagccattattaaagtgattcccttgtggtctacagggatcatgatgtcagttaacattggaggctcatttggattgctgcaagctaagtccctggacagacacatcacctcacacttccaagtgccacctggctcttttagtgtagtcatggtacttacaatatttttatggatagctctctatgaccgagccattcttcctttagcatcaaagataagaggcaaaccggttaggatcagtgcaaagagaagaatgggacttggcttgtttttctcttttatccacttggtaacttcggctattgtcgaatccgtaaggcgaaggagagcaatcaaggagggatatcttaacaatgccaatggtgtgttgcatatgtctgcaatgtggcttttcccacaactttgcttgggtggaatagctgaagcattcaatgcaataggccaaaatgagttctattacacagagtttcctaggaccatgtccagtgttgctgcttccctttctggactgggaatggctgcaggaaacttggtgtctagttttgtcttcagcgttgtacaaaatgctacttcaagaggggggaaagaaggttgggttttggataacattaacaagggtcgttatgacaagtactactgggttatttctggactcagtgctcttaatatagtgtattatctaatatgcagttgggcttatggacctaccgctgatcaagaatcaaaggtaactgaagaaaatggttccaatgaggaagaattgccatcaactcgatctaggaatgggagtcaggttgacaaagaattccagattagtaaagaaaatggctcaaaggaggaagaagagttaactaggtgatatgttgaattgctcctctaggcatattgttgatcgggcaaatacactta

SEQ ID NO: 12578 - DNA, 420 bp, Glycine max
gtagaatccagcttgttcacaggatttgtacaagtgattgttgttgcctacaagaacagaaaacttccattaccaccaaacaactcccctgcacattaccattataagaaggagtcagaccttgtcgttccaaccgataaactaagtttcctgaatagagcctgtgttatcaaagatcgggaacaagaaatagcctcggatggttcagcatcaaatccatggaaactctgcacagtagatcaagtagaggaactaaaagccattattaaagtgattcccttgtggtctacagggatcatgatgtcagttaacattgcaggctcatttggatcgctgcatgctaagtccctggacagacacatgacctcacactttcaagtgccacctggctcttttagtgtagtcatggaacttacaata

SEQ ID NO: 12579 - DNA, 1156 bp, Glycine max
ctcacttcaaagttcaaagttccaagttccaagttccaagtttcaagttccattacacaacacacctattttagttgtagacaaagccacataaatagacccaagaggtttaacttaggcaacgacgagacgcctctcttatcctccacttccagtttcaaccatgtcctgccggaaaagacaaaagacttcgccggacaaaacctccgacgacttcttcgactctctccccgacgaccttgtcctctctatcctctgcaagctcagctccaccgcaacttccccctccgatttcattagtgtcttaataacgtgcaagagactaaactccttaggccttcactctcttgtcttatcaaaagcttcccacaaaacattctcagtcaaggccaaaaactggtgcgactctcttcaccgtttcctcaaacattgtgccgacgccggaaacattgaagcctgttacactctcggcctgattcggttttactgcttgcaaaacagagggagcggcgcgtcgctgatggcgaaggcggcgatgaactctcacgcgccggcgctgtactcgctcgcggtgatacagttcaacggaagcggcggcaccaaaaacgacaaggaccttcgagcgggtgtggcgctttgcgcacgcgctgcgttcctcggtcatatcgacgcgctgcgtgagcttggtcattgcttgcaagacggttacggcgttaagctaaacgtaacggagggacgacggtttttggtgcaagccaacgctcgtgaactcgccgccgtgctctccgcggggaataccaagcgcccctggctgacctggagccaccaccctgtcacccacccgcggctccggtcgggttgcccgttgatgagtgattacgggtgcaatgttccggcgccggatgctcacccggcgagtcagtttatgtcggagtggtttgatatccggggcgggtttccgggtccggatatgaggctttgttctcattcgggttgcgggcgacccgagacatggaggcacgagtttcgaaggtgttcggtttgcggtttggtgaattattgctcacgcgcttgtcaggcgcttgattggaagttccggcacaaggcggaatgtgctaccgttgagaggtggctcgatgacgacggcgaaggcgtc

SEQ ID NO: 12580 - DNA, 273 bp, Glycine max
tttttactttatctctctctctctctcattcatttacaagttccaagttcagagttccattacacaacacaacacacacctatttgtagttgtagacaagacctaggaagccacataaatagaccccaagaggttaacttttaggcatattatgcgaacgaggagacgcctctcttatcttccaaccatgtcttgccggaaaagacaaaagtcttcgccggacaaaacctccgattgcttcgactctctcacagacgacctcgtcctctctat

SEQ ID NO: 12581 - DNA, 417 bp, Glycine max
tcgtccacgcgttcgtccacgcgtccgcccacgcgtccgattttagggcatattaatgggcggaaagtcacttctgggtggggagcaaggctttcctatggccatgagtggaattagctcaggtgatctttctaatgcttatagagtctaatatttttatatattgtaattataaatatgttaaattattaattaaatttttaatgtagttattatgaaaatcaacaaatatttattatatttataattaaacgaaaatgtaaatacgagtactgcatatactatttatttgtaattataaataaaacatgcatttctaatatatgatgatcttctatatatgaatatgaccatttgcttgtgcctatgttatatatagctttgtgcatttaccaatcaatttcagaggcttcaatg

SEQ ID NO: 12582 - DNA, 578 bp, Glycine max
gtcgacccatgtttccagaagcactcaaaagtaaacactcaaaacacttggtattaatttgttcttcttattcttcaatttgttgtgcctctagttcttgtttctaagctaagaatatgtctggggtttgggttttcaagaacggtgtggtgaggctggtggagaaccctggctcagagcgcaaggtgttggttcacactgcaagcaacgaaatcatcacttcctatgcagtgttggagcacaagcttagctcactggggtgggagcgttactatgatgaccctgatttgcttcagttccacaaacgctccaccgtgcacctaatttctctcccaagggatttcaacaagttcaggtccatgcacatgtatgacatagttgtcaagaacaagaactacttcgaagttagggatatgtaataaggatttgtggaaaaaactatgcatggcccaaattgggcagggtatgtataaccttcttgatgtgtctcactcgatttgtgtcaaccctacaaaatttaattcttgggagagcaattttctctcttaattttttcttctgatttttatatctacatg

SEQ ID NO: 12583 - DNA, 839 bp, Glycine max
aataaaacactcatacacacacaaacacttaaacatcatcaatatcgtatattcttgttgtgttgtttaagttgtaaaagaatgtctggggtttgggttttcaagaacggtgtggtgaggctggtggagaaccctgggggtgaggcagtggagggaagccgtggaggaagaaggaaggtgcttgttcatagagcaagcaacgaggttatcacctcttatgcggtgttagagcgaaaactgtattcacttgggtgggagcgttactatgacgaccctgatcttcttcaattccactaacgctccaccgtgcaccttatttccctcccaagagacttcaacaagttcaagcccatgcacatgtatgacatagtggtgaagaacaagaacgcttttgaagttagggacatgtagggtagggccaagccccacatatatatatatatatatatatagtgaccaaacaaaaaacaccccccttgcaaggccttcggccagggcaccctgctactgtccagtgtcagtgtttgtgactttttgtactactaccactcattcctttaattgtgccctttcattttcattatttagctgctgcatccatgcatgtgttagtttttgaatgtttcattttcgacttgtggccatggagggtggaagtctgtgtccatttgattgtaacattaacttgggtatttggactgtctaggtaagtctatgttctgataaatttcatgtttatgtataggtatatataggtagggtctgattcgtcatttgtgaggactgggtgtcatttacgtgtgttcgatccgctgtaaaattttggtcattctgccatc

SEQ ID NO: 12584 - DNA, 488 bp, Glycine max
agagatttcaacaagttcaagcccatgcacatgtatgacatagtggtgaagaacaagaacgcttttgaagttagggacatgtagggtagggtagggaagagacaagacaacaaacatatagggaccaaacaaacaaccccttgcaaggccttcggccagggcaccctgcgtgctactactgtccagtgtcagtgtttgtgactttgtgtactactactcatgattcctttaattgtcccttttcattttcattagttagcttcgtccatgtgttggtttttgaatgtctgattttggacttgtggccatggagagggtggaagtctgtgtccatttcattgtgacattgacttgggtatttaattggactgtctaggtgagtgtgagtttatgttctgattataaattaatgtttatgtttaggtatatataggtagggtctgattcgtgattaatttgtgaggactgggtgtcatttacgtgtgttc

SEQ ID NO: 12585 - DNA, 506 bp, Glycine max
aattcacaaaaacactcaaaattaaacacacaacactttgtgtttgttcttacttcttattcttcttcaattggtacacttgtgttgtgcctctaattaaatctaagaagaaatgtctggggtttgggttttcaagaacggtgtggtgaggctagtggagaaccatggctcagatcgcaaggtgttggttcacactgcaagcaacgaaatcatcacttcctatgcagttttggagcacaagcttagctcactggggtgggagcgttactatgatgaccctgatcttctacaattccacaaacgctccaccgtgcatctaatttctcttccaagggatttcaacaagttcaggtccatgcacatgtatgacatagtcgtcaagaacaagaactacttcgaagttagggacatttaataagggggtgtgtaaaaaaaactatccatgacccaaattgggcagggtaaccctacaaaattgaattcttgggagtgatttatatctacaa

SEQ ID NO: 12586 - DNA, 1345 bp, Glycine max
attggaatatggattgctctgcagttgtgagagttagaacactacacatcagttctcctattttggctgctaaaagtcctttcttctacaagcttttctcaaatggaatgagggagtcagagcagaggcatgtcaccctaagaattaatgcttctgaggaagctgctcttatggagcttctgaattttatgtatagtaataccttgagcattacttcaccacctgctttattggatgtgttgatggctgctgacaaattcgaagttgcttcctgtatgagatactgtagccgattattgcggaatatacctatgacacctgagtctgcattgctttaccttgagcttccttctactgtcttaatggctgatgcagttcaaccattgactgacgcagcaaagcagtatcttgccagtcgatacaaagatataacaaagttccaggaagaggttatgggcttgcctctagctggaatagaagcaatattgtctagtgacgaactccaggttgcatcagaggatgctgtatatgactttgtgttgaagtgggtccgaacacagtatccaaaactagaagagcggagagaagtcctgggtacacgacttgcccgtttaattcgcttcccttacatgacctgtcgaaaacttaagaaggtcttaacctgcaatgactttgaccatgatgttgcatccaagcttgtactcgaagccctctttttcaaggctgaggctccacaccgccagcggatactagctgctgctgagtctgcttccctccatccgactttttgtggagcgggcatacaagtatcgccctgttaaggtggtggaatttgaacttccccggcagcagtgcgtggattacttggatctgaagcgggaggaatgtgccaatttgttcccatctggccgagtatattcgcaggcattccatttaggcggacaagggttcttcctatcagcacattgcaacatggaccaacaaagctctttccattgctttgggctgtttttgggaatgcaggaaaagggctcagtgagctttgccgtcgactatgagtttgctgcgaggtctaggccgacagaggaatttgttagcaagtacaaaggcaactacgtgttcactgggggaaaggccgtcggctatagaaacttgtttgccattccatggacttcgttcatggctgaggatagtctttactttatcaatggtgtccttcaccttagagctgagctcaccatcaaacactgacccccatttctagttgtaaactttctatctattccggttggtagccttgacctttttttttagaaaaaaaaaaaaaaaaaaacggacgcgtggg

SEQ ID NO: 12587 - DNA, 1454 bp, Glycine max
ggctgctaaaagtcctttcttctacaaggtagatgtctattttttattggttagatttgaaaatttctgctaaaaatgtgtttgcttagttgtgtttattttgcagcttttttcaaatggaatgagggagtcggagcagaggcatgttgccctaagaattaatgcttctgaggaagctgctcttatggagcttctgaatttcatgtatagtaataccttgagcattacttcaccacctgctttattggatgggttgatggctgctgacaaattcgaagttgcttcctgtatgagatactgtagccgattattgcggaatatacctatgacacctgagtctgcattgctttaccttgagcttccttctagtgtcttaatggctgatgcagttcaaccattgactgacgcagcaaagcagtatcttgccagtcgatacaaagatataacaaatttcacatatgaccaggttccaggaagaggttatgggcttgcctctagctggaatagaagcaatattgtctagtgatgaactccaggttgcatcagaggatgctgtatatgactttgtgttgaagtgggtccgaacacagtatccaaaactagaagagcggagagaagtcctgggtacacgacttgcccgtttaattcgcttcccttacatgacctgtcgaaaacttaagaaggtcttaacctgttccgactttgaccatgacattgcatccaagcttgtactcgagggcctatttttcaaggccgaggctccgcaccgccaacggtcgctggcagcagaagactccgcttcttcaaaccgtcgttttgtggagagggcatacaagtaccgccccgtgaaggtggtagaattcgaacttccccggcagcagtgtgtggtgtacttggatctaaagcgggaggagtgtaacaacctgttcccatccgggcgggtttattcccaggcgttccatttgggtggacaaggtttcttcctatcagcacattgcaacatggaccaacagagctctttccattgctttggcctgtttttaggaatgcaggaaaagggctcagttagctttgccgttgactatgagtttgctgctaggtcaaggccaacagaggaatttgttagcaagtacaaaggcaattatgtattccctgggggaaaggccgtcggatataaaaacttgtttgcaattccatggacaacgttcatggctgaaaaaagtctttactttatcaatggtggacttcaccttagagctgagctcaccatccgacactgactgggatttaaacgtgtaaacctttttttctagtcgggagctctgactttttttgggcaatgtgtctcattttcagataacctgctgtaatattcaggcaatgtgccctaggtggctagtgctggatgtgagatcaaatgaattgcaatgactttactttttctttcccttagg

SEQ ID NO: 12588 - DNA, 797 bp, Glycine max
  unsure (1)..(797): unsure at all n locations
ggtttttggcatgtcattgagtcttttccctagcttgtagctcatgcttggggttctgtctggtccttcgctcttggagttttggcattggaccaannnttttttctttgccccgaagtcttccttcgcttggcttggtcaaccaaaaggaaagggatgcttcgaaggctaaaaaaggtgcttccaaaagattgggcgggacgggaggatgtgtcgggccgagatggcgttgctggttgaagggtcttcgggattgggggtgatacatctatagaagagtacataattggccctgctgacaaggtggctgatggtcatgaacatgcaacagagaaagataaaattcgattatatggatcccaagcaggcctctcttggttagcaaaacctgtcactggacagagttctattggccttgcatcacgccatggaagcatcatcaaccaaagcatgcccctcatggatcctctagtgacactgtttggtagcattcatgagaagctccccgagacaggagcaggaggaagcatgcgaacactctgtttccaaattttggaagcatgttcagcacagctgagccgcatgttaaaaatgaacagtgggatgaagagagcttacaaagggaaggtgaggactacatgtcagatgcagctgatggggactctgatgataatttgcatagtcctttaatctcacgtcaaacaacaagccttgaaaaagacttggctcctcctcctccttcccatggcagtatccttggcagcatgaggcgtcacagtagtctcatgcaagggtca

SEQ ID NO: 12589 - DNA, 530 bp, Glycine max
ataaatttcaacatttggttatacggatcaatatttacatgaaatttaaccttgaatggggatccttatagttgatatatagtagtttgtgttgagatatcattagagatgtaggaagaatgcataatgatataacatgaactggttctgattttgtcattgatcatgaattgatgaaattattaatattcacttgtttggtgcctagtaatatctcatttgccctttaaagtagatggaacttttaaatttatgctaaacaatatatttgttctctgtatgtaataactgttttagaatgagtttcattcaatgtagtaaattgacacatttattgtgattattgcaaacctatgttgcaaatgtatctccatttgatatatatacatttcattggtttttttaaaaaaaattgtatgtcactatgtctcaatgtctagtagtgtttatttgatactgcactttagttttacaggtttctgaataactttcaggctgtttcttttacttcttacatgtcttccattttt

SEQ ID NO: 12590 - DNA, 1065 bp, Glycine max
gtcggagttaggccatggaagtaatgttcgaggaattgaaacagtcactacttatgattcaaacaccggggaatttgtcatcaatactccatgtgaatcgggtcagaagtattggattggtggtgcagcaaatcatgcaacgcacactatagtcttttcacagctctatataaatggaagcaatcaaggggtgcatgcatttattgcccaaatcagggattcagatggaaacatatgtccaaacatccgaatagctgattgtggtcacaaaattggtttaaatggagttgataatggccgtatctggtttgataatgtgaggatacccagagagaatttgttgaattctgtggctgatgtttcaccaagtggtgaatatttgagtgcaataaaaaatgcagatcagaggtttgctgcattcttagcccctttgacttctggtcgtgttaccattgctgttagtgctgtttacatctccaagattagcttggccattgctataagatatgcattgacaaggcaagcattctccattacaccaaacgggcctgaagtcttcctgcttgattaccctagtcatcaacggcgtctgttacctttacttgcaaaggtatatgcaatgagttttgccgcaaatgagctcaaaattatgtatgtcaacagaacgcccaagtcaaacaaagcaattcatattgtttctagtgcttacaaggctactttaacttggaataatatgcgcactctccaggaatgccgtgaagcctgtggaggacaaggagttaaatctgaaaatcgtgttggcaatttcatgggtgaatttgatgggcattcgacatttgagggggacaacaatgttctaatgcagcagattagcaaggcactctttgcagaatatgtagcaagtcagaagaaaaagaaaccattcagcggtttgggattagaacacatgaacaaacctttgcctgttatcccatctcagctaacaagttcctacattaggaacagtgaatttcagattgatctgttccacctaagagagcgagacctattgagacgttttgctga

SEQ ID NO: 12591 - DNA, 1809 bp, Glycine max
tcgctcacgcgtccgcgctctctcattcaaaccattcgatctcatcatctccccaacctgtaagtaaaactacaaatcactgtaaatttacattaccactctcttagttattaacttagaatcttccctttctagattataattataattaaatttttttatatatatttcctcccatatagttatatattattgttgggatatatgcatagaagagtcatagataaagaaagtcttgattattaatagtccaaggcagtttccttttgtggggtgtggttatttgatcatacaaaatgactagtggtagttgtattggaatctctaccatgaagccttgttgtagaatcctatgtaactataaaagtccatctatttttgggttttctccaaccaagttgagtgattcagcaatcatgggcatgttgtccagatcatgtcgtcacaactcaacccatcgccataggtacaatacctgtaatactcagaatgtagggtacataaatgggatccatccgaatcggagagattttagtgtttccggttcgaattggggtcttgctaggaattttagcactagtgtttgtgtcaatattggtagttttaggcctagggtcgtgtccttgacaccgcatgtagcgtcggattttaggaatcactctacatcagttgattctaatgctaatgacacgagctttgagaagattttcattcaaagcagcttgaatgtcaagccattgataattgaaagaattgagactgatcaaagtaaattggaggaagtcgctgaagaaagatgtgacgagtcaaatgtaaatatagataatttgaaggatttaagtgagaataaggttcagagggaggtatctgagattgataaggaagcttggaagttacttcaagatgctgtcgtcacttactgtgggaatccggttgggactgttgcggctaaatgatcctgcggacaagcagccgctgaattatgatcaggtctttatccgtgattttgttccatcagctcttgccttcttgctcaatggtgaaggggagattgtcaagaattttctacttcacacattgcaacaacctagttgggagaagactgttgactgctacagtccagggcaagggttgatgccagcaagcttcaaggttagaactgtgcctcttgacggtagcaatgaagcatttgaggaagttttggatcctgattttggtgaatcagctattggtcgtgttgcgcctgttgattcaggattgtggtggattatattgttgagagtttatgggaaattaactggtgactatgctttgcaagagagagtggatgtccaaacaggcataagactgatccttaagttgtgtctgactgatggatttgacaatgtttccttctctattagtcactgatgggttcctgcatgattgatagaaggatgggcattcacggtcaccctcttgagatccaggcattattttactcggctttacgctgctctcgtgagatgctgatagtcaatgatgcaaccaagagtctggtggctgctgttagtaatcgcctgagtgcactctgctttcacatgagagagtcttattgggttgatatgaagaagactaatgaaatttaccggtacaagacataagagtatgctactgatgctggacacaagtttaacatctatgcagagcaaattccttcatggctagtagactggatttacgaggaaggtggctacttcattggcaatttgcaacctgctcatatggacttcaggtttttctcactcggaaacctttgagccattgttt

SEQ ID NO: 12592 - DNA, 303 bp, Glycine max
ttcgttttctcgtgggttttcgctctctcattcaaaccattcgatctcatcatcgccatcatctcctcaaactgtaagtatacctacaaatcactgtaaatctccatttccactctcttagttatgaacttagaatcttccctctctagttctaaattataatcattctcttattttatatttccccccccccatatgggtatatatatgattgggatctatacatgttacatgagtcagagatacattaagtctccttttttaatagtccaaggtagtttcattttcaggggtgtggttatt

SEQ ID NO: 12593 - DNA, 353 bp, Glycine max
gcagcttctaatgatatttcactaagtggaatgattcttccagctgctgtgtatttgtggcgaataccacattttatggccctagcctatttgtgtcgggatgactatgctgctggagggtttaagatgtactctcttgctgatgcatctgggcatagaacagcattggtggctttaaggaactctatatatctaatccctttggggttcttggcttatgattggggtttgacttctggatggttttgtcttgagtccgctgcacttacacttgcaataagcgctgcagcattttcattctatagaaaccgtaccaaagaaaaggcaaggagaatgttccatgccagtcttct

SEQ ID NO: 12594 - DNA, 929 bp, Glycine max
gagactaatgctcattcttctttgaaggacttacatttcagttctgatggtaaattacttgcctctttgggaagtggtggcccttgcaaggtttgggacgtttcttcatcaatggtcttatcttctctatcaaatgaaaatcgcgaaacttttagctcttgcagattttctcaaacaaatgacgagactctgatcctatatattgctgccatgactgataaaggtggaagcatcctgacctggaatacacaaacatgggaaaggatggcctcaaagcatattattcgtgatccaatctctgcatttaatgtctcagctgatggaaagtttcttgcgtgtggaacaccttcaggagacattgtagttgtaaattcaacaaatatgcagattcacacaatgataaaaaaggctcaccttggcatagtaactgctttagcattctcccctgattcaagggcggtggcttctgtatccatggattcaagtgcgagggtaacaataattgaagagaagaagactaatgggcttagcttgtggattgcattatttatcatcctacttgcagtagccgcttacttcctgaggcaagaaattgaaaagtgaaggttccaagattttgcttattgaaatatgaaacaattagcatccttgtgaatgctactgcttatttttgatgcattgtcattttttaaggggtttgctgatacttttatatattttggcatctttatgaacagttgttctaggacacgaccctctctctaaaatgccttgtaacatgggttgtatcgttacgttacatgtttcgtacaatgcttccaggtagaattgagctatcattcattacttgctatttgctgtgtcctttgctgttatatgatatatagctttcactgtcagaagtaacccgagggcacgggttttggatt

SEQ ID NO: 12595 - DNA, 420 bp, Glycine max
cggacgcgtgggtattattcgtgatccaatctctgcatttaatgtctcagctgatggggagtttcttgcgtgacctcaagggtgcattttgacaagaacttatttcttctgttttggtgggttgacatgcagtggaacaccttcaggagacattgtagttgtaaattcaacaaatatgcagattcacacaatgataaaaaaggctcaccttggcatagtaactgctttagcattctcccctgattcaagggcggtggcttctgtatccatggattcaagtgcgagggtaacaataattgaagagaagaagactaatgggcttagcttgtggattgcattatttatcatcctacttgcagtagccgcttacttcctgaggcaagaaattgaaaagtgaaggttccaagattttgcttattg

SEQ ID NO: 12596 - DNA, 471 bp, Glycine max
gggaccactgcattagctactcttgtcataggaaggttgctggtggtggcaaatgcaggagcttgccgagctgtgctgtgccgtcgtggaaaagcaattgaaatgtcaagagatcataaaccaggttgcaacaaagaaaagaagcgtatcgaggcatctggggggtatgtctacgatggatatctcaatggacaacttaatgttgctcgtgcacttggtgaactggcacatggaaggattgaagagcaaagacggtggaccactgactgcagaaccagaacttatgactacaaaactgactgccgaggacgaatttctcatcattggttgtgatgggatttgggatgtatttcggagccaaaatgcagtggattttgctcggcgcatgcttcaggagcataacgatccagccatgtgtagtaaggatctggttgacgaagctttaaagagaaaaagtggagacaatttggc

SEQ ID NO: 12597 - DNA, 409 bp, Glycine max
cttcagcttctcttttcttcaaaaggcaattgatttttcttcatgatgccgagtgttaaggctgatgcatctgacaaagactcagaaccatttgttgaagttgatccaacaagaagatatggaagatacagtgaactattaggatatggtgctgtgaaaaaggtgtatagggcatttgatcaagaagagggaatagaggtggcatggaaccaagtgaagctgaggaacttcagttatgacccttccatgggggataggctttactctgaagtgaggttgctaagaagcttgaccaacaaaaacatcatttccctttacagtgtttggagggaggagaaacacgacaccttgaacttcatcactgaggtctgcaccagtgggaatctgagggagttcaggaagaagcaca

SEQ ID NO: 12598 - DNA, 448 bp, Glycine max
gcgctacctactaatattccaggaagcaacacttatatcagttatcgaaaatgagttaaaggcgggcagttctgttgccacacagaatactcaattaccttcagcgagagcttggaaacctgctcctggtttcaaggcaaaatctctcttagaaattcaactggaagaacaaaaaaagtcactgacagaaaagcttgtatctgaggttgctactcctgtcaattccatgagctcaacaactccctgggttggagttgtcgccaatccagactctatgaaggtgtcaaatgatggccacagagaagcagaaaatactgaatatctggctaaagctgaaaaatctcaaaatagtaaaagcaagaaaagcccattacatgatctattggcagaagatcttgtaccaaaatctagtgaaagagatggcaaggttcctgacagtatgctcccc

SEQ ID NO: 12599 - DNA, 425 bp, Glycine max
gcgtgacattacctccacgatgtgtgcagttaaagccggcaaagatgtccgcgcttatgctgatcactcttgaggctttgctgatgccaccacctctagttatgaaccaaaacctgtcaaacacatcagggtggccataatgcatttgaactttgagagggtttgccaaaaccctctgccccaatgtgacaaaactcgtttcttgacctgacatgaaccatacaagagaggaaacagaaccggtaaaaatgtgttccctcactccaagcccaattgtctccacggaaaccaacctgctatgatccacagatgcagtatattatcacataccatgaccaattattctaaaaatatattagaacatacaaaatataattaaaattaagaacatattttttgggcattactgtaaagatgtggcaatg

SEQ ID NO: 12600 - DNA, 409 bp, Glycine max
ctcacgcgtacgatcaatttcaccacgcttataaattctgagaatgaattcctatgagcgaagcatttgcctttttctgtgccgacactggtttcgatcccacacccactaacgcatacccttgatcctttgaatgctcttgcgttcttctttcactacctaattcctaactcacactcacacaacgggtgatatcaatgtcgactactgctatgaagaggctcatgagagatttcaagaagctgcctcaagacccgactgcaggaatcagcggtgcacctcaagatatcaacataatgctgtggaacgctgccatatatgctccttatgatactccatcggatggaagcacgtttaagttgactgtccaatatactgacgattatccaaacgagccaccaactgttcg

SEQ ID NO: 12601 - DNA, 435 bp, Glycine max
agaatttcttgagtatcttattgtcacttaaagatgtgagggatgatcatggaaaccagcgcactgataccgagattgaagcactacttctgaacatgtttacggcaggaactgacacatcatcaagcaccacagaatgggccattgcggaactaataaaaaacccacaaattttggccaaactccaacaagagttggacaccgttgtgggtcgagatagcagtgtcaaagaagaggacttggcccacctcccatacttacaagctgttatcaacgaaaccttcagactccacccatcaacccctctttctgtgccacgtgctgctgccgagagttgtgagatatttggctaccacatcccaagggtgctacactcttggtgaacatttgggccatagcccgagacccaaaagagtggaattgacccatggagtt

SEQ ID NO: 12602 - DNA, 433 bp, Glycine max
gatcttttcaccctagcggggttattggagtttttcttcacagaagcaccttctagcatgaggtctttggccacatcactctcttgggccgctttggctgtagggtattaccttagttcagcaattgtgtcaattgtaaatagtgtcactggcaacacctcacatagaccatggctctctgggacaaaccttaaccactaccacctagagaggttttactggctcatgtgtgtgctgagtgcgttgaatttcttgcattacttgttttgggctatcagatacaagtatagagggacaggaactacaaacaactgaaaatgaagaaaaattacccaaagggaagttttcaaaatgggatatagataaggccttatgtttaattaccaaggccattaatcaaaatatatattttcgagccataatattatgcttc

SEQ ID NO: 12603 - DNA, 473 bp, Glycine max
ctagttctagatcgcgagcggccgccctttttttttttttttcactatcattttgcataggtgtctttttaatagattccttcttatcctttgatatagcaatatatattttaatgtatgctgccaatgattaattcaaatgaagtaagcatttcatcatttttgtctaagttttcatccataaacagctcatagcatcaacaaatatactagaaactgctagaaacttctaggagcaatgttgagcttgggcctgatgagtggcagtgggctggcttgttgctgtgggctggcttgctgttgtgggctacttttctgatagaatgctttttcagtttaaaaatgatgtgttctatttgcttgttactttgacttctcattaatgcttttgtatgggaacatccaaatgtatagtcccgcaatctataataaataagttgaagacaagtttgacttggaaaaaaaaaaaaaaa

SEQ ID NO: 12604 - DNA, 465 bp, Glycine max
aagaaattcaactctctccaaacatgcctctgatagacacagaaaactttccatggcggggctttaataagatcttctttgaccatcttgtgcaagagatgaaaactttggagttaggagagtggtggctttgcaacactacttatgatcttgagcctggagcattttccgtatcaccaaagttcctacccattggcccattgatggaaagtgacaacagcaaaagtgcattttgggaagaagatacaacttgcttagagtggttagatcaacaaccacctcaatctgtcatatatgtttcctttggcagtttggcagtaatggatccaaaccaatttaaagaattagctcttgcacttgatctccttgacaagcctttcatttgggttgtacgtccatgtaatgacaacaaggaaaatgttaatgcatacgcacatgatttccatggaaagcaaggtaaaatag

SEQ ID NO: 12605 - DNA, 445 bp, Glycine max
cccacgcgtccgcccacgcgtccgcccacgcgtccgaagaaagaaatgactgggttgggcattggtgtggcaagcatgaaagctggggagcgtgcgttggtgcgtgtgggctgggaattaggatatggagaggaaggaagcttctcttttccaaatgttccacccaaggcagatttagtttatgaagttgagctcattggctttgatgaaacaaaagaagtaagttgccattaaattatggatggctgtggacttggttagatgcttatagcacctgatttcacaggggaaagctcgcagtgatatgactgtggaggaaagaattggtgcagcagaccggagaaagatggatggaaatgctttgtatcaggaagaaaaactagaggaggctatgcaacagccattgcatatatgggagatgacttcatgttccagttgtttggga

SEQ ID NO: 12606 - DNA, 470 bp, Glycine max
cccacgcgtccgcccacgcgtccggtggaaaattaatgaaggtcaagcacaagtacaggatggcaacaaatttaacaatatctgagaaaagaagatgctcttccctggtactcctggaagggaggcccaaagattctccaaaagcagagaagactggtgtccacatcctttcaaaatccgaaattgatgcagagctatcgaaaatgaagggtgtgacacctcaagaggcggcggcggcagctgcgaaagcagttgcagaggcagaagctgccattgccgaggctgaggcagcagctagggaggcagatgctgcagaagctgaggcagaggctgcacgagtgtttgcgaaagcagcaatgaaggcactaaaatgcaagacacttcgtgtttgatggtgttagcttctgcattgcttacatgaggagtatatttggcttgagatcataattctgctgctagactttctgcat

SEQ ID NO: 12607 - DNA, 417 bp, Glycine max
  unsure (1)..(417): unsure at all n locations
tggtaaatcatttacaagcaaagtattgaaactaagaaaataggaaaactattaagatcatgggatattaggaaatattgaaactaagaaaataggaaatattaataactattaagatcataagattccatcattcactagcttaattatttatactaataactattaagatcataagatattaggaaatattgaaactaagaaaataggaaaactagttctacgagataatctctaacattccctaaaatattctatgacaaaatctaaacattattggatactgtaaataattntaagatactactataatataaaaatgtataaaatgcnaagcgatgtccacataggcagattcacatnattgcattaactttcaagaaattcgaatggatatggggtggtgtttaatctaca

SEQ ID NO: 12608 - DNA, 781 bp, Glycine max
ccttctcttattctgctgctcatgctcttcctttcttctttgctcgcaccacctactccaccgggaccaatcttcatccacctgtcttttgccaacttcaatccgggccagagaaaccgctgccaagaaggtgttccccctttctagaaaggtcattactctctggtaatggtggtgtggcctcaaaccagtggaaagctgttcctgatatttggagatcttctgctgagaagtatggtgattaaatagcattagtagatccgtatcatgatcctccttcaactatgacatataaacagttggaggatgcaatattggactttgctgaaggattgagagttattggagtaagacccaatgagaagcttgcgctttttgctgataattcatgtcgctggcttgtagcagatcaaggtatgatggcatgtggggcaatcaatgtggtaaggggttcgaggtcatcaattgaagaactgctgcaaatatacaaccactctgaaagtgttgcactagctgtggacaatcctgaaatgcttaatcggattgcaaaactgttttatttgaaggcttcaatgagatttattattctgctgtggggagaaaaatcaggcctggtcagtgaaggagacaaggaggtgcctgtctttactttcacagaagtcatacatttgggacaagagagtcgcagagtattgtttgattctcttgatactagtatgccacctggatctttctttacaattttggattaaatatttttatcattcaactatgttatctt

SEQ ID NO: 12609 - DNA, 638 bp, Glycine max
tgatctggtaccttactattaggtctggtttaagtcgattatagtgctccatatatgctgtaatttattgtctttgactttgttatcttttattcacattcttgtatttccttttatgcaggaaaatgcagatatcaggggccactgatctagcttctaagggacagggtgcatcagatagcagtagtgtaaaggttaaaagtgaatttgatgatgcctttcaaccagatgtgaagattcgctgtctatgtggaagtagattggaaacagagaatttggtcaagtgtgatgatgcaagatgccatgtgtggcaacacatcagttgcgttattattccagagaaacctactgaaggcatcccactagttcctgataaattttattgtgaactctgtcgtctcactcgtgcagatccattttgggtttcagtggcgcaccctttgcatcctgtgaagttgaccacaaccagtaatccaactgatggaaacaacccagtgcagagtgtggagagaacatttcaactgactagagctgacacggacttggtatcaaaaccagaatttgatgttgaggctaggagtatgctcctgaacgacaaggttccattcaggatgcaatggccacagtatacagacctg

SEQ ID NO: 12610 - DNA, 553 bp, Glycine max
aattttacaagtggggagagagagatttgttctggtattgttttgatcctcggtcaaaagaacacgcaaagcaaacccagtcacccccaacaaacacgagacaagccgtgtgcaaacaatagtcggtgtgaacccccaaaccctaatcgccaccacctccaatccttcgtttctatgaccgagtgctgttggggtcagcatgcgctagcttcgtcgtcgattttttggttggtgattctcgtgattcttttcgggcagaatttttgggtttgacggcatggatttggtaccgagcgtcaaggaaaaattaaactattttcgtataaaagagctcaaagatgtgctcactcagttacacctttcaaagcagggaaagaagcaggatcttgttgatcgcatattatctgttctctcagatgaacaagtttcaaaaatctgggctaagaagaatgctggtggtggaaaagaacaggtagcaaaattagtggatgatacatataggaaaatgcagatatcaggggccactgatctagcttctaagggacagggtgca

SEQ ID NO: 12611 - DNA, 404 bp, Glycine max
tttgccatttcccaacacaacacaaaccgtgtgctaacaatagtatagtgggtgtgaacccccaaaccctaatccttcgtttctatgcatgcgctagctccgtcgtcgtcgtcatcgattttccgggtcgtgattctcgtgattcttctcgggccgaattattgggtttgacggcatggatttggtaccgagcgtcacggaaaagttgaactattttcgtataaaagagctcaaagatgtgctcactcagttacacctttcaaagcagggaaagaagcaggatcttggtgatcgcatattatccgttctctcagatgaacaagtttcaaaaatgtgggctaagaagaatgctggtggaaaagaacaggtggcaaaattagtggatgatacatataggaaaatgc

SEQ ID NO: 12612 - DNA, 504 bp, Glycine max
tcgcccacgcgtccgctaaacctctctgctttcaagaatttagaatggcttgagggctcaagctgtggactacaagggactatcccatctgatattggtgcctatgggagcgtttatagggcacaattaccaagcggcaaaattgttgccgtgaaaaaactccaccgatttgaagcagaggtgccagcttttgatgagagtttcagaaatgaggtcaaagtattatcagaaataaagcatcgacatgttgtgaagctccatggattctgcttgcacagaagaatcatgtttttgatatatgagtacatggagagaggcagcttgttttcagtgttgtttgatgatgtggaagccatggaattggattggaaaaagagggttaacattgtgaaaggcactgcacatgctctgtcctatcttcatcatgacttcactcctccaattgtgcatagagacatatcaaccaacaatgtcttgcttaactcagactgggagcccagtgtt

SEQ ID NO: 12613 - DNA, 573 bp, Glycine max
cggacgcgtggggtgctgctggagctgctgctggtgtagtggttcttctaatagttttggggtttgtgatgctgaggcgcacaaggaggcatgttgggaccggaacatcagtggagggctcattgatggcatttagctacagggatttgcaaaatgccacaaagaatttctcggataaacttggaggagggggctttggttctgtcttcaaaggaacattggctgattctagtatcatagcagtgaagaagcttgaaagcattagccaaggtgagaagcagtttagaacagaagtgagtacaattgggacagttcaacatgtcaaccttgtaaggcttcgcggattctgttctgaaggtactaagaaacttctggtttatgattacatgccaaatggttccttggagtccaaaatgttttatgaagatagctccaaggtgttggattggaaagtgaggtaccaaattgctcttggaacagcaagggggttgaattatctccatgagaagtgcagagactgcatcatacactgtgatgtgaaaccagagaacattctcctagatgctgattttg

SEQ ID NO: 12614 - DNA, 473 bp, Glycine max
cccacgcgtccgcggacgcgtgggcaagcttcagtttgtcccctgcgtcttattacttgccggttttgtggtgatatggttcaagctgggagttctgccatggatgtccgtgacagattaagaggattgtctgaacatgagagtatttgcggttctaggactgccccctgtgattcttgtgggcgttctgtgatgttgaaggacatggacattcaccaggttgctgttcatcaaaaaggctaattctgatattttcatcttaacagcaacttgtgaaagattgcatctaggtaataaatagaaaattaaaagaaactggaggaaattgaaagatacaagcagattgatggtggagcagaaacatctctatgttctactgtggacaactggctggatatatcacccggttgttgatcttgtcattcattatgtatgaaattatgattatgaatttaagattgtgatttccctcc

SEQ ID NO: 12615 - DNA, 960 bp, Glycine max
gttcatgttccagtgattttgtgactaggaatatattccatttaccaagtgacccttttatcttgatgcctaagtttgccactttgctttggtactccttttggttcaaacattatgattctttcttttttaaacttttactatttgataacgtacagggtcccttgccgaaagagagagggcatcagattcaccatcaacggtcactcatacttcaacctagtcctaatttccaacgttggaggtgcaggtgatgttcacgcagtttccatcaaaggatcaagaacaaattggcaaccaatgaccagaaactggggtcagaactggcaaagcaacgcctatctcaacggacaaagcctctccttcatggtcaccactagcgacggacacaccgtggtctctaataatgttgcaccctcaagctggtcctttggccaaacctttaatggccaccaattcatttaagaaaacaacatagacccttttacatttagtagctaaaaattgttgtatttgtgattatacttagtggtacaatagatgtgttggtatatagaagaaaaaattaagtaatatgatataggagttgagtcatggatggggcttattttaggatggtcctttttccttgtaatttgaattgtgttttgtgaggaattttgttctgcctagcatttgaaaaaggcagagatggtttaattagggggcaggggtggatgtttaaggtttaccacccgccaatttcgtttgttgtgtggttcgtgttatgttatccacaattggaaaatgaaaaaaaaaaagtgatattttctagcttagcgaatgagaatagaataggaaagagacaagcgtttttgcttctataggaagtcattaatgtcttgaacttcatgtagtttagtgagtgtaaaagtgaattgtatgacatgtaaggaataaaattactctcctcattagttc

SEQ ID NO: 12616 - DNA, 449 bp, Glycine max
agcaaacaacatagacccttttacatttaatagctaaaattatagtatttgttggtatatagaagaaaaattaagtaatatgatgatatataggagttgagtgatggaaggggcttattttaggatggtcctttttccttgtcatttgaattgtgttttgtgaggaattttgttctgcctagcatttgaaaaaggcagagatagtttaattagggggcaggggtggatgtttaaggtttacctaccacccgccaatttcgtttgttgtgtggttcgtggtgttatgttatgtcatccacaattggaatatgagaaaaaagtgatatttttctagcttagcgactgagaatagaataggaaagagacagaagcgtttttgcttctataggaagtcattttcttcaactttatgtaatttaatgagtgtaaaaatgagtgtatgacatgta

SEQ ID NO: 12617 - DNA, 785 bp, Glycine max
gtgcttcataacacaggtgacagccatctatctgcttttacggtagatgatgaaatgaacacaaaccatgctccaaataggcacatcaccaacatttctcagcaactggtcacctccaaggtacctgtggagggggttgtcagttttaatcctggcagggcaggtgattgtccagactctaaagggaaagattcattggaggaacactcttcaacaactggagagagttggtcctaaatcagttggagtgtgtcttttaacttcagcttttgtgggcatggccttcacgattcaatttgtaagagagttcaccaggttgggattgaatagatcggtaggtggggttttagctctggctttctcaagggagctaagtcctgtggttacagcaattgtggttgcagggcgcattggaagtgcttttgcagctgagttaggaactatgcaggtttctgagcaaactgatacattaagagttcttggttcagaccctgttgattatctggtgacaccaagagtgttagccacttgtattgcgttaccccttttgaccctgttgtgttttacattagggatggcatctagtgcccttcttgctgatggtgtttatggggtgagcatcaacattatcttggattcagctcagcgagctctcagatcatgggatattattagtgcaatgatcaagtcacaggtttttggtgctatcatatctattgtgagttgtgcatggggagtaacaactttgggaggtgctaaaggtgttggagaatcaacaacgtcag

SEQ ID NO: 12618 - DNA, 579 bp, Glycine max
cccacgcgtccggaagaatgttggtgcttcttactcatatggtgaaacatctatgcaggaataggcagcagaataacattcagtacaaaacagttggacaacgcagttggactgcaatatttcgatggaggaatattcgtaggacgaaatgttataccaatttttctggctgccagatatctgattggagttgtacttctatttgtgttattgatctacaaatggcgacggagacatttgtcaatatatgaaaatatcgaaaatttcttgctggatagcaatctaaatcccattagatacggatacaaagaaatcaagaaaatgactggaggtttcaaagtgaaattgggtcaagggggctttggctctgtatacaaaggaaaactccgaagtgggttagatgtagctgtcaagatattgaccaaatccaatgataatggacacgattttatcaatgaagtagctaccattggaacaatacaccatgtaaatgtggtgcgacttattggatattgtgttgaaggaaaaaagcgtggtctagtttatgaaatcatgcctaatgggtcattggataaatac

SEQ ID NO: 12619 - DNA, 545 bp, Glycine max
  unsure (1)..(545): unsure at all n locations
cccacgcgtccgctggtccctccaacttcacttaacttctccctctctttctttctctcaatacgcaccaaaacattcattcattggtattattcatacaacaaatcaaaaaatgttacccaacaatccttccactattgttcccgacgcggtggcccggcaccacacccacgtggtgtccccgcagcagtgctgctccgccgtggtccacgagatcgccgccccggtctccaccgtctggtccgtcgtgcggcgcttcgacaacccgcaggcctacaagcacttcgtcaagagctgccacgtcatcctcggcgacggcgacgtcgggaccctccgcgaggtccacgtcatctccggcctccccgccgccgtcagcaccgagcgcctcgacgtcctcgacgacgagcgccacgttatcggcttcagcatggtcggcggcgaccaccgcctcttcaactaccgctctgtcaccactcttcacccccgctccgccgncggcaccgtcgtcgtcgagtcctacgtcgttgacgtcccccccggcaaca

SEQ ID NO: 12620 - DNA, 375 bp, Glycine max
ctttcaatcttcacttctctctttctctcaaaacacaccaaaccattcattcattcattcatagtttcattcaacaaatcaaataatatcaaacaaataaatgtcacctaacaatccttccaggattgttcccgacgcggtggctccgcaccacacccatgtcgtgtccccgcaccagtgctgctccgccgtggtgcaggagatcgccgccccggtctccaccgtgtggtccgtcgtgcggcgcttcgacaacccgcaggcctacaagcacttcgtcaagagctgccacgtcatcctcggcgacggcgatgtcgggaccctccgcgaggtccgcgtgatctccggcctccctgccgccgtcagcaccgagcgcct

SEQ ID NO: 12621 - DNA, 401 bp, Glycine max
cttccacttgctctaacttctgcaacaggaaggaaagaacttcccgaggatctgttcactgtaaaatattcttccttccctgctccagtcctaggttggcaaatgggtgttccccatggcatgggtatctcaatgcaatacaataatgtggtgcctgtgccaagttttccacagccatcaaagtcaataaatccatttgatgtcagcagtgaacctaccgcaaatcaagccccaacttttccttccatgtcatccttgcaaggtgccctgcctggggtaccacctcctggtgcagtgcacccttcaagcatgggtaatccaacacatggctggactcctctgtcatcatcatttctgcctgcacagacacaaatgcgtgcaactgcattgggaccaaggcc

SEQ ID NO: 12622 - DNA, 598 bp, Glycine max
  unsure (1)..(598): unsure at all n locations
cccatgcgtccgcgccataaagaatctattntttctgtctttttctttttactctcttaagttcgtagcagcaaatcaggatttgctgcttcagtgcttcttcaccttttgtcttctagcctctggaatttttccatggagacagagaacggtgacaccaggtccaaaaagatggaagagtatgaagtcatagagcaaattggaagaggagcttttggctctgccttcctcgttcttcacaagtccgagaaaaagaggtatgtgctgaaaaagattaggttggccaaacagacagagaagttcaaacgtacagcacaccaagagatgaacctgattgcaaaactgaataacccatatattgtggactacaaagatgcttgggtggagaaggaggaccacatatgcattataaccggctattgtgaaggaggtgacatggcagagaacataaagaaagcccgagggtcattttttcctgaggaggaggtctgcaaatggctgactcagttgttgatagctgtggactactttgcatccaatcgtgtgatccacagagatcttaagtgtttcaacatattnctcaccaaagacaacaaca

SEQ ID NO: 12623 - DNA, 707 bp, Glycine max
gaaggcatcgcctctctctttggagcaattcatctccattaccgctcctcttcttgacttgggaaaggaagctgagatttcaagctcgatcgccactggtgcgtccaggaatttggatactgctcaaaagaggggttctacaatcctcaacttgaagtgcgtcgatgtccagacagggcttatggggaagtctctgatcgagttccagtcaacaaaaggagatgttcttcctgcacacaagtctgcgactcatgatgttgttgttttaaaactcaacaaggctgatttaggttctcctgctcttggacaaggtgttgtttacaggttaaaggactcatcaataaccattgcttttgatgatataccggaagacggtttaaacagtcccctaagactggaaaaagtagcaaatgaggtgacttatcgcaggatgaaagacgcgttgatacagttgagtaaaggagtgcacaagggtcctgcctctgatctgattcctgtcttgtttggggagaggccaccaacagtgtccaagaaggatgtatcttccactccctttaataaaaatcttgatcactcccagaaagaagcagtttcaaaagctctatcatcgaagaatgtgttcttgttgcatggaccacctggaacgggaaaaactacaacagttgtagaaattatattacaagaagtgaaacgtggatctaagattc

SEQ ID NO: 12624 - DNA, 492 bp, Glycine max
cggacgcgtccgcccacgcgtccgcccacgcgtccgaacctgccagttctgaagaatggagctacgctacatgttaaaaaatctcaggcgtctaaggagagagggttacaagggagcacaataagcagtcctagtgaaatggcacagggaatcagagcagggaaaatagctgaaggaaatgatgcacattctctttctcttcaagctgttgaaactagacagcaaacacaagtcatcaaagttgtaccacataaccggaaatcagcgacggaatcagcagctagaatttttcaatccattcaagaagagagaaaacaacatgatttagtctagtgctgtttatggaggtggagttatttgagttgattttgtacagtgcgtcaagtcctgtactttgttgttgtttggtaatatgtatcttgctgttttattctactcttcctttatgtcctttttcttacaacatattcgaatgtagatattgttataact

SEQ ID NO: 12625 - DNA, 433 bp, Glycine max
cccacccgtccgcccacccgtccgatttagtgtggctcaagatggtggaaaaccaacaccaggaaaaagatttaatcataattatatttcttgatcggggctccgagtctggccgaggccaacagggaggcctgcatgagctcccccgacctctcctccctgtggctgtcaacgccgcaatccgccactccgggacccgacacgagcagagctccgccgcctccgccgccgcaatctcagtctcctctacaaaggcggttgcagacgctactagaaggagctagagaaagctggacctatgcaattttctgggagtcttctcacgacaacttctccggcgctacccttctccgttggggcgacggctattaccagggcgaagaagaggacaaagccaaaggcaaagctcccaaaacgacgacgtctgcagaac

SEQ ID NO: 12626 - DNA, 1560 bp, Glycine max
attacgaatcgcaagttcacggagacaaatagaatacatgaaaatggaagcaactgagatcatattccttttgttttttggtcaaaagagaagatatatggaatagcattagcttcttcaaatgaagaaaacaccagcccccagtttgcataaatctaaccaaagaaaaaagaatgttggattccaagatagaggtgcagccaatggtacacagagtcaccatgttgagagccattctgctctgacatatttcaagtcttccttcaagaaattttttacattgtttctctctgggaagcgaaaaacagactcagaagctgctgaaagtgatgacagaaagaatacacacaaagttagaggggtatcatcttccacagatgtatcatctgatagttccaagagttcatcaaaaagggtgttttctcattgctctgcatcatctggcactgcaagtagtaagcttggaatgggaaacttcacctttgaggagatttacaaggcaacagcaaagttctctctagagaataagattggggaaggcgcgtttggaacagtgtataagggaaagcttaatgatggaacccttgtggctgtaaagcgtgccaagaaggatttactaaacaagaacttagctgagttcaagaatgaaataaacaccttgtcgaaaattgagcacattaaccttgtaaggtggtatggatatttggagcatggacatgaaaagattattgttgttgaatatattagtaatggaactcttcgggaacatttagatggtattcggggagatggactagaaattggtgagcgtctagacatagcaattgacatagctcatgcaattacttaccttcatatgtacacagatcatccaattattcatagagacgtcaaagcatcaaatatcttaatcaccgataaactaagggccaaagttgcagacttcggttttgctcggttgggaccagaagaccctggtgcaacccatatttcaactcaaattaaaggaacagctggttacatggatcctgattacatgcgaacgcgacatctctccgaaaagagtgatgtttattccttccgcgtgctgcttgttgaaatgatgacaggaagatatccagttgaaccacagagacctcccaatgagagagttacaattaaatgggcaaatgcagttgttgagacaaaaagaaagttgttgattgccatggatccaagattgaggagaaatccatcctccaacaaggcagtgcaaaaggttctcaagctagctttccaatgccttgcaccggtgagacgatcacgaccatctatgaagagttgtgcagaggttctatgggagattcgtaaagtttttaaagaaaaagcattttctcatcctcctcaccattctgcagatttccctcaaagagatgctaggaagaatagacataagacatatggtattgaagacagtaaaggctataaatttgtatttgcataaaaaatttcacatctcccgtttgttcattgattgttcttatagaaaaaacatgtataatttaaaaaaaaaaaaagaag

SEQ ID NO: 12627 - DNA, 443 bp, Glycine max
attgttcctaccaccatcaccattactaccattgctgcaactctccgttagcagacttcagggaatgggcaaagaggaaaatgatgaaaatgaaaagaaagatggagaagatggagacgaggatgaaaatgcacaagaggaggatgaagaagatattagtgatgatgattataatcagaatatagattttgatgacgatgaagatgattataatgatgtagatgacggggatgatgaacctacctattagatatcagtatggagaatgttcttctgctcatcccgtgacagctatacaagcatggactgttgctcctttaattttacagttgggaagttaaaattgttcgttagccttatttggcttttactttgtcactattttaacttgttcaattactaacggatgttttccttgtaaatgtttagattaaagaagtata

SEQ ID NO: 12628 - DNA, 587 bp, Glycine max
gttgtcttgaagccaaatgaggctgcttttgagaaagaaatagaagggatgccatcaacacgttctgttggggaactaccacccgagctccgctgtcccttatgttcacctgttaatgaaagatgctgtactgacaagcaagtgttgctttaaaagcttttgtgacagatgtattagggactatattatctccaagtctatctgtgtatgtggtgcaacaaatattcttgcagatgatctcttaccgaataagacattacgagataccattaatcgtatattggagtcgggcaatagcagtgctgaaaatgctgggagcactttccaagctcaagatatggagtctgctcgctgtccgcagcctaagattccatccccaacctcatctgctgcatccaagggagaactaaaggtttcacctgttaatgaaaaaacaacaaatatacaggaaacaactgatgatagaaaggctgtttctgctccacagcagacatccgagcaagtaaggaaccccagagctgctgatatatctgaagctactcacgagtctatgagtgtgaaggagccagcctcacaatggagtgctc

SEQ ID NO: 12629 - DNA, 474 bp, Glycine max
cccacgcgtccgcggacgcgtgggttcagaaaacgtgccaaacttgagcgacgtcactaagaagaccaaaggtcggcaaaggatagagttgaagacgatggccaacaagtgtagccttcaagtgacattttcaaagcatcgaactggagttttcaagaaagcgagtgagcttgccaccctttgtggtgtggaccttgctgtgattatgttctctcccaataaccatgtttactccttcggtagccctaatgtggattctgtaatccaacgttatacgacagagggcccacctcccctcttcacccaagacctcaatgaggccccttgcaccatggatgagggtgagctccaagcacacctcaactgtttgtccaaccaaattgacgcggagaagcaacgtgtagaggatctaaaccatttgttgatggctgcgaaggatcacatctggtgggatgtgccaattgaaagcatgag

SEQ ID NO: 12630 - DNA, 575 bp, Glycine max
  unsure (1)..(575): unsure at all n locations
tcgaagatatgaatatagaatctgaatctataaaagaaagctgttcaagcctgtttgaagaggtgaatgagacaccgactcttccggatgaagaggaaagtaaaacagaaatggatgaaactatgaatgatgctgagttgaatgaaaacccggagaaatctgacgctgtattggaaggttaaagtcaatgtctattagacagatatttgtcgtaccgtgtaatcatagtagtctcaatcagcatttttagcacattacaagtgaagtgaattaaaaacaaaacaaaaaaggcactaccgcatatgctgtagtagttattcagtcccgtgcaactaactcgattagaaattgttcattttcatgtgttgtattagacgaatttatttttcaaggaattgaagagtatgaccaattgtatactatactacacggcatgtcacccttcattatatgagtgagcagagaactgaggaaattccgtgncccaaanaancaacgtgtagaggatctaaaccatttgttgatggctgcgaaagatcacatctggtgggatgtgccaattgaagcattaaaaa

SEQ ID NO: 12631 - DNA, 1017 bp, Glycine max
tctttgctgccctcctcgccaagaactacaaagagctcactcgaatctacctcgaattccccaaaacttattcaattcaaccaaacctagacacatacaacaccgtaatcaaggcctttgccgaatccggttcaaccagctccgtttattccgttctcgctgaaatggataagaataacattgcacctaatgtcaccactctgaataactcgctctctggcttttaccgcgagaagaagtttgatgatgtagggaaggtgttgaaattaatggagaagtatagtgtttttccttctattagtacttacaatgttaggattcagagtttgtgtaagctgaagaggtcttcggaggcgaaggcgttgctcgaggggatggtttgtaacgggaggaagccgaattcagttagctacgcgtgtttgatccatgggttttgtaaagagggggcccttgaggaggccaagaggttgttcagggacatgaagaggagaggttacttgcctgatggggagtgttattttacgctcgggcattttctgtgttccggtggtgagtttgaggccccgttggaggttgctaaggagtgtatggggaaaggttgggttccgaattttactaccatgaagagtctcgtgaatgggctcgctggtgcattgaaggtggatgaggcgaagggggtttttaaccagattaaggagaagtttcctgagagtggggataagtgggatgagattgaagctgggttgcctcagtgagaaagagtgtggtctcctttgtattgtacaattctttgatcaattggaggggagccctgaaaattgaattaactatggaatatcagctttggaatagctttattttgttttgccatttcttctagccattggcctttttgcttgctcgaatgaattcatcggtgactggtaattttgccaggttagtttaacatgttcgctgttgttaggcatgctttgttttccttgattgagtaataaatcgatttggaaatggttttgc

SEQ ID NO: 12632 - DNA, 476 bp, Glycine max
cggccggaatcccggtcgacgacgcgtccgcggacgcgtgggtgcgtcccttgttggaattcccaaagagaaggtgctatctgaagtaaagccagatgagaaaaagaagtgcataaatgaactacagaaagataacaacattgtagcaatggttggtgatggaattaacgatgcagctgccctggcttcttcacatgttggtattgcattaggtggaggtgtcggggctgctagtgaggtgtcttctattgtattaatgcgcaaccagctctcacagatagttgatgccttggagcttagcatgactgtccatgatttctataaaacaaaatctttggtgggctttcatatacaacattgtaggaattccaattgcagctggagtgttatttcccataaatgggactgtgctaactccatcaattgcaggggcactcatggggttgagctccattggcgtaatgactaactcgtta

SEQ ID NO: 12633 - DNA, 454 bp, Glycine max
cccatgcgttttcttatgttggccatccaaatccgttaaaagaaggccatgatctattcagaaaaggacttttaagtgaagcagttctggcattggaagctgtagtcctaaaaaaccctgcgaatgctgaagggtggagactgcttggaatagcacatgcagagaatgatgatgatcaacaggctattgcagcaatgatgcgtgcacaggatgctaacccaacaaacctggaagtgcttcttgctcttggtgttagtcatacaaatgaactggagcaaacagctgctctgaagtatctatatggatggttgcgccatcacccaaaatatggaacacttgccccgcctgagatggctgattctttgtactatgctgatgttgctaggttattcaatgatgcagctgaactctcacctgatgacgcatatgtccacataggtttaggggtcatgta

SEQ ID NO: 12634 - DNA, 562 bp, Glycine max
cgcattttagctccctcttggacaattctcgaaagtacaagaaagaaatgggggatgagtatgtgtctgtggaacaccttttgctagcatttcattctgataagagatttggacaacagttgtttaagaatcttcagcttagtgagaaagctttgaaggatgctgtacaagctgttcggggaagtcaaagagtgaccgatcaaaatccagaggggaaatatgaagcattggacaagtatggaaatgatctgactgaacttgctaggcgtggcaagcttgatcccgtcataggtcgagatgatgaaattcggcgctgtatccagatattatcaaggagaacagaaaacaatcctgttattattggtgaacctggtgtggggaaaactgcaattgctgaaggattagctcaacgtatagtgcgtggtgatgttccagagccattgatgaatcgaaagtatcgtggagattttgaagaaaggttgaaagctgtcctgaaggaagttacagcatcaaatgggcaaataattttgtttattgatgaaattcataccgttgtaggtgc

SEQ ID NO: 12635 - DNA, 822 bp, Glycine max
gcatccgttgcttacaatgaaggctactctgaagggacagtacgatgtcgacaaaagcggcgctgcctttgccaacatcgccgcccagaaacccggttccttcatcgtcgactacaacgttcccaaaaaggactttccgtttcagtctatgaacacggttagggttgcggagaggccggtgaatttgacctacgcgcacagcaggggcgacatctgcaccgtcttggatggaacctttgtgtatgattctgcgaacaaggtttctgccaattacgcgctcgactcagggaactgcaagcttaagtacacctatgttcacaaggggttgaccacgtttgagcccgcctatgacgtggccaagaacacgtgggacttcgccgtttcgcggagggtctacggcggcgacgacacgttgagggcctcctaccagacatccagcagggttctgggagttgagtggtcgcggaatcccaaacacactgctggcttcaagattgtagcatctgttaacttggccgaggaatttaaagctcccaaacttgttgctgagaccacatggaattttgagatgtagattggttccaatatattgttcaatttcttgataggtttactgtcaagttttgaaggctttttggtcaccattgggcatatttttgcctttgaatatattatatgcttggaagtgttttgatcatgttatgagcaactctggcattaattgtccaccaacaacttcccgtttgattttaaactatttcatattcacattacaaaaacctgtaattgcttgcctataaaatgtgctcaattattctcata

SEQ ID NO: 12636 - DNA, 521 bp, Glycine max
tctctttgcaactgcatccgttgtttacaatgaaggctactctgaagggaaagtacgatgtcgacaaaaacggcgctgcctttgccaacatcgccgtcaacgccggcgacgtcaagttccgagcctccgtaacggaagccactttcattaacggtcccagcttcaccggcttggcgctcgccgtcgagaaacccggttccttcatcgtcgactacaacgttcccaaaaaggactttcggtttcagtttatgaacacggttagggttggggagaggccgttgaatttgacctacgcgcacagcaggggcgacaacaggaccgtcttggatggaacctttgtgtatgattctgcgaacaaggtttctgccaattacgcgctcgactcagggaactgcaagcttaagtacacctatgtgcacagagggttgaccacgtttgagccctgctatgacgtgtccacgaacactgtggacttcctcgtctcgcgacgggtttacagtgaggacgcacttatggtgcct

SEQ ID NO: 12637 - DNA, 1349 bp, Glycine max
ccgcgttacaagttgcgttccgagcttgccaacgcaaacgtatcgagccagcctcacaagctagggttcttcaccgcgctccacccttcttccctctcccttcgtcccctccaattggaatgtgtttgtgacttcatatgctggtagttgacattttgaaattgtaactgtggtgggagcaataatatattttgacatcatcatggagatacagacttgtggcaggccgattgactccttgctagagaaagtgctttgtatgaatattctgtcgtctgattacttcaaggagctctatcgattgaaaacgtatcacgaagttattgatgagatctacaatcaagttgatcacgtggagccatggatgactgggaattgtcgcggtccttcaactgcattctgtcttctgtacaagttttttactatgaagctcaccgtcaagcaaatgcatgggctgttaaaacacctcgattctccttacataagagcggttggatttctctatctgagatattgtgctgatccgaagacactatggaattggtttgagtcatatgtaaaagatgatgaggaattttctcccggatctaatggtcgaatgactacaatgggtgtatatgtccgtgatttgcttcttggacagtattatttcgacacactgtttcctcgcatccctgttcctgtattgcggcaggttgtgtctaatcttgaaaagttgaagctcccctctacacattctggttcaacaggggaaactactcgtcatggttctgatgatactgcccgtagaccaccttctgttaaagctgccctttcagtctcttttggtcagcgggctccacaccgggcttccacaagagattcttcacctattcgccgtacattaccttctcatgaaaaaaatggcagtgatgacataagaagatctccaagtaatcgccgcagccagagccgtgaatatcctgatagggagagggatagggaccgagaccggtcacagtccagagacagggatcgggaacgtgatagagacagggatcgggaacgtgatagggacagataccgtgaccgagataggaacagggagtgggagcgagatcgagatcgagaccgggaaagatacagggatcatgactcggaaagagatcaggatagggacagaatcaggaggaataatgagcgggaaagagagagagagaggatttacgattatgacaagaggtctaagtacacagagagagaaagcagccgggattatgacaatggtagtaggcactatcgtaggagcaggagtcggagcaggagcaggagtagaagtcggagcttgcaagctggcactggttggtatg

SEQ ID NO: 12638 - DNA, 426 bp, Glycine max
gaaaaaacaggaaggagacaacgggaaggaagagttgaaagaactggaaggagagaaaggaaaggaagagttgaaagaactggaaggagaaaaaggtgaggaagagttgacagatactgtgaccgagataggaacagggagtgggagcgagatcgagaccgtgaaagatacagagatcgtgacttggacagagatcaggatagggacagaatcaggagggataaggagcgggaaagagagagagagaggagttttgattatgacaagaggtctaagtacacagagagagaaagcagccgggattatgacaatggtagtaagcactatcgtaggagcaggagtcggagtagaagtcggagcctgcaagctggcactgctcagtatgaatcacgttctagtcctcagagagaggagagtaagagaact

SEQ ID NO: 12639 - DNA, 822 bp, Glycine max
caggattctagagaggcacacaagagcttaatcttgttctttctattctcatgaatagctagtatttatatcaatgataaatgtttctttgggttaagtggttactacctcttcatggtaattgtcatctttgctctgtgttgatgttttatgattttgggaatattgtgcatggtacactatatgccttggatgacagacttgattggtgcagttcccaagtttactatacccctttaattcctgattatttaactatactttaagggattgatgagtctgtactgctgttgcagtattatttcgacacgttgtatcctcgcatccctgttcctgtattgcggcaggttgtgtctaatcttgaaaagttgaagctccccactacacattctggttcaacaggggaaactactcgtcacggttctgatgatactgcccgaagaccaccttctgttaaagctgccctttctgtctcttttggtcagcgggctccacatcgggcttccacaagggattcttcacctattcgccgtacattaccttctcatgaaaaaaatggcagtgatgacatatagaagatctccaagtaatcgccgcagccagagccgtgaatatcctgatagggatagggaacgagaccggtcacggtccagagacagggatagggaacgtgatagggacagatactgtgaccgagataggaacagggagtgggagcgagatcgagaccgtgaaagatacagagatcgtgacttggacagagatcaggatagggacagaatcaggagggataaggagcgggaaagagagagagagaggagt

SEQ ID NO: 12640 - DNA, 692 bp, Glycine max
aagtgacgtcgtgcaagttccttcttcactttcacgacactcactcacacaccatggatttgctctcaatctctccctctcaccctttaccttcttccattcgaaccctttcctcaaaccctaagccacccatttcctcctccttcttcttcatccccaaaccccattcacgcttctccaaaaccccaccaaggtgcgtcttcacgccggcctcgccaatcccctccaaaaacacaaactttgggtcccagtttcggaaccctacgagcctcaccttcgagctctcctcgccccagactccctcgacggcggcgagaggcgcggagggcgacgtgatggggctgttgctgagagagaggattgtgttcctcgggagcagcatcgatgactttgtggccgatgctatcatgagccagttgctgctgttggatgcccaagaccccactaaggatatcaggctcttcattaattccactggtggctctctcagtgctacaatggctatctatgatgccgtacagcttgtgagggccgatgtttccacagttgcactcggcattgcagcatcaacagcttctgttatccttggtggtggcaccaaaggcaagcgctttgctatgccaaatacacgaattatgattcatcaacctctaggaggtgctagtggacaagctatagatgtagaaattcag

SEQ ID NO: 12641 - DNA, 482 bp, Glycine max
atttaataaagtttaaattcttttatattttattatattaattattattattatgattataaaatatataatttagttatttatattaatttatatttttatatcttaatttcttataattttagttatattaatttctcattttattttttattctatatgttagttaatgaattgttgcattttaattattaaaataaaaacctaaatatcatgatatatttgatttataattttatgtttactttaaatgttaagaacctaagaaatgatgtttttatgttagtttttaatattataaagttgtggtattatatttatttagtagtataattttatgtattaattattattatattttattaatactagtcaaccacgattcaaacatgattaagtcattaagttttgaactaatattttgatcgattcaatcatcaatccgattttaaaaacattggttagttgaaccaagttaagtc

SEQ ID NO: 12642 - DNA, 443 bp, Glycine max
tcggccatagcatcgcgaaactgggaaaccattcaaattgaagacctcaaaattgatcgcaatgagctgcttgctgtgaactgtctggtaaggtttaagaatttgcttgacgagtcaattgaagtgaacagtcccagaaatgctgttctgaatttaatcaggaagatgaaaccagatatttttgttcacagcgtagtaaatggatcttataatgctcctttctttctcacacgcttcagggaggcactgttccattattcttcaatttacgatatgtttgatactctcatatcccgtgaaaatgaatggaggttgatgcttgagagagaatttttgggccgggagataatgaatgtggtagcatgtgaagctctagagagggttgagaggcctgagacatacaaacaatggcaggctaggaatactagagctggttttaagca

SEQ ID NO: 12643 - DNA, 1008 bp, Glycine max
  unsure (1)..(1008): unsure at all n locations
gttggatgatgcttcgagtaaaagtttcaagtttctaaggattaatttgcctgccggcggtcatccaacggcagttgcattttccgatgatgcatcctcccttgttgtggcgtcttatactctgtccggttgttcattatacatgtatggagaagagaaacctaaaacatctgaagacaaaccacaagcaaagcttcctctccccgaaattaagtgggagcatcacaaagttcatgataagaagtcaataattactatgtttggagcctccgcaacttatggcactgcggatggaagtacaattgttgcctcgtgttcagaagggactgacatcattctttggcatggaaaaactgggaagagtgttgggcatgtcgatacaaatcaattgaaaaataacatggctactatatcacccaacggtcgttttattgcagctgcagcatttactgcagacgtgaagatctgggagattgtatatgctcaggatggatctgtgaaggaaggtttaaaatgttatgcagcttaaggggcataagagtgctgtgacttggttatgctttatgccaaactctgagcaaataatcactgcatccaaggatggttcaatgagactatggaatatcaatgttcgttatcatcttgatgaggatccgaagacgctgaaggtgttcctaattcctcttcatgattcttccggtactacactgcactatgaccgcctgagtgtttcccctgatggaaaaattttggctgcgacccatggctccacactgcagtggttatgtgttgagactggaaaggttctggatacagctgaaaaagcccatgatagtgacatttcatgcatttcatgggctcctaaacccattccaatgggaaatgaacaagttttggttttagccacagccagtgctgacaagaaagtgaagttgtgggcatctncatctatcccttcatcatgaaccactatgatactgcaccaaccatctagcatgcctatgcatg

SEQ ID NO: 12644 - DNA, 984 bp, Glycine max
gcgcgcgtacataagctattaattttgctcgagggacattttttcccgcattttggttttaaagttagggggacataaaccaggctgtttttcctggacttcaaggtggtccacacaatcacactatttcaggcttagcagttgcactgaagcaggctatgacaccagaattcaagaattaccaaaagcaagtacttagcaactgctcagcatttgcacagagtttgttagaaaaaggctacgaacttgtatctggaggaactccgctgacaaccatttagtgttggtgaacttaagaaacaagggcattgatggttctagggttgagaaggtactggaagcagttcatatagctgccaataaaaataccgttccaggggatgtgtctgctatggttcctggaggcattcgaatgggaacccctgctctcacatctaggggatttgttgaggaagattttgaaaaagtagctgaatactttgatgcggctgtcaagttagccttgcagattaaggaaaataccaatggtacaaagttgaaagattttgtggcagctatgcaatcagatgaacaaattcaatctaagattgctaatctctgtcatgaagttgaggattatgctaagaagtttcccactattggttttaacatagaaacaatgaagtatggtaagtgaaaggcgacagatggaacttcttctggagtattatttggaagcttttggaattaataacaacacgttgctcaatggatagtaccggagtcttggatgaaaatgagaatgatattatcaatggtttaaatgaaagagaaaagggagaaatttcccttcagcttttcaaatatattattgatttcatggtgaaaattccttgtgatcgtactgctgatgtagcaaaaaggaggtcgagcatgtggattttgctatttggtgaatttgtactagtatttgaaataaattaccttaattcctcctcaatttcc

SEQ ID NO: 12645 - DNA, 624 bp, Glycine max
cattaagctagctctgagttatgccctgtctgttctaatcttaacatcttttcgaagcctaggtgaaactttatgttgggccacctagagatttccagtccagcaaactttatgctcttgagacggcttgggtgtgagaatgatctacattggttgggtatatagtcaaagtaccccatataatgacttcagctatactcttcacttgagctcgctttgagggttgagttaggctcattgtgttttcatttgtaaccatttcaaagttgggtaacctgataaaattctttactctctgaatccatcttacaggtgttgcatgactatgaagacacaatataccaggctgtttttcctggacttcatagtggtccacacaatcacactatttcaggcttagcagttgcactgaagcaggctatgacaccagaattcaagaattaccaaaagcaagtacttagcaactgctcagcatttgcacagatttgttagaaaaaggctacgaacttgtatctggtggaactgacaaccatttagtgttggtgaacttaagaaacaagggttgagaaggtactggaagcagttcatatagctgccaataaaaataccgttccaggggatgtg

SEQ ID NO: 12646 - DNA, 540 bp, Glycine max
cccacgcgtccgcccacgcgtccgcccacgcgtccgggcgcacagatgttgagagacttgggtgtacgatctatgaagctgatgacaaacaatccagcaaaatatattgggctcaaaggttatggtttgacagtttcgggtaggatcccattgttaactcttatcacttcggagaacaagagatgtttaaagaccaaacgtgtgaaaatgggtcacatatacgccatggaatttaacggccaattgagcactcatgacagtggcaggcaggctctaccaaaaatgttcatcttgattcttgaaacatagtgccatgacaagggcattgctatttcaggggcattttttctttggtcgccttttagaggttcatcctttctggactcgggaagtcattggccccagtttcttcattctttttgggacatttactcatgtatcccggttccccaaaaatgtccataatagaaaagttatattttgtagctacactgtgtattataaacaaattccctttgtcccttgtcacagttaatggtt

SEQ ID NO: 12647 - DNA, 792 bp, Glycine max
gaatagtttagtgtctaaggtggagaatgaggaggaggaggggaatgtttctctcttggatttgccctgttttgcctttgaattcattctttaacccctttcaccaacttaattattccaggtggcaacagggtgcacattttttaaggatagatgtaagaatgatcatttatgggagaaacacatggagaggaaatggggtaaggtgtttggtgatgctgctttataggcaatggaaatggcttgtaccttccaagaacagagaaaaaatctcctccaaccagcacaatcagaaaggaatatttgctttccttcgtggtggttttctccccttcatatggatcaaagcaaaatcagaaaagggcacagagtcaagtagctcattaccagaagattcgagagcagctttatatctttctcttgaaagtggcaaattttggttccctgctcaagtctataaccgtgagaatggtcatgctgggttcatgctctcatgttatgatgcccaactatgctatgattctcgatccgacacttttctggcaaggtcctcgcctcatgggagatggccaactgaggaaaacatacaatgggaccggctaagagtgccaccaattgctacttctccacatgctcttcacatctctgactgtttggatgacttgagacctggagatcacattgagattcagtggagaagaaacaaagaatttccttatggttggtggtatggtgtcattggtcatttggaacaatgtcaaggacatgggaaccattgccattgtcactata

SEQ ID NO: 12648 - DNA, 875 bp, Glycine max
ggttgaggaaattttttggaaggaaaacaaaaattcgatccgaatgtattagatctcaaatcatttctactgaaaactacagccatcgatcgaattccctgcaattaacataagcataaccccttttccaacctttctcctcttcagatcggatcagatcagaatcccaccgccatggatttcatgaaggtcttcgatcaaaccgttcgagaaataaagagagaggtgaatctgaaggtgctcaaggttccggaaatcgaacagaaggtgctggatgcaactgataatgaaccttggggtcctcatggtactgtgctggcagagatttcacaggctaccaaaaaatttactgaatgccaaatgatcatgaatgtcctttggacaagactgggtgaaactggaaaagattggcgttatgtatacaaggcattagctgttatagaatatttggtagcacatggatctgaacgtgcggttgatgacattatagaacatacttttcagatatctgcactttctagtgttgaatatgtcgaacctagtgtaaggatgtgggactcaatgtaaggaagaaggctgaaaacattgtgtcgcttttgaatgataaagataagatacatgaagtcagaaataaagctgctgcaaaccgtgacaagtacattggagtttcttctagtggaatcacatacaagtctgggtcagcctcctcttatggtagtggcagcagctttcaaagcagtggtaaatatggaggctttggatctagagatggtgacaggtttaatgatagctatagagacaaaggatcctatgaagaagaaaaagattaccaaggaaaatcacaccatgccaccgctagtgacaatcaagagaac

SEQ ID NO: 12649 - DNA, 490 bp, Glycine max
actcgagccgaatcggctcgagcggctcgagcggctcgagaaactacagccatcgaattccctgcaattaacataagcataacccctttccaacctttctcctcttcagatcggatcagatcagatccaccgccatggatttcatgaaggtcttcgatcaaaccgttcgagaaataaagagagaggtgaatctgaaggtgctcaagattccggaaatcgaacagaaggtgctggatgctactgataatgaaccttggggtcctcatggtactgtgctggcagacatttcacaggctaccaaaaaatttactggatgtcaaatagtcatgaatgtcctttggacaagactgggtgaaactggaaaagattggcgctatgtatacaaggtaatgctttccaaagaaccatgttatttcttaagatgtttagatacatagagaagaatttttggtggcattttctatgttgatagatacacaacttacttttc

SEQ ID NO: 12650 - DNA, 420 bp, Glycine max
gttctttctctctctttctctttggttttctgaaaaaaaaaaaaaacaaaaattggtgggatttgagggtatttgaggtggtggattgagttgggtacattgttggggttggaagaatctatcaccatgaatatgatgcgaaggttgaaaagcattgcttctgggaggacttccgtttcatcagatcctggaggggattgtaccacaaaaagagtaaagtttgatcaagaaaccgaaggaaaggtcaatgaggaaacatatcctaatgagagatgcggaaaagatcaggagcagtatgtagatgcattaaaagaaagtgttaattctaatgttccttcaatggctagaactgagaagtcaggttttgatcagcttccaaaagaattaaatgaaatgaagattggagacgacaaagggcaa

SEQ ID NO: 12651 - DNA, 459 bp, Glycine max
cccacgcgtccgcccacgcgtccgcaactactgtgtcttctgcttgtcatttggtgcccggattgcagtcacatttgtggtgtgggttgaagacaacaaagggtgggaatggggctttggaatctctactataaccatatttgtatctatcccagtgttcttggcaggctcaactacttataggagcaagatcccttctagaagtccacttacaaccattttgaaggtactagttgctgcttcacttaacagctgcttcaacagtagaaattctagcagtgcagtggtgaacatgacttcaagcccttccaatctaaactcaagcagaaaacaagtagggaaagaagcttccaatattgcaaacaaggaaccagaagccccaataacaaacacactcaaattcctcaataaagcagttgagaacaaccctatctattcatcaataaaatgcacagtgga

SEQ ID NO: 12652 - DNA, 457 bp, Glycine max
tgagaggaaagggagggcctcagaactccaaatccctactcccactaaagggagcaaatagtggagaacaaacacatgggggagttcagttcacgatagcaagtttcattgaataaaccatgacggaacctcagaatccttcaccattgacacattctccagcgttagaaatcacacctcaaccactgctacctcccaaaaggaaacgaagcctccctggaatgccagatccagatgctgaagtggttgctttgtcaccgaagacgctgttggcgacgaaccgtttcgtgtgcgagaatctgcaacaaaggcttccagcgcgaccagaacctacagcttcaccggcgtggccacaacttgccgtggaagctgacgcagcgagggagtacacagccgcggaagaaagcttacgtgtgtcccgaaccttgctgcgttcaccacaaccccgcaagggcgc

SEQ ID NO: 12653 - DNA, 504 bp, Glycine max
cccacgcgtccgcccacgcgtccgcccacgcgtccgggcaaaatccatgtgcccacatgggtgattgagagagagtaagagagagagagagagaaagagaaaacgtattatatttatgacctcaagacatcaccacaagaaacagcagcagcaactgcagtggcagcaaaaaacatagtaatagtaatagtagaggaagagagacacaagagacccaccaaggaaattttgctcaaaaccagaacttgctaccaaagttaacatcttttgatgattccaagtgactttgagcttcaaagtccatagtggggtgtggtgaattttttgaattttgaagagaagaagtgtgtgtgtgtgtgtgtgtgtgagagagagagagagagagagatgaagaagagtgagagtggggggtatgtgagagcggatcagatagatctgaaaagcttggatgaacagcttcagaggcatctgaatagaacatggactatggagaagaacaaggag

SEQ ID NO: 12654 - DNA, 688 bp, Glycine max
gacagagctactaatgaatccacaggccatggaaaaagcacaaaaggaagtacgaagcatcttgggagaaagacgagttgtcgcagagagtgatctgcatcaattggagtacatgagagctgttatcaaagagatatttcggttgcatcctcaagttccagtattagtcccaagagaatccatggaagatgttgtgatagaggggtacagaattccagctaaaacaagattttttgtcaatgcttgggcaataggtagggacccagaaagttgggaggatcctaatgcatttaagccagagaggtttttagggagtgatattgactacagagggcaggattttgagctaataccatttggagcaggtagaagaggttgtccagctattacttttgccactgcagttgttgagcttgctctagctcaactcctctacattttcgtttgggagcttcctcctggtattactgctaaagacttggacctcactgaagtctttggcatctcaatgcacaggagagaacatcttcatgtggttgctaagccatactttccatgaagactcatgatacagcaagcaagcatagaaaggcattgaattggactcaaatagttagtgtatgtttggattacagttgaaaaagtggagtttgtaaacttaagtttagttaaaaattaggtttaatgt

SEQ ID NO: 12655 - DNA, 604 bp, Glycine max
  unsure (1)..(604): unsure at all n locations
acgggtttggattatgccatgatgactggaggagatgttgcacctctgggcgcacaggctgttaccaaaattcatgatatatttgattggtccaagaaatcaagaaaaggcctattgctttttattgatgaggcagatgctttcctttgcgagtaagttctggagcgtttaaaatacattttgaagactgcttctataaaatataactatttaaattactactacgtagcagggtagccaaaattttgtttttgtagtttatctaacatgtgagaaatgtaactgttgtattacaagttaagacagtctacgtataacatctttatacttttacacaaatcctaacggtttatatttgatttatattgtgtttttaataaattttgatatttagaatcacgaagtgtctttaacttcacatattcggagattaaatacatagatgaatcaacaacactatggattttgcatctattagttttaccttattgtctgtaacttgaaaagactgcaaattttaccgtgtatattgcagaaacgattggtgtgataagttggatattaatgatatctcttttatagcaanttttcagtgatcattttt

SEQ ID NO: 12656 - DNA, 368 bp, Glycine max
agcggacgcgtgggcggacgcgtgggcggacgcgtgggcggacgcgtgggcggacgcgtgggcgcacgcgggagaatatagtgggtgcaagtggaagcccttttgaaaatgcagatcttggaaatggagaagttggccatgtaaatcaagccaacaacatgtacctgtttccagggtaggcatgcctttgtggcttatattttttcacggatcatgccactcagtggaaacattggcagaatgttcgaccgcaacatttcatttcaggattggtttggggacactcttatcacgtgctcgtcatataacagatggaatgttgcgagcagcagccgaatgcgcagtaatgcaggtgtggcaaaatggga

SEQ ID NO: 12657 - DNA, 663 bp, Glycine max
ggatctctccgctctctcatcataccgcactctcgggaagttacttcctcttccctctcactctcaatggggtctccatttcctcgcccacgctcaccgcctccaccagatgaagaaaaggccatgtggggtatatgcatccctctccgagagtggagagtattattcccaccgaccgccaactcccctactagacaccgtcaactatcctattcatatgaagaatctctctgccaaggagctgaaacaactcgcggatgaactgcgttctgatgttattttcagtgtttctagaactgggggccatttgggctcaagccttggtgtggtggaactcactgttgcacttcactatgtcttcaatgcccctcaggacaagatactgtgggacgttggtcaccagtcttacccgcataagatactcaccggtagaagggaccagatgcataccatgaggcagacaaatggcttatctggcttcaccaaacgttctgagagtgaatttgattgttttggcactggtcacagctccaccaccatttccgcaggacttggaatggctgttgggagagatctgaagggaagaaagaataacgtggttgctgttataggtgatggtgccatgacagcaggccaagcttatgaagccatgaacaatgctgg

SEQ ID NO: 12658 - DNA, 812 bp, Glycine max
  unsure (1)..(812): unsure at all n locations
gcgttcttcaatttattttctttctgcttctcatggatctctcctcactctcttcataccgcactgtcggagtaacaccttctgatcctcgaaaatcacttcctcaatggggtcttcatttcctctcctacactcacaggctcaaccagattaagaaaaggtccaagtggggtatatgcatcactatccgagagagagagaggagagtattattcccagagaccgccaactccgctactagacaccgtcaactatcctattcatatgaaaaatctctctaccaatatgaactgcgttctgatgttattttcagtgtttctagaactgggggccatttgggctcaagccttggtgtggtggaactcactgttgcacttcactatgtcttcaatgcccctcaggacaagatactgtgggacgttggtcaccaggttggttttcaacttccttgctgctttttgctttacttgttctaaactaaattggacaaccttgtatgaatttgcagtcttacccgcataagatactcaccggtagaagggaccagatgcataccatgaggcagacaaatggcttatctggcttcaccaaacgttctgagagtgaatttgattgttttggcactgggcacagctccaccaccatttcggcaggacttggaatggctgttgggagggatctgaagggaagaaagaataacgtggttgctgttataggcgatggtgccatgacagcagggcaagcttatgaagccatgaacaatgctggatatctngattctgacatgatgtgtattctaaatgacaacaagc

SEQ ID NO: 12659 - DNA, 662 bp, Glycine max
ttcacgcgtccgatttattttctttctgcttctcatggatctctcctcactctcttcataccgcactgtcggagtaacaccttctgatcctcgaaaatcacttcctcaatggggtcttcatttcctctcctacactcacaggctcaaccaggttactgccatttatgaatgcaatgcctcctcttttataactacctttgtttattgctgaattagtcaatggggctttgcatatttagatgaagaaaaggccatgtgggggatatgcatccctctccgagagtgagagaggagagtattattcccaccgaccgccaactcccctactagacaccgtcaactatcctattcatatgaagaatctctctgccaaggagctgaaacaactcgcggatgaactgcgttctgatgttattttcagtgtttctagaactgggggccatttgggctcaagccttggtgtggtggaactcactgttgcacttcactatgtcttcaatgcccctcaggacaagatactgtgggacgttggtcaccagtcttacccgcataagatactcaccggtagaagggaccagatgcataccatgaggcagacaaatggcttatctggcttaaccaaacgttctgagagtgaaattgattgttttggcactggtcac

SEQ ID NO: 12660 - DNA, 473 bp, Glycine max
  unsure (1)..(473): unsure at all n locations
attccattaaaagccataccatggccgtatctccaattttgttgttgttggctatcttctctctcatttatggcaatggtgttcttcccattgaagctacccaccatgtttacagaaatcttcagactctatcttctgattcctctgatcaaccttatagaaccgcttaccatttccaacctcccaaaaattggataaatgaccctaatggaccaatgaggtacaaaggactttatcatctcttctaccaatacaatccaaaaggtgctgtatggggtaatattgtgtgggcccactcagtatcaaatgatcttgtgaattggactcctctagatcatgccatctacccttctcaaccgtctgatatcaacggttgttggtcaggctcagccacaatacttcctgggggcaaaccagccattntatacacaggaattgaccctaataatcaccaagttcaaaacttagcccta

SEQ ID NO: 12661 - DNA, 3072 bp, Glycine max
  unsure (1)..(3072): unsure at all n locations
gacgtctctttaactcatgctttttcccacttgcaaactccaaattcactctgacagtttttgcagctaattaagaagaacttaacagacatataaacatagtgatcgttatgtctacgcaaccaaagcttggtcggattcccagtatcagagaccgagttgaagacactctctctgctcaccgtaacgaactcatttctctcctctccaggtatgtggctcaggggagagggattttgcaaccccataatttgattgatgaacttgacaacatccctggcgatgatcaagcaatagtggatcttaaaaatggtccctttggtgaaatcgtcaagtctgcaaaggaagccatagttttgcctccttttgtggcaatagcagttcgtccaagacctggtgtttgggaatatgtccgtgttaatgtctctgagctcagcgtggagcaattaagtgtttctgaatatctcagcttcaaggaagaacttgtagatggaaagattaatgacaattttgtattggagcttgattttgagccatttaatgccacatttcctcgtccaactcgctcagcatccattggcaatggtgtccaatttctcaatcgccacctttcatctattatgtttcgcaacaaggattccttgcagcccttgcttgatttcctccgagctcacaaatacaagggccatgctctgatgttaaatgatagaatacaaaccatttccaaacttcagtctgcattggccaaggctgaggattatctctctaagcttgcacatgatacactctattcagagtttgaatatgtattgcaaggaatgggttttgagagaggttggggtgatactgctgaacgggtattggaaatgatgcatctgctattggatattcttcaggctcctgatccttctacactagagacttttcttgggagagtaccaatggtattcaatgttgctatattatctcctcatggctactttggacaagccaatgtcttgggtttgcctgacactggtgggcaggttgtttatatactagatcaagtgcgtgcccttgaaaatgagatgctccttcggatcaagaaacagggacttgatttcactccaagaattctaatagttaccaggttaatacctgatgcaaaggggacaacatgcaaccagcggctagaaagagtcagtggtactgaccatactcatattttgcgagttccattcagatcagagtcaggaactctccgtaaatggatttcaaggtttgatgtgtggccttatctagagacttatgcagaggatgttgccagtgaaattgctgctgagttacaagggtatcctgatttcatcattggaaactacagtgatgggaatcttgttgcatctttattggcttataaaatgggagttacacagtgcacaatcgcgcatgcacttgagaagacaaaatatccagattcagatttatattggaagaaatttgaggataaataccacttttcatgccaatttactgctgacctaatagccatgaataatgctgattttatcatcaccagtacataccaggagattgcaggaacgaaaaatactgttggccagtatgagagccacgctggttttactcttcctgggctctatagggttgtccatggcattgatgtttttgatcccaagttcaatattgtctctcctggagctgatatgtcaatatatttcccctactctgaaaagcagaacagacttacagccctgcatggttcaattgaacagctattatttgctcctgagcagactgatgaatacattggttcattgaaagacaagtcaaagcccataattttctccatggcaaggctagacagagtgaaaaacataactggattggtagaatgctttggtaagaacagcaaattgagggaactggtcaaccttgttgtagtagctggttatattgatgtaaagaagtccagtgacagagaagaaattgcagaaattgagaagatgcatgagctcatgaaaaagtataacttagttggtgattttcgttggattgctgcccaaacaaatagggcacgtaatggggagctgtatcgctacatagcagacacacaaggtgctttcgttcagcctgctttctatgaagcttttggacttacagttgtggaggccatgaattgtggactccccacttttgctacttgccatggtggtccggctgagatcattgagcatggtatatcaggattccacattgatccttatcaccctgatcaagcttcacagctattagttgaatttttccaaaagagcaaggaggacccaagccattggaagaaaatatctgatggtggtcttcaaagaatttatgaaaggtacacgtggaagatttattccgaaaggcttatgactttggcgggagtttatagtttctggaaatacgtttccaaattagagaggcgtgaaactcgacgatatcttgagatgttctatatcctcaagttccgtgatttggcaaattctgttccgctagctaaggatgatgcaagttaactagctatataatttcaccaaaggcttgacagcagacataataagagtcatttatgtaaatataatagtctgcttctcgtgttttgaaatctagtgaggcgacctagaggagtttcatggaagacttgtcttgtctatgttaacttcgattatgtaagagatggcgagcactggttgttgaatttggatgtctcttgttttcgtttgattagtagtcatcaatgatatagacctggaaattacctgtgactgaggattgttatccttactgatgggtaagaataaagcattatgaatcaatggcctaatggtccgtattgtggcactgtataatgttaatgtatatgatgagacggtctagccaacccactgttgggttgggtgtaacacttgctaaatgaccttgaatttttaagtttgaaaataacacttctatcatgaattaatgtcataaaatagaagaagtcataacctacaaatatttgatttcttcccaaaaaaagttnctncaacattatttaat

SEQ ID NO: 12662 - DNA, 536 bp, Glycine max
tttacgcgtccgattggaaactacagtgatgggaatcttgttgcatctttattggcttataaaatgggagttacacagtgcacaatcgcgcatgcacttgagaagacaaaatatccagattcagatttatattggaagaaatttgaggataaataccacttttcatgccaatttactgctgacctaatagccatgaataatgctgattttatcatcaccagtacataccaggagattgcaggaacgcatccatgactgtactgagagacttataccgtgtttggtgtaacataacttgttgtctcaagattcctaaattatgcgtggtgacagcaagtgtcatggactcatggcttaccaaagaccactcagttatatgatgctatacctagtcatttcttttgtctcttgatatttctctgaaaggcatatgagctagttactattttgtttaagcatcctctcttggcatctcacatatctatccctggtgctaacctacattttccttgtaatctatatatacttgtttttca

SEQ ID NO: 12663 - DNA, 1716 bp, Glycine max
ggccaagtctgatgctgccattttcgatattgatgctcaaatggaagaagcttcgggcgaagggggggggcaagacctatttggataaggtcgacctaaccgtatttctctacgataatttagctcccttacctcaagatataaaacaaactattaagcttttggacaagcttgttgctttgaagtttaatggttctcaaggaagaaatatgtgtattgacggtcccaaatctgcaattgatatttgtgatggactgacatatctggatttgatcattaaccagattgagaccctcaattccaagtatggaagcagggttccattgcttcttttcaataaagatgacattcatgatagttctctaaaggttttggagaagtattctaaatcaagtgttgaagtgcacacttttaaacagggtgaagatcgagagttgaaatcattgggtgaatattatagcaaggaggaagtgcatccatttgatgatgttgatgtgttccgtttactaatgactggtggaacccttgattcattattatcacagggtaaggagtatatcctagtgttgaagtcggacaatgtggcaacagtccttgatccaaacatactaaatcatttgatgataaatgatattgaatattgcatggaggtgacaccaagcaattcgtttaatttaatgttacccacaacgaaatttaagcttcgggagattggtggagaccaagataaacacttgaaggacaatttcaaactcatcgatacaacaaacatgtgggtgagtttaagagccatcaagaggtttgttgacactgttgaagtaaggcagaagaagccctcattttcaaaggacacagcagctggaccagcaataaagttctttgataatgtatttggtgtctccgtgcccgaatctcgctttcttcccttggatgcaacatcagatctattacttcttcagtcagatctatacacttgtagagaaggtgttttaactcgaaatccagctagaactaaccctttaaatcctgtgatagacttgggacctgaatttgaaaagtttggtgactttcaaagtcgcttcagatccattccaagcatcattgagttggacagtttgatggtgagaggtgatgtgtggtttggggctaatattactttgaaggggcaagtgactattgctgcaaaacctggcttgaaattggaaattcctgatggggtgacgattgagaataaggagatcaacgaccctgcagatatctaaggatgaatgttgtcgaagttgctgagatttggttccagtgaatacatgactgctgaactttgatttgcagtgctatacaatttagtttgtcacattagcagccagccatcttttagcttttctatttgctgggaactaaaaggttgcagaagcaaatagttccttacacatttttttttcaagcggcatgatagtggtgaaataattgtctgctcatctatttattcatcctgtaactcttagggcaaggcttgatatagtcacagctgagagcctgagaagctgagacaaggaataggaatagtttcagttttgctggtctttttgccttagatactattagaatcacaccaattgtttactgtaccaatgagttggagcatacattacagaaaagacatttttaaggcatatttgtcattgacttatataagctacccccaaaatttactgc

SEQ ID NO: 12664 - DNA, 1000 bp, Glycine max
gtgcacacttttaaacagggtgaagatcgagagttgaaatcattgggtgaatattatagcaaggaggaagtgcatccatttgatgatgttgatgtgttccgtttactaatgactggtggaacccttgattcattattatcacagggtaaggagtatatcctagtgttgaagtcggacaatgtggcaacagtccttgatccaaacatactaaatcatttgatgataaatgatattgaatattgcatggaggtgacaccaagcaattcgtttaatttaatgttacccacaacgaaatttaagcttcgggagattggtggagaccaagataaacacttgaaggacaatttcaaactcatcgatacaacaaacatgtgggtgagtttaagagccatcaagaggtttgttgacactgttgaagtaaggcagaagaagccctcattttcaaaggtatcattccctagctgtcattagttcattactctattgatagcttatgtaagaatgaattgaatggcttactgccgccaagaaaatgactatctcttctacaggacacagcagctggaccagcaataaagttctttgataatgtatttggtgtctccgtgcccgaatctcgctttcttcccttggatgcaacatcagatctattacttcttcagtcagatctatacacttgtagagaaggtgttttaactcgaaatccagctagaactaaccctttaaatcctgtgatagacttgggacctgaatttgaaaagtttggtgactttcaaagtcgcttcagatccattccaagcatcattgagttggacagtttgatggtgagaggtgatgtgtggtttggggctaatattactttgaaggggcaagtgactattgctgcaaaacctggcttgaaattggaaattcctgatggggtgacgattgagaataaggagatcaacgaccctgcagatatctaaggatgaatgttgtcgaagttgctagattggttcca

SEQ ID NO: 12665 - DNA, 525 bp, Glycine max
aagttaagctactttaggttgacaaagttcaagacaaacttgttagatgggaatcttccttcattgtcagaaatatcacttctgataccccacaggatggtgtactccaaggaaatgatgatcagaagagttatggctcacggttcaataatgcacaattctgattggaatgttaatttgatgaagcaaatatctatcagtggactatgtaacaacttaggtggagcaagaattatgcaggggtccatatcaagaatggtattgaaggaaataatatatgaaaagctgatgcaggatactatgtgatagttcatttatcaagttttggaaatatttgctgacttggtctggtgcaatgagaagaacaatacacgtgccgaaggagatcaacgaccctgaagatatctgaggatgaatgttctgtcgaagttgctgagatttggttccagtgaatacatgactgctgaactttgatttgcagtgctatacaatttagtttgtcacattagcatccagccatctttt

SEQ ID NO: 12666 - DNA, 698 bp, Glycine max
ctcgagcgttcgtcttcacccttacaacgcaacaacataacgttgctaattgcttgcacttcctcttatggttgcttcctttgtttctcattagctgttttggtttttgtcttagttctacacctttcctcatttccgcagtagcaacctgcgaaccaatctctctgagaaaaaaaaaatggcgtcgaacgggaatggcagcgttgcgaacgggaacgggaccgctaggaacggactggcgaagattcagacgcacaagaagcatgacgggatttgtcacgacgacagcggtccaacggtgaaggctcagaccattgacgagcttcactcgctgcagaagaagaaatccgcacccaccacccccgttacggggtttcaggctcctttcgccaccctcaccgaagaagaacgtcataagcaacaactccaatccatcagtgcatctctggcatcactgaccagagaaactggaccgaaactggtgaagggagacccagctaggaagtcagatacccagaaggttactcacgtgcaccaccatcatgtcagcactcccaccattgctgtcagcgacagtgctttgaaatttacccatgtcctctacaatctctccccagctgaactttatgaacaagcgattaagtatgagaaaggatcattcatcacttcaaccggggcattggcaacactttctgggg

SEQ ID NO: 12667 - DNA, 804 bp, Glycine max
tggccagaacatccaccacggaagtgatatctagtggaattaacggaacaagagatggagcacttcaattaatgcatgctgaacttcaagttctttcgcctttggttccggttcgtgaggtgaatttcctacggttttgcaagcagcacgcagaagggttgtgggctgtggtggatgtgtccatagatagcatcagagaaagttcaggagcacccacttttgtgaacggtaggaggcttccttctggttgcgtggtgcaagatatgcccaatggttattccaaggtgacatgggtggagcatgcagaatacgaagaaagccaagttcaccagctctataggcctttgttgagctcaggcatggggtttggtgcccaacgttgggtggctacccttcaacgccaatgcgagtgcctagccattctaatgtcctcagcagctccctctcgagaccattcagcaataagctcaggtggaaggagaagcatgttgaagctggcacagcgcatgacgaacaacttctgtgcgggtgtgtgtgcctccacagtgcacaagtggaacaagctgaacgcgggaaacgtgggggaggacgtgagggtgatgacgaggaagagcgtggatgaccccggtgaaccgccggggatcgtcctcagtgccgccacctcggtgtggcttcccgtctcgtcgcagaggctctttgacttcctccgcgacgagcggctccaaagcgagtgggatatcctctccaacggtggacccatgcatgagatggctcacattgcaaagggacaagaccatgctaact

SEQ ID NO: 12668 - DNA, 806 bp, Glycine max
tggacctactgaagctgataagccaatcataatagagcttgctgttgcagccatggaggagctcattggaatggcgcaaatgggtgagcctctttggttgactaccctggatggcaccactggctcaacgatgatgagtacatcaggtcttttcctcgagggattggtcctagacccgttggtttcaagtgtgaagcttcgagggaaactgctgttgttatcatgaaccatgttaaccttgttgagatcctcatggacgtgaatcaatggtccacggtgttctctggcattgtctcaagagcaatgactttggaagtgctatcaacaggggtggcggggaattacaacggtgcattgcaagtgatgacagcagaagtgcaagtaccttcacctctggtgccaactcgagagagctattttgtaaggtattgtaagcagcacggtgacggaacttgggcagtagtggacgtgtccttggataatttgcgtcctagtccttcagccagatgtagaagaaggccctcaggttgcttaattcaagaaatgcccaatggctactctaaggtcatatgggttgagcacgtagaagtggatgacagaggtgtccataatctatacaagcagcttgttagctcggggcatgcatttggtgcaaaacgttggattgcaatcttggatcgacaatgtgaaaggcttgctagtgccatggcaacaaacattcccacagtagatgttggagtaataacaaacccagatgggaggaagagcatgttgaaactggctgagagaatggtcataagcttttt

SEQ ID NO: 12669 - DNA, 480 bp, Glycine max
cccacgcgtccgcccacgcgtccggggaggagaaaagtggaaagaagacaaagatgaccgcgagtgcttcgagccgggctgtttgtcaggtggaagattgtagggctgatcttagtaatgcgaaggattaccatcgccgccacaaagtttgtgatatgcattctaaggctacccaggcactagttggaaatgttatgcagagattctgtcaacagtgtagcaggtttcatgttcttcaagaatttgatgaagggaagagaagctgtcgtaggcgtctggcaggccacaataaaaggaggaggaaaacacttcctgatgcaactgtagttaatggaggctctctgaatgaagaaaagggcagtagctatctgttaatgagtctgctaaggatactgtccaatatgcattcaaatggctcggataatatgaggaaccaggatgttctatcacatctgctgaggaacctagcaagtctgactg

SEQ ID NO: 12670 - DNA, 1069 bp, Glycine max
gtcttgtcttgtgtttgttgcagttgcggttgcggttgcgattgcgatggtgaaatcgaacgagaacggttctggttccgtttcggtgcctcctttcctgaaaaaatgttacgatatggtggaagaccgcaacactgattctatcatccgttggagcgatggcggtgacagctttgtcatctccgacatcactcaattctccgtcacgctccttcccacctatttcaaacacaacaatttctccagtttcatcagacaactcaatatctatggtttcaggaaaattgatacggattcctgggaatttgccaatgaaaactttgttaggggtcaaaagcatttgttgaagaatatacatagaaggaaacatccacacagtgcagatcagcaaaaggcattgccacagcaagacaattgtgatgaaccatcccaagaagcaccaaatcatggcctttggaaagaagttgagaatctaaaacttgataaaaattcgctcacacaggaattggtcaaacttaggcaacatcaggaatctgctgagagtaagttgctgctcctgagtgatcgccttcaaggaatggaaaagcatcagcagcagatgttgtcattcttagtcatggttgtgcaaagccctgggttcatggttcagcttcttcatcctaaggaaaataattggcgtttggctgaatcatggaatagattggatcaagataaacaagatgacaagccagttgcttctgatgggatgataataaagtataaaccacctgtaggtgaaaaactaaagcccgtagttcctctatctcctggtttcgaaaatcaaccagaacctgagctttctgctgatgggctgaaagacttgtgcatcagttctgaattcttgaaagtacttctggatgaaaaattgtctccgttagaaaatcattctccatttctcctaccagatatacctgatgatggttcatgggaacagctttttcttggcagtcctttcctgggaaacattcaagattctaagaatgaaagtgaggggcacaccaacagtggaaaggagatggaaccaacaata

SEQ ID NO: 12671 - DNA, 448 bp, Glycine max
gtggaggagaacaaggctacaattttggagctacgttatcgaacaaatgtgggtgagttgcttgggcgtctgcgcaaagaggctgccatggggtgatgcaaaagttgccaagcaacttgttgatgcaaaactatatgaactacttggtgatcggacagcagctgatgatgaaaagccttctagaaagaagaaggagaaacctgcaaaagtagaggataaggcagcacctgttgctactcctgaaaagtcacctgaagaagaccttaatccatttttaatattccctaatccagaggaaaatttcaaggtgcatactgaagtgccttttagtgatggtagtattttgagatgttgcaatacaagggatcttcttgacaaacacttaaaagcaacaggtggaaaagtcttgacccgctttccacccgaacctaatggatatttgcatatt

SEQ ID NO: 12672 - DNA, 413 bp, Glycine max
cgtcagcggacgcatgggaaaacaggcttgtaaccgctttcatgatggtgtggtgtcaatggttgttgataagccagtgacaaaataattttgggcatctggggcgaaattctactatcatttgtcgaaattaaattgcatcgtctttcttgcaaatttcttcctgatatgctcactatcaaatcaaatgagtttgctttaattcaataatgctgtcatttcctgcaatattctctctaaatcaagttaatctgtttatgtagataggatccactgagtgggttgaacaaaaccttattaatctaagttccaaagctgtagcataccttaaggtggactgtcctgtgcaacgtcctgatttccttgttggttcaactcctcagctagacaatcttattcttgaggtcacaaac

SEQ ID NO: 12673 - DNA, 1258 bp, Glycine max
ggtcgaggacgcgtccgcacacgaatccgcttacatctagctagcaagctgagctctctgttcctctcatcttccctccgcaaggcatgggttcgtcctctagtcgacttgggtctcgcccttcttcgtcttctagtcacagtcacagggtcaaccgcttcagattatcgtctcttctatgtggcacctccacctctcgctccgttcatcagatggaagaactttcagctgaacttcgggttgattcagcaagggattttgatggtgaaattcagaaagacactgaggaatcgtctttatcatatacagaagctagaattagctccagtcgccctgctgaaactgcaaccctatctgatatgagaactgagttccatgggaatactagtgttgaaggttcttctagaaacgttgcaacaaatagtcagaggaactgcttgtctgaacatgaggagcttgtccctccttatcaggtaagtgctggtcatactggtcatgaatcatatagtgatagtagcaacacagctagtacttcatttgtagaacagcagtcttcagatccagtctctgtaaatgtttctgctaacaaggatgtagtcaatgatgttaataatccagtggttagtggtgtctctcaagtctctcacgagacaatgcgcccaagaagttcaacccctcaagagcatgggaattttggttctggtgaaatctctgttgagaatcacactagtgcattcatatctatccagaattcttccagccctgttgctcaagtttccaacttagcagcaacctctcaattgccagaagatgaacctcgtcgtgagacaataccttcgggtttaggtattcttgtgtccaatcgggaaagagggccgggaaatgatagtgtgcttcaagttgatgtggtcactatatcttccaacattttgtctggtagcagtgctgatgccaatgataatgatgccagaaggaatggtagaagattattttgggatgctttttcacgacgtagttctagaaggcttggtgattctcctaccattgtcttctctgctgggggtgctgatgattctggatctcaagatcgatggctagttgattttggtggtgatttgtcaaatgatggggttggaggtgcttccggatatacgggtagtagaattcacagattgaatgaacgaagaatgcaacactcaagatctgagatcttgggaaggcttttcgggggctttgatgagattgggtcggggaatta

SEQ ID NO: 12674 - DNA, 1701 bp, Glycine max
gttatccacctcatcgaccataacactagtgaatgaaataatctctataattgacgaaggaaaacaccgcaaccaaagacaaaattaagaatagaaaatcgttcttgacttcttcttaacttccatcgtccatggcggtttcggggttgagaagcggtggtttgcctctcttccaccatcaccaccaccaccaccaccttcgcttccttcaatcccctccttcctttgccaagctcagttttcttggctccaagtcgtcgaagaaggggttcacagtcttctcccgctatgcgcaagcgcgtgaccttttctcctcgcgtagattccaagatagcatggagaagctgccgaacctggtggaggacattgtgcagacatccttaaacactggtccaaggggtgtcctgaggttggctcaaggtgttcaggccttccttggggttggtcaggagtggttaactgatgtctctaagtcagcaaattcatttgctgggttaccgactgaactgcagcttggtttactctcccccttttatttgaggaggttgtttgagcgcatgggtgcaacctatatcaaattgggtcagttcatagcatcagcgccaacgctgtttccacctgagtatgtacaagaattccaaaattgttttgatagagctcctcctgttccttttgaggaaattgaatctatattgcgcaaggaattaggaaagccattagaaagtgtttatgaatacattgacccaacacccattgcttctgcgtctatagcacaggttcatggagcaaggctaaaaggctctagggaggatgtggttataaaggtcttaaaacccggaatagaggacatattagtggcagatcttaattttgtttatgttgttgctaggatattggagttcttgagtcctgaaataagccgaacatcactggttggtattgtcaaagatatacgtgagtctatgcttgaagaagttgacttttacaaggaggctgcaaatattgaggcttttaggagatatttagaaacaatgggacttactgggaatgcaacagctccaaaagtgtatcgatactgcagtacaatgaaagttttaactatgcaaagactatatggagttcctcttactgacctagactccataagttcattagtttctaatccagaaaccagccttataactgctctcaatgtgtggtttggaagtttgcttgcatgtgaatcttttcatgcagatgtacatgcaggaaatctgtggcttctacgtgatggccgtattgggtttcttgacttcggaattgttggtcgtatatcccctaaaacatgggctgctatggaagtcttcttaggatcaattgccattgaagattatgactcaatggcatcttccttaattgaaatgggtgctacaaaccaggatgttgatgctaaggcctttgcaagagatttggaaaaagtattctcatcaattaaggaattggacacttaaatacttgtagcaaccacaactagaacgcagattttaaggctatggcttgagagacaaatttttcctggatcagatgttcgtcgttacatggatgatattagactaatttaaaatgatgtattattgtattgtaatggatataatataaatattaattttttcacacttgttgtagtaaaaaatcattttaaatattgaaaatgattattat

SEQ ID NO: 12675 - DNA, 480 bp, Glycine max
attatgcctcaatgacatcttccttaattgaaatgggtgctacaaatcaggatgttcatgctaaggcatttgtcaaagatttggaaaaaagtattttcatcaattaaggcaagtcttgtaacgcacatatactcacttgtcaatcatgtgtgactacgtaggtgaatgcgtattgttgcttatatttttgcactacttgtgcgtactatgcaacagcaggaattggacacttaaatacttgtagcaaccacaactagaacgcagattttaaggctatggcttgagagacaaatttttcctggatcagatgttcgtcgttacatggatgatattagactaattttaaaatgatgtattattgtattgtaatggatataatataaatattaattttttcacacttgttgtagtaaaaaatcattttaaatattgaaaatgattattatagttttgattccaaaaaaaaaaaaaaaaaacgaa

SEQ ID NO: 12676 - DNA, 802 bp, Glycine max
ggtccacggacgcgtccgaccacgcatctagggttcagttggggtttagggttctctcatcacatcggtgttatcactgtcacggcgtgagctcatctcatcgttgagtataataatggattcggacactgaagaaacaaaacccaagcatcccaagaaggagaagaaaaagaagaacaagaagaaagaggttgaggttgtccaacctcaatctgaacagattgaggttgaggtcgaggttgtccgtgagcaccccaataaaacacctcctgttgttggttatttcccttccggatttgatccggtcaagaatcatggcggcggtccctccaattttcaagtttaccggcacaggagcatgcccaagaggctggagcttgtggttcgccctccccggtcttcagtggaatttgttggaaccagttatgctggcgaggctgcggccagacaccgtgccaagtacgcacttggggttcttgacaaggaagccgggaccctgaaggttgtgcccattgctggtaataagatattcagattggagccgaaggttaaaggcgtgggagcttttgaaaatgagcctgcaaattcaacgttggaagagatgactcagcagcagaagtttgcggagactacttctatatggggaacaaagaaggatatagagaaggctaaaaagaagctagctctcagacaagatgaagatcctgattctcaaaggaatctggatgtgaaaatgaaaagtgttacagtaaacaaaaaggctcttgaaagtacagaatctcatgtttctcgcaatatacca

SEQ ID NO: 12677 - DNA, 1003 bp, Glycine max
gtaggaataatcaatcatggtaaaaaaacacatcaccttctctattttaagtaattcaatggcttacactgcaagtcttgtgttcttagcttccactttccttatcataaactttcctcttctggcaaacgctatcggatgcaatggaccatgcagaaccctcaacgactgcgacggccaactcatttgcatcaacggaaggtgcaacgacgaccgcgacgtcggaacccacatctgcggcggcggaatgccgccaaatccgccaccaagcggcggaagctgccagtcctcgggaaccctaaattgcggcggaaaatcgtatcctcagtaccgttgctctccgccggtaacttcctcgacgccggcgatcctgacgctgaacgacttcagcgaaggcggcgacggaggggacccgtcgcagtgcgacgagaagttccataacaacacggagcgtgtggtggcactctccacggggtggttcaacggcagttcgctgtgtttgaaaatgataaggatcacggcggggaacgggaggaacgtgacggcgaaagtggtggaccagtgcgactctgttaacggctgcgacagggcacacgcgggtcaaccaccgtgccgtaacaacatcgtggatgggtcacaagccgtgtgggatgcgctgggacttgactctgacgtgggagaagcgcgcgttacttggtccatggcttgaatcaaattttaaccactaaacaagaaaaatgaataatgaacaaggatcgacaagcattatatcatatggcttgttttcttcttaatttgcgctttttattttgtttttgttaccaaaaggatgggaaatgaaatgctcacatgcatgaacattccattctttgctttggttttaaataataataaaattatgctgatcactgcagttatgcactcatttgatatattttgctgcctcaacacatatatatgttgaacactatttgctggtcctgctttctatatttctcttctt

SEQ ID NO: 12678 - DNA, 444 bp, Glycine max
gagaagctgaaaatggcgatgaagaagttggcgttggtgaaagtgaaaggcccttgttgtcctctcccctccccaccagcaccacgagacacagccgtctcccccgtccactacgcccgcttcctggacttcctgaaatcccactgggccccacctttcaccccggacaccctcctccactttttgaaatccaagctccatcaccacccttccttctcccacttcgacttccacctcttcacatgggcctcctcctccctcgactctttccgccacacccacctcaccttccactggatggcccgctccctcgcctccacccaccgcctcccccaactccgcaccctcctccacctcatctcctccaacccctgcccctgctccccctccatcttctcctgcccccaaacccaacccatcttctccctctccatccacgccttc

SEQ ID NO: 12679 - DNA, 920 bp, Glycine max
agcccacgcgtccgcccacgcgtccgcggacgcgtgtattgcagtttattctatcatatccttgttcaaataattttcttttcaattacaataccccaatcccagaaacttatgttcatgaccatcctcaaggtcccaataacatttacttgaagacaattttgagttgaccttacagcctagttccacctacaaacacccttgatccttcaaagcctctcatagttccaatactggcaacaataatactcttgggcatctaaactatctccattcttttttccccctttctttgcagtggatttgcgaggttttaaagaaattaaatgcgtttttatgtgctaaagagctaggtaattatagaattcatctcacacatacttctttttactaccttttatcttttagattttatttttgaattatccttgtttaatggagtaatttaattcgttgaggggttgtggaatttgtgtagaagattttcctataagaatttttaattcgctaaagaaatcctcttgttgaattagattattatgagattaactacttcacaaaattccacaactcctcaacaaattaaagttctttgttgaacaaagttaatttaagagtaaaatctagaagatagaggttgtaaagagaagtggtgtgagatgaaatccataattagctagttgtttagcgcatgaaaaaaagtgtttaatttttttaaaatctcacaaaccctgcagggaataaaaaagaaaagaaagatcggagatagatcatatgccctaatagtatatgaagaaatctttcccgtaaaacaaatataaatgatatacatgtgtgatatttttttctgctgaaaaagttcacttcagagagattgttcaaagttcaaacgtgtacgagtggaaaaatgactttcaaaa

SEQ ID NO: 12680 - DNA, 840 bp, Glycine max
  unsure (1)..(840): unsure at all n locations
tactctccaaatccactcccacaataagtcttgtgacaagtatttagagtaatctaaaataaggttgtaagaaagtgtgtaaatgaatccatattagctagttgtttagcgcacaaaaaaagtgtttaatttttttaaaatctcacaaaccctgcaaggaataaaaaagaaaagaaagctcggagatagatcatatgccctaatagtatatgaagaaatctttcccgtaaaacaaatataaatgatatacatgtatacatacaacattgtcacaactcctgaggtgtgatatttttttctgctgaaaaagttcacttcagagagattgttcaaagttcaaacgtgtacgagtggaagaatgacttccaaaacaccatggtcgaactactctttagaaaagtacaatgttaatgtaaacatcttgcttgattctgtgaagtaactatgaaatgccttgcatggcttgttgatatgtcccttagtatgaattttatttagctgtccttctgaaatacaaaataaagtatttaatcaagtgggaattatttaattttttaacccgcgacacatattgaaatatagagagaatttttttannaatcttgcaaattcctgtgaagaagttcnncaagcccaagtgtgaattattttacttcggtannaactgaagaatgtcgaagaagaagcaatttnncattttaataaatcatactaagttagggttcaatcattacatnatttannacctaaataaaatattgaaccctatatattgatagctttgcaatgaatactnaaatgtgttgccatgtacaanntctcattgagtttaaaggtaaa

SEQ ID NO: 12681 - DNA, 1135 bp, Glycine max
  unsure (1)..(1135): unsure at all n locations
cccacgcgtccgcccacgcgttcgtgagtagtatcttgcagtttattctatcatatccttgttcaaataattttcttttcaattacaataccgcaatcccagaaacttatgttcatgaccatcctcaaggtcccaataacatttacttgaagacaattttgagttgaccttacagcctagttccacctatacaaacacccttgatccttcattcttttttgagttgaccttacctagctccaatactggcaacaataatactcttgggcatctgaactatctccattctttttttccccctttctttgcagtggatttgcgaggttttaaagaaattaaatgcgtttttatgtgctaaagagctaggtaattatagaattcatctcacacatacttctttttactaccttttatcttttagattttattcttgaattatcgttgtttaacggagtaatttaattagttgaggggttgtggaatttgtgtagaagattttcctataagaatttttaattcgctaaagaaatcctcttgttgaattagattattatgagattaactacttcacaaaattccacaactcctcaacaaattaaagtactttgttggacagagtttatttaagagtaaaatctagaagatagaggttgtaaagagaagtggtgtgagatgatatccataattagctagttgtttagcgcatggaaaaaagtgtctaatttttttaaaatctcacaagccctgcgaggaataaaatagaagagaaagatcggagatagatcatatgccctgatagtatatgaagaaatctttcccgtagatcatatatcaattatatacatgtatccatacaacattgtcacaactcctgattgaggtgtgatattcttttctggtgaaaaagttcacttcacagagattgttcaaagttcaaacgtgtacgagtggaagaatgacttccaaaacaccatggtcgtatactctttagaaaagtacaatgttaatgtaaacatcttgcttgattctgtgaagtaacaatgaaatgccttgcatggctgttgatatgtcttagtatatataaccacctgtttttgcaattnaatncagcataataaagtgagattataattta

SEQ ID NO: 12682 - DNA, 617 bp, Glycine max
caactcctcaacaaattaaagatctttgttgaacaaagttaatttaagagtaaaatctagaagatagaggttgtaaagagaagtggtgtgaaatgaaatccataattagctagttgtttagcgcatgaaaaaaagtgtttaatttttttaaaatctcacaaaccctgcaaggaataaaaaagaaaagaaagatcggagatagatcatatgccctaatagtatatgaagaaatctttcccgtaaaacaaatataaatgatatacatgtatacatacaacattgtcacaactcctgagttaagcatttttattggtgaaaacatttttattttgtataaattgttgcagtttcgttattagatatattaaatgataaaaggctagtctttattcctaattttggccatttgtttggttttcaggtgtgatatttttttctgctgaaaaagttcacttcagagagattgttcaaagttcaaacgtgtacgagtggaagaatgacttccaaaacaccatggtcgaactactctttagaaaagtacaatgttaatgtaaacatcttgcttgattctgtgaagtaactatgaaatgccttgcatgggactgttgatatgtctt

SEQ ID NO: 12683 - DNA, 436 bp, Glycine max
cgcttactcacaagagcctctttaatttccccatcccctctagattttctctctaaatggttttccaaagatctctcacaatggcctttaatctcgtgcttttgttctgtttggttgcggtgatcaacaatgttgtcattccaactagtgctagacaactcatgatgactgcatcaccaaatgagaaagaagtgatgaatattggcactgaaaatagaggacatgatgaacatgatcatcaagcacaagtactagacgatccaacaagcaagaataacgtggaaaagaaagaagaaagatttgacaagaaccaactcttccctccctttttcccacttccgccatttactcttccatttccacgtgctgcttttccatttccacgttttccacttccagggcttccatggccaataggcccaactggggcttcttt

SEQ ID NO: 12684 - DNA, 416 bp, Glycine max
cggacgcgtgggtagccagtgagaaactcctcattctccttcttcttctgctacccatggctttgtcttcttctgagcctcctccaccttcagttcctgctcccgttcaatctaaccctcctccacacttgatgtacaaaaatcgtttacaagagtttacttcaaagtcaggcattaactttcctgtgtatcagaccattaatgagggacaggatcatagtccaaaatttaggtcgactgtgtgggtcgctgatatgggttacacttcccaatccacattttcccataaaaaagctgctgagcaggaggcagctagacttgctttggaaagtatccttaagaggaccagagatgaacgactctctcttgtcaatcagatttctccattttccagatctatcatgaatgagtaagct

SEQ ID NO: 12685 - DNA, 430 bp, Glycine max
acgcgtccgaaccaatgaagtctcccatgcatgacttgggataagtcgtaaaagcatgtaagatagggtgtataaaaagtctctgttccctttccctccttttagaagactcccaatcaacgggaacgctaaccagaagttttaccttccctttccctcccaaatccctcatccaaacatgcccctggtgttctgacatcttcaatatgaagtttacttctctaattcacaatttatacaacatcagatgttcttggaaaggggtattgtgccattatggttgttgggcaattttaaatggagtgtgtcttattaatttatatatatttgagacaaatatttataaaaaggacggatgtaatttcaaattttatgcattcattgggctgaaattataaaaagtaaattttataataaagatgtctatttg

SEQ ID NO: 12686 - DNA, 464 bp, Glycine max
agcgtccgaccaagcgtccgcccacgcgtccgcaagcagtcaaaatgaagtatgtacatataaaatttgattttcagattaccgagagttcgcagtcagacagagcaatttcaacaatacatgagagtagtaggaggcagtacgacaacaatgaacctaaggagggcctgagcttcagcatgtgcaaaaagttggtacagatgatgcaaggtaatatatggatatcaccgaactcccttggtttggtgcaaggcatgacacttcttctcaagtttcagataggaccatcacttggaaaatccatatttgcacctaaagattattcaagctcacagttcagaggccttaaggttttgttagccgaggatgatggtgtaaacaggaccgtgaccaagaagctacttgagaagcttggttgtcaagtaattgctgtttcatcggggttgagtgcctgagtgctataa

SEQ ID NO: 12687 - DNA, 476 bp, Glycine max
ctcgagccgaatcggctcgagatatcaaatcgaacagccgcaaacccttcctctgaactctgatccgcactggcactgaagccattgctgtaccttccaaaccctagcgtagccacgcgctgaattgcgatacgatgatcgtgcgcacatgaggcggcacggcacggcacgatgatgaacacagccaacggcacgatgatctcaccgtcgtcttcgtcgggaacggcggcgcagtcgccgggactgaagacctatttcaaaacccccgagggaagatataagcttcaatacgagaagactcacccgtccggtcgtcttcattacgcccatggcaaaaccgttactcaggtaaccctggcacatctcaaggacaagcctgcgccttctaccccaaccgcttcgtcatcgtcaagtttcagtgccagcagtggggtacggtcggcggcagctcgattgctgggaggaagcaacggtag

SEQ ID NO: 12688 - DNA, 801 bp, Glycine max
tgcaaatgggggtgagagtgacacagatgatgcatgtgttgttgagacaggctcggtggttgaaactgataagtctggcactaaaacagatgaggaccttcatttgtatggcacaaacacataccatgatgaatcccatcctgtggaagctaggaacctgtcagctgaattaaatgaatcaaaggaaattaattggacagaagtagatcttgaagatgcaaatgtcacttctggtgcttgtcaaatcaatattgattctaaacagggctgtgatggtagtgaagttttcttgtgtggttctaacaagtctggatctgttggtgaacgagcagatataattatgtcagatagcacagaagttgaaaatgataaagcaaataaattgggaggtgcagctacagaattgatttctgctccaaatacaagggaaccatgccagagtaattccattgctgaggatagaatggtggtttctgaggtatcttctggcggtcttggaaatgaattggagaggcatagagtgtcttctaccctatgtgttgatgatagagataataagcatgaagctgattcaggtgttatagttgatatgaaaagctctgtgcatgatttaagcactatgataaattcttcaatctcatctttgggcaattcttgttcaggattgagttttagttctgaaaataagcatgtgccccttggaaatcctcgtgtctctgcattgtctatggacaaccttcatgcacttttgcaaaatacagttgctgttgatgttcaatgtgagaaaactgctagccaaga

SEQ ID NO: 12689 - DNA, 531 bp, Glycine max
cggggtcgaccacgcgtccaaaaaagcactcctcacgagtccgacactgctatcgctctccgctctaattcaccgatccactggataagtatgaagaatagaaacagtcgagctaatcggaaagctcgttcggtgaaaccccccgattcctgtttatcttcttccaattcaaacaagaaatggatggttccctataaattctacgatgtcaagggtcccaattccgagtcaaaccctaatgttgactcgtctagttgggttttgtgcaccgaggttcaattggaaaccattctgttgaaaaacattgaaattatatacaatgacactgtgccaaagcttgttgctttgggctacagtgaggagattgctgtcaaagcgattctgtacaatggacattgttacggtgccaatgatttggcaacaaacgtgctgcacaactccttggcttgtttgacaacggggaccttggacttgtctgagtccagccctgcgttccctgatatgaagaagcttcaggagtactctttgatg

SEQ ID NO: 12690 - DNA, 1904 bp, Glycine max
gtattataataataatattattattattacttgggtatattcattattcatcctaagcaataataaacccggatttaagtgaagtatacctatttgatttgcctcattagatcgggttggctacgaatttattttcaaaaaccttctcttttctcaattgggtttccatctttgatttgatttcattgccatggctccaaaggatcccaagcaagttgctgatgctgcttcttctggtggtgggggtggcttttttgcttctattgcttccagcttgtccaatttcggtagtgccatgtccaaatccgttaatggtttggtgggctacgaggggctggaggttgttaatccagatggaggaactgaagatgctgaagaggaagcaagaaagggacgatggaaacaagaggagcgagatagttactggaaaatgatgcaaaagtatgttggctctgatatcacatcaatggtgacacttccagttatcatttttgaaccaatgacaatgcttcagaaaatggctgagcttatggagtactcttacctgttagatatggcggacaagactgaggatccatacatgagactagtatatgcttcatcattctttatatctgtctactatgcctatcaacgaacgtggaagccattcaatccaattcttggtgagacttatgaaatggttaaccatggtggcattacatttatatcagagcaggtcagtcatcaccctccaatgagtgctgggcatgctgaaactgaacatttcacttatgatgttacatcaaaattgaaaaccaaatttctcggcaactcagttgatgtatatcctgttggaagaacgcgtgttaccctcaaaagagatggtgtggtccttgatttggtgcctcctcctacaaaagttagcaacttgatttttggacgaacttggattgattcaccaggagagatgatcctgacaaatctgactacaggggacaaagtggtgctgtattttcaaccatgtggctggtttgggtatggctactttctcttgccatcaaatgttctctagtaacttactacttcttgctcagtacttctgttatatattatcaaacttaaagatttttgcttttgcagagctggtagatatgaagtggatgggtacgtgtataattctgctgacgagcctgagatactgatgactggaaaatggaatgaggctatgaattatcaagtttgtgactcagagggagaaccacttacaggcactgagttgaaagagatttggagagttagctgataccccgaagaaggacaagtttcagtacacgcattttgcacacaagattaacagctttgacactgctcccaagaagttgttggcatctgactctcgtctacgtcctgatagaatggcccttgagaagggtgacctatccacatctggttatgagaagagcagtttggaggagaggcaaagagctgagaagagaaaccgagaggccaagggccataagttcactcctagatggtttgatttaacagatgaagtaactcctaccccttggggtgacttggaagtttaccaatacaacggtaaatatacccaacattgtgctgccgttgatagttctgagtgcattgaagtgcctgacatcagaccagaattcaacccttggcaatatgataatttggatgctgaatagtgagcatccttgtggaattctttctattttttttaaatatcattttgttattaagtttgtaatgtaatcttgattggaatgcttgaaatttggttttgtttttgggttgttttatcactgtagtatttgattaattaatagtagctatgttagttcatcagttccctttgcatggataaatgctagtagggaaattcaagttatcttcctttc

SEQ ID NO: 12691 - DNA, 448 bp, Glycine max
cccacgcgtccggatttttggacgaacttggattgattcatcaggagagatgatcctggcgaatctgactacaggggacaaagtggtgctgtattttcaaccatgcggctggtttggagctggtagatatgaagtggatggatttgtgtataattctgctgacgagcctaagatactgatgactggaaaatggaacgaggcaatgaattatcaactttgtgactcagagggagaaccacttccaggcacagagctgaaagagatttggagagttgctgatgccctcaagaaggacaaattccagtacacgcattttgcacacatgattaacagctttgacactgctcccaagaagttgttggcatctgattctcgtctacgtcccgatagaatggccccttgagaagggtgacctattcacatctggttatgagaagagcagtttgga

SEQ ID NO: 12692 - DNA, 609 bp, Glycine max
gggccgacccacgcatccgacaagtttgtataggtctgaggtcaaccgaaaacctgccggccagaccgacttgttgaaaattgaaacactacaccatgctgataaagacaaaacagaagcttatatacttgaactggtcatctggcttcatcatctagtgagccaagtaagagttggtaatggaggaataaggtccccagtcaaatcgcccatatgttctcctacccaaaagacagggcagttatttacacagaaagcctgctcttcccccatgttaacggttgaagatcagcaaatgcttcgtgatgtcagcaagaggaaactaacacctggcattagcaagagccaagaatttgactctgccaagaccaggttgagtaaacaccataggctaagcaagagtagtagtcattccccaatcagtgaaagtaaaaatgatatattctctacaaggagggtaccttctgttcctgtcattgattttgatattgaccgaatgaaggccttggatgtcattgatagggtggataccattggaagttcttagttgtgtggcatatcttgatctttaagctgaagggctgggaatgctaaagttacatgaatctg

SEQ ID NO: 12693 - DNA, 699 bp, Glycine max
aattaggtcaacatggaagtcctcagcagccacagtccctcttcgaacgaccccttcgatttcaatcgtgcaaggatttccccctatctcagcgctccttcttctcccaagcgttttggccaattttattacctaagcgccccctcaagcccttctaaagattttgatcttgcggctcacgatgatgatgccttcgcctttttcgttactggggaatccaagagccctcgatccgcggcagagcttttcgacggcggcaaaatcaagccgctgagcgaggatgattcctcggagtctgctaaaagcccacttctccctgccaaacgatcttccatagcccaaggcaagaaggccattcgcgaagccttctcgacgagaaagaagaaagaagagggagatttaagtgaagaagaacaagagacacgagggagagataggactgcgagttctagtagggtcacgcgttctctctctccttgtaacagaatatctcactacacgtgggacgaggaacgcaaccaatcgcagagcaacaaagccgactcgctttctaagacttccaggagatggaggctcactgactttttgctgttccgcagcgcctccgaaggaagaggttccagcaaggaccccttgagaaagttccccactttctacaagaagcccgaagacccaaaagcttccaacccaggcccaaag

SEQ ID NO: 12694 - DNA, 429 bp, Glycine max
  unsure (1)..(429): unsure at all n locations
gatcactcctttctgcgcaatgggcgcgtgcgcatcttctccctccgcgaaaacgacagcagcaagtgtgaacaagggtggtggtggcggcggtgcacctgcgtcggaatctttccgccgaccgtcgtcgatcatggtgatggacatgctcggtcgaatcaacgagtacaaacaaccaatccccgccagaaacgtgctctccgagaatcctcatttctacctctgcaactcggagacagtgcacatcggcacgtgcatgccacgtgtccccgatgaagaagagcttctacctggtcgaatctacttcctcgtccctctctcgcattccgattcccctctgtcactccctctcctctgcgatctcgccgttaaagctggttccgctcttcncaaccctaataataacagttacaatggtcaccgtaaaaa

SEQ ID NO: 12695 - DNA, 692 bp, Glycine max
ttcttccgccctcgcgtccgaaacaacacatataaaaatctatgcattcctgaaattgtttttaaaaattgttttcccgatcccaagaagagatgatatgactcatttgatttagaaaacggtgtcgtgtccctccctctctctgtgttccaaaacccaaaatcccattccggctacgattgccatgctggtgtttaatttaaaaatcggcgtcgtagcaccagcaacatagggttagggttagggttagggttttgacgcatcgattgtggtcaaaatggaggcagagatcgatcactacgcggtgctagggttaccgtccggcgaagaaggcgcgaagctaacggacaaagaaatcaacaaggcctaccgatggaaggctctcgaattgcaccctgacaagaggcccgacgacgccaacgccgccgctaacttccaacaactccgcacctcgtacgacatcctcagggacgacaaggcccgcaagttgttcgacgacctcttgcgcgtcaagcgcgaccgcgagctccgcaattcgcagcgcgacggaaagcgccgcaagatggtctccgatctcgagcgccgggagcgcgacgccaacgcccccgatcccgccgcgaaggaacgcgaagaggaggccaggatcgcgaggcagctcaaggaggagattgcgaggattcgtgctatgcacg

SEQ ID NO: 12696 - DNA, 618 bp, Glycine max
agcacgcgtcaggctaacagcttctctgtgtatgaaaccttgagatcttattggcagtcaaatagatcggatgattcacctgctgtcgttagtctggcttgcggcagtctttcaggcattgcatcatcaacagagaaagagagtttggtgcaggaactgcaccaagtatctaaccagactgacccatagaaccagagaccaggttggagttgttattgtatctgtggcatatgacaatttagtaaggaaaatgacaaaaaacatttttctcgtctttctgtaactttattttttatctaaagatcttgctcaagttatcatcttcccaagttttgttctatgacatgtctccccaagctatgcaggggattccatcatgtggtggcattacttggatgaaactatatgattccctcagttaccaaatgtgagaggtgtcctctttgagctatgcttctcacttaggctaccttcacctgatgtttggatgggtaccagaatccttttcaagccttagtgtttctgaagaatctgttcttggtgctttaatagtattgctttcagcataatctaaattatggaaattatggcaaaaaattacaatataaaagaaaaatt

SEQ ID NO: 12697 - DNA, 687 bp, Glycine max
cacgagcatttattgttttggaattggtttgcaattcaatcgattaatcatcttaccacctttgatgatgcactgtaatgtcacagactactggtctgatgtaaaaattgaatttctgttgagtagaatgggtgtagttcaattcaattcatctgttatactatttgcagcaacgtttccgttggatcttgtgaggcggaggaagcaacttgagggggctggtgggcgagcccgtgtgtatacaacaggcctctatggtgtgtttaggcacataatccggacagaaggcgttcgtggtctctacagaggaattctgcccgaatattacaaggtggtgccaggtgtaggtatttgttttatgacttatgagacgttgaagatgcttttagcagatattgctactggataattacacccatcaaccttggagtctgatatacaagaagtaaatgtatgaagttatttacccatacaaaaaagggtaagagttacatttacgaattaacaattgtaagttcattttatttctcgagccctcacctgggcaattttgtaatgtgttcccgtggggattgcatttttgcatgtacagagacttgcataacatttaatattaagctgttatcgtcaaaaaaaaaaaaaaaaaaaaaaaaaaactcgagactagttctctcgctctcctggtgc

SEQ ID NO: 12698 - DNA, 444 bp, Glycine max
taaatgtatgaagttatttacccatacaaaaaagggtaagagttacatttacgaattaacaattgtaagttcattttatttctcgagccctcacctgggcaattttgtaatgtgttcccgtggggattgcatttttgcatgtacagagacttgcataacatttaatattaagctgttatcgtcatgtattctcatttggtctgcttatctttgcactaaagaaaaaggggaagtgcagtgagaaatatctattgatctgcaagactgcaactggtttccgatggcccgacttattcttgtcttaagagttgctaaaaataatactttcagaacttgggagaactatgctacaaaatctagtcagttgtagttggagaggccatgcccttgtaaatctcacatttgaattgcatacttctaatatgggactgaaatcctatgtgc

SEQ ID NO: 12699 - DNA, 451 bp, Glycine max
atcgtaaatgtaacttaacattttttgtatgggtaaataacctcatacatttacttcttgtatatcagactacaaggtggtgcccggtgtaggtacttgttttatgacttatgagacgttgaagatgcttttagcagatatgggtacgtgcttaactacacccatcaaccttggagtctgatatacaagaagtaaatgtatgaggttatttacccatacaaaaaatgttaagtttcacttttacgatttaacaattgtaagttcaatttatttctcgagcctcacctgggcaattttttaatgttcccgtggggattgcatttttgcatgtacagagacttgcataacatttaatattaagctgttatcgcaaaaaaaaaattataactaaaccaacataagtaatttaggaaaaacgtcataggtaaaatacaccatttacaacatacta

SEQ ID NO: 12700 - DNA, 1289 bp, Glycine max
gtttgtttcactgtttcagaatgaacggcttaagaagtgaaagagcccctctcttggaggctgagcgtgctggaagaggaaagagggatggtgcctcggaaggtcaagcctcagaccttgagcatggtgatgcagtgccggcggcaaatgtgggattctgtagggtgctttcacttgcaaaacctgaggctggaaagttggtgatcggtactgtggctctgttgattgcagccacatcaagtatcttagttcaaaaatttggtgggaagataattgacattgtctctagggaaatgaaaactccagaggagaaagatgaagctttgaatgctgctaagaacaccatactagaaatctttctggtcgttgtcttcggttcaatttgcactgcacttcgagcttggcttttttatactgctagtgaaagggttgttgcacgactgagaaagaatttgttcagtcatcttgtaaaccaggagatagccttctttgatgttactcgaactggggagcttttaagtaggctatctgaagatacacagatcataaagaatgctgcaactaccaatctttcttaggccctgagaaacttttcaactgcattaattggtctgagcttcatgtttgcaacatcatggaagttaacattgttggctttggctgttgtacctgttctttctgttgctgttcgcaagtttggccgttacctgcgtgaacttctcataaaactcaagctgcagctgcagttgcttcatcaatagctgaggaatcctttggtgcaataagaacagtaagatcatttgcccaagaagattatgaagtaacacgctactcagagaaagttaatgaaacacttaatcttggtcttaaacaagctaaagttgttggactcttttctggaggccttaatgctgcatctacactttcagtcattatagttgttatatatggagctaatttgacaatcaagggttccatgtcctcggcgtgatcttacatctttcattctttatagtctctcagtgggttcttctatatccggtctgtcaggattgtatacagtagttatgaaagctgcaggtgctagcagaagggtatttcaacttttggatcgtacctcatccatgcctaagtcaggagataaatgtccactgggtgatcacgatggggaagtagaactagatgatgtgtggtttgcctatccatcacgccctagtcatccggtgctcaagggcattacattgaaactgcatccaggaacaaaggttgctcttgttggtccaagtggt

SEQ ID NO: 12701 - DNA, 547 bp, Glycine max
gaggctcgagtcttaacatttctaaagctccttctcctctcaatatctcatggcaaacgctcttgaagtctctgctctcaatcgcatcaagctgcatcttttaggagaactctctcccctcacccaatttcaggaaccaaacacaacctccctctgttcccaatcttcaacttccgattcattcaccacagttgaccaaatcttctccgaattcctcgatttcccaactactactacttcttccacagaacaaaaccagttttctgcattcgagtttgagccaaaacccgaaataattgagccacaattggaattcagttttccaaccacacgctgcaaatcgagtcgaaggccgtcgctgcaaatctctctcccgaagaagaccgagtggatccaatttggagagcccgaggttaccgaaacggtgtcgcagagtaacccgaacgcggaagagaagaagcactacagaggagtgcgacagagaccgtgggggaagtttgcagcggagatccgggacccgaacaagcgcggctccagggtgtggctt

SEQ ID NO: 12702 - DNA, 447 bp, Glycine max
cggctcgacccaagcgtcaagtgtgattagtatattgtcggtactatggtatcttaattcatgttgtaacctatgtatgaggacaccatagtcctacctaaattggactctctgtaatcattccggacaacttgtactgctatatatataatacaattctacttttgctgattaaaaaaaaagtgttaagacttaaatatctttttagctcttgtaatttagtgtcatttttgctttagtcttgcaaaattattctttttatttttagtccttgcaaattatgtttggtatttttcttccttatgatgctttagataacattttttttactgatctaagcgctatctaaggtgttttaaggacttaagagtaaacaaaaaaattttgcaaggacaaaaaaaagcaaaagagcactaaattgtaaggaccaaaaatatatttaaacat

SEQ ID NO: 12703 - DNA, 409 bp, Glycine max
acccaagcgtcagatttaagtgtcactgcaaattttccatcaatttcttgagtgagccccatcagctgatttgtagtattctagctatacttgcaaaatcagtgtcactcagtaatggtagcctcttgatccatgatgctcacttcaactagttggtgcctttgcaaattgcaaattttcaactgaaatcctctcctctatgaaatctttctttttgcttatcacctttctgaaatgagaattgcaacacaacttgtaattgtaagttgtataaatcatgctgggtacaaggtcaaaagtattatttggataacactgtccagagaatccaactaacatgtcttaccatctgcctggtggctttaataaagggctcttttacattagtctgaataaatttgttagtttc

SEQ ID NO: 12704 - DNA, 267 bp, Glycine max
gcgtcagggttgaagagcatatagagtttttgcgttgaggtggatcggaaggttaattagctagacggagaacgtaggtaaacggcgaagacggaaagtgggggtagtttgtgatttgcgcgtgagtgcgtgcaaatacggttacgtgcgagaagctcgtgactcgtgagagccaaaatgcctcacagaaccacatacattttcccgcgtcagtttccggagcgaggagggttggatgaatcgtccaaacacctattagatcacgag

SEQ ID NO: 12705 - DNA, 885 bp, Glycine max
cacgcgtccacactcctaaaaatggtagcagttaatctattgttgctgccaaaaaaatgagttataaattcaaaaatactgatacttccaagacaagtgaatcaaaggatgatggcagtatcaaacaaaaaccttctgccaagtttaagcatgaaactccaaaaagtggaaaatccaagcaagaaaccccaaaggctgccatttccaaaggaaaacctgtcaaaagtggtggaaagactgatgttaatggtaccagcaaagcaagatctggtttaattgaagagaaaagattccgagaattagaactctgatgtttcagctggagagagagaggatgccaagggcaagagtgcaaattcatcaaaggcaaaaggaagtgagctgaagagtggaaagaagcgtcggaaaacctagaagtgggtatttgtcccccctgtttattccttaactgggtgcttctcttctgctcatcagtttactcttcttcagagcatttaattttttcttcctatggctaatgaatttaagctgtgtatgaggtagctgttcatcgttttgtggtaattatccagttggtaatagcattgttatctttagttattggttaggccagtttagttgtagtatcggttagtatctttagttattctagactagatgtatgttatttaaaggcaacactggatattatttggctagcaaccttcatttaaagaatccttgctacttacaacttacccaattaacgtttttgcattgctcagtgctgagctgtggttgatttattgagacaatacgtacactaagcggaacgtaatctttatatggtttatttggtttcgatttgcatgtttgagtgctatataaaaaatgattgattgtttt

SEQ ID NO: 12706 - DNA, 537 bp, Glycine max
attcgcgcgtcgatccatgcgaccacctacgcgtccgcccacgcgtccgcccacgcgtccggaatattctcagccaagggtaagcccttatcgtcttgcagctcatcttacatcagcatttgctatttactgtggcctcttttggactgcactttctgttgttatgcctgaaccaccagctgaatcactaacatgggttcgtggggcagctaaagtgaggagacttgcattgcctatcagcatacttgttggtcttactgcagtctctggtgcattcgttgctggaaatgatgctgggcatgcttttaatactttcccaaagatgggtgatacatggataccaggagacatttttgaaatgaagcctctgattcgaaatttctttgagaatacggcaactgtgcagcttgatcaccgtatacttgcaactgcaactctgatttctgtgggcattttatggtggtcaacaagaaagctggagatacatcctgcagtaacgatctgtgattggaggtgctgttggcatggcagctcttc

SEQ ID NO: 12707 - DNA, 786 bp, Glycine max
ggttaaattatttttttatcattatataattataaaatacagaggcgggttattctctcatgaaaggtggatcatcatgttccaaattaacctttcaagcaccatacctacccacccaatcaatattagtaaattgcaacaagaaagtttaaattaggcattacgtggaacatcataaaatccatccagggaagaaacttgacatctacacaacaaatctaacgcttcaaggagagagtccatagcagaaccgaaccagctaactaataaccgggtaacatttgatagccattctcacaaaaaacataggccactctaaaacactctttctagcctaaagatcacacaacagaaaaaccggatactcctaaggaggagcactatttctacaacttaatgctacattgcaggatgtagcataaactctctgaccgattttgtacaattcctcaaagatcacttctgtccagacctagatggtcgctgcaaaaacttgacggcacaatcgagagctgcagccgcccagtccattcctcgcccggcttcaagttcacaggtttctctattactgccccatcaacacaaagcatttgtttatactcctcatcaccaaagtctgacattgattttgatttcttctcccatggattccacacagcaacatcagggagaccatccttccttataacaaatgttcgtttcctctcatgatctagcaccgcaattatgtttggagagctaagatacactcgatccacctcagattcaaatgttattgcatctcct

SEQ ID NO: 12708 - DNA, 1334 bp, Glycine max
gtaaatacgagagataaagttaaagaaattaaatagcaccaatttcgcccacgaaaccctctctcttgtctcgtcgcttcaaactcctctgcggtttccccttcttgttcttcttcacagaaatggaggtagcagtggccaaagcgttgaaaccgagtttaaggagagagttcatcgttcagcaaatgctctgcgaggatattttcagcctgaacgccaacaccgtcgccgccggcgaagatttctccgtcgacgacctatttgacttctctaacggctctcttcacaacgaacaacaacaagaatacgacgaagggaaacaaagtttatcggcttcagaggaccgcggagaagacgattgcaactccaattccaccggcgtttcctatgattcacttttctccaccgaattagccgttccggccggtgatttggaggacctagaatgggtttcacactttgtggacgattcactcccggagctgtcacttctatacccggttcgttcggaggaagcaaaccggtttgttgaaccggaaccctcagcgaagaaaacgccttgttttccgtgggaaatgaaaataacgaccaaggcgagaaccgtacggaataggaagcccagcaacagtcgcatgtggtccgttgggtagcccgttgctctcgctgccgtcttcgccgtcttcgccgtcgtcgtgttcttcttcggtgagggagccgccggctaagaagcagaagaagcaagcccaggcccagcccgttggggcccagattcagcggcggtgcagtcactgccatgtgcagaagacgccgcagtggaggaccggcccactgggcgcgaagaccctctgcaacgcgtgcggggttcggtacaagtcgggtcggttattttcggagtatagaccggcgtgtagtcccaccttctgcagcgatattcactccaatagtcaccgtaaagtgttagagattcggaagaggaaagaggtggctgaaccggataccggcttggcccagactcaaatggttcccacctgctgatattttattagagtctagggaaaaatttgcagtttaggaatacaaacccggtttgaaccggttcggtttttgtatgatatttagttagtgctagtgctaggcagtagtcacactagtcaggcaaccaaccgataatattaggaattactagtaattaggcatttattgtttgtatttgtaaggttgtattgtattgtatcccatttacttagtgttgttgattttatttaatttaatacatagtttaagttaactggaggaagagcggtttaattatgaagattatttaaagtttgggc

SEQ ID NO: 12709 - DNA, 856 bp, Glycine max
gtcgttccggccggtgacttggaggacctacagtgggtttcacacttcgtggacgattcgactcccggagctgtcgcgtgttatacccggttcgttcggaggaagcgaaccggtttgttgaaccggaaccctcagtgaagaaaacgcctcgttttccgtgggaaatgaaaataacgagcaaggcgagaagcgtacggaataggaagcccaacactcgcgtgtggtcattgggcagcacgttgctctcgctcccgtcttcgccgcccacgaagaagcagaagaagcgggccgaggcccaggtccagcccgttggagtccagattcagcggcggtgcagtcactgccaggcgcagaagacgccgcagtggaggaccggcccactgggcgccaaaaccctttgcaacgcgtgccgggttcggtacacagtcgcgtcggttattttcggagtatagaccggcgtgtagccccaccttctgcagcgatattcactccaatagtcaccgtaaagtgttagagattcggaagaggaaagaggtggctcaaccggataccggcttggcccaggcccagactcaaatggttcccacctgctgatatcttacttagattagggaaaatttgcagtttaggtttagggtatacaaacccggtttgaaccggttcggtttttgtatgatatttagtgggttttttagttttagttagtgctaggcagtagtcaccagtcaggtaaccaaccataatattaggaattagtagtaattaggcattgattgtttgtaaggttgtatcgtatcccattttcccagcgttgttgattttatttaatgtaatacaaatagtttaagttaactgg

SEQ ID NO: 12710 - DNA, 427 bp, Glycine max
cggacgcgtgggcggacgcgtgggcggacgcgtgggcgcccacgaaagcctctctctcgttcggtgcttcaaactgcaaacttcaaactcctccgcggcttacccttctcgctcttcttcacagaaatggaggtagcagtggccaaagcgttgagaccgagtttaaggagtgagttcatcggtcacaaaatgcactgcgaggatattgtcagcctgaacgcgaacaccgtcgccgtcggcgaagatttctccggggacgacctatttgacttctctaacggctctctgcacaacgaacaccaacaagagtgcgacgaagagaaacaaagtttatctgcttcgtcgcagtcacaggaccgtggagaagacgatagcaactccaattccaccggcgtttcctatgattcacttttctccaccgaattag

SEQ ID NO: 12711 - DNA, 389 bp, Glycine max
tctcgagcgaatcggctcagaaatttaaaaagatagaggaacagagatcctgataagatagaacgaaaagagagataaagttaaagaaattaaataccaccaatttcgcccacgaaagcctctctctcgttcgttgcttcaaacttcaaacttcaaactcctccgcggcttcccttctcgttcttcttcacagaaatggaggtagcagtggccaaagcgttgaaaccgagtctaaggagtgagttcatcgttcagaaaatgcactgcgaggatattttcagcctgaacgcgaacaccgtcgccgtcggcgaagatttctccgtggacgaaactccaattccaccggcgtttcctatgattcacttttctccaccgaattagccgttccg

SEQ ID NO: 12712 - DNA, 581 bp, Glycine max
cgacccaagcgtacgtttgaatctgtattttcttaaaggaaactgtgtgatcgatgttgtaaatcttacaatataaagaaaatcaagagattcagttcttcgaagtgacaacgttgttggaaaacatggtgtgcttttgttttcttgtggatcagacaaagaaagtgaagcggagcaagccggtggcagggtcgtgctcgcggtgcggcggcggcgccagcgtggcagacatgattactcaaactagattttgctttgttcctttctattggaaatcttggaaggctattatgtgcactttctgtggagccatgctcaagtcttacagatgacaaattacttgcaaacaaggttttaaattgcattcgcgattaattaggtttctttgtatttcttgatatcgtaagaaattacagataaatataacctacgcggccataattgcaattgtgttctaaaaaatcttcacgtcacagtcaagctcgtgaccagaaattggtttttaaataatgagatcaacacgtatgcaccaaattctgttataaatagctacattataggatattttaaatgtatactta

SEQ ID NO: 12713 - DNA, 719 bp, Glycine max
tggagtatcgatcactccgattcctgttggttgttctctcaagtctcaactcccaccccccctctttgacttttctatcagaagagcttgttggagttgaaaactgagaagaaaacatggcagcacaagggcctgtggtagtagcatcacttctaattttctgtttagctggaagttgctatgggaaggttcacttctcttccttgaaaagaacccttgatgtcactgcttcccccaagcaggaacaagttctggaggctggattagacaaaatcacagtgacatgggcattgaacaagaccttacctgcggggacagactctgcctacaaaaccataaagctgaagctatgctacgcgcccattagccaaaaggaccgcgcgtggagaaagacagaggatgagctgaacagggacaagacatgccagcacaagatcgtggccaaaccctacgacgcttccaacaaaaccgtgcagaggttcgagtggctggtcgagcgcgacgtgcccaaagccacgtacttcgtacgcgcctacgcgttcgactccaacgacgcggaagtggcttacggccagaccaccgacgccaagaagagcaccaacctgttcgagatcaatgcggtgagtgggcgccacgcgtccctcgatatctgctccatttgcttcagtgttttctccgtcgtttccctctttttcttcttctatatcgagaaaagaaag

SEQ ID NO: 12714 - DNA, 392 bp, Glycine max
ccgggccgaccacgcgtcaagaaccgtacaagtgatgatgtactgcaaccgagtccattccatttccatgtccatgtcctctctgactcgaagagagggttagaacccccatcttcttcccctcaacgatgccagtgccttccaaacccataaacaccttcaccatcacaatcatgctcaccttcaccttcttcctcctcttcttctccggtttcctccacttcccctccgcttcctcctcctctttccctcccatcacccgccccacaaccacgccgcccacggcggaacccttctccgatctggtcgcggccttcaggaaatgggattcccaagtgggctgcgctcgcttcaaacaaaaaccaaatggggtgccccttaaacactcaaag

SEQ ID NO: 12715 - DNA, 940 bp, Glycine max
ccgggccgacccacgcgtcaagagaaatctatcaagacaaaggttggagccttttctgttttgaaagaacttgtggttgtattgcccaactgtcttgcagaccatattgggtcactcattccaggaattgaaaaagcattaaatgacaaatcatctacctcaaatttgaagattgaagccctaacatttacaagattggtattatcttcacattctcctgatgtttttcacccttacatcaaggctctttctgcccctgttctgtcagctgttggtgagcgttattacaaggtcactgcagaggccttgagagtatgtggagaacttgtccgtgttgtgcggccaaacattgaggggtctggttttgatttcagaccatatgttcatcccatatataacggcattatgtcacgcttaataaacccagatcaggatcaggaggttacggagtgtgctatctcctgcatgggcctcattgtgtcaacatctggcgatcatcttaatgcataattacctgcatgccttcctgtgcttgtcagatcggatgggaaatgagatagcccgacttactgctgtcaaggcattcgctgtcattgctgcttctccacttcgggtggatctatcatgtgttctagagcatgtggtagcagagttgactgcatttcttagaaaagctaatcgtgctctaaggcaggctaccttgggaaccttaaattcacttatagttgcttatggcgataagattgttttgtctgcttatgaagttattatcgtagaactgtcgggactaattagtgattctgcttgcatatgacagctcttgccctggaactctgctgcacattaatgggtgacaagaggtcaaatcaaagtattggtttggccgttagaaacaaagttcttcctcaagctttaacattaattaaaagctcattgttgc

SEQ ID NO: 12716 - DNA, 526 bp, Glycine max
gctcctctcatggagattgtaaatattcttttgatgccagtggattgacatcatacagcttctgctctagtgatcgaaaccatggtggctttgactgtagcattgaaattgtatcacataaagggcatatactacattcaatttttctcattggatcaaatgctgcagccatacttcctgcctattggtcccttcggcagaaggcatttgcagaatggattttgttcacatccagtggcattgctagtgggctatatcatgcatgtgacgttggcacctggtgtgcattgaactttaatgttttacaggttactgctctcttcctttagtggtctctcttacttgaatagctgtgacaagcttcaacattgttctgtgacctgagttccaaataagattctcattcttaacaggattattttatgctgtgaattactcccaggacttgggtgtcaatgatagtagcatgtataaacactcggatgaaaagctaaaatcacttagaatgtgtttggtttgcattttc

SEQ ID NO: 12717 - DNA, 1185 bp, Glycine max
  unsure (1)..(1185): unsure at all n locations
gagaaacccgtcgtggcgggaaagaagaaaggtaagaaaggtaatgcttaagccaagagttatgatgatgatgttgatgaggatgaagatgatcctgaaattgtgtttgctgggaagaagaaggggaagaataagaaaggtggtgggagcagtgcgttcactgcttctggctttgatttgctcggtgatgagagggatgatgatgaagagaaatccgggttaaccggtgaggttgatggtgaggaagaggatgaacctgtggttagttttacggggaagaagaaggcatcgaagaaagaaggtggtagtttgttcagtgcatctgcttttgatgctattgatgatggtgaggaggaggatgggccagtgattagttttaaaggcaagaagaagtcctctaagggttcgaagaaaggcggtggcagtttgttctctgcctcggcttttgatgctattgatgacgatgcggatggtgaggtggtggatgataagaatgacgatgttgatgatgatgagcctgttattgctttcactgggaagaagaagtcttccaaaggaggtaagaagggtggttcagtgttttcagctgctgttcttggtgagattgatgatggagaggagaataaggatgatggtggtggtgatgatgatgatgacgatattggaccgatcactttctctggtaagaaaaagaagtcttcccaaaaggctgctaattctgttagcaaaggtgcttctgttgaggaaggtgatgacaaagatgaggatgatgtttcgttagttgcattttcaggtaaaaagaagtcttctaaaaagaagggcagtagtactgctgccaaagggagtgatgaaaatatggatgcagtggatcctgaggcacccagtgttggtagtactgatgctggcaacagcaatgtaaataagagtgaagaggtcgctggaaattccacaaatacacagaagaataagaagaagagtggaagacctgctcaagaggaggaagatttggacaaacttcttgcagagcttggtgagacccctcctgtacccaaacccacaactctaccccaggatgataaagttcagcctattcctgaagtagtacctgttgctgatgcttccgggcaaaaggaaggtccaaaggagccccgtagagccagtctgctgcaangagaggagaagtat

SEQ ID NO: 12718 - DNA, 1033 bp, Glycine max
ctcgagccgaacagaccttgttccagtacctgagccattgtattctagggagactcacccgctctcatcaatgggagcatcagagacaggatcctcagggcttaagctgaagcttgatggtgttcagaagaaatggggtaggccaatttattcatccccagcatcatcttcctcaacttctacttcccaaaactcagtgaatggggtgactcagatggatgttgcaactgctgtaaattcaaaaggacgtgataattatgatagaagaaagcaacggattgaaatttctcctgaaaagcaaaaacttgcagataaattgtttggtggttcaactaaaactgagaaaagatcatcaactagcaataaggttccaaaggctagtactagtgctgcagacagaactcaggaatcaaaagccgcagctgtacccagtgaagtagctcgggagaaaactaatcaacaatctcctcctccagatttgcttgacttgggagaaccaactgtcactgttgcacctccctctgtggacccattcaagcaactggaaggacttcttgacccaaaccttagttctacagcaaatcgtagtggtgctgctgttacgaatgcaccagatatcatggcactctatgcagagactcctgaaagtagagagagcggcagtggtggctattctatccctgtgacgggggataatgtgaatcttctatcagagttgtcaaatgcagctgccagaggtactactgtagaaacaacagtgacgcctttgtcacagtctgtaaagggtccaaatgttaaagattctttgcaaaaggatgcaaaagtcaggaagatgggtgtgacaccctcaggtcagaaccccaacttgtttagtgacttgcttggctagtctgattgaaaggacaattctaaatcatgatgtttgaggatagattaccttgcaacttaccactcgttggagtttcagaaacagttgggtatcatctgatatatgcaaaaattgaataatatgattcgtgattaggcatggatg

SEQ ID NO: 12719 - DNA, 482 bp, Glycine max
taggattcctggtaaataacaatgtaagacagggcaaacgtccgtttcctctgagaatggcaatgcaggcaggcgaactctgtcagcagcaaaatcaacattcccctcccattttcttcaatccgattcccgattttggtttttttcccggagggttgtttctcgaccccaaaatccccgattccttcgttcgttccatttcgttcaagattcacgccactcccttttccgaatccaatcctcgccgccaacggagaagggttccggcagcgtgctttctatcagttagcttgccgagtgcacatctcgttagcgaacacaaactgcaaaatggagaacactgtgtccgaccaggagacaacctcaaacggtgtcgttcagcagagagaggttatggtacgacgatgcaatgccgtcatcacgactaaacatctctgagctggtgctatagccgctatggtctcgagaacttgtgtggctcc

SEQ ID NO: 12720 - DNA, 481 bp, Glycine max
tcggaagatggtgagaaaaccagctttgatcattgctgttactggtggcattcatagttgtttctgccaatgcagacaacacaaaggttcaccccccaacttctaagaatatggtgtattatcctcaaggttgtaggtgctgctggttcatatggaagccaatgatcaaatgtgggaaagtttgttgtgaagatggatgttgctcttaaacttatgcaacacaaggttgaagcagacctcctataatttctacaggtctatatatgtttctcttcatccagatgcttatataatgtagtgctaaataatcatccaggaatccagaatttgattatgtgccctgcgagtagtttgaagggtaattgatgagttaatgtgatcaaaggtgctatttatatatattcccgaggaatttcaatgcataaatcatatgtggatccctacatcaactatccaaggaattttcgaagagcataatatg

SEQ ID NO: 12721 - DNA, 839 bp, Glycine max
tcgattccacaggagagtttagagagaaaaataaatcttctggagaatgagttgagttcttttagtgagaaagaggttggacttgaaacaagaattgcacaattgcagagtgagaataattccttacttcaaaaagaggctacattggtggaaagaaccaatcaattgctgaatgaaaaggcagttttgagcccccacgcggccggtttagaacaaaaaatatatcttctggaaagcgatttgaattctttagtcaagaaggagaattcaactaaagaaactatttcaaacctgaatggaaacattgctgtgctacaagcgcaggtggaagagttggaggagtccaggaataatctttttctagaaaaccagcaattgagggaaaaagtgtcgagtctagagtcaacggtccaaaatcatgaaaacagtaacgcttcttcctgctcacgggatgcacctgaaaaggatcttgcttctgaaaacaaggacttgaagtctgaaattgaagcagcctttacgttggtggagaaattgatggctgaaaatgcggaacttgtggagaaggtcaccgagttatgtgttgagttggatcaccaaagtgcagtcatgaacccaatgagatgactgaattcgctaaacctactggtgttgccattcctccaccagaatctgctgagtatgcgtctgtgtcggcccccaagttgaattcattggaagagacttcagtgaaggataatggtaactcttttaatgacgctaagcatgttgttggggtaatgtcaaactcgtcgttgttatctgatgatgctggagaaatcgtgcaaattccattggatgat

SEQ ID NO: 12722 - DNA, 711 bp, Glycine max
tccgcccacgcgtccgcccacgcgtccggtcatggtaatgcccatgtagagcttaacaaacctgattatgaccggaatgatacaattcttgatgaggaagaggctgcattccttcgttcacttggctgggtggaggattctggtgaggatgaagaaggccttacagaagaggagatcaatgccttctatcaggagtgcatgaagttgggcaccaccacattaaagctatgccagggcatgcagccaaagttgtccaagctttctgaaccttatgctacgactaacttgcatggagcttctgctgaattgagttctgactccagatctgaagcttgatgctctcggttctatcacggatagacccaagtttcattttttatggcagatagctagtaacattcttcccttttgtttttaaagaaggctgatcacttgggagtgaaagaagtgggtgggttttgatcggaaccctgcattttgcaaatattgcaataagttacaggtgtctcaatcccgcctgcttaacagggattttttttttcttttgggttaaaagttataggttggtggttgggtaggggtaggctacggctgttttgtctgcagtggaaggtgctgggcaattgcatcttttggggtattttgatccttttttctttcagagggttgattctacaagataaagtttatgatgtctttggtcaattttac

SEQ ID NO: 12723 - DNA, 372 bp, Glycine max
  unsure (1)..(372): unsure at all n locations
cggctcgagcggctcgagcggcgcccgtgaacatcttctttatcctcagatccctctcttctcccctgattctctcctacatcatcatcttctatctccttgccaaaaacacctcctgtggtgtggacccaaaatttcttgcatgtccacccacaacctgcgccaacaacaatcaaagtataagttatcccttttacatccaaggaaaacaagaacctttttgtgggaatcccggttttggcatctcttgtggcccaaattgttttccaatccttaatctgtctaatanccaatacatcattcaccanatattctacgaaaatcagacacttcgagtgtccaataccgcgttttcagtttcacgaacaaaca

SEQ ID NO: 12724 - DNA, 716 bp, Glycine max
ctcccggccgacccacgcgtcagagaagaagaagaagaagaagaagaagagatgagcgtggaagatcttcctgggaaagaggtaaacgtgctgaagggtcacgagggtggcgtgttagccgcgaggttcaacggcgatggcaattatgttctgagttgcggcaaagaccgtaccatacgcctttggaatcctcaccgtggcatccatatcaagacctataaatcccacgctcgcgaagtccgcgatgtccacgtcacacaggacaactccaagctatgttcctgtggtggagatcgacaaatattttattgggacgttgcaactggacgtgtaattaggaaatttcgtggccatgatggtgaggtaaatggtgtcaaattcaatgagtattcatctgttgtagtctctgctggctatgatcaatcgttgcgtgcttgggactgcagatcccacagcacagagccaattcagattattgacacatttgcggatagtgtgatgtctgtttgtttaacaaaaactgaaattattggaggaagtgttgatggaactgttcgaacatttgacattcgtattggcagagaaatatccgataatttagggcaatctgtcaactgtgtatcaatgtcaaatgatggtaactgcattctagccggttgcttagactctacattgcgtcttttggacaggtccacaggtgaactgttacaagaata

SEQ ID NO: 12725 - DNA, 488 bp, Glycine max
gagagacgtcattaaaagaaaaatatttctctctctctctctccctctctgcattcattccttaccccaactctgtttgttcctccctcgccgccgcagaatagctcagtgaatcgcgtcgtattttggagttggttgaagggttggattggagatttgggaagaaggtacagaacgagaacgtgggtctgcaaatgcagttgttggaggtttattggttgtgtctaacaactcatatttaatttaggggtgtgtgtctttctctcctagagcctagtgaagtagaagagatgagcgtgaaaaatgatgttcctgggaaagaggtaaacgtgctgaagggtcacgagggtggtgtgttagccgcgaggttcaacaccgacggcaattatgttctaagttgcggcaaagaccgtaccatacgcctctggaatcctcaccgtggcatccatatcaagacttataaatcccacgctcgcgaagtccgcgat

SEQ ID NO: 12726 - DNA, 511 bp, Glycine max
accacgcgtccgcttcaaatctccttctcttttcgcttactcccccttccttcttcgcgatccatcactgccaaatctccccaagatttcgattccgcaccgtttcggcgatcgattttctccataaccctcgatccacataggtcctctgtaaaaaatccaaaaccctagttttttcttttccttaatttcatggcggagctttagattaggcacaaacccttcaatgattatggtccctttcgttttccctcggagctaaatttcatgggtgttcccgaaagtttttgaattgaatcgcttttccctgtgattttgcgttccgactttggggcgatgcagtgtagatagccacctcgcgattttcattgaggagagtgtttttcgtctttttaggtgatggttttgcgaatttttcacaaaggaggaagcttgtgagggttttggatagtgggtctcgttgattgagtttggatcagtgagtggaattttgcctgtgtatattggttct

SEQ ID NO: 12727 - DNA, 899 bp, Glycine max
cgcgtcagcaaccactggagagagagacatcccccgcgtccgctctattcttcaagcaaactcttcgtctcagatctctctttctctctctctagggtttccgtttctctctctgctatttatgatcactctctgacgcgcttctgtcaccaaatcaagtgcttccgtctcttccccttcttctctgattggaaggattcgtgtggtcggagatggtggtttcggggccaatcacgccggggcaggtgtctttcttgctgggggttattccagtttttgtttcatggatatattcagagtacttagagtacaagaaactctcatctcctcccaaagttcattcagatgctagtcttgaagagttggggaaggatgcaattaaggaagatgatcgggccattttgctggaatcagggcttacaagatcagcatcagcaaaattccatccaccatctgtcaaattgaatttgattcggtttttgaccatggatgattctttcttgttagaaaatcgagcaactttgagagcaatggccgaatttggcctgattctgttttatttctacatatgtgatcgaaccaacatacttggagattccaccaagagttatagttgggatcttttcatcttcctctaccttcttctgattatagtttcagctttgagttctttgaagaaacataatgactcatcaacattttctggaaaaaacatactttaccttaatcggcatcaaacagaagagtggaaaggatggatgcaggtcctctttttaatgtatcattattttgctgcaacggagatatacaatgcaatacgtgttttcattgctgcatatgtttggatgactggatttggaaacttctcctattattatatcagaaaagattttagcctt

SEQ ID NO: 12728 - DNA, 1241 bp, Glycine max
actgttttcctttgtcccttttgtatcacagaatcattctggcatctctcgtattcctctctcctctctctctctcctacctttccacttcatttcctggttttggtttttctatggtcctgcctttccacacaatccactatagtttcttctataccttccttgtggatctgtcactatgacttcctcactcgtgaagatccaaggcgaacaggtcctcaccaacgattttcaggacctttcaatcaaagatctgagtgagaaagggactgaggcagagattcacaaggtggggtcttatggaagccatgggggaatctgtgctatctgcttggataagatagtgctgcaggaaactgctcttgtaaaaggttgcgagcatgcttactgtgtaacatgcatccttcattgggctacataccgtgagacagttacctgccctcagtgtaaacatccatttgagttcctcaatgtccatcgctcacttgatggcagcattcaagattacatgtttgaggagagtgtgtgcctgctacttcgggcctcatggttcacacctttatctgttgaagaacatgtggttcatgaagatgcatatgaagacctagaagattattatcagtacgaggatgatgatgatgatgatgatatggatgaagcttactatggtggttcgtccagtcttcgggttattggcaaccgtagatggggagataatggttatgtcagggctggtcgtcaagaagctcggccagtccatcgtccaaactttcaggattcaggagcaagttcttcttcgcatgagccgaagaagaaagaggctgggaaaattatcacaggcagaagggcaaagagggcacagaaaagggaagctgctgacaaggcggcggaagcaaagcatcagcagcatttagtaaggttgggtaggaagtgattctattttatttatgtcaggccatggccttgaactttccttcccataagttaaatattttctttttctttacattttttttttcttgtacattgtttctgtgctctttactctgaagcatgtaatagatcttggggaaggtgttttagaataatggcttggtggggtggttggattatggaaactccgaactcactatagcattgaacaatttaggttttagttgttattatgctctcaatgcaggtctaagttgtacataatttccatgtgatgttgatacctcaacaatgttgatatctatctc

SEQ ID NO: 12729 - DNA, 504 bp, Glycine max
gttgaaaaagcataacgaaggtggtttgtttttccgtcttaatcaaaatcgcgaatcgaattggattggatacaaccctatataagcattcaacacctcacctgcgctgcgtgttgtcgtttggcttgctttcctcaccgaacgagtaacggagggatttccttaacccacaaactctcaaataccctctctctctcaccgaccactatgttgcagagacctagacgccgctgcgagggcactgccatgggcgccatcgttctcgatctccgtcccggtctcggaattggacccttctccctcgggatgcctatatgtgaagcatttgctcagatagagcagcaacctaacatatacgatgtggtgcatgtcaagtattttgatgaggaacccctgaagttggatgttgttattagctttcctgatcatggcttccatcttcgctttgatccgtggtctcagagattgcgccttattgaaatatttgatgtaaagcgacttcag

SEQ ID NO: 12730 - DNA, 475 bp, Glycine max
tcgcccacgcgtccgccaccctccgccacgcgtccgcttttctgctattttatccctcctttgatgattatcatccctttcgtatctctatgtttagggggaggtaacagtgcatggggtgtagaagaataggggaaaagatgagaaggaggcactgctacttggtaattaaggttgttgacagaagatagagagcacagatgatgatatgcatattatataatatatagcagggaactcatgatgaattgtgcatcttactcctttgtgctctctatacttctgtcatcaccttcagcctccatttctcactattccccctctacaccaactgttagctagtgtagtatatacttcgtttctatctactggaactataattcatatataaattactttaataagcctgttcatatataataatttgatgttcaccctgggtatttattacctagctagctagttttctcttcta

SEQ ID NO: 12731 - DNA, 713 bp, Glycine max
  unsure (1)..(713): unsure at all n locations
tgaaaagtactactattttctcttctcttgtctattcccctaacgcgttgcttcttcatttgcgtggttttttaacatttgaaaactcataattcttatcttcacacatagtgctagtgcgctgggcctgcatctgtggcctctctcttcctcatcctcatatttcattcactttgtgggtcaaaatgtcttctctcttcttctcttcttttattaattaattacagaaattgtcagtttctaaatcagtgctagcagagagaaagagaatataactatataaggcggatcactcaacaaaccaatgggtctacagctgtccctgacatgatgaaatcttagtttactaagttgtccatttgagctaagcaataagcatccatttaataaaattgcgacgtggtgtgaggaccagcagtataattttccttcagcaaagcaagttgcggctgtggatgtgctgctgagatgttcagacattttctgtccttttctggttggctctaatagggatcttcctcctcatcgacattcaattaattccaatttttggtattgttacaatagcctcatatttaaatactaactgccaaatanggccaaataaatgtcagtgactgattccatatttaagaacttgtgcttccattagtcagcaaatacgtaagtgtgtttttggattctgttgtagtaattggacccatcaaacaatg

SEQ ID NO: 12732 - DNA, 527 bp, Glycine max
ttcggcaataataagagcggcatgggagagaacatttttcaattttcatgactttctgaaggatggaaaatgaagcctcgtgtcggtggtgctcttgcagtgcacgcaccctcgtgtcaatattcgctgcaattcttctcctattccaaccaaattgcatcgctaagcaacagcaccaaccatgccctccttcatcctgcggcataattggcaacatatcgttcccatttcgcctcaaagacgacccaagccactgcggcgacacaaggtaccagttagattgcgtgaataacgcgacgctgttaaccttgttctcgggaaaataccatgtacaagatatcgattacaagagatacaaaatcaaggttagtgacgcgggtgcagtggaggactcaaattgtttcatccctcgcaatttcttatgggatggtaatttcaggcccacgggcctggtcggcccagatgattttggatcacagccgtttgtttggaccttgatttcaccagaattgggtacttcaactgcg

SEQ ID NO: 12733 - DNA, 649 bp, Glycine max
ccacgcatccaccaatccgtgtgttctggggaccaaaattttgaagaatccaaatggggaaacctccacacaatttgtgaaactgagtcactttggggattcactgcgactatcttcaccaaagaggagagacaacttgatttacctcggaaaaactaattccttgagtcttgggaactgggcttaaaccccatcctaacaggttcgccacatgcaggtgatatcttccacatgatcagtggactcaattttgactattctgttccaatcacgccacttttcacttcaagtagctctccgcaaaggccacacgactggttggaaaccgcttttgacttctcaagatttgattccttcagaacacatgatagtgtacctttgcctgctcgggagacgacagaacaatttgattcagtgcgcaacagtgcggattttgaccatgctcatgggtttccagcttttgatgactcggatcccttcggctctggcccgtttaggacttcatcagataatcaaactccaagacgaggatctgataattggagtgctttttagtttagcaattacacctgatgcattatttctgttttcagactttccgactgttgcctctggtggagtgggttgtctgtcttgctatttggaacct

SEQ ID NO: 12734 - DNA, 1168 bp, Glycine max
aattgccggccgacccacgcatcagggaggtggctcccttgctcgttccttataatgcggtggctcctcctcctcccttgtcggcggctgctgctaatgtggtcgctcatcctcctttgctggcggcgactgctgataataattatctggtggctcctcctcctcctcccttgcaggctattgttgatggggcctatgtttcaaccgacgaccttgacatggaacttgattggagtggtataattgacagtgatactttgccatcattgaactttcattacggggagtgtagtagccatgctgagtattccaaagtattcatcaaggatcaggagccattggcagacacttttgaaatttcttgtcctgaaaatgtctggcctcttgatatgactgggcaacatggcgtgggtacaaattcaggggaagatggagacagtggtgagctgagcaatattggcaattttgatctttcatcgaataatatgaatctggatctttactgggatgccaacgagaatcttccgatggatgatgatggatttttggaatacaatgatattgcaattgggaatggggataatcctaccgaggctgatctttctgcaaatgccatgctagatgagtatgctgcactcgctgatgatgatatttacaagtatatatcttttgattctcctcagattcaagagagtgaaaactttattcccaaccaaggatcacctttcacccagcagaatgtggagggagaaaccgctgatagagctgtggttagtaatgagggttcttcagtgcagaatacacaggaggcaatgcttgcatcaggaagtacaaatccacttgttaagcaggcatatggatggttagccagcatacctgctgcgcctgcacatgctatggagtttcctgctaaggagattgctcttgggcttcatcctgtggctcagtcttcccatccagctcatataactacaggtatgatcagcataacagacattactttaagaggcaatgcgatggattggacgatgggcaaaaatggagggtttagcactgtaatatccactgggttttgtcaaccggatgttaattcggatgctttgatacctgtttctggcaagactgcatttgtgttgtcgcatggcttgattttcctgactggtttctc

SEQ ID NO: 12735 - DNA, 523 bp, Glycine max
aggaggaggccgccgtgaaggtggtggaggtggctataaccgcaacggtggaggtggtggatatggtggtggtggaggttatggtggtggtggaggtcatggtggcggtggaggttatggtggcggtgggagagaccgtggatatggtggtgacggcgggtcccgctactcgagaggaggcggtgcttcggatggaggaagctggaggaattaggattaggttttttagtgggtgaaaaaatggggggaggttctgttggagtaatatcatccccttgatattaattgtggtaattttaggtttggaatatgcgttgtggtttgagcatatgttactgttatggttggttggtttccgtgttactcctgtcctgtggttctcgtttttgacctctgataatgaatctgtgttcttgaaggaatgaaatgaatggcaagaaattatgatcctaagatttttacaaaaaaaaaaaaataaaactttaaaataaaaaattaaactaaaattgtgtaactttaaaaa

SEQ ID NO: 12736 - DNA, 600 bp, Glycine max
aatatatcggtcttgtgattccccataatcaaatagtcttaatcctaaattacttgcaacaagcaaaaattttccaaccatatcaagctactgagacctaaatttgtggatacggtgaatactccaaagacatcaatgccaaagccagaaatctcgatacttccacatcttaatttgaaaatgtaaaaatgacaaaggaagagtgtacaggtaatttggtgtattgtttaagaaaccttgcctctaccatacaaagcattaagtccttaacggacacattctactacagttgtttagcacttccaatgatgcttgctgtcctaaagcctgaggacctactgtcccatgtttgggggtggaggaggaagacggacaccctggccctgcatgggttgggaaggaaaaccttggggaggtggcattgatggaggtctagcacccatgttgaaacccgatgtcccacttgcaacagggggtgggggtggaatagatggcattccaccagaaggtggaggtctaggaccgttagctgctgtcataggaggaggaggtggcatagatcccggcattggaggtggaggagctctaggaggatttgcc

SEQ ID NO: 12737 - DNA, 561 bp, Glycine max
acccacgcgtcagcacaatgtaagtttgtccaatacctccttgttttaacttcacattcttactttttcatagatggacttctttttatttaatcattttgttcttagtcccattcccatcttctgtttgattttaacaccacaattgacactggctttgtttttcgtcaaaaggaaggggctgctaaagcaaaagaacttcttgatactgtgatgaatatttacatcaagactatggttgaagatgatgacaaggaagtggttgctcaagcatgcactagtgtggctgacatcattagagattttggttatgcaactcttgagccgtacttgtcccagcttgttgatgcaacttcattgttgcttcaggagaaatcttcttgtcagcagatagagtcagacagtgaaattgatgatgttgatagtgcacacgatgaagtgcttatggatgcagtttcagatcttctccctgcatttgcaaagtccattggtgctcaatttgctcccatttttgcacagctatttgaacctctaatgaaatttgcaaaatcttctcgtcct

SEQ ID NO: 12738 - DNA, 525 bp, Glycine max
gcgcaaacaagcgtaagaagcattagatctgcgatttcatttcaatttacgtgctggatctattaaaaatgggagatctacttcttacgcttaatttgatttcttctgcgcaagccagctctcggagcatgcaatgcaaagacaagtgaagaattcagcgacctggttcaggggcgcccagagtcaatgatggatcatgacttggagaccgctgctttgggggcttaccaggacaagcctagaaccttccccaacatgcgcactagaccttacacccctctgatatttcgtattttacttggtatcaatgttcgtgtcctcttcattcttttgctcctcggcttgggagctatcttttacgtcggagcttctacttctcctatcattgtctttgttatctctgtttgtattctcagcttccttgtggccatatatcttacaaagtgggtcctcgcaaaagatgaagggcctcctgaaatggttcagatatcagatgctatacgagacggagctgaaggatttttc

SEQ ID NO: 12739 - DNA, 430 bp, Glycine max
tccgggccgacccacgcgtcaggcaccctgtcatcaaccaaggctttggtgcaaccatcagagccattaacggtcaacttgaatgtgatggtgccaacccttccacagttcaggctcgcgttaattactacactgactactgtagacaattcggtgttgccaccggtgataatcttacttgctaaggtagcaagccccgctccctatacccatattatatagaataaattatgtatcttcttatacccctcattttttcttttcaataaagaattgaaggcttgttccctcgctcaattcacttttaggaggagttttaaacgtatatatcttcattcacacttgtatgagagagattaattcttctagatttctttatgtccatgaatttgaaactcaaatataataagattacgtgtttaatatattt

SEQ ID NO: 12740 - DNA, 542 bp, Glycine max
gacccacgcgtcagcccacgcgtccgcccacgcgtccgcccacgcgtccggggatctggatccatagcatagagagagagaagaagaaaatcttggcttgataattcagatttgaaagagagagaaagataaaagggcaaaatgacaacactctttgtccagaaacccataagagccttcttctcttctgctgcaaccattttattattactataaacaattactataagcaaggcggtggtttggcttttctagtaactttgaccattctcattctctcctcaaaccttcatgggaatataacaaagaaactcactgtgccaccactcatctcaacttggtaggtagggcttgtgtgtgtggttgagaaagaaactttacttgttacaggagtgagtgagatacatgaccactagagaatagagagagaaagagagacccaacttgaaaaagcaaatttcatttttagggatagactagtttgccgtggaatcaagtagcaatattttttctttttgttcaccgatggatggttacgaagc

SEQ ID NO: 12741 - DNA, 542 bp, Glycine max
tgaggtttcaccattattgtgtcctcatttgttgtcatccccctccttgtcctctgatgagtgtgtatttgtgatggctgcttgcttgacattcttgtgattgcaggatattcctgaagcagtatcagctgatgagcttgctcgataatttggatttaaagaagcctggttgaaacactttccatgttttgaacccgtgtcagcgtacgatgggatggggattacggaaagtgcagaatggttggtggaggtgatggagagaagcatgaggactgaaatgttaacagcgagggcaggtgcaatgggtccaggtccctagaagggtcttacattaaactgaagtgatttctcgattcctttatatagctttgtaaatccaaattggattatacctgatcataactgcagcgagcagaataggtaaaagaataacatcgtgttgcattaaactgagccttgaaatttgatgccatagttgtaatacagccgtttcatatgagaggctcagtctccagtatctcttagagcaattttcttcttac

SEQ ID NO: 12742 - DNA, 447 bp, Glycine max
gactggtctttgctactctctctctctgttctttctttgaagagggagagagagaaagggtcaccggccgcccccgccaattgaaccctcctccttctttcctttctacaataaaagtcaattcccagagccaccgacacaactggttttccgaaaaggtttagtttttgattgaattggattggttctttggccatgtctacgtccaacgctgggggtgctggatccaatgattccaatgctaccaggagacaaagcaagagacccaagtactcaaagtttacacaacaagaacttccagcatgcaaacctattctcacaccaagagcggttatttcagcattcttgattgtcaccattgtgttcattcccattggagttgcttcattaattgcttcgcatgatgttgttgaaattatcgatcggtacgacttgcgctgcataccg

SEQ ID NO: 12743 - DNA, 643 bp, Glycine max
tttggtatagttgcaaatttcaactcaactaactagtttttctttccacaagagttttgtttgttccggagatcacgtagctaagaagagtaaacattaaacaagaagattggtaattttttaattaagtgcgcgaaaaccgaaaagggtctttgttttctttcatactataaatgtattatcaagttgcatagaaaagcttcaatagccccaagtccagagcgacttatcggttgttcgggacaaccttttagtttttggcttcgacttttttaagattctgttttctgggttgcggggtcgtaactcatccagaagaaagggggagcagagaaacaaggtcgatgagagttgagtttataaggttgcagcagtacgagtgaagtttcttcgctggtgctataaataattaaacatgtcttctgcggcagcttcaacttggatcacgtccttctcgtgttcacccaatgcaactccaaatttacctcactggctgagattcattttcctctctccgtgtcctcagagggctcttttgtctggtgttgagattcttctcctgttgactctctttgtgtttgcgctaataaagctctattcgaggttcacttccattggcaaccagaactcagagctcgacaag

SEQ ID NO: 12744 - DNA, 380 bp, Glycine max
ctctgccgctcaatttcccgcgctccgtgtctccctacgtgactcaccggaaatccgagtgcgaacgccgccgggaaaggctattctacggcacgccgcagatgaacgctgccgcgtgcgacggcggagcagcgtcggagaaccggagacacggtggaaggttctggatcctctcgaatttattccgagccagatcgaacaagaccgaatcctcgccctcgcatcctccgccgtcatggttctcgacaatccttcacgcgcgccggcacaataagtgtcggcacgcggatcgaggattgtcgccgttgacagaggtggagaatttcaccgaatactctgctgacacagtgcaagaccgatctgactcgggaatttcgtcg

SEQ ID NO: 12745 - DNA, 487 bp, Glycine max
agatcgagcgaatcggcccccaacgaacctcgttgttgtgaatcgcgctgctgaatcaatcgttctcggttttcgcgtactctactcgttcatcccgacatggtttgcttggcttgtttgctgcccctctttctcgtcccaatcgtcaacatcctccctcttctcttccattttatcatggggaaaatctatcgggtttttggttgggagtacaggaaaccggagagggctcctcctgtatgtccatacaagcctccaaccaacagggttagtaaagttgaggcagatgttgaacctgttccagcagatcctgttaagcctggaagtgtagatgtcaagcaggattaatctggggtagctattctataaggtttgacgggagtaaaatgtatgataacatctgatggttgatgtatgtttttaacttttattaaatatcttgtcttgtcatgaccattaaacaataaaaaaaatgcttggttgggtt

SEQ ID NO: 12746 - DNA, 372 bp, Glycine max
aagacttgtcggagagtgagtaggttgtggtcggcgagggactagcaccacgaagcaaatggccgttagcattggcgttggcgccacaaaagcgatatccatggcaatagcagcgaggcacctcggaacaaaaccttacgcagcagcagcaacaacaacggcacttgctgcttctctcactccacaaacctcttttcctccctcattcctctcccttctcctctcgccgcgctttctgcgccgcgactcttcgccccgccgataacagagtgcaacagttccgcaggaagcttagggtttccgaaatcaaagaaggcgacggcgccgacgtgttcggccgcaacctcgtcgtgcagggctgggtccgcacgc

SEQ ID NO: 12747 - DNA, 676 bp, Glycine max
cacgcgtccgaaaagttacccctaaaccttctgatggatcagcaaagggtggtgttgttgataaggagtggtggaagaagagtcctttagcgtgtaaagagagtgatagtggtgaatcgagtatcaatagtgacagtgggaagagttctggtagcagtagtagcaatagcagcagtagcaggagtaacagcaggcgtgagaacagtggtaggcgttgctggcctttcattcgcagacccaaaaatcgaacacaaaaaagtaagatatccttctgatgaaacaacacagtgctctgagaactacacatgttcatgatccttagaagctttatcttcataaactcctcacaagttttaccgcgagtcatttgattacaacccagtagtaccatgtaactttttatgaatgatgaaggcacattcaactaggaatctcgaagaaatgtattgtgaggatgaaatctgtataaatgtcactgtgcttcatgtaattaagtttttctaattttcatacatgataaggcatatacaagcatgccaaaagaaggtttaccaagtttcaattttttatctataccctcagatagtcagatgaatatttggaaactttttatgatggcttggatcccacagttgaagcagttgttacttcaagttatagatcccttctgtcgtct

SEQ ID NO: 12748 - DNA, 635 bp, Glycine max
gcaaagcagtttttcatctatcagttcttctccaaagcatcgccaaggaaagtcatgtcgcaagataagacatagacaaatcaggtcggtagtggaggagtctagaaataagtttgctaaccatgaaaatgaacttgcatcctcgtctgaaggatttccaaatttcttagatggtgggtctaacatgccgaaaatagaatctgaaattcaagaagagggtggatcagaggcaaacccacttaacaaaaatgatcatgtagatggatatgtaagagagaaggacatggaaagacgcgcttgaacaccaggcccaacttattgaccaatatgaagcaatggagaaggctcaaagagactgggaggagaaatttagagagaataacagcacaacaccagattcgtgtgatccggggaattactcagatatgactgaagattaagatgaaagcaaggttcacattccatatgctgctaaggtggtcacctcagatgctcaagagagtaaaggagaacctagaggtgtttgcttatctgaagaagaattcaaagctgaagccagaaatattatgccaaaaactcatgatgatacaaggggttatagtgaccataagagtgcaactattagcacttctgat

SEQ ID NO: 12749 - DNA, 662 bp, Glycine max
gcagatcatatatacttactgaggattcgtccactacaatttttgagcatccttcagaagtgcaacacgaatgcatccctcaagcaatcttaggaatggatgtcatttgccaagcgaaatctgggatgggaaagactgctgtttttgttttgtctacacttcagcaagttgatcctgttcctggtcaagttgcagctcttgttctttgccacacaagagaactggcttatcagatttgccacgaatttgagaggttcagcacatatcttcctgatataaaggctgctgttttctatggtggtgtcaacatcaaggttcacaaagaattgctcaagaatgaatgcccacacattgttgttggaacacctgggaggattcttgctctggctagagataaggaccttggtttaaagaacgtgaggcattttatacttgatgagtgtgacaagatgctcgaatcacttgatatgagaagagatgtgcaagagatcttcaaattgactccccacgataagcaagtgatgatgttttcagctacactcagtaaagagatccgacctgtttgcaagaaatttatgcaagatcccatgggaatttatgtcgatgatgaggccaaattgactcttcatggtcttgtccagcactatatcaacttgcaagag

SEQ ID NO: 12750 - DNA, 476 bp, Glycine max
  unsure (1)..(476): unsure at all n locations
tgctcttcctaaaacccagaaccagatctagggtttattttccttttcttttagaatttgaacaagttttgcgtcttcaaaggaaataggatgggagaattgaaggacactgaggcttacgaggaagagctcatcgactacgaagaagaagaagaaaaagctcccgattccgctaaacccgttactgaatctggcaagaagggttatgttggcatccatagttcgggatttcgagacttcctgttgaaaccagagcttcttcgagccattgtagattcaggatttgagcatccttcagaagtgcaacacgaatgcatccctcaagcaatcttaggaatggatgtcatttgccaagcgaaatctgggatgggaaagactgctgtttttgttttgtctacacttcagcaagttgatcctgttcctggtcaagttgcagctcttgttctttgccacacangagaactggcttatcagat

SEQ ID NO: 12751 - DNA, 586 bp, Glycine max
tcctttcgtccgcccacgcgtccgcccacgcgtccggtctctctctctctcaaatccaatcatttcctgaaagacaaaaacaaaaacaaaataaaaatcgcgttcagacacactcacaattcacacaccaacaccaccaatccccaatctctaacttttcccgagaaaattataatttccattctcttttctccctcagattcccggaaaatatagtattcacaacgttatattttggcaccgccaagctccaattcaatccgtcgtcgttttcgcgaattccgaatgcgtcgacttcgggttggagaatgagttctccgtgctcttcttgtggctgtttgttggcgttcttggatctctcttcaaaccctccacagtctcctgtccaattttaactctcttagtcagtttaactatgtatcacacaaagaaattttcaccggctagcatggtgccgcataaatctcaaggtggtgctgaacagcttgcaaatgctggggttttgggtggatcggctgtaaaaactgctgcaccttctgggggaagtgggaagcaacgcttaaggtggacatctgatcttcatgac

SEQ ID NO: 12752 - DNA, 418 bp, Glycine max
tttcgcttcacgcgtccgcggtactctctctctttcaaatccaatcatttcctgttgagacttaaacaaaataaacatcgcgttcagatacactcacacacaaacacaaccaccaatccccaatctctaacttttcccgagaaaattttagtttccattttcatttctccctcagattcccggaaaatatattcacaacattaatttcgcacttcgccctctgccaactaccaagctccggcttcctctgccaattcaatccgtcgtcgttttcgccaattccgaatgcgtcgatttcgggttggagaatgagttctccgacctcttcttggatctctgttcaaaccgtcacacagtctctgcgttcggattctcttgtccaattttaactctctctccctctctctctctctctctc

SEQ ID NO: 12753 - DNA, 411 bp, Glycine max
  unsure (1)..(411): unsure at all n locations
atggttgttgattctatcttcagtgtcatgcttcgctttcacccaagatagaatcttttgcctttttcctttggtcggttatcctaattgaatgctctctcccgttaatcaccatcaattctgcgttatcatcatcaattctgctttattagctctatttttatctctctctttttcaatttctttttaaaaattctctctcttcctgtgaactttatgtggggtgggacatttatgacttattatgagggaagaaagacatcgtcaactgagcaaaaaaagtggggatttggagataattagaaaagataacaataatgaactcggacacgtgctgctatactttacttttgataaagtttcttggtaggaaccgtggggtnttgtttttgttcatcgtgcttcttaatg

SEQ ID NO: 12754 - DNA, 846 bp, Glycine max
tttccacgcgttttaaaacctcttcttcttactctcttacgttaattcttcgttgtctatgatggcattggatatgattgatgttgttcccaggacgaggatggaagaagaaaatatagcaatacaagaagcagcttccgctgggttaaagagcatggagcatctcattcgtctcctttctccttcttcttctcttcacaacaaccttaataatctcaatctcaaccacctcgactgctccgaaatcaccggcttcactgtctccaagttcaaacaagtcatcaaccttctcaaccgcaccggccacgcccgcttccgccgctctccaccccaagcccaagcccaagcccaaactaatcctcaaccacaacctcagatccaacaacaagggttcagtttagatttcgtgaagcccaccattctaaactcaaagcccatcaacaaagacgaaactttgactctttcaacaacctcttcttccttcatgtcctccgtcaccaacgacgccagcgtctccgacggcaagatcggacctttcctccctccctccgccgccaaaccccctctctcctccgcccaccggaaaaagtgccgcgacgccgccgcagcactctccgccaaaccctcctgccactgctccaagaaaaggaaatcacgcgtgaaacgaacgattcgggtgccggcgataagctcaaagatcgcagatatcccaccggacgagtattcgtggagaaaatacggtcaaaaaccgatcaagggctcaccttaccctcggtattattctattccttcttctatcttcatgctgaatcggtcaaagtcaaatgcagatctcaaagttctttc

SEQ ID NO: 12755 - DNA, 867 bp, Glycine max
cttttccctcttctgtttctatgatggcattggatatgatagatcgttgttccgagaacgaggatggaggaagctgcttcttccgctggattaaagagcatggagcatctcattcgactcctttctccaacctcttctaattccaattcttcttcttctcctcttctcaataccaatcccaacaacctccactgctcccaaatcaccgacttcaccgtctccaacttcaaacaagtcatcaaccttctcaaccgcaccggccacgcccgcttccgccgctctccaccccaagcccaagcccaagcccaaacccaaacccaaacccaaacaagtcttcagcctcaaccagaaacccaacaagggttcagtttagatttcgtgaagcccaccattctaaactcaaaacccagcaacaaagacgagactttgaccctctccaccacctcctcctcctccttcacgtcctccgtcaccaacgacgccagcgtctccgacggcaagatcggccctttcctccctccctccgccgccaagccacctctctcctccgcccacccgaaaaagtgccgcgacgctgccgccgcactctccaccaaaccctcctgccactgctccaagaaaaggaaatcacgcgtgaaacgaacgattcgtgtgccggcggtaagctccaagatcgccgatatcccatcggacgagtactcgtggagaaaatacggtcaaaaaccgatcaagggttcaccttaccctcgagggtactacaagtgcagcaccgtgagagggtgtccggcgaggaagcacgtggagcgagcgcaagataaccccaagatgctaatagtgacttacgagggtgagcaccgtcacgttctt

SEQ ID NO: 12756 - DNA, 1261 bp, Glycine max
cacgcacaacacaaccacatcatcgtcttcatcgctctccgacacttgaacctctcatgttgttcctctagaaacctcttccgctccaccgtgcgaattttcctgcttctgtagcacaaaacacacacacacacaaactctgctttaatattattcacgcctgtccttgtcgtggtgctggttacaagatagggtttgcactttttaatcagaaactagccatgaccaggtacagaaaactactgtgttagttaaaaaacattcatcgattattagcaactttttcagtagtagtgtagccttgtaggtgaactgtgtgttaggattttgaagtttgattaatagccgtgtgtagaaactagaaaggttagtgattgttgtagaatcaatggtaggtgttgatctgagtaatatgaatatgaatcgaaatagtggtgtatttggttcatcatctgggggtgctcttagacccccaaatcgattgaataatcaaatgggtgttgctgagaaccagaaccagaaaccctatggtatgccaccctcacaccctaataccaatatttcaccttcatcaccttatcctcaatttttgggctcccaatcccaatccaattctgtttcccagcgtttgggttctcccaatttgagtcctgcgtcgtcccattccaggtctttgtctcagccctcttttttctctctggattccttgcccccattgagtccttccccttacaaagaaccttccttttccgactcaatttcgaccgacgtgtctgctgaggaaagcttgcctacctctcatgcccctttgcctaatcggggtcatgcgcttcagcttggccattctcttcctcctcgtaaaggacataggcgctctagcagtgattcccctttaggaatcgctgattttattcagtctgcccctcagtttgttccctctaagacttggagcaatcgtgaaaattcggcatctaggggagggaactctggttttgagaagccgattcagttagtgttaaaggaaccgattaaggatatggaccgtgttgatggttttggtggagaacctatggttgggaggaaagaggatgatgcactggatgatttgtttagtgcatatatgaatttggacaatattgatggtctcaatttttctggtatggaagataaggatttggatagcagaactagtggttccaagacagttgagagcagtgataacgaagttgagagtcatgcaaatggcaaagtgactggttct

SEQ ID NO: 12757 - DNA, 469 bp, Glycine max
aacatggacaaggaagttaccaataaagtacggagtttttggatcaaaccgaatccgacaagcagagtaagaagaccaacaacaacaagaagaaagaacaacaaggacaacctagttgggtgttcgaagacgaggtggacgatgatttggtttcggagttcaaagatctacccatgaagttccaacaaacactgatcccagacctggaacgaatctccacaacctcaaaagcctacataacaaaagccaacaaagagatcacgagagggttcaaaccctacgttggcaacaagtacgcacccaccatcaccactttactctcttgcgcattcgctttgatccctttgcttttggcctcactcctcttcaacaaaatcaaagcctatttctcactccaaaagctcttaatcttgatccaagcctacctggctatctacttatccattctttgtctttcttccttcggcac

SEQ ID NO: 12758 - DNA, 454 bp, Glycine max
  unsure (1)..(454): unsure at all n locations
ggaagatcaacctaatgtgacccctgtattcttctatgactgttaattcggagtcagaccttgacaattcattgatattgtatcaggaaatgatcatggaattatttacatcgagggataaaatggagcagcagttattgcagatagcaaatactgtatatggcatgctgacaatgaaatagactctacatcgaatcgaagtatcaatcctaacttaaggattctaatttattaccattttcttttgctactctcatagagtgtagagtttagatattgtacagtgttaacaatcttatggggaagtgaaatccttttccaaccacaaatagaatgtcacccacagtgagcttcaaattgttgatattcttccctggccttttacaatacaattggttntaaggtatgtcactaggtcaatggtagggctgttattcagtgaccaattttctag

SEQ ID NO: 12759 - DNA, 439 bp, Glycine max
aagaaaagctaaaatgcttaacttctcaattgcatatgggaagactcctgtggggctttccaaggattggaaggtttctgtgaaagaggctaagaaaacagttgacctttggtacaatgatagaaaagaggttttgcaatggcaagaggagcgtaaaaaggaagctcgcgtgttacattgtgtttacacattgctagggcgagctcggcggttccctttgatggcccaagctaacacctatcagaaaggtcacattgagcgagctgctattaatactccagtgcagggtatagtgcagctgatgttgccatgtgtgctatgttgcaaatttccaagaataaacggttgaatgagcttgtgtggaagttacttctacaggttcatgatgaagtcatatcggaaggaccaacggtattcggcttaagttgcgaaatccata

SEQ ID NO: 12760 - DNA, 439 bp, Glycine max
ttttccttggaaatgtcaaggctttttacatatgatgatgtggtggagagagtagcccaacaacttggtttggatgatccgtccaaaatacggcttacaccacacaactgctactatcaacagaccaaaaccccagcctatcaaataccgaggggtagaacatttgtctgatatgttagttcattacaatcagacgtcggatatattatactatgaagtacttgacatccctctaccagaattacaagggttgaaaactctaaaagttgcatttcatcatgccactaaggaggaagtggttattcatactatccgactcccaaagcagagcactgttggggatgtccttgatgatcttaaaacaaaggtagagttatctgatcctgaagctgaacttcggttgcttgaagtcttctatcacaaaatatacaaggtcttc

SEQ ID NO: 12761 - DNA, 2232 bp, Glycine max
gacccaagcgtgcgcaaaaccctaactctccctacctttgattttgaagatgaaagggaagaagaacaccatgaccaaaaacgacgttgaagacgacggagctccggttccttcaccaacagtatccgattccgactctgattacgaggactcttcagcagatgacgacgacaaatcttctgactcgctggattctcaatctgaatcggaattagaagatgcttcacctgagaatggtggctccggcgatgtagaatctgcagaagatgaggacactgtcaatgatgaagacggtggaagtgagagctctgatctccatcaggaaggagctgagagtgattcctccgaggatgaggtggctcctcgaaacaccattggagatgtgccattgaagtggtatgaggatgagcctcatattggatacgacatcaaggcaaaaaagattaagaaaaaggaaaagcacgacacgttggattcatttcttgcaagtgttgatgattctaagaattggcggaagatctatgatgagtacaatgatgaggtagtcgagttgacgaaagatgaaatcaaactcgtccgtagactgctcaagaatcgggcaccccattctgactttgatccatatccagatagtgttgactggtttaaatgggaagatgccaaacatccattgtctaatgcacctgaaccaaaaagaaggtttattccttcaaagtgggaagctaaaaaggttgtacagtatgttagagcaatccgccagggattaatcacttttgacaagccaaaagaggaagatggtccatatctcttgtggggagatgattctggttcaacagaaagagcaaatcatttggcttacattcctgccccaaagcagaaattacctggccatgatgagtcatataatcctcctctagagtacattccaacccaagaagagatcaattcttatcaattgatgtttgaggaagaccgccccaagtttattcctaaaaggtttgcatctatgaggagcattcctgcatatgagaatgctatgaaagactgctttgaacgttgtttggatttgtatttatgtcctcgagttcggaaaaaacgtctcaatatcgatcctgaatctttaaagccaaagcttccaagtcgaaaggagcttaagccttatcccacaacatgctatatcgagtataaaggccatgaagatgctgttacatcaatttcactcgaagcttcaggacaatggatggcttcaggttcaagtgatggaactgtccgtatctgggaggttgaaactggcagatgtcttaggcggtgggaggttggtgaatactgttagctgtgttgcttggaatcctctgcctgatattcatcttttggccgtttctgtgggccaagatgtacttctacttaacacttgtttgggggatgaagaagagcagaaacggattaaggagcttctctgggttgactcgtctacagcatcagatgactctggcaacaaagcacctagtgtaagctggcttaaagatgataaacatatgggtttaaggttaaggcactttaagactgttactgctgtagaatggcaccggaaaggtgactacttttcgacagtgatgccagcaggtgaatcaagagcagttctgatacaccagttatccaaaaagcttacgcaaagacttccattcaaattacatggacttgctgttaggtcaaccttccatccatcccgttccatcttctttgtttgtaccaaaaagagtgttcgtgtgtatgatttactgaagaccaagatcataaaaaagcttgatactgggcttcgtgaagcttcatccattgcagttcatcctggaggtgataatttaattgtcggtagcaaagaggggaagatgtgttggtttgacatggacctttcatctaaaccgtataaaattcttaagtgtcacccaaaagatatcaacaatgtcatctttcatcgctcgtatcccctatttgcttcatgttcagatgactgcactgcatatgtttttcatggaatggtttattctgatctcaatcaaaatcctcttattgttcctttagaaattctacgaggtcataccaattcaaatgggagagggatactggactgtaaatttcacccgagacagccatggttatttacggctggtgctgataaactgattaaactttattgtcattaatataaacatggacatacgtgcatgtgatagg

SEQ ID NO: 12762 - DNA, 422 bp, Glycine max
ggccgaaagtgtgggtaaaactaaaaccctttacctcctccaaattcgaaacaaaaccctaacttgtgattttgaagatgaaggcgaagaagcatgcccacgctgaagaggagggagttgctccgcttccttcaccaacactatccgattccgactctgattacgaggactcttcagccgatgatcaccacgaatcttctgtctcgctggattctcaatcccaatcggaattagaagacgcttcacctgaaaatggtagctccggcgttgtagaatctgcagaaaatgaatcatctcaatacgaggacactgttaatgaagaagacggtggtagtgagagctctgatctccatctggaaggagctgagagtgactcctccgaggatgaggtggctcctcgaaacaccgtgggagatgtgcca

SEQ ID NO: 12763 - DNA, 490 bp, Glycine max
  unsure (1)..(490): unsure at all n locations
ccccttttcttttcctttttctatctataaaacctcgtccaaaccaccaccttagccccaacatctctctgaaaatcactcacacgcaaaagagagagagaatcgaaacaccccgtaagcagcacggcacaatcgcaacgcaagagattaataatcaatttgcatcgatcgatcgatcgttggttaggtttttgttttgggggaatatgggcgagttgactcaggcggaggtgtactcgcctcggactcagcaagtgtggagggcactgttgagttggttggccttcttctttcagatcttcttccagattataagagccttaggtcactaccctctactctctttctcttctaattcttcttcttcttcaaacgcttcttcctcttcctcttccttcaaacctcttccctccgttgagattgctgaacacgattcgccttctnccttcgtcctcgatatctcaccacttgattattcccccgccgatca

SEQ ID NO: 12764 - DNA, 872 bp, Glycine max
tgagaaggtaaaatgttggaatggctataactgtagcctcttgcactgttgcacataccaattacatccaaaaaaaaaaagaaagaaatagaatatagatggcaggaatttgaaaaatggaatcaggggtgggggttgtcaatcttgaaagagggtaaataacccggcatgtaaagattgacggagaacaaacgacaaaagggacattttagtagagctcatgtaacgctgtgacgactaatgggcctttgcgggccagggttatcctcgaactattattttttctctttctggctctaagatacatgacatgctagaattaggctacggatgccttttccttctggtcaccaaaaatgcgttgccggaagtcagaaaccattagtgggaggcccttgcgcaggtcaaccttgggttcccagccaagttgatccttagccctacttatatcaggctttctcttgtgcgggtcatcctctgtgttgggcctgtactctatcctagcatcagggtctattgtttcttgaaccaccttggcaagttcaagcatggtaaattctccgggatttccaagattgaaaggtcccacgtgttctccttccataaggcggattagaccctccaccaaatcagagacatattggaaacttcttgtctgcttcccatctccataaacggtcagaggctccttccgtagtgcctgagcagcgaagttactaacaacacggccatcatctaagcacattctaggcccgtaggtgttaaagattctagcaattctaacctgtaaaacacaatacacaagaggcaccgtttaaattttcactacttgagaagtccatcaaaggctgaactcaacacaagaattaaac

SEQ ID NO: 12765 - DNA, 1297 bp, Glycine max
aaaagaaaaaaattgcaatgacaaattaataaagttctgagcattgcatccaggtactgtcttgcagccaggtccctcctccttccatagttcccagtttatagtttctacccaagtacttttaccagggctgctttgttgcaatgaaataggatatgactatggatgcgtaacaacaaaaaaatatctctacccttcattttgtggaccagcatatcacgggttcctcgttggccagaccctggaattcttactacgtggtcctctacttccgttccacgtttcttattgagttttgaaaaatatgtctcacacggagtgtgctgcagcaagtgcaaggcgtgtctctgacaattctaattctaaacatggcccagaaaggccggtggtgaccggagaacataataagagaaggaatgctaaccaattgggttgacgttgccccagtaagtcgccttctgagggtgctgcagaggatctccataaacctcactggtactcgtcaacaagaacctcgcgcccactctctttgcaagccccagcatgttcaaggtccccaccacattcgtcttgatagtcttgacggggttgaacttgtagtggacaggggaagcagggcaagccagatggtagatctgatcaacctcgagcaggagaggctcaacgacgtcgtgtcggatgagctcgaatctagggttcccaaaatggtgcatcacgttctcttttcttcccgtgaagaaattgtccaccacgatcacgctgtcccctctcgcaatcaaccgatccaccaggtgcgacccaacgaaccccgcgccgccggtcaccacgatccggagccccttcctcttaattcccaacggcaccttccccaccgagtgcaccgccgcagcgacgcggtggtggtacgccggaatctttgactcgcgctcgaagtacgagatcgggagagactcgtacggaacgcttgaagaggatgaggaagggacgagtgtgaagaagagggttgctatgatgacgccgacgaggacgaagacgagtcgctgctcgcggagcatgtagtgaatcgggcgagtcacggtgaaccagggcttgtggggcttcggcgagtacgagtcgtccacgggctgagcctcgtggcctctgaaaatcaattcggagcccatttctattctcttcttctcactcaattctgaattcaaatctccttcttcagaagaaatttggtttgaagagaaatgcggaatggactgagttccgagttgggaagagaccgcgactcagtcgccggggacgggaa

SEQ ID NO: 12766 - DNA, 352 bp, Glycine max
aggggaagagtaagggacgaatgtgaagaagagggttgctatgatgacgccgaggagaacgaagaggagtcgctgctcacggagcatgtagtgaatcgggcgagtcacggtgagccagggtttgtggggctttggtgagtacgcgtcgtccacgggctgggtctcgtgccctctgaaaatcagttcggagcccatttctgtgttcttcttctcagtcaattctcttcttcagccagggtttggtttgggctttgccaagtgaagagaaaattgaaatgcggaatggactgagttccgagttgggaagagaccgctactcagtcgccggggacgggaatgagatgctgtcgag

SEQ ID NO: 12767 - DNA, 363 bp, Glycine max
ttctccttccataaggcggattagaccctccaccaaatcagagacatattggaaacttcttgtctgtttcccatctccataaacggtcaaaggctccttccttagtgcctgagcaacgaagttactaacaacacggccatcatctaagcacattctaggcccgtaggtgttaaagattctagcaattctaacctcgaacgccggcacctcggtggtagtccatggtcaacgtctcggccgtacgctttccctcgtcgtagcagcttcggacaccaattgggttgacgttgccccagtaagtctccttctgagggtgctgcagaggatctccataaacctcactggtactcgtcaacaagaacc

SEQ ID NO: 12768 - DNA, 528 bp, Glycine max
cccacgcgtccgcggacgcgtgggttccaacctattcaaatttcaaaacaaggaaatggagtcactacttcccaagtcaatctacggtggcatcaagagttacttgagaaggcggcgctaccggcgtctccacggcggcgccaccgtcgttagaaggaagatggcgatcatccgcttgagagggccacgtaggtattggaggatcagagcagttccaaggcttagatgggtgatgagatcaccattgacgattttgacaaagctcaagaatgcttatatgaactttatgttgaagctgtcagggaacgtacgtgctatgaacagtgataacatctttgaagtgaaacggattccaaaggctcgtcaagtgtctaagggctattcccgtgatgaatttgaggccaggctcatttttgagatttctaagaccttggttgcttcctatgaacttcatcccatgtagttgtgttctatatatgttattcagctatcccccaacttttaattctatgtttgagattttctttc

SEQ ID NO: 12769 - DNA, 655 bp, Glycine max
gttatcatttcttggtgttccgcactttgtgtcacctgcaactacatcatccactgtaaagttgcaacactttcgcaaaccttgtacttgtagttctacacccttcttccgtctcctttcatatccctttcttcacgttcgggctccgcgggccattgggcccgatgggaagttctacccaagcccagccgacgacgaccctccggaagccgacgaggattcctcccacggcttctccaccttccagcaaatccagcgccaagcccaacgcgctcgccaaatcgaagaagaagactacaagaacaaccagtccacgtacctcgccgccatcgccgacgtcgaagacgcccccgacaacgcccccttcgactcctccgaggatgacctcttcggcgaaatcgacaaagccttagctctcaagcgcaaagaattcgtctcccaaggccttctccaacccaatccccccaagcaggacccactccccgtcgccgccgtcgacgagctccaaccagacgagctcggcgatttggctgaaatcgaacgcctccagggactcaccgctgacggtaacggaagctcaacccattcttcggttggattccattttgaccggtattggaaaaggaagggtaggaatggagaaagggaatttaag

SEQ ID NO: 12770 - DNA, 503 bp, Glycine max
aaagatggatgattttagatatgcacatgagcaggtgtgtgcaagtgtgtcatcagagtcaacaaatatgaatgagctactccaatggaatgacctctatggagaaggaggatcaagaaaaatgagatctctgagctatttcatgtaaagctctctctctctctctctctctctgtatagcatttcttgcttaggctattcttctatcaccacctaaagggtgcagcaaggtcagcagtgacctgtttgatgtggaaatcccatctttggttctgcctctagtgtattatatcatcataggttttctttcccctttttccaaccctcaccatcctctccaaattttttcagatattagtagaatttgttgactatttcaattgagataaaaaagtttaatttaggttcccagctgatccaactctccctccccttattcttgcttgtatatactgagttttttttttctcgtaaaaataaaataattcttaattatttcttgt

SEQ ID NO: 12771 - DNA, 426 bp, Glycine max
gtgtgtgcaagcgtgtcatcagagtcaacaaatatgaatgagctactccaatggaatgacctctatggagaaggaggatcaagaaaaatgagatctctgagctatttcatgtaaagctctctctctgtatagcatttcttgcttaggctattcttatatcaccaactattgatgtggaaatcccatcattggttctgcctctctctattgtgttatatcatcataggttttctttcccctttttccaaccctcaccatcctctccaaattttttcacatattagtagaatttgttgacaatttcacttgagataaaaaaaagtttaatttaggttccctactgatccaactctccctccccttattcttgcttgtatatatcaagttttttttctcgtaaaaataaaataaatatttatttttatt

SEQ ID NO: 12772 - DNA, 470 bp, Glycine max
aagaggttgagacttgagagatattaaaaaagccaataacaaaacaaaacaaggaccctgagagagggtgagacttgagagaaagagagagctgaagtagagtccgaaccaagtctcatagctgagagtttaggatcggaattctgcctccgttcttcttcatctcacctaccaccttaacctcgggattaaagaagtcatggctatatggggtggttgatggaagatattagcacaaacttggtttgcttctatgagccacatctcgtgtttccttctgcttcataatggtcttgaagggtctatgtgagaggattgtttcttcaaaatgctcttctaaaagctcaaccgagactgtagataatacacagtggttgaaacatatagtgaatcatcagcttctgaaaagaaagcagttccttctcgaagtaatgggtgggcagctgctgttaagaaaagttgtactggtg

SEQ ID NO: 12773 - DNA, 320 bp, Glycine max
aaaaagccaaaaacaaaacaaggaacatacctaagagtttgcgagagagacagagagagatgaagtggagtccgaaccaagtctcatagctgagagtttaggatcggaattctgccaccgttcttcttcatctcacctacaaccttaacctcatattagcacaaaattagtttgcttctatgagccaactgtcgtgttttcttcagcttcataatggtcttgaagggtctatgtgagaggattgtttcttcaaaatgctcttctaaaagctcaaccgagactgtagataatacacaggtgcccgtttattcaaaagcagg

SEQ ID NO: 12774 - DNA, 454 bp, Glycine max
tttgtaagctgcagcctgacctgcagcaaaagcactcaagctaggggatgcttctccaagagacattgaagcagttagcacggcaataatcacattcatcactgtgcccccattatatcctttttccattatcatctttgcgccaaaccatacagccaaagcataaccacagaaaataactaacataactgtgcctagaccagctccagctatgaaaccttcatgaactcctgatttgtaagcatctacaagaaatttgctataactagatactgcttgcttttccccagtgaaggatgcaacctggaaatatacacagggaaagaaaatataattattatagcactgtcaagacgcaagcaacaagcaataaacacattctcaaccaagaaattatagaattccacagatatctacttaaggtttcaacaaataacatacagttcttattgat

SEQ ID NO: 12775 - DNA, 968 bp, Glycine max
gttctagatcgcgagcgccgcccttttttttttttttttttttttttttttttttttaatttgaaggtgctggaaattcattggcaaagggtatatcgtgtttacaaatcaacgccagaaaatccggagttcaaagactatcaaactttccgcaaatataaagcatcttgaattttattttaatgcacctctcgtaactccaaaaagaaaatggaaaaatagcccatcattaccaatgggaatcaagaaattttgagcatgtaaacaatcgaaaccaaaatgatttgaagttaaatgaacccaaactattgaaccaagcccctctgcttgaaaacatctagcatggcagctccaattttggcaggggactccacaactgtgaccccagcttccctgagggttttaattttgtcttgtgcagtgcccttgccacccgacacaatagctccagcatgacccatacgacgaccagggggagcagttaaaccagcaataaaagcaacaacaggcttctcagttccactctccttaattagtgcagcagcatcctcttcggcagttcctcctatctctcctataagaatgataccttctgtttgaggatcagttaggaacttctgaaggcagtcaacgaagtttgttccattaaagggatctcctcctatacccacacaagtggattgtccaaggccaacagcagtcgtttggaaaaccgcttcatatgtcaaggtaccagaacgagagacgattcctatgcgaccaggcttatgaatataacctggcatgattccaattttgcattcccccggcttgataatgccagggcagtttggtcctatcaaacgagtcttggactgcctgttaagtgctgctttaaccctaaccatgtcgtgctggggaatgccctctgtgatgcagacgacgagatccagttcagcctccatggcctccatgctcgcgtcgagccg

SEQ ID NO: 12776 - DNA, 752 bp, Glycine max
cccacacgtacgaaaaaatctttctgtcaaaacccaattttgggagccatggggtgtggtgtactctgtcgactggtccattaactgccaaaggagataacaagaagtttgatagcacatcccttgaagaaggagaagttgttgaagagggaatggatttgaaaaggtgccagctgcaagtgactgagagggctcttatcgagatgcttcttccttgcatagatcaaagttctgacgaatcccgcaattcctttgcaagtgatatggtgaaacagttaagttatattgagcaacaaataactgctgttacaggtggaagtaaatcagtaggaagtgctcctcctggagttgaaggtcagccgaataaagtaaataaccgcaaaaatatgagaggtggaggccctgcattagctagacgacaaacagttgcagcagcttcttctccaccgtctcctgcagccctacgagcttctatgtcattacggttgcagttgctcctgagatttcttcctattctttgcactgacagggagccatctgtgcggagcatgagacaatttcttgccactgtaatttttcgtctccttggtagccgggttgtgcatgaggatgcagacatttcggtgaatgctgtgccatttctgcctataagggaggcagagtcatcttctgaagttgcttctgctgcttttgtggattcttcttctgggagtttgtttgatcgtttggtgttggttttgcatggattatta

SEQ ID NO: 12777 - DNA, 393 bp, Glycine max
cccactcgtccgcccactcgtccggtcttctcaccagaaccaaccatacaatcacatacgtgtaacctaatcttacgctctctctctcttcaatctctctctctctctaacactttccacagcctcggaaactaaattccggtgggctagctagcttctcttctctttaagcttatataagttcaactaactcacgtcgcctccacggttccgtgagggctcaatcattcgtcatcgagtttggacgcacgtgccatatttgaacgcaactctcggtagtactacagtagtagagtgcaatatagaagaagaaacgaaacgaaatgaaactctatggcggttaataatattatttgagttttaagtttaagaagaagaaagacacggcaacgc

SEQ ID NO: 12778 - DNA, 547 bp, Glycine max
gttcagttctttggtttgacatctttctcaaagaatctcttatcttctttctttcccattttttcattccactttatctcaacctcgatttttccattttccgattaactcactcttttcacgatcttatctacatataatttcaaaatttttaatttctcaattgattgtttgtgacggtgatcgatcggtcggcgcgatcgtacctgcatctattctcttccagtgtataggtttggagaatgagttctgtgcaaggaccagttgtgtgcccttctgtccgtgccaaacaagtagggttctgcagcattcctatgattggggcagtgaaaatgaacgttagacgcattagaagtgaattttggggtctcaatggcgccaaggctaaacccggttttctttcttgccgtataaacacacgaaagtacaagactgtgcattgtacttttaactcaccctccaatgacagtggaagtactgctgacaatttcaatgaaaaagatgaagattatgttaattctagcgtcattgaagctgttgaggtgaa

SEQ ID NO: 12779 - DNA, 426 bp, Glycine max
atttccctttgtctcaacctcgatttcccccctattttctgattaactctttacacgatcttatctacgaataataaaaaattaattcctcaattgattctttgtggcggtgttcgatcggtacctgcatctcttcttttccaggtttggagaatgagttctgtgcaaggaccagttgtgtgcccttctgtccgtgccaaacaagtagggttctgcagcattccaatgattggggcagtgaaaatgaacgttagacgcatccgaagtgaattttggggtctcaatggcgccaaggctaaacccggttttctttcttgccatataaacacgcgaaagtgcaagactgtgcattgtacttttaactcacccttcaatgacagtggaagtaccgctgacaatttcaatgaaaaagatgaagattatgtt

SEQ ID NO: 12780 - DNA, 1272 bp, Glycine max
cccacgcgtccgcggacgcgtgggttggcctttccgcacaactgaacttaatttcaaaaagtatcgttcctccactcaataaaatcaggtcacaaagtttcaaaaagattgatgatagttctgatttcttgctggatactgaaagtgatcttgatgagccggcacagattgaacaagaacatgaaaaatccaattatcatgccagaaagtctgtttcatggatgaattacgggctcaaggaatttcgcttagttctttgcagaaaaatcagtgcagatgagagcaaattgaatttagaagccaagatcaagatcagtatggaatatcctctaaggcctcctctttttgcattgagcattagttgtatatcttctggggaaaaccatgatgagacaggtttggagtggtacaatgaacttcgtgcaatggaagcagctgtcaatctacacatactaaagatgttacttgtcaatcaacaaaattatgtattggctcatcaagtgaattgtcttgctatgttgttcgactattatttggacgaggcatccccatcatctgaaaggacaaattgtacttccgtggttgatattggcttatgcaagcctgttactggtagattcctgggtagatcttttagaggaagggatcgcaggaagatgatctcctggaaagacatgaaacttaattccagctgtccctaatagtggtaggttcctgtctgaatctttcagagggggaaggatcacaattgatctcatgtgaagacaaaattgtcttaagtagtaatgttcagctctggagggttggcaaatggatgctatggtatatggtatggcaaggataatgacattgtacctctgtagtatgcgttgagccaaccatgtgacatcattgttcttgactctacaaccaaaaaactggctgggatactatgatagattttgaagggatcatttcagctgttgagtgtttgttattgtgatttaatttcttatttctgccaaatgcagctagttcggttccagtataggagcaggcatcgtgggtggaattttttaagagttgtactttaccgaggtctactgcatagtgattgtttgtagacttctagtattttcttttattggttatatttaattctttccattctgaatccgagattccctagcaaagacgagatgatttcctgtcagcggaatttttaagaataaaggacattattacaacaagtaggttgtattgtatgttactgcaatacatcttttttgcact

SEQ ID NO: 12781 - DNA, 552 bp, Glycine max
ataaaaaacacacaagcaccacaataacaaaacaaaaatacaattcaaagatcacattctccttcttctcatgttatgttaataaggtttctctttctccttccagaaccaaaatcccatttctggaaaagaaatggaggaatcagattcaacaccaaagtctctgatggagaatctgcttggccttttgagggttcgcgtgaagcgtggtgtcaaccttgccgttcgtgatgttcgaagcagcgacccttatgttgtcatcaagatgtacaaccagaaactaaagactcgtgtgattaaaaaggatgtgaatcctgagtggaatgaagaccttactctttctgttataaatccgaatcacaaaattaaactgactgtgtatgaccatgacacttttagcaaagatgacaaaatgggagatgcagaatttgacatctttccctttatagaggccttgaagatgaacttaactggccttccaaatggtactgtagtcaccagaatacaaccaagcaagcattattgcctggcagactagagctgtataactta

SEQ ID NO: 12782 - DNA, 428 bp, Glycine max
  unsure (1)..(428): unsure at all n locations
aacaaaaatatataaacgcattaaagtaaaacatgttttaagtacaaaacatttgcaatacgagaaacgattacattaaaagtaaatcacgagtcactattaggggtggaaatgagctaagtcaagctaagctttactagatttgaactgaatatgtaaagcttgaacttgacacaaggcttggctcgacttacataaaagcctgacttggctcacaagcctatttaaaagcttgcttaaagacgtctttgattaattaattattttaaaacctagtgaaatactaactaaaaaaagaaacctataaaattttgtataagtaatgtacaaatccaaaaataattgataaacaaaatcatattgaattcaaagtcgttaaaatcccaagtatatcagnggaaaaaaannnnnnnnnnnnnnnnnnnnnn

SEQ ID NO: 12783 - DNA, 430 bp, Glycine max
cgtaagctcggaattcggctcgagttgaacataaggggcctgaaggcgctaacagagtcggattctctccatatttagtggaatttgcttactctttatcagcaacttaagttactcattgctgtcacgaaaaaaagaaaagaaaaggaaaacatcactttggaaatgtgtcaatccaatgaaggtatgatgcatggccatataagtagggagttatacgcctgcaacttgaaattgtttgttctctactttgactatgcatcaattataccacaaaagattgagaaggtagatattctctattgcaaatcaatctttagcttcaacacaatgtaagctacttccccaactgaaaaataatgatgatagtgttattcatgaatcgagatcaaatactgttgctgagttcctctgtgaagatgtgtccgta

SEQ ID NO: 12784 - DNA, 478 bp, Glycine max
tgagaggaagaattaaattatgcttagggaaacctgcagatcaaagtattgtattggtgaaattccttggcacgtttggtgggctgggagatccagagaggcttcataaatatctttctgataataatggcggtagagctgaatatgagagagtaaagtctgaaggtattaaaagctgcaacacgggcgagacagatgagggagacaaagtggagaatattctttatggctacgtggggatcgcggaggacttggacaaactagatttcaatagtaagaaatggagtatggtaaagagtaggaaggagatcgacgacctggataaagctcctgttaaaaccgatgagaagcgatagttacagtgtcattgtcattgaagatcgattcaagagtttcatggtccctgacgcttaatattgagtgttctaattgcataatctctttttctctatgcttttgctagtagtttatgttattt

SEQ ID NO: 12785 - DNA, 363 bp, Glycine max
ctgttttttgggtaaattgtactttttttatgggaaaacaaatatacaacttggaatggatttgaggcaaattgtgccataagcagatcttctttaagtggctaaaacaaagtttaaaaagcatgttaacaataaaagaaaatgtttctggtataggaccagcagtacaaaaaaatagtgtacgagtacctggataaaacacccgttttgcaatagtgcaacttttaagtacatattgttgactgtccgtagtccacgcagagttacaactccacacttcaacaacaacatgctgacagttcctaaagaaaactactcaaaaaaaaaaaaaaaaggcataacccagatgttccctcatttgac

SEQ ID NO: 12786 - DNA, 515 bp, Glycine max
tggatgagttgtgcagcaatgagagtcttggcagggaatatgtagatatgttgcgatgtgatgtaagtaagctgctcaaggaacattctgagacgaacaatgtctaattttagcttgtatgaatacatatgcttcattgcttctattgtctcgcaactcttgaccttcctgaaagtccttctagagaatgggttttggcgtgttgtgccctgaataattaattgatcattaattggtctggatcattttgacggacttccagatcatgtgagaaaattaacatacaccacatgccagacggttgtttcaaatgtagcatttaggcgtttaatggccttccattgttatatatttttatgtcctttctgattataccctcgtttgggcttaatttggacagtgaaggcttctatcaaaatagtcttgtacatctagcgtttccattatatgcaagtcaaccagtgtgtttgttttcacctgttcaataccataatcaaacagtagattggtaaagg

SEQ ID NO: 12787 - DNA, 418 bp, Glycine max
cccacgcgtccgcatctttctcttcaaaatcttcttctcttttccttttattctttttggtgcttccttcatgcaggcgattccggctccatgcccgcaagttgctgaggacgagtttttaccgcagcacattgacctcaggtatttccttcttttttcctttctttttcttgatatctattttctttaagcttccttttctctgcaagtattttccgctatggccaaagaatttgtgaatggctttgttcatcaaaacggcatcgctgtcatatcccgcaatccccccaaaggcgattccggctccatgcccgcaagttgttgaagacgagtttttaccgcagcacatggacctcaggtatttccttcctttttcccttgtttttcttgatatctaaatttttcaaagcttcctttc

SEQ ID NO: 12788 - DNA, 421 bp, Glycine max
cgaattcgggtcgatcacgcgtccgctcctcttttctttttattcttttcgtttcttccttcatgcaggcgattccggctccatgcacgcaagttgctgaggatgagtttttaccgtaacacattgaccttagcttccttttctctgtgagtatttttcgctatggccaaagaatttgtgaatggctttgttcatcaaaatggcatcgctgtcataacccacaatccccccaaaggcgattccggctccatgcccgcaagttgctgaggacgagtttttaccgcaacacattgacctcaggtatttccttcttttttcccttttttttcttcgtgtctaattatctaatgttttaagcttccttttctttgcgagtattttccactatggccaaagaatttgcgaatggctttgttcatca

SEQ ID NO: 12789 - DNA, 855 bp, Glycine max
catgattttgcattacacaagtttatgaccatcagtgggcgagttggtgaagcaaagtcaactcactggaaactcggttgaactcggtgtgtgtagaaatggcgaaacttgaagccaagctagggatgatcttggactcggtgggtcagttcttctccggcaaggaccatcttccttattgtgactctgacgtcgtagctggatgtgaaagagaggtcttggaggcagaaaaacaatcatctcaagagtatatgcaagactgtctcctgcgtttatcatgggctcttgttcactccaaacacccacaagatgtgcaccgtgggatagccatgcttgaatcatctttgcctgctacagaggacccactgcagcaaagggagaagctttatcttctggctgttggatactatagaaatgctgattattcaaggagtagggatctcgtcgacaggtgcctcgcgcttgcacccgactggaggcaggcagtgacactcaagaagacgatcgaggataagatcactaaagatggtgtcattggcctgggcattgccgctactgctgtaggacttatagcaggtgggattgcagcagctgtgtctagaaaaaagtgatagaatcatttctataaaacacacatgatctgatatgtaagaggcaaacatctataatactgtgattttgctgcatcttactgcttttatgaaaagaagggcatgaacaataatgtgtacaaagcggtggaaatgatgtctcagtactagatgagagatgtattgcgtgtcttcatgtttaaaaaaaacatatacctctgtacttttatcatttctatgatttacttcctttgatgttttaaaa

SEQ ID NO: 12790 - DNA, 457 bp, Glycine max
  unsure (1)..(457): unsure at all n locations
ctcgagccgcgaaatctaagaagtctgctctgaatttatctgagagctgaagagagggaacgagtttgtgaagtaaagttgactcagtggaaactcggttgaactcgaaatggcgaaacttgaagcgaagctaggaatgatcgtggactcggtggggcagttcttctccggcaaagaccatcttccttattgtgactctgacgtcgtcgctggatgtgaaagagaggtattggaggctgaaaaacaatcatctgaagagcatatgcaggactgtctcctgcgtttatcatgggctcttgttcactccaaacacccacaagatgtgcaccgtgggatagccatgcttgaagcatctttgcctgctacaaaggacccactgcagcaaagggagaagctntatcttctggctgttggatactatagaaacgctgattattcaaggagtanggatctcgtc

SEQ ID NO: 12791 - DNA, 2001 bp, Glycine max
tttgccttttactgtaccatacacatttcctataggctcttgcaaagctaaattcaattattgaagccaaagaaaaagagacaagaccaaaggcagtggctgccgtggaagaaagacgaaaggtttcatcgatctctgttgaacttcaaacactgaggaagaagagccacaaaattcttccttctgcagggtgcaaggtactgcttcaatgggaaattgctggggttctccacctcacaacccaaccccaacaactaccggtaaccttagtacaggtacaacggggacatctcaggcgatcagcagcggtagctatactactactactacgacgactactacttcttctggaagtgggagcagctccataaatagcaagttctcagtgtcaagcggtggtcagccttatccaaatggacagatcttacctacctctaatttgaggatcttcacttttgccgagttgaaggctgcgactagaaatttcagagctgatacagtgcttggggagggaggttttggaaaagtcttcaagggttggcttgaagaaaaggccacttcaaagggtggaagcggaacagtcattgccgtcaaaaaactcaactctgaaagcttacaaggacttgaggagtggcagtccgaagtaaattttctaggacgtctttctcataccaatcttgttaagctgttgggatactgtttggaggaatcggagcttcttctggtctatgaattcatgcaaaagggcagtttggaaaatcatctatttggaaggggttctgctgttcaaccacttccttgggacatcaggcttaagatagcaattggagcagctcgtggcctcgctttcttgcatacatccgagaaagtaatttacagagacttcaaggcctcaaatatattgcttgatggatcctataatgcaaagatatcagattttggcttggcaaaactgggtccttcagctagtcaatcccatgtgacaacaagggtgatgggcacatacggctatgcagctcctgaatatgtagccaccgggcatctatatgtaaagagtgatgtatacgggtttggagttgttttggttgaaatactaacaggccaacgagcacttgataccaaccgtccaagtgggctacatagtctaacagagtgggtgaaaccatacctgcatgacagaagaaaattgaagggcattatggatcctcgattggaaggaaaatttccatccaaagctgcatttcgtatagctcagctttctttgaaatgtcttgcatctgagcccaaacagcggccatcaatgaaggaagttttggagaatttggagcgcattcaagctgccaatgagaaacctgtggagcctaaattccgttctactcatgccgccagccgtcaaggtcaccaggctgtgcaccatcgttctccacgtcaggacggtagttattagttagtttctcttaagaaaactaatcccgttggttcgttgtgttatttgtctctccgttgaagactttgcctattgttcattatttatgtatttcttggactcagatttgtacgggtaagtcatgtattagtattgttaagtgtaaattattatttgtgttctgttaaacaaatagtgaggtctctagtacaacattatcaggaaagtgtttgcattaaatttgacgagtctatctagatacaatgtaactgtttacatatacatatgaacctgtgaaagaaagaaacaagagtccagaaaaaatgattagttacatcagtagcttcgggtatgcacaactagcctggtaacatattcatgattgtaactgagactgggagtctgattctctgtgtgcgcctgttgtgggaagtttatttttctcgtgtactgcataaggggcaaattgttggaggtaaaagtgctgggaatagaagactacatgtgacaacttcaaatatggggttgtatcctttcaacaatagaattttgtggtggtgtgggaatgcaagagg

SEQ ID NO: 12792 - DNA, 398 bp, Glycine max
  unsure (1)..(398): unsure at all n locations
ccggtcgagcacgcgtgcggcacgcgtncgnccacgcgtnncgccacgcgttccgccacgcgtgcggcaaagctaaattcaattattgaagccaaagaaaaagagacaagaccaaaggcaggtgtggaaagaagaagaaagctctcatcgatcggtgttcaactttaaacactcaggaagagccacaaaattcttctttctgcagggtgcaaggtacagcttcgatgggaaattgctggggttctccacctcacaacccaaccccaacaactaccggtaaccttagtacaggtacgacggggacatctcaggcgatcagcagcggtagctatactactactactacgacgactactacttcttctggaagtgggagcagctccataaatagcaagttc

SEQ ID NO: 12793 - DNA, 306 bp, Glycine max
cggctcgaggactgacccagtccatgtgacttaatatgtcaatacaacaacaattgctgaatcatccttccattaaagttttgccttttactgtaccatatacatttcctatagcctcttgcaaagctaaattcaattattgaagccaaagaaaaagagacaagaccaaaggcagtggctgccgtggaaggaagacgaaagctctcatcgatcgctgttcaacttcaaacactcaggaagaagagccacaaaattcttccttctgcagggtgcaaggtacgacggggacatctcaggcgatcagca

SEQ ID NO: 12794 - DNA, 542 bp, Glycine max
gatgttgataattcagataaaagtcaaaagtctgaggacaagctttctattgataataattcagataaaagtcagaaatctgaggagaaacttactgatgataatgaacgccggtcaaaaagaaagtaccgttcaagatctagtagacatgaagaggaggaagaagaaaacaaagataggagggatcacataagatccaggaaaaaacatcactctcatggcgcttcacaccacaatcgggacaggcataagcacaagagaagacattcctcctccaaagacaaatattcttacagggggaccaagcacgatagctcctctgatgatgaacatcatcgctcaaggcatcatcgtcataaatatgatagctcctcctctgatgatgagcaccactcttccaaacaacgacatagggatgataacttctcacaccatgagcatagacattctccccattctaatgaacattatacttcatctgatgatgagcataagcatcgaagcaaaaacagaagtgtaaggcataagagcaaatctcatgc

SEQ ID NO: 12795 - DNA, 1405 bp, Glycine max
aaaaggcagtaatagcagctgacacatcttaagacgcgtacgctccattttagggttcactttgtatttgtaataccatttcctcgcgcggcactgcttcccgccgccgccgccgccgtcagcgtcagcaccaatggcagacgcatcttctctgccgacggatcaactcgccgccatcaccctcgacgaggttcccaaagctaatttctccgaccgcgtccccatccgatccatcatctcccgcaccgacggcggctcgggcctcgccggcaggaaggcgcgcgttggcggctgggtgaagacgggacgcaaagccgacaaggacgctttcgcgttcctggaaatcaacgacggaagctgcgccggcaacctccaggtcatcgtcgaagccgcgctgggcgaactcggccaactcgttcccaccggaacatgcgtcgtcgtcgacggccacctcaaacttcctcccgctggcaccagacagaagatcgaactccgcgccgataaggtcctccacgtcggtcccgtcgatcccgccaagtatcctctgcccaaaatgagactcactctcgagttcctcagagatttcgttcaccttcgttccagaaccaacacgatatctgcggtggctagaattagaaatgctcttgcgtatgctacacatacatttttcaacaaggaagggtttctatacgtgcacacccccattgttaccacaagtgattgcgagggtgcgggtgagatgtttcaggtgaccactttgctgagtgaggcggagagattggagaaggagttgttgcagaatccacctccgtcggaagcggatgtggaggcggctagggttgttgttcaggagaaaggggaggttgtgtctcagttgaaagctgccaaggcgagtaagcaggagatcggtgctgctgtggatcagcttaagaaggcaaaggagagttttgctaaggtggaggagaggtctaagcttaagcctgggattcccaggaaggatgatggaaaggtggattatgggaaagatttctttgcacgtcaagcgtttttgacagtttcaggtcagcttcaagtcgagtcttatgcttgtgctctgagtagtgtgtatacctttggccccacatttcgcgcagagaattctcacacttccaggcatttggccgagttttggatggttgaacctgagattgcttttgcagagttgaaggatgatatgaactgtgccgaggcatatgtgaaatttatgtgtcagtggctacttgacaactgccttgaggatatggagtttatggctgataagtttgataaaggttgcattgaccgtctgaaattgggtgcttccactccctttattcgagttacatatacagaagcagaggaaatactagaagatgctgtgaagaat

SEQ ID NO: 12796 - DNA, 367 bp, Glycine max
gaagaaatcactgtgtgtgattcaattgcatcggtttcttcaattccagcaccggtgcgtgcgtctgatttatataaccttgtttgctcactcttatttttatgttatggctatttcatatttgaggtcagcatcataagcagctgttgtttcggaaacacacgatgaattctggtgggtacgctgttgaggttacgggtctctcgccaaaagccacggacaaggatgttcgtgacttctttgctttctccggtgtgattgagaatgttgaaattatcaagtctggtgattatgcttgtaccgcttatgtgacattcaaagatgcatatgctcaagaaactgcatgcttgctcagtggagccactat

SEQ ID NO: 12797 - DNA, 603 bp, Glycine max
gtttttactacctaagcattaattaacccatgatgtcattctaatcagagtaatcatggtgcaatttggatttcttttgtaatccctggagaagtaacatcatgatttgttaatgggagataatctaatagccactacttttgcttttttatttaatatatgtagttgatgggggatctatttttcataaatggtgctttgattgtagaacaatctagttttggagtgtcataacgagtggaagaaataattagagaaaatgttcagaattctttctacaaagagttggatgtggatgccttgagacagtgaaacggcctagttagttgatttagagtgcatggattaaagtttcatccaactgaacttatgttcaactcaatccatcactcacattgttagcatttatgcattggcacgtacaagagtgcttgagtttgatcttcagaatgcattgagtctctgacccttttttcaacccctttccacctctctcttggtggtcaagagcctgattaactaaaaaaaatcttctttgctttcagaatttgtactaatttgtttcaattgaaaatgaaacaaaaacttggcattctctacgaa

SEQ ID NO: 12798 - DNA, 995 bp, Glycine max
cccacgcgtccgaaaaatctaaaattttatagaaaacaatttatttcttgagataatctccttcttattttttagaagaaaagggaaggagaaagagaagattggattggggattaggaaaaaatggcgtgcaggggtatgcttcgttccaccattctcatagaacccagcctactccgttctttaaatttcaattctaacaaacatcacatagcttcactcaaccaatggtcttgccggtttcattctccaaaacccccttattcttcctctcagaacgaaacgccgttgtctcaggaccctgtcttgaaggccatttcagagatttccaaaggcgaagggagggttggccaaacaacaaacgtaattattggaagcactgctgccgatgattctaacaatgaatggttggctttggaccagaaggtgaactcgtacccaaccgatcgaggatttaccgccattggaactggaggtgaggattttgtgcaagccatggttgttgctgtcgaatctgtaatccaacaaccaattcctcagggatatgtgaagcaaaagttatcgtcggggggcaaatatgtatctgtaaatattgggcccattcaagttgtttctagtgaacaggtccaagctgtatataatgccatgaggacagacaaccgggtgaaatattttttataatctgtcacattgttttgtagagaacaccacgattgcaagaacaatctagttttggagtgtcataacgagtggaagaaataattagagaaaatgttcagaattctttctacaaagagttggatgtggatgccttgagacagtgaaacggcctagttagttgatttagagtgcatggattaaagtttcatccaactgaacttatgttcaactcaatccatcactcacattgttagcatttatgcattggcacgtacaagagtgcttgagtttgatcttcagaatgcattgagtctctgaccctttttttcaacccc

SEQ ID NO: 12799 - DNA, 439 bp, Glycine max
  unsure (1)..(439): unsure at all n locations
gtgcattngtcggatttcttcttttggtattgcccgnggattcattcaattaaaagctatagacatctacgcccattaactaaactatgtcaacggcattatatgatcaaaacagcaaaaccccctcttcctcaagttgcagatgagattcaacggtgttgctgagcatcaatgtagccagcaatcaacaagaacctttctctttcttagccatctcaatgtccccggcaaccatcatcttcacaagctgctcaaaccccactttaggtttccaaccaagcaccttcttggcctgggacgcgtcccctgtgaggttatcgtcttcagaggggcgaaagtatctcttgtcaatggacgagaggaaccgatnctggactcggttgcaactcgttggcagctgttatttctgctatgctgttgagaagcttatcgcacctat

SEQ ID NO: 12800 - DNA, 537 bp, Glycine max
cgtagatgtatatagcttttaattgaatgaatcaacgggcttacaagaagaagaaatccgacaaatgcacatctaggaaataacagttgcaacaagaaaacaacataaattgcccataaactaaactatgtcaacggcattatatgatcaaaacagcaaaaccccctcttcctcaagttgcagatgagattcaaggttgttgctgagcatcaatgtagccagcatcaacaagaaccttctctttcttagccatctcaatgtcccggtcaaccatcatcttcacaagctgctcaaaccccactttaggtttccaaccaagcactttcttggccttggaagcgtcccctttgaggttatcgacttcagaggggcgaaagtatctcttgtcaatgacgacatggtccctccaattgagtcccacatagccgaacgggacttccaagaagtcatatacactgtgccactcttcagtggccacaacatagacctaaagcttctcctgatgcagcatcagccacatggcagcacgcgcggtcg

SEQ ID NO: 12801 - DNA, 410 bp, Glycine max
taacaaaaacatggcaaaaaattagcgtaaccaataacaataaatttcgtaagattgcccaggctttgcagtttggaaaatccaggcaaactaataaaactatctacagagttggctacagcaagcaaacctaaattcctacctaaaaggctaaaacactattgccattgctccctaactcactatttccgcttgttagtacattctaatttatactcaagtcactgccaattaaaaagcccaaatcctcttccacttcctcgatctgtggaatcccgattcacttcccaattgtctcatccgaactctcgcttggaaggacttgtatccggtctgcatgctcaacgatccaatcagtgaattctggagaagctgcccattctgctagagcctgcttagtggattctctt

SEQ ID NO: 12802 - DNA, 345 bp, Glycine max
ccgaaaccttttcttctcaccgcagcaacagtcttcttcttcctcttgtttgcggcacagcaatggagccttgtcggtgaccgacggcattcgagctgcagcggaagagtctctttccttcacagcgtattctgtgttgccgccaccatgccttcagtgcctcggggaaacttctccaatcgccaaacccaattctccgagcggtattctcctaaacccaattagggtttcacaatcacttcaacacgaatcataatacatgactttccaatatcttcttacgcaggacgcagaagattatacatcagaggaagtctcttccgattacaccagttgagaaaaggc

SEQ ID NO: 12803 - DNA, 160 bp, Glycine max
  unsure (1)..(160): unsure at all n locations
nnnnnnnnnnnnnnnnnnnnnnnnnnnnnnnnnnnnnnnnnnccaaaactaagtattagctttatgctaagctgttaaagaatgtaacttacgtgtattgggcatgacacaacaatccttaattttctgttggtgataattaatgtattttatcctgcaa

SEQ ID NO: 12804 - DNA, 395 bp, Glycine max
gaatttccgggccgagcgtccgctttttttttttttctttttttttttttttttttttttttttagacattggagagtgctgtgaaggtctgcctcaacggatgatttacccatcctgactcttgctcgtttcacaaggggcaagggttcatctccatcttgttcaaagcatctttcttttgaatttccacacatattttgtgagctttgactggcattctgcacaccagtctcttcctctggcctactgattggcttataagcatcattagctgccctctttctattgggttttctttttttcttattaactacagggtttatttcaagattaaaccctttggtcaactcaacttttggacattcaatagcttcagataggtcaaggttaaaat

SEQ ID NO: 12805 - DNA, 451 bp, Glycine max
cccacgcgtccggcaaagagaaccaaagcgccacgcaattgcacttcttcttcttcttcttcttcttcttctttggcaactcagaatcgcttaaacaatgacagaggatagcatcgttagggtttcttcttccaacgaaacctccgcggccaacgaggcttcgcagacgcggcagagaaagaagagaaagtgggatcaaccggcggagtcattgatgccagttgggatgacagtccctggagcactccctttgagcaatgccgtgactcttggaggggttgcatttcccgccatggctccggtgatctccggcactcttttgacgaatcctctggcagcttctgctcagcttccgcaacatgcagctgcagctgctgttgccgcgcaaaagttgaatcaacataagatccaagatgaattaataattgctcgagaaattgtcataaatgat

SEQ ID NO: 12806 - DNA, 459 bp, Glycine max
  unsure (1)..(459): unsure at all n locations
gctcgcgtgaatcctttttcgttttcgggtatcgaaaaccaaggaagaagccttgaggacccggaccccacgcaattgcaccttttcctcctctttcgcagctcagaatcgctccaaccatggccggaggttaccaccgttagggttccttcttccgccaaaacctccgcggccaacgatgcttcgcagacccggcagagaaggaggagaaagtgggatcaaccggcggagtcattgatgccagttgggatggcagttcctggagcactccctttgagcaatgccgtgtctctgggaggggttgcatttcctgccatggttccgatgatctccggagctcttttgaggaatcctctggcagcttcttctcagcttccgcaacacacangtgcagcttgctgtgccgcacaaaaatttgatcaacaaaagatccaagatgaattaataattgctcgagaa

SEQ ID NO: 12807 - DNA, 703 bp, Glycine max
atacaaacaaacaaagctctttaccttctctctctctctctctcttctggtttttattctgaatccgaaacaatccctcttcccttgaattattttcatggcttatcatccaccaccattctacttgtttctatcatcctcattcactcccaattccgttccgttcaattccttccacatcatacttttccgtcatatttccattcaatcttgtaacaccttctgacgcttagcagttactaccaaactcagcagcgtaggagccgctaccgttatgggaaaacgtaattctcaacgtaaaaatactgcaatgttggataacgacgatgatagtagtagtagtgtgagttcgtcatcaacttcccgaactgatcacgtctccgtctccgtctcagggaacgaagaagtgcacttcgatcaagatgctctgctcgatcaagctctcgatgctttggacgaaaaaaggggttccacaagggagagagcgttgtcagtgatcattggggcattcactagcaacatgcagcatcattttgttgacaagaaatttgctactttattacatcagtgccttgcttcaataaaaaagggatccaaaaaggcatctgcaaaggagatagctttggcatcacatgccattggtttgttgaccctgactgttgggtgtagtgataatgcacgtgaaatatttgaggaatcggtt

SEQ ID NO: 12808 - DNA, 653 bp, Glycine max
cccacgcgtccgaatttgtcccttttgtgtttttctgcagatgtctcggtgggaagtagttgatgttcttgttcttgttcttgattcgtgaaagaagaactgaaagcatgaagctctccttctccgtcccatcatccaaaccccactcgaagcccaaagccgtctccaacaccttcgacgacaattccacctcccaaaacgacaccggcggaaccaaatacctcatcaccgaattcgacccttccaaacccgctcccacctccgtccccaaaaccctaattcccccaatccaaaaccaatggcaacccttcaagaagatgaagaatctccacctccccaccgccgccgacgccgaatccctcgccttcgaactccacaccgacggggaccaacccgaatccgacatctcctacggcctcaacgttcgtgccgacaaaaatccagaaggaaacaacaaagacgacagtgatggtgctgccccacggcgtcgagttccgctggaggccacggcgctgcagaagctgaaaagcgacctggagaggctgccggaggaccaggggatggaggagttcaaggatgtcgccgtcgagggctacggcgcggcactgctcgccggctatggctggaaagaaggaatggggattgggaggaac

SEQ ID NO: 12809 - DNA, 301 bp, Glycine max
ccggaccggaatgcccgacccgcgccacgcgtccgatatcatattatgattgctaatatattattgacttatgttttattatatcattcagtatttcactgatcctagaccattggaaccagaaagattgaaggcacttcgcaaccagtgggcaaagtactatttgaaagtgaaaaatgaaacttaggatgtttagacaatcttgtaattgtagtttatatttacttacttaatttacaattcatgtctcaacatttaaaaaaaaaaaaaaataaaaaatagcaattaatataaaagaggg

SEQ ID NO: 12810 - DNA, 1014 bp, Glycine max
tcctcaattcgcccgacgccccacgcgtacactgagctacttgcttccttcctcttttcagaatcaatggttacctctctggctatcataattcttgtgctgctattccaacaaacttgccttgccaagcagcaccaccaccacccaccctgttattcttcatgtggcgaaattcacaacataacgtatccatttcgactaaaaggcgacccaatcggctgcggcgatcaagattacgaattagattgcgttgaaaacgtgacagtaatgactctattttcagggaaattccacgtgcaggaaataaattacaagaggtacgagatccggttgaccgatgctggtgtggtggaggacattgcttgctcaattcctcgttatttctttaatctctacaatttcacttacatcggtggtcttaactattctgcatatggtccgttaagtttctcggggtatcctcagtatgcggtgtttctaaactgcactaccccagtcaccgatgatcctcgatacgtagctgtgaaggtcaacggtaattgtgattcgagttccgtaggccatatctatgccattctggtcacagacgatgatgatcgctttgggtttacactgacggacatcaaggttgggtgccgattgaaggttgctacatttgcaaactggaaatataataacagggaggttaacgtttcttattctgatatcaacaagtggctgcaccacggaatttggatgtcttggttctttccagttatttgtagggaccgatgcggaaagggtgtgagttgctacatcgatcaaaccacgcgagaaactcgatgtgcagatagctactgccaaatctttggcattcaaacatacaagtgcggaattcgtaatcagattcttgaatatatgcggcaaattcttggctacacagtaggttatcttaaaagcgttataatgggtaatacaacttatctattaatttgtcaactgatttcatatttgaataaacttatcgattagacc

SEQ ID NO: 12811 - DNA, 520 bp, Glycine max
tgaagattcaggaggtcatatgccaggagttgaatctttcctttataaacttaccagttccaggacaagttagttctcaggcacaaaatggagctttcgtgacaaatgcagaagtacccaacagtcaatccaaggaaaatggtgggagtgatatagcaactgatggtgcacaaggttctggtgatgctaggaaccaagcacagttatatcaagactcgtccatattatatcattttagagacatgcagagaagacaggttgagtttataaaaaagagggttcttctcttggaaaaagggctcaatgctgagtaccagaaagaatactttggtgatccaaaatcaaatgaagcatcaaatgaagaacttaaaagtgaaaccaaggctactaatttcccaggtgataaattaggggacagtgacaccaaaatgattgatcaacttccgcaagtagaaacaatagcttcaaaagaaattgtggctgcatgtgatagtgatcccaatcaattggagttagctcg

SEQ ID NO: 12812 - DNA, 240 bp, Glycine max
ttttttgttgcggtacgagtctttctttgagatgttttatttggatgtaagttatcatacatgcatccttagctttatcataaaagatataatgaagaagcttccattcttgtagtgcttatggttttggtggtttaagttcattaactaaaccatgctcaacattcatttttggtatgctggaaatgtgaacaagtgtattttgctgagattaatcaaattgggttgttggctctctca

SEQ ID NO: 12813 - DNA, 1033 bp, Glycine max
cgtcggcctcgtcctcttcggcctcatacacagaagagcaagtctcaattatcagagagataaagagaaagaagaacttttatgagatattgggattggagaagacttgcactgttgaggacgtgaggaagtcgtacaggaaactgtctcttaaggttcatcccgataagaacaaagcccctggggccgaggaagcgttcaaggccgtttcaaaggcgtttcagtgtcttagtaatgaagagagtaagagaaagtatgatgtttcgggggaggatgaagcggtctacgagcagcgtgcggcaaggccggcggcccgaggttataatggttactatgaggctgatattgatgctgaggagatattcaggaacttctttggaggaatggcccctgcagccaattttggaggattcagttttggaccagctgggttcaatgggttcaatggtcataggcatgctgctgaacatggttctggtggttttaatgttcgcacattaattcagttactgccagtgctgctgattctactattgaactttttgccttcttcggagcccttgtactcgctatcgaagagttatccttatgaacatcggtttaccacacccaagggtgttaactattatgtcaagtctacaaactttgttcaggagtatcccttggggagtgatgaacgatcaaaaattgaagaaagggtagagagggagtacttcagcattctccgccagaattgtcatttcgagttgcagcgtcgccaatgggggtatatccgggaaacaccccattgtgatatgttgcggaagtttgaggtggtgaattgataagttgaatcaaggtcctaatttttaatattgtcttgccttttgttgtagacgcagtagctttttcctgcttgtgatattattatagaatgtacaatttatttttcactcccatatagtgaagcaagtttacaataagccagccgctttgttgggattgttatctttcaaatttcaccaaatatctctatgatggatcttcctttcct

SEQ ID NO: 12814 - DNA, 477 bp, Glycine max
gataaaaggggtgttaaggttagggcattgtggggtttatgcccctttctccgtctcttgtttgccgggttagattttttggggtgttagggtttcgtggcttgattttttggttgtgctgtatgaaataggtttgatttcgaaagcgattttgagggaagaagaagatgaggccgatttttgctgggaacttggagtacgatactcgtcaatcagagcttgagcgcttgttctcaaagtatggaaggattgaccgcgtggacatgaaatctggttttgcttttgtctattatgaggatgagcgtgatgcagaagaagcaattcgtgcacttgacaatgttccatttggtcatgaaaagcgaaggctgtcagtggagtgggctaggggtgaacgtggacgtcttcgtgatggatcgaaggcaaaccagaagccaacaaaaaccctgtttgtgattaactttgacccaatccgtacta

SEQ ID NO: 12815 - DNA, 525 bp, Glycine max
aaagccttttttcaggtttgatttcgaaagcgattttgagggaagaagaagatgaggccgatttttgctgggaacttggagtacgatactcgtcaatcagagcttgagcgcttgttctcaaagtatggaaggattgaccgcgtggacatgaaatctggaacttctactaagggaaaatatgctgagcttctgtcttggtttgccaacctctctgcaaattttttttgggaaggaaaacttcctgcttgtctgctctccttctactcacagatctgcattttcacatctgatcattcgtcactcacctcaccatctcccaacattgacatttccatcagaatgttgttagtgggatcatcaatcaatttattaagccatgcctagcttcactgaaaataggggatcaatgaaattctgtcaagtcatgccattctatttctgaaatcacttgtgctgtctgaatggagaagcatgcttggcagtctcagatctgaattctggattaaacctttaattgcaatcatg

SEQ ID NO: 12816 - DNA, 720 bp, Glycine max
agaaaaaccacagccaaaagttttgtggagcaaaaacaatgggcagctagtgcttccaaatagggtcactgttctctgcaatggtgttgaaggcatatattttccaagccttcatttagttgtgtgcaagtgtgggttttgcaggacagaaaagcaagcacttagtgaatgggaacgacacacaggttccaaattaagaaattggagaacaagtattagggtgaaagattctatgctacctctggaacaatggatgctgcagttggcagaatttcatgctactgctcaggttcccaccaaacctaagaaaccttctctgaaagaaagaaagcataagttgcttaccttcttgcaagagaagtatgaacctgttcatgctaagtggactacagaacgctgtgctgtttgtagatgggttgaagactgggactacaacaaaattatcatttgcaacagatgtcaaatagcagttcatcaagaatgctatggagcaagaaatgtccgagatttcacatcttgggtttgtaaggcttgtgaaacacctgacatcaagcgggagtgttgtactttgtcctgtaaaaggtggtgctctaaagccgactgatgttgacacattgtgggttcatgtcacttgagcttggtttcgacctgaagtctcttttgctagtgatgagaagatggagcctgctttgggtattctaagtattccatcaaattctt

SEQ ID NO: 12817 - DNA, 448 bp, Glycine max
cacgcgtgcgccggcgacaccttcttcttagtctccaccatcaagttccagaacctcaccactttcccctccgttggagtcgtcaaccccaccctcctcgccaccaacctctccatcggccaggacaccatcttccccatcttctgcaaatgcccccccaacagccaaggaacaaattacatgatctcctacgtcgtccaacccgaggataacatgtcgtcaatagcttcaactttcggtgctgaagaacagtccatcattgacgccaacggcggtgagacaactctacatgactatgacaccattttcgtgcccgtggcgcggctgccggctctgtcgcagcccgcggtggttcctcccgcgccgccgccagtaattgggagcaataatgatgataggacaaggactgttaaagggttgggggttgaattggggattgtgggggttg

SEQ ID NO: 12818 - DNA, 594 bp, Glycine max
  unsure (1)..(594): unsure at all n locations
gcgtcggccacgcctccgcccacacgttctctgactcttggcagcgcgaagcttggaggagcaccgtttgtcatggcggttccaccatcggaaagtgaatccgttgagaaaagaacattcctttcacaattttactctcactatctcggaaaccgaatccacgctctctatccctacttctccacaaatttcttgtccaccttcgttctccgcttcagatcaacgcagcgtcgggaatgtctccctcttccgctaccttcctcttcactcgacgctcccttgttcatgaccaagagatctagagtgcatgatgttttggaggatatattagagcgtgttttgataaatttgcatagcgtccaaaagaatctgcagttttggcagtccagagctaagaggtcagattccgagaaggcacgtttcatgatatttgagaggggtccaagggcttttattgatgaaacagttaagttgttgcgtggactcactgctcaaggttcatccacacagaatctgagccaatctgcatctgattatatcgacgagagagtangctttntgagtagcttaagatattcgctcgccacatttttg

SEQ ID NO: 12819 - DNA, 578 bp, Glycine max
cggaatgcgttaagtctccttacttgccgcactgtgttacatcatgataaagtggatagtgtgggagatacagatcttgatgatggcttgtgctgcatatgttatgcatgtgaagcaaatgctcaaattgcaccttgttcacacaggtcttgttatggctgcattaccaggcaccttttgaactgccaaagatgtttcttttgcaacgcaacagtgacagatgttagcaaaattggttagaagaccggctaaggaggagcttctattttatggttgcttggttccggttgaagtcagctagtcagtaactgattatttgcttatttatgaactacatatataaaaagtgacaagaaatgtaaaggaaaacaaagaaggaaaagatgggggagaagaaaaaaagagggggtggggtaatcgggtaggagttaatactgttccagatagtgaagtgtttcttgacatgggcaggggggggtaggtcgccatcggcggaattaagaattttgtaggctatgttagaggggtgttatgcctgtaaaatgcgatgtaaatggcaggcaaaatcgttgaatgac

SEQ ID NO: 12820 - DNA, 1006 bp, Glycine max
ggcttattttgccttcttggaggttttgttcaacagccacatcacttttgtattaaacttggacacaaacacctttatgcatatggttggctcccttgaatctggacttaaagggttggatacaagtatctcatcacagtgtgcatcggctgttgataatttggctgctttctatttcaacaacatcactatgggagaggctccaaatttacctgcatctgtcaatcttgctcgacatattggagagtgtcccaatctgtttccagaaattttgaagaccctatttgagatcatattgtttgaagactgtgggaaccaatggagtctgagtaggccaatgttgagcttgatactcattaatgagcagatattctcagatctgaaagctcaaatcttgtcatcacagccaatggatcagcatcagcggctctcttcatgctttgataaactcatggcagatgttgctctaagcatagattctaaaaacagggataagtttactcaaaatctcaccatatttcggcatgaattccgtgccaaataattcaaatttatgcgagtaaatatgagagtttggtgtttgtatattgtctttttggagaatctggtgcactctgttctggtgggtggcaccttggagtcctatcatggaaaaaaaaaaccattttatgcggtttcttcattttggtcttgtaacaaatgtattctttgtaattactgttcatgcagtgtggaagatagctgtatacttttggtggtaccggataactctctttatactcagatttggatgattcaaagttcaaagatgatggaaagatttcgaagatgtaaggaagtgggtgggacaaaaagggtcatggacgagaaaactagtggagggataaaacggtaaccacctgaaatgtagagtgattgggttagatatattctttgtagaaatcatgtatattattatcgccgatatttgtttagaaacatgctagatattatttgatattaaaaa

SEQ ID NO: 12821 - DNA, 429 bp, Glycine max
ggaattcccggcggtagctcacgcatcctgagggccatactgcttccacccatgagcgggccccacagaatcatacgtacacgtgtcgtattctggaggtacattgcgagctcctcaacacagtgcgaccttctcaaggtaggtactttttaatttggtacaggtttcagttttcggtgtgaattagttttatcaatggaaactcacagattaatccttcttcaagtatgattaagaatcatattcataattattaatctaaggaataaaattatttattaataatcaaaaaaaaaaaaaaaaataccttaaaaaataaaattaaaccgaaagaatggaaaaaaatattaacttaaaaataaaaagaaaggtccgaaatttttacccacttaaaaaagtttttggttaaaaaagaaggggggggggggg

SEQ ID NO: 12822 - DNA, 521 bp, Glycine max
  unsure (1)..(521): unsure at all n locations
ctcacattgtcatcctctattgtcttgtgagggtggtggttgaagaggttcgagatgcagaggctcgagttcctcttcccactgatgaggttcatacagtggggcaagcccccaatcaattcattcagtggccgagaagacttgtgaagtctatgtcagccaaggctgttgtcgaatctagcaaagatgctccacacaaaaggttggaacctcaacttggtccgctcgaacgcttgttgataatagttagcaaaattaggaaggatcatgtacagctaccttgggatcctgatgtactaagcaagccctctaccatgtcatttcatatctatcggaaggatatttttgaattatgtatgggtagcgagatgctaaacatctcagttatacaattgtggctgatgtatctgcatagcttatgtactgataaggggaatgcacatatctatggatttatggacccgcaatccattcaaagtgttgggaataatgcaacagaagttcanggctacttgcaaagt

SEQ ID NO: 12823 - DNA, 1468 bp, Glycine max
caaaatcttacatttatcaagacatttgcttctggaattcttgttccaaagggatacatatggcccgtagatgcaactctttatctacaatcacatacatctttggtctcagatgcacataaagcaggcctggaagtttttgcatcagattttgtgaatgatgttccatttagcttcaattacagttatgatcctcttgccgagtacctccaatttgtagacaatggtgacttctctgttgatggtgtgctgagtgattttcccataactccatttgaagctataggttgctttgctcacctagccaccaatgctacaaaaaaagataaaactttggttatctcaaaatatggagcaagtggagattatcctgcttgtaccgacttagcatataataaggccatatctgatggtggggatgttcttgactgtcctgttcaaatgtctaaggacggaacaccattttgcttaaactccattgatcttatagagagtacaacagtcgcccaatcaagcttcagcaaatttgccatgactatccctgagatcaaatctggcagtggcatatttgcattcaacttgacatggaatgatataaaaatcttgaccccctcaatattgaacccttttgcaaaatacagattgttcaggaatccaagatctaagaatgctgggacattgttggcattatcagatttcttgtccttgacaaaaaatcagacttctctatcaggtgttgctatcattgttgagaatgcagcctatcttgcagacaagcaaggattaagtgtgattgatgctgtcattggtgctttgagcaaagcaggttatgataaaccaggatcccaaaaggtttatattcaatccactaatagttctgtactgctgaagttcaaggagaaaaccagttatgagcttgtgtacaagattgacgagaccattggtgatgccgctaatgcagctgttgaggatataaagagctttgctagttctgtggttgtcaacaaggactccataattcctaataatgatcaattcctgacggcctatacaaatattgtgccaaagctaaaaaatgctaacctctcagtttttgtagaaacattcagcaatgagtttgtgtctcaagcatgggatttcttctcagatgcaactgttgagatcaacacatatattacgggagcacaaattgatggtatcatcacagacttccctaaaactgctgacacatacagaacgaacaaatgcttaggtttgggtgacaacaaacctacttacatggaacctgttcaaccaggtagtctttttggactcattaccaaagaattcttgcctccagccgaggctccgcttccacccttgacagaatctgaagtggcagagtcacctttgcctcctgttgctaaaatagccccagcttccagcccgaatgccagaaccaaatttccacagggaaattcacagccta

SEQ ID NO: 12824 - DNA, 856 bp, Glycine max
aaattgtaatctcagaacatgtttgtatgtttgtgtttacgatcttttttttctctatttaagtagatactatgttgtcttcttataatgcaggttgctttgctcacctaggcaccaatgctacgaaaaaagataaaactttggttatctcaaaatatggagcaagtggagattatcctgcttgtaccgacttagcatataataaggccatatctgatggtgtggatgttctagactgtcctgttcaaatgtctaaggacggaacaccattttgcttaaactccattgatcttatagagagtacaacagtcgcccaatcaagcttcagcaaatttgccatgactatccctgagatcaaatctggcagtggcatatttgcattcaacttgacatggaatgatataaaaatcttgaccccctcaatattgaacccttttgcaaaatacagattgttcaggaatccaagatctaagaatgctgggacattgttggcattatcagatttcttgtccttgacaaaaaatcagacttctctatcaggtgttgctatcattgttgaggtgtgtgcttccatgcctattcattctttatagtattcattctaccggctgttatttgaacatataattttttttgaagaattaggacaaatttttgtgagaatggcttagggtcgcttaagttatttaataattcctatgattgatttcaccttggaataataggggaaatagaaatccgaaatattaagactatcatgcattatttctatcaaattgttacaagacctggttctcacttgttcttgttggccatactttacttctaaatttctgtataacttggccaaaaatta

SEQ ID NO: 12825 - DNA, 792 bp, Glycine max
caaccttcggccacgcgttccgagctctcaaaatctgcaaccctttgtgagaagattggttctatcaatggtgccattcttatattagtagggatgacaagcagcaaatcagaagatcttctcactgttgagaaggctgataaaacattggagaatctggagaagtgtgagagtaatgtgcggcagatggccgaaaatggcagattacaacctcttctgacccagcttcttgaaggtccaccagaaaccaaactctccatggctacataccttggtgagctgcgttttaaacaatgatgttaaagtccttgttgctggaactgtgggttcatctctgatcaatattatgaaaagtggtaatatgcaatcaagagaagcagcactgatggcactaaatcagatatcatcatgtgacccaagtgcgaagattttaatagaggttggtctactttctcctcttgtcaatgacctttttgcagtcggtcctaatctgcttccaacacgattaaaagacatctccgccacaattcttgctagtgttgtaaactcaggagaagacttttattccattccatttggacctgaccaccaaactctggtctcagaggatatagttcgtaatctactccatcttataagtaacaccggtcccgcaatagagtgcaaacttctccaagttcttgttggacttactatttctccaactacagttctgagtgttgtggctgctatcaaaagctctggtgccaccatcactctagttgagttcattgaggcaccacagaaagatct

SEQ ID NO: 12826 - DNA, 402 bp, Glycine max
gttgaactggcaaagcgcactggaagatcagtatcttctttgcaggatatcctcactaatgttggcgaaaaggttcaatcagagtttgagcttctcagcatggatatcgctgaacttgtgacaatggaggctggcatcaatgtgaagaggctacattcagctgaaggtgcagaaattttaccacgtcctgcagttgtaacagtgatgggccatgttgatcatggcaaaacttctcttcttgacgccttgcgtcaaacttcagtggcagccaaggaggccggtggcataactcaacatataggtgcttttgtggtggtcatgccgtcaggagcatcaatcacatttcttgatactcctggtcatgctgcatttagtgcaatgcgggcaagaggtgcagcagtt

SEQ ID NO: 12827 - DNA, 360 bp, Glycine max
acgtcctgcagttgtaacagtgatgggccatgttgatcatggcaaaacttctcttcttgatgccttgcgtcaaacttcagtggcagccaaggaggctggtggcataactcaacatataggtgttgctgagtggtggctagtggtggcttggctgttccggcattctgactgctcgtattcacctcctgacgcgcacagtaattaatgcagcatttaaaggacatagtttgggtaaaaaacgtagagcccctctgggcctggaccaaagatagagaccgaaccgtagaaacaggaaaaaaacggaaaggaaaaaactatgactaaatgtactacagcagaaataatatggccttcgttttc

SEQ ID NO: 12828 - DNA, 492 bp, Glycine max
  unsure (1)..(492): unsure at all n locations
ctggaacacaagaatcaaaagaatgcaacgagcaggcttaccaatctaccctgaagagttgtgccaacggatacttaattgcaatcaagaaagtcaaaatattagcatcctgtcaaatgaagcctcccagcatggtgatctgtcacaaacagactttgatataccagacgtggaattcaaaattttcaaatttcgtcatggtctatcacatggacagtcaatatttgatatgcctgaaagtagcttgtttgatcaaagttcagactcatcccatagttataacttgttcccaactatgcgtcctacaaaacgccctcgggagtcagaaatgctatatgatagttttgaaagttgtacaattaatgctgccccactatttgatcagtatgacaattatcgtttgagaaaatttctgaccatcnctgggtgtctctttcaatggatcccgttcttaacacccactgatagtttncatgggataaccttaccggc

SEQ ID NO: 12829 - DNA, 999 bp, Glycine max
atccttgttatgtgagggtgaaagaagaatctgagaaacttgttacgcaatcagcatcactctcaaagttcaaaggggaatgaatgctttttctcacaacaacaaccttgatcgtttcattactgtttccccttaaccccaaatagatataaaacacaacaagaatctcgtttcggggatacaatgattgggcgcagagacagagagggacccttgatgaggaacaacagcactaactctcttcgcaaatcacgggtcctaacctcagttgcaattggtgtccttattggatgcggcttcgctttcttgttccccaatggcttcttcgtttccgactctgctgcccctaatcgccatctccctctcgcgggatccaagacccagaaaaattcagctggatgtgaatcctcggatcgggtcaacatgttgaaatcggagtttgtggcggtatcagagaaaaatgctgagctgaaaaaacaggtgagagaattgactgaaaggcttcagcttgcggagcaagggaaagaccaggctcaaaagcagttccttacattaggaaaacagcctaaagctggaccttttggtactgtaaagggattaagaaccaaccctactgttgttcctgatcaatctgtgaatccaagattggcaaagatattagagaaagttgcagttaaacaagagcttatagtttgtcttgcaaacaccaatgtgaaggagatgctggaggtctggttcaccaatatcaagagagttggcataaccaattatctagttgctgctttagacgatgagactgcaaagttttgtgaatcaaatcaagtcccagtgtataaaagagatccagatgatggtgttgatatcattggaagaacagggagcaaccatgctgtctctggtcttaaatttcgtattctaagagaatttttgcagttgggatatagcgttcttctatcagatgttgatattgtacatttgcagaatccttttgatcatcta

SEQ ID NO: 12830 - DNA, 507 bp, Glycine max
  unsure (1)..(507): unsure at all n locations
accggntcgaataccgggtcgacgacgcgtccgaagacacactcgttcatatatctctctgctcttctcttctcttctacctctcaaggtgcggttcttctccctcggccaaatcctagattccgtggttcaatttcggatcttgcacttctggtttgctttgccttgctttttcctcaactgggtccatctaggatccatgtgaaactctactctttctttaatatctgcggaatacgcgtttgactttcagatctagtcgaaatcatttcataattgcctttctttcttttagcttatgagaaataaaatcactttttttttatttcaaaataaaccttgggccttgtgctgactgagatggggtttggtgattacagaattttagcgaattttgtaattgtacttgtgttgcctgtagttttgttttgttttcttgtttctcatacattccttaagctttcaatttattcgagtataggtcacaataggaatttcaaactttga

SEQ ID NO: 12831 - DNA, 560 bp, Glycine max
agatcttggaattttggttacgctagaagtggatccaactgaatctcaaggagggattctgtggtgtgactgatagaaaaatatatatttgagcgtagttatttacacatgcacttgttaaaaggctcacaagaaaatttaatgattgaatcaccattgaaatcttgtgttttggctcagtagtttattcactttattgatttagagcttgttcaatcgtactctatccaaaaaaaagaatttaccttttgattttggagtgatatgactcattatgttgatcgtattaataacaatacaccattcacctctgcatggattgaatttcttagatactgacaactttagttttgtcctaagttttgtttgtttggtattctttgcctcctactttagttagtgtgcaccatctttagaaatatgtttataccatcagttgcaagtcttccttagtcccaatgatttactctaaagtgcaaaacaagtcatcctttatatattttctattactaattccagttccaagactttggcataaatttgatctctctttttatttg

SEQ ID NO: 12832 - DNA, 944 bp, Glycine max
ttaccgggccgaccgacgcgttcgcacagattgagagggccagtctctgcatctcactcctctccttctgagccatgcctgcttcgagccgtgctttatcaggcacttcagtagcccttgcagcttctttttcagcagttttacacctttcttggacctcatcaaatcttttgaactcagtatgatacttctgttctagatggttcttttcctgctgaaatactatcgcttccctttcatatgattgagccttagcattttcagctttcaacttctcagtcaactctttaatttcaatcctcagtgatgatatttctgtatcataactccttatctttgattcagcagccttcaactctaaattcagggttgttaaacacttctcagcatgctcaatttttgcagttttctcttttatttcatcttctttttcagccaaagttccagaaaattcttctcttaaagcatcttccctcaattgtgtctgcttgtttgtgcgctcctgcacattagctgctttctgcaaagcagattgtgcttctctccgggcgatatcatacttccgcttccactcctctgcctcctcttgagcagactgagcttgttcctttgctgctgccaaccttgcttcagcagcaccactccgggacttgagggctgctatttcagaactagcttgatcttcttcagctttctgcctcgataagacttgctcatattttcttttccaatccatggattcctgcttggtagagtcaagtgttttcaataaactagagtacctctcgtccagtgagcgacgattagcttgcaggtcagttatgcaattcttatattcatccatgagtttcttcttatcattgatggcgtcctcgtatcgcttaatatagttcgatttttcaccttcagtggcttccaaccgttttgtcaagaggtccaccttt

SEQ ID NO: 12833 - DNA, 732 bp, Glycine max
tgttatcgcatttgtttgtcctttcccgatcgttaaacctcccccactgcaattgcaaatccctgataattaaaccaaagaaccattccgctccaatcttaaaatcacttcccagttcctagttcccacttctcattctcgcattcctctaataacacaaaccctatttttggctccacaatggatctccttcatcaatactcagacggcgacgatcccgactccccctctcaaaaccctagctccccgccgcgcctcctccccggccgctccgccgcccccaacgtcgacgacaccatgctggccctcaccgtcgcctacttctcctccgcggccctctcgcggcccatcgaccctacccagcacctggtgggcttcaacccctcctacgaccagctctgggcccccatccagggcccggcccaccccttcgccaaggacggcatcgcccagggcatgcgcaaccacaagctcggcttcgtcgaggacgcctccatcgaacccttcctcttcgacgagcagtacaacaccttccacaagttcggctacgccgccgaccccgccgccaacaacttcgtcggcgacctcgacgcgctacgcgacaacaacgccgtctccgtctacaacatcccccgccacgagcataagaaacgccgcattgaggccaagcagaagaagaaatcagaggaagacgacgacggcgacgtcaacgaggagatcgaaaacccggcc

SEQ ID NO: 12834 - DNA, 815 bp, Glycine max
cgtccgacttgttcagatcgcttcggcgtcccattcgtccgtccacgcgtccgctcaatctctgcgttgtaagaggaagccacgattctttgaaaccccaatttctggtagttgatttgaaaaggctccagcaatcatatttgggatggtttttaagtaaataaatataaattccggtccaatcctccttgttgtttccctaactgagcacgttgcaactcttggccaaaatggtatccgagttaatcaatgcaaaccctatcatatatgaaaagaaagagcgtcgacctcgaactgctccatctgctccccatgatgagtatgctgtcgaactaatcgaccaacaagagggttttgatcatataagagatataaaggaccctgagcacccatattccttggaagagcttaaggtgatcacggaggaagcagttgaagttgatgatcagcgtaactatgtgagggttacatttactccaacagtggaacattgcagtatggcaacggttataggtctatgcttacgtgtcaagctcatgagaagcttgccttcacgatacaaggtggatatcagagtggcacctggatctcatgcaactgaagctgcaggtaacaaacaattaaatgataaagagcgggtagagcagctgcactggaaaacccaaaccttctgaatatggttgatgattgccttgcttcatcttatgattgaaggaacttttttcctcctccaattctccaaatgcaatgaactctgtaggtgcttttatgcctttaataaaagttggtcaactttatctgtgtttatgatattt

SEQ ID NO: 12835 - DNA, 293 bp, Glycine max
gcgtccgccctcgcgttcggtttgtgacttatagcgtgtgtggttttggttggtaactgaagagtgtgtggaagcagaagaagaaggaagaaggaatcggcggtgttcgactgacgatcgcatctcaaaattgggttcggatcattcctttgcttgttcgacaattttttttcgcttgcggtttttcggaggcattttcttagttgaattgtatggttgtttgtgttgttttctcgctgctgaaattatatatgggctgagggcacacttttcatgggaggtgtgtaagatta

SEQ ID NO: 12836 - DNA, 887 bp, Glycine max
  unsure (1)..(887): unsure at all n locations
acgacaacgcatgttgctgcacaatattgtcagacagctttcctttaccacattgtttcaaaatggaatgctgaccctgatgttcctgataatgatggaagacgcccattgcattgggctgcttacaaaggttttgccgattctatacgtcttctgttatttcttgatgcacacaggggacgtcaagataaagagggttgcactcctcttcattgggctgctattaggggcaacttggaggccagtaccgtgttagtacaggctggcaagaaggaagatcttatgctggctgataatacaggcctgactccggcacagcttgcttctgataagaatcacagacaagttgcttttttccttggaaatgcccgaaggttgcttgacaaacgctgcgacgggaacagccgccttggaaagatttccaaattaggacttgctcccgtcctttggtgcataattcttgtgctgttggctacgtatattcattcggtcatcttggcaacaaatatgccaaagctgacagctgcagctggccttcttgcatggtttggagtttttcttgcaagtgttggttcggggatggtttacaggggtaggcagcaaggattcctggttatatcaggatgaatatgcatgacaatcaggatacaaaagatgacgagcctctcttgaagattgagataaataatcctgctttgctagctggaaattggtcccagctttgtgcaacatgcaagattgtcaggcctcttcgagcaaaacactgttccacctgtgatcgttgtgtggaacaatttgatcaccattgtccttgtgtatccaattgcatcggcaagaagaacanatgggatttctatgtttttcttgttcttgaagttctggcaatg

SEQ ID NO: 12837 - DNA, 809 bp, Glycine max
  unsure (1)..(809): unsure at all n locations
gaaggagtggacaccacaatttctctccattccatttgagagtttactttcgcaaaacgggggagagtatcattacgctccctttcagtcatttttagaggttgaggaagctgaaactacctcagacccagagtcactttctgaatcgccttcactgtcactttccttggaagaggaacagatacatggtgaatcgtcttttgattatgcagcagaagcagcacatgccctcagtgaggcaaataaatcatcacctattggagtgaatccggacggatcgagatggtggaaagagacaggaattgagcgaagacctgatggcgtgatctgcagatggacaatgaccagaggtgttagtgctgacaaagctattgagtggcaagagaagtactgggaagcttctgatgattttggctataaggaacttggttcagagaaatctggacgtgatgcaaatggaaatatttggcgtgaattttggagagaatccttgtgtctggaaaatgggcttatgagttttgagaaaactgcagacaagtggggacgaaatgttaatggtaatgagtggcaggaaaaatggggggagcgctacaatgctgctggtcaaacagaaaaatgggcacacaagtggtgcagtattgacccaaacacaccgcttgaacctggacatgctcatgtttggcatgaaaggtggggtggcaaatacgacgggtacggtgggagcataaaatacaccgacaaatgggccgagcggtttgtggatggtggatgggataaatggngtgacaaatgggatgaaaattttgatc

SEQ ID NO: 12838 - DNA, 483 bp, Glycine max
gccgaagagcgcgacagggtgcagcgcatgcagatcatcgatcgcgccgccgccgccatcgccgctgccaggaactccttcaggaacgcagtgccgccgattccagccaccacgcagcccccgccgacgaacgacgtgacgaatcaggttcaggaatgggagtgcagagtgagggtattcgtgtgtcagagtcagaaacaaggggaaatggtgtgcctggccctgatttttggtcctggacaccccctgtggagagtgatgctccttcacatgatggcagtgggctgcagttagataccaagtcttgtgttcgtccaaccttgcccagtgcggttgtggagaaggagtggacaccacaatttgtctccattccatttgagagtttactttctcaaagcgagcgtagtgatactcttccaccctttcagtcatttttagaggttgaggaagctgaaactacctcagacccagagtcactttctg

SEQ ID NO: 12839 - DNA, 568 bp, Glycine max
cgagcccacgaaacataaatcccccgcaacgaacaaaaacatatataactccacccctcaacgacaacaatcccttcttcttccctcagatccacaacccgcgtcctcacctaagccgccggcaccggaagatggaggacgacgagaagacacccttggtgggagaaatcgaggaggtggacgcgagtcccgtggaggaggagggcacgagcgagcgggagaagcgcgtgcggaccaaggtcccggaggcagagatccacctgtatcggcaggggaagggccccgtggcggtgttcaagtcggcactgggcggctgggagcaggatcagctcgagatcagggaggacatcctcgagaagtacggcatgaaatcggtcttcgcgttcaatccgaccgccggggggcgcggcgttcctgtccggttcaatcccagaaatgggaggtcgattttgacgtacagggatggggctgttgtttaccttgatggagaacctaaggattcacttgttaaaccagtgacgaggatcttggttggggttgctttaataacctgtatgataacactagt

SEQ ID NO: 12840 - DNA, 328 bp, Glycine max
  unsure (1)..(328): unsure at all n locations
gtccgtgtcttaagccagagtttcaagcccccagaagaccaggaagggggagccangtctnanaggaaganaacgcctagctaacatagctaccacagagaatgtatcattagatggtggaaatggcttcaaaattctaacaaagtagactcttctaatacagatagtgcagctgcacatcgtaaccaagataatcctaagaaaacggaagagagtgttggaaactgcccagtctgtcgcaagccttttcttgccaaggatttggaccatgtgcttgctctagttggttcatattcttcccaattgagttcagataatgaagaactca

SEQ ID NO: 12841 - DNA, 589 bp, Glycine max
  unsure (1)..(589): unsure at all n locations
gacccacgcgtncgggacgcgtggggttcatttgtcttaattgggtgtgaaaggagtggtatgtacaagtgtgggaataaagaattcgttagaaaagacactgggagtaggaaatgtggttgtcccttcaggcttcatgggaaacctgtgcatggaagggaaggttggatggtgaagttgatctgtgggattcacaatcatgaattggccaagtccttagttggacatccatacgctgggcgattgactaatgataaaaagaaaattattgctgatatgacaaagtcgatggtgaaaccaaaaaacatcttgctaacgttgaaagaacacaatgccaacagttgcaccacgaataagcaaatttacaatgcaagaagtgcatatcgttcttcaataagaggagctgataccgaaatgcagcatctgatgaagcttctcgaacgtgatcaatacattcattggcatagattgaaggatgaagttgtggtgcgtgatctgttttggtgtcacccagatgcagtaaagttatgcaatgcatgtcatctagtgttttttatagacagtacctacaaaacaaacagtacccttc

SEQ ID NO: 12842 - DNA, 1368 bp, Glycine max
gggggaggagaagattctctttcgaggaatggggtggtggagaaggtggcaaatgacaattcaagtgaataatggagaacaacaacaacaaccacaacctcatcgtccctaatcctcaagattcactgtggatgatgaatttgaggactggggaaacaatggattctggatcttatccggagcgtccaggggagccggattgttcatattacatgagaacaggcctttgtagatttggtgcaacgtgtcgatttaatcatcctcctaacaggaagctggctattgccactgcaaggatgataggcgagttcccagaaagaatagggcaaccagaatgccagtactatctgaagacaggaacttgcaaatttggagccacatgcaaatttcatcatcctaaagatcaggctggaattgctggaagagttgccttaaatattttaggctatcctctccgccctaatgagcctgaatgtgcttattatttaagaactggacaatgtaaatttgggaacacttgcaaatttcaccatcctcaaccaaacaatatggtgctttccatgcgaagttctcctgtttatcctactgtccattctccaactacaccaggtcaccagtcatatgcgacaggaattacagattggtctagttcatcttatattcctagcccacgttggcaaggcccttcaagttatgcacctttaattctacctcagggaatggtttcagtgcctgggtggagtgcatacagtggtcaaatgggatcagacagtcctcagcttacaatggcatatggcctaagctatggaacttctcgacaaagtgaaccagcaaattcaggatcccagggggcatattctcaatttcgttctggctctgttcctgtagggttctatgcgttgcagagggagaacatatttcctgagagacctgatcagcctgaatgtcaattctacatgaagactggagattgcaagtttggtgcagtctgtcgtttccatcatccacatgaaaggatgattcctgctcctgactgtgttttgagtcctataggtcttcctttacgtcctggagagcccctgtgtgtgttctattcacgttatggcatatgcaaatttggtccaagttgcaagtttgatcacccaatgggagtcttcacctataacatgtctgcatcacctttagctgatgccccaggacggcgtatgtaaggtccttcataaggacctctgcattaaatttattatcaaaaggacttgttgagtcaagcttaaaaaattcaaggaggctttcattatcagaaactcgacagataccttctggtgatgataacattgatgaagagggataatgatgtctcttggaaat

SEQ ID NO: 12843 - DNA, 514 bp, Glycine max
aaaaaaaatttgattattattattgattttatttaactgttgttgttgttgttggaggggtccggttgatcctagcttatgagtgagtgaggctaatggaatgtgaagagtgatgatagtattattatgtgtctatggaattcgatgccgcgattcccgtgtcccgagagcacctccctcaagatgcaatgtggcaaattaacttgaggtcaagtgaaacaatggaatcaggaccttatcctgagcatccaggagaaccagattgttcatactacattaggactggcctttgtagatttggagcaacatgtcgatttaatcatcctcctaacaggaagctggctattgccgctgcacggatgaaaggtgaattcccagaaaggataggacagccagaatgccagtactatttgaagacaggaacttgcaaatttggagccacatgcaggtttcatcatcctagagacaaggctgggattgctggaagagttgccatgaatattttaggctatcc

SEQ ID NO: 12844 - DNA, 934 bp, Glycine max
  unsure (1)..(934): unsure at all n locations
gacccacgcgttcgaaatcctcttcttacactcaccccttctttttcttttttctttctatatatagtaacaaacaaaattggagtagggtttgatttcgatggagaattattctatgttgttccctatttccaattcctcgagctacccaatttcaacgagtggtgttggaagctctcaaatcggctataatggtcaaagctccaatgcgtttcttggtctaaggcctagtaatgaattatgctagtgatgatcatgagaagagacaaggtggtggtgatggcaatatgttaatgtctcagatcagtggtggtagcaatactaatgtgagtgatgagttaggtggttccggaaatagtaacaataaaaagaaaggagagaagaaggttaaaaagcctagatatgcttttcaaactaggagccaggttgatattcttgatgatggttatcgatggaggaagtatggccaaaaagctgttaaaaacaacaaatttccaaggagctactacaggtgcacgcatcaagggtgcaatgtgaagaagcaagtgcaacggctaaccaaagacgaaggggtagtggtgaccacttatgagggagtgcacacacacccaattgaaaagacaacagataactttgagcacattttgagtcagatgaaaatatacactcccttttaaaccttcttctccacaaacagtgtacctcaattgggaactacttgtagtacttttgttcccccctttgatacaaaaataaaactgtgtcaatagaagtaattaagatctagtttattgcataaactctttttagacaatcttctttctttctttcccatttgtttttttaaaaaaaaattggattattattagcgtatgtaaattcaactgtaaagtcagtacttgtgagatatatacaggtgatatnctttacttat

SEQ ID NO: 12845 - DNA, 537 bp, Glycine max
  unsure (1)..(537): unsure at all n locations
cccacgcgtccgtatttgattcacaccttccactctctctatcaccgatcccttatatcccccctccacttagctgaacataattcaccacttcaccatcaatttcccctccaatttcccatttatgatccatttggcatttcatcatatttcaccacttgtcctactccacttggatgatttcctaacgtattgttttcacaaatccttgttcttcatcagctaatagtttgagtccaacgaattcagcaacactatagatatatgctatatcttcctttccctatacattttccttccaaagtatctctagttctctacaaatcaacgtggcacattttttagcctaagaaaagctttagctgcaactcaaattcaaagtgtaagcctttcttgtttttattagtttatcttcaccaatggaagagaactttaagtgtgaacaagttggtctcattgatgagctaatgcaagggaaggagctagcaaagcagctctgngaccatcttctagtctcatcatcatcatcatcatctt

SEQ ID NO: 12846 - DNA, 404 bp, Glycine max
gaataaaaaccattctcttcccttctatttgattcacaccttcacactgtctctatcaccaatcccttatatcccccctccacttagcataccataattcaccgtcaatttccccattgatgatccatttggcatttcatcatatttcaccacttgtcctactccacttggataatttcctaacgtatagttttcaaaaatccttgttcttcatgagcttatagtttatgagtcctacgatttttggcaattcagcaacactatagatatatcttaggctaagagaagccttagcagcaactcaaatccaaaagtgtaagcctttcttcttgttattagtccatcttcaccaatggaagagaatatgaagtgtgaacaagatggtctcattgatgagttaatgc

SEQ ID NO: 12847 - DNA, 439 bp, Glycine max
gccatggtctatcttgtcgtcgttgttgtaggatacgactcagtagttgaaatcaataaagggaggccagaaccaaaattttgaatatcaattataccaaacaccgccattccaaacactttattttgtcgcatctttgtgtcggtgctgcaaataacatgaatccgcttggacagattttcccttagagaacgcatatgagctatctattaaacatatattaggagtgcccgataccacctcctttgacgagatttaagcgtcgtttcgcaaattggccaaagagactcactatgacctagctgagttaatgaatgattccactgtgtcttgacgatttgtactaattctggaagcctacgaggcagagttactccacagagtgtaacttatagttttgcaacccttttgcttgaccttttcagtggcaatcatattc

SEQ ID NO: 12848 - DNA, 461 bp, Glycine max
tctctcgagcctcatcggcccgacaaagttccaaagtcctcagacatgaaagggtctttatatgttgctgatgcccacatgttagccacttcttctctttctatgagtaataaagccaacaacccttttgttcttccttgtcaaacccttgtctctcatagtagtgtgagagatttgagcttcaaggtcagcatttcttggccttaccatgcttcttgtattgtgcaacgacaaaagaatagtaataacagtggttttgttgtggtagggtgtgcaaaatggggtttggaagctgagatgaaaccacaagaagatgatgaggaaaaaggtaagaatagaatggcaaggtttaaacacaaatgtcgaaaaagaaaaggcgttttcgctctgttgtagtggttggaaaggcaagctataatgagtgaatatgtacgaaaagagcctactgattacaacctaat

SEQ ID NO: 12849 - DNA, 587 bp, Glycine max
attctggtccttgatcgaatcacaaggatatgaatggaatcagaagaagtgatgagcgacgtgcacctgggttgtccagccggtttctccggaccctatatttcccttttctctgtctctacgaatctccaattcgaccaagatggtgaccttcttctccctcgacgacgcaccgctatgttcgaagcaaacgcacaacattcatttagtgtcagaatccagcataacatcacttcgtcaattccaaatgttggtctccaggtttggagagctgaactattattatctgattttatattgcataaagcatcttcttcctctcaacttcatcaagttattgcattagaacttggcgctggaactggcttggtgggtttattacttgcacgtgttgcaaatgcagtgttcctaacagaccatgggactgaaatacttgacaactgtgcaaagaacgttcagcttaattttggattattgaattatcaagccaaaatttatgtacgtgaacttgattggttcggttgctggcctcctaaagcaaaaacaggagaggctccttccacacaaaagtgtgctcacaatcactt

SEQ ID NO: 12850 - DNA, 478 bp, Glycine max
cccacgcgtccgaacgccatggcctctcagaaccttgacttcgcaccctcccggagacgggtccgtgcagctttcaccgaggtgcaccagcatctcgaccatttcttgttcaagactgctcctcctgggatcagaaccgaagaagggtatgaaaggaattccaggggattggaaattttctgcaaaagctggatgcctgaatcgggcgtcccactcaaggctgctttgtgtttctgccatggttatggcagcacttgcactttcttctttgaaggtattgccaaaagaatagctgcttctgggtatggtgtttatgctatggactatccacgttttggtctatctgaaagtttacatggttacataccaaattttgatgatttggttgatgacgttataaaacattttacaaaaatcaaaacaaggcctgaggtgagagggttgccacgattcatatttgggcagtcaatgggtggag

SEQ ID NO: 12851 - DNA, 670 bp, Glycine max
aaagtgcaccaatatgtgcactcatataagccctcataataacaacaattgttgtttggtttgccattgctcttcttctactcgttcaccaacttcaaccttgttcggcatgtctcatttttctcctccattgtcaccaccttctccttcttccccttctaggtttgagaccaacaaccatcatcatggtgttgtgaaatataataaggatgttttctctgagcttgtgtgttccatggagggtttgaattttgatgaggcttcttcactgttgtctgctgcttctaagcctcatcatcacaacaatttgtcttcttggcttgatgtttctaaggatcacaatcaaaaacagttcaatactcttaattcgccaaccatcactgcttgtggaagtttttccaataatggaaatgggggatttttgagagcagaaaatggggttgttgttgatgatgtcattgccccagatctcgcatgggtgaatgaattgctgatgtagattatatgcaacatctgaagaagaagatgatgatgatgacaaaaagagtggttcgtggtgggatttgtgatgaggatttaccccaagtgtaaatacatgttggagctagcaacatatattacatccttgtcttctattgttattgttattgttagttattgtttcttaaga

SEQ ID NO: 12852 - DNA, 393 bp, Glycine max
gagagaacgagagaaagaacaatgggggcgaagaagcagagccagggagtgaaaaataagggtaatggcgccaacagtgatgttttcgcgtcatgctccttctccagccttggacttgattccaatttatgtgaacaacttcgtgataggttggggtttgaagttccaacgctggtgcaagctcaagcaattcccgttattctctcggggcggcatgcattggtgaatgctgcaacgggcacggggaagactgttgcgtatttggctccgattattcatcacttgcagggttatgaaaatcggattcagcgctctgatggaacatttgcgttggttcttgtaccgacgcgggagctatgcttgcaggtttatgaaattcttcaaaagttattg

SEQ ID NO: 12853 - DNA, 408 bp, Glycine max
cgtacgagatttcagaagaacattctgctgcgactttggaattcactggcagtcaccctgtcactggagaagtattggatggtagtgacatgccccaaggccaaaatgaggaggttggtgacgctcaaaatgaagatggtgaaattgctgttgggaatgatgaggaatccaaagatccacagaacttggatgttactggtcaagaggaattaccaggtgacaaaactggaactttagaagagaatccggatcaacctgttgatgcaaaaatgctgtctgatgagatgcagagggatcagacagacccagacaaccagcagtcaacattggcgcccactggtgagagagaagagggagaattggtgccagatatcggtgatctagaaggtgctagtgatttgtctaaca

SEQ ID NO: 12854 - DNA, 655 bp, Glycine max
cccacgcgttcgcccacgcgtccgcccaggctcgaggccacgggcaaatgcagatgcagatgcaacaaacgcagcagcagctgcaggccacggcggcaccattctcgacctccactcctcctcctcctcctccttcctccggcggctccgcgtccgaggcaccgccgaagcaggtggctcaagcaatggacaagctcggacaagccgaacgaatcatcgccgacatccgaatcggcgccgaccgcctcctcgaagcgctcttcgtcgcggcggcgcagcctcaccaaggcaacaagcctctccaagtcttcctcaaagaagacgcatgcatgcgtcagtatcttcaagaccttcggtcgcttggtaaggagctagaagagtctggagttctcagcgaatcagttcgatcgaggaaagacttttggggcttgcatatgccactggtttgtccagatggcgccgtggttgcgtatgcgtggaaacgacaacttgcaggacaagcaggtgcttcggccgttgacaggaccaggttagctctcaaagctttcactgatcagaaaaggcgttttttcccacatcttgatgatggacttgaaactagtgaatcagcatcgaagaaatgttgtgggtctgaagaaattgcagtggatcccaa

SEQ ID NO: 12855 - DNA, 2192 bp, Glycine max
caaaaaccgaaaaccctcgcaatttcccaattcacgcgtttctttcctttcaagactctctctctcgctctagttttttcgttccgcgactcagcctttcgaatcctctcacccagaggtacgattcgtaccatgtagttgtgggatttcggctttgccacttcttgattccaataattttggtttctttttttcccctaatttgatttccccagttagggtttttaactctattcgatcggcgatttcgaatactcggaggctcgaatcgtgttgggggttttccgttttgattaaaaaagtttccgttttttgtgttgggtgatcaagggttgtttgatttttttcttgcgatcgagaatgggtgaggcttcgggagctggttccgctgattgtttcagccagatgatgtcgtcgatgccgggttttcgcttccatcccacggatgaggagttggtgatgtactatctgaagcggaagatttgtgggaagaggctgaagctcgacgtgattcatgaaaccgatgtgtataagtgggatcccgaggatttgcctgggcaatctatattgaaaacgggagataggcaatggttctttttctgtcacagagataggaaatatcctaatggtggaaggtctaaccgagcaaccagacgtgggtattggaaagcaacaggaaaggatcgtaacgtgatatgcaattctaggtcagttggagtgaaaaagaccctggttttctacgcaggcagagctcctagtggtgagcggactgattgggttatgcatgaatacaccttggatgaagaggagcttaagagatgccagggtgttaaggactattatgcactttacaaggtttacaagaaaagtggacctggtcctaaaaatggtgaacagtatggtgcaccatttaatgaagaagagtgggcagatgatgacatagtagattttaatatcaactcagctgatcaggaggctccaaatgatgttgataatggtaatgtactgcagcctttgcttgatgatgaaatcgacaacatcattaggggaattttggatgatgagcttgtccttgatcagcagcatgtgaatggttatcctgactttcctcaggttgttagtgaagaaacacaaagtactgctgtggatcagttctctgaggctgtgatgttccctgagccagtcagaatcacacagcctagcaaccaattttttgatgcacagcctagctttgacttcaatcagccagttacttctcatctgcatgtttctgaaacatctgaggtcacttctgcttccaacattaaaacaaaggagcttgactttaatgaggatggcttcttggaaattaatgatctcattgatactgaacctacattgtcaaatgttgaaaattctgtggagtaccagcattttgaagatgggttaagtgaacttgatttgttccaagatgcacagatgtttcttcgtgacttggggccaattattcatgaaacagattcacatgcatatacaaatgcccttgtcagcagcaatattgaatgtcaaagttaccaattgctgccaaatccagaggatgccaatcaaactgttggtgaattctggatgcatggtgaaagtaatcagctatcatccccaggtgttgtatatgaatctgttggctttcctacggaaggcaataacaatcaaagtagcactgtggaagatgttgctacaagtagcttgtcctctgctctctgggcctttgttgagtcaatacctactactcctgcatcagctgctgaaagtgctttggtgaaccgagcattgaatcgaatgtctagcttcagcaggttgaagatcaagcacacaaacattgctgcagcaggtaaagacactgcaactatgaagagagcaggcagaaagggacttccattccttttcttccctattattattgctttatgtgctttttgttgggtttttgttggaaacttaagactattggggagatgtgtctctccttgaatatatatatatatatatatatatatatataaatccaaagttttgctgctaggtatattttctctggaacctcccagaatgattgttgtctgggatctctccccggaattaccaaacagtgctgtcctaacattttctcaatataaaaaaaaaaataaaactttgtgaatattgtaggcaatata

SEQ ID NO: 12856 - DNA, 190 bp, Glycine max
cgccctttttcgacaatgaatattttttcacctattttttatggatgcaaaacaatccaacttttatctgtttcatctctctttcactcctcatactttcatttcttttcattcatctcttccaaacacaatgtataaaacgatattggatacatgaaactcaattaatgcgtatttagttgaatgcttc

SEQ ID NO: 12857 - DNA, 449 bp, Glycine max
gttcggaatttccgggtggccaagccttccgccctgtttttactcaagagagacggctttgcagtaatcacgggacgaatgcgtttctgagggaccatgggcttcttcaagatgttgttccttcacacatgttgaaagaagagtagagctgatataactccagtaattattagtcatcatgcttctatgtgatttattttttgctgactttttcctatgagacttaggtgagaactctagtactggtacatgtaatttttcttcctgaccggaggtaatattagtgatcatgatcatatatacttgtaaaacccactttatctttttccacatagccccatcatgattatggctgtatagcatgatggattatgatttaatgcagggactacttctagttctagttctaaaaaaaaaaaaaatagcataaaatttttaaatataagtca

SEQ ID NO: 12858 - DNA, 686 bp, Glycine max
cgggttgaatatacacactttttggatttggttgcttctggagttgttaattcttcatcacaagctagagataaagcagcgaaatcagttgaattttggggactaaggaaagggtctattagctctttgcatgctatactttttacttccaagccaattccttcattgcagtttgcagcatattttgttccttcaaatgagcctgttttaagcattgctgtccttgaagataatgcttgtaactcaaacatatatgctgctagtgaagaggatatcacccgtcttgactcgccaatagaagaaaaagtccatctgaaagaggaaatatctttcatggtagaaagggcaccttatgaggttcttgatatggacttgcttgcagaccaacgagtaaatctcttccttgcatggtctttgttgatatcacatctacagtcattaccttcatcatcatctcaaaggcagagactgatccagtacatacaagactctgctactccagttattttggattgcctttttcagcatattcctgtagagatttccacagttcagagtctaaagaaaaaagatgcagagctttctggtggcttatcaaaaactttaagtgctgcaacccgtgccaccacaactggttcacttttgttatctgtggaaatctctttggcctttttaattggggaaaa

SEQ ID NO: 12859 - DNA, 1649 bp, Glycine max
cccacgcacgcgcccttccaagccgaagcctactgaaactggcttctgttgtgccgtttagcttcttcttcaccatattctccttcttttctcagattctcgtgcgcccacgcgtcccgttgcattgcccaaatccattgcccagcgtttcagaggcatccaccacagcccgcggaaccagtggtgtaataacaaccgttgcgaaacgcaggtccaaagtgctgggcccgtggcttctctcctcaagtcccgttccgtcatacggttccgcgggcctgacaccctcaagttccttcagggcctgttgaccaacgatgtacggaggttgggtgagcccgttggtgacagaaccgaaaacttgcccacgcccaacgtgcctgctacatcgtttcctcctatctatgctgctctattgactcctcaaggaagattcctctacgacctctttctctataagcctcccacgtgcgacaccaagctcgatgacaccggcactggacctgattcccaaccacacgaaccctttcatttgtttgctgacgtcgattcttctgtgttgggatgaattgttgcaaaccctcaacaaataccggttgaggtcaaaggttgagattgatgatgtctcaagtgatttctcgtgctggcagcgttatggtgctggccttcttgagaagacctcacaagtagaagaacctgaagcagcctctgtaggctggggtgctggtgtggatcgtactgcaatgtcatcctctcaagggagtgatcaagggtggcaatggtttaaggatcccagattggtctgtcttggtttcagagggatcttcccgtcgaatataactccacctctaattgaggtggacaaagagactgatgaacagaatttccttctgtggagaatagagaagggagtagcagaaggatcaactgagattccaaaaggcgaggcagtaccgcttgagtataatcttgcaggccttaatgcaattagctttgacaaaggttgctatgtcggccaagaactcatagctcgtacacatcacaggggggtgattcgtaagcggatagttcctctaaggtttctagataacgatgggaaagagttggtaaacaaagtcattccaggctcagaagtaatgaacactgcatctggcaaacaagctggtacagtgactactgccctaggatgtcgtgggctggggctcttgcgactagaggaagaagctttaaaggggtcgagtgccttgtccgttcagggacaagaggatgtgaaggttgtcgctagtagaccagattggtggccttctgaatggcttcaagatcatggacagcacgctgcttttgcctaggatgcccaatgtcgttcaaagggcgagtatttatgatgaacaatttcgtgggtgaatgaataatttgtaaatgggggcgttaatgtgatcctaatgcttccagtgggtgaatagttagttaaaaaggggaacaatgaagacagcactagtgggttttcttgcggaatgagtttcattgtagtaatggtagtatgccattttccccccatagaaccttaacaattttgtgtttggcaaattaggaaggaatcatgttatgcgataaaaaaaaaaaaaaagggcgggccgccctagaaggatccc

SEQ ID NO: 12860 - DNA, 568 bp, Glycine max
atggggaccagactatgatattagagtcaatgggattgcaccaggtccaataagtggcacccctggcatgagtaaactggctcctgatgaaataagtagcaaagccagagattacatgccgctgtataaacttggggagaagtgggatattgccatggctgcacttttcctagtatcagatgcaggaaaattcattaatggcgacattatgattgttgacggaggactttggctgagtcggcctcgccatttagcaaaagaggctgtgaagcaggtatctcgatcagtagaaaacagatccagaaatgcatctgtcagtgttccaaaaagcaagctgtgaaccagcagattcaggtgttagcccctctacacagccgggaaacaaattataatttgtagaatactatggatttggaagatatcatctgttacttttaaattattaaatagttgaactttctccacctatcaaatatgatgattaaaaagatatgcctacatccaagacatcccccacacccaaaaaaaataatataaaataaaataaagttgtcgcagtccccatgat

SEQ ID NO: 12861 - DNA, 698 bp, Glycine max
  unsure (1)..(698): unsure at all n locations
ataaaggtgaaaaggagttgcactcactgaatgcggatagagttactcaaggtctaagtactgtatggagtttgattcttctaaggcctcccattcgagatacttgcttacaaattgctctacagagtgcagtgcatcatctggaagaagtgcgtatgaaggcgatacgtctggtggcaaataagctttatcctttgtcatccatttctaagcaaatagaagattttgcaaaggaaatgcttttctcagtgatgagtggggatgcatctgaagctactgatattgaatgttccattgctgattcagaaaagggacctgatgttgacaaggttccaaacgaacaatcatcattgagtggcagcactaaagatgtcacctcagatgatcggcaatcatgcacatctgagagtgtctcaccagattcagtttctgaggctcagaggtgcatgtcattgtattttgctttgtgtacaaagaaacattctctctttcgccaaatatttgtcatctatagaagtacatcaaaggcagtgaagcaggcagtacatcgccaaattccaatactagtacgtactatgggctcatcttcagatctncttgaaattatttcagatcccccaaatggaagcgagaatcttctaatgcaggtattgcaaacacttacagatggtacgatcccttctaaggatttaatatgt

SEQ ID NO: 12862 - DNA, 564 bp, Glycine max
cacgcgtccgccagccctttctcctttcttcgattttcgccttttcaattcactctctgatgatcaccggttccgtttttcgttttcatttttcctcccaacattctatttctctttttttgcatttcattttcgatcatccgcagatcgcttgcgtttttgttctacgacgctgatcgtatctttattttttattttatttttttttccttctgttacttcggtttttttttagaaatatatatatttcttattcatttattttgttgaactcctgctattatgcatatggaatttggaagaatttgattcagtaatgagttttgcaagtctcgtttggtgttattagactgatctactgaatagccagctagtttgtgtatttggaattttacatgataatctgtgtttacttacggtcaactcaatcggtatcttctcttatttaggattaacatctgtaacttaatcaattgaacataatttacccattggtatctatagttttattatatttgttagatctatttgtgtttgatttgttttttaacctaattaattttg

SEQ ID NO: 12863 - DNA, 669 bp, Glycine max
cgaggaagggttttctcacgacgactcaaccaaaaagcgaaaacgcgcaagggattggaatttaaattcagcttggcagaggttgtttcagctacgctggcctgatcgcgttaagcagattcatagaacggattgggagcaactctattgggaaactcatttgcaagattgtttagatgaagcagtggaggtagcactaattccatcttttactggatatattggtgacatacagatttcagatagcatactgaaatatattggctttgtggggaatacaaaccattctacttgtgaccattcaaaattgtcttaccattgcctacaattgggcagccatgtgagttgcctggggctgcaaaatgttctatgtactgcagaaactagtgttttgttgagggaatgcaagctacagagtctggtacttagatgtatccgatccaaggaactaattgatggattatgcaaacttcttgctcaacattgtagaacgttaacgtctctggaatttgttcactgcgcactctcaacagattttattaatgcaatatttggctctttagtcatagagagagtacaaaaacatgggatccaacatttgtcaatcatcgccacaagttttctgggaccatgtgcagtttctttacctaatggactcatgtcattttt

SEQ ID NO: 12864 - DNA, 348 bp, Glycine max
tttcatttcaagcacgactaaaaacacctttttcctctcacaccgacagtttcaagaagcaaggaggagaattcacataaatcatggtggagattcacgaagaaatcgacccctttgatcaagaagaacatgaagaggaagaaaccgactatgatcagctaaagaagcggatgcagaaggatcggatcctgctgcagcagatgaaggagaaacgccccaaagaagaggcaggccaacaagaaaaacaagaagcatctaggcggaagaagatgtcaagagcacaagactctatcctcaagtacatggtgaggattatggatgtttgcaatgctcaaggttttgtgtatg

SEQ ID NO: 12865 - DNA, 647 bp, Glycine max
gaaatattttacttgcaaaaattgcagagggtgtttcccttcttccaatgtggaaagagtggggcttttatgtctatcttgcgtggaatcaaggaaatctgaaaaaagttctattcatgccgtgggcaaaagaatcaggtcccctcggccagtattattctcccgttcatgttcatgttgtgcttctgaatctgaactctgtatctctcctcaaactaagaaacagtggaagacaagaacaaagtcatccaaactgtcggtaaaattgaagactgcaccaattacttcaaagtgtttatctccacaaaacaaaagtcagtggaggatctctaaaaggtatcaacgattacataaattaatttttgaagaggatggattgcctaatggagctgaagtagcttattatgcacgtggacagaaattgcttgagggtatcaaaacacgctctggaattgtctgtcgatgctgcaacactgaggtcagcccctcacagtttgaggtccatgcaggctgggcttctcgcaggaaaccttatgcattcatctacacgtcaaatggggtgtcactccatgagttagcgatatttctcttaaaagatcacaaatgcactacaaagcaaaatgattatgtatgtgttggttggtggg

SEQ ID NO: 12866 - DNA, 421 bp, Glycine max
ttcaaatcgagcttcgctttctcttccctgcactttgcactttgcactttgcactctgcacagcgcaatggcgtgtttgttgagagcgagaaacccctgttactctctgatgaggcgcattcgaatccggtgcatgagcaacgttcccgagaacacggtgtattcggggcccacctcgcagagctcgaccaagcgcgtcacgctgagccagttgcgccagaagcaccgctcctcccagcccatcaccatggtcaccgcctacgactaccccgccgcggtgcacctcgacaccgccggcgtcgacatctgtctcgtcggcgactccgcggcgatggtggtccacggccatgacaccactctccccatcacgctcgaggagatgctcgtccactgccgcgccgtggcgcgtggagccaagacg

SEQ ID NO: 12867 - DNA, 1367 bp, Glycine max
caggatttggcttctgctgagaaatcaataagggagacaatggaaagcaaacaagttctgcaggggagtctggaatggctcaagaatgtttttggctcggaggttgagttgccatggagtaggattcgggaacttgttttggaagatgaatcagatctttgggatgaaatttttgaggatgcttttgttggcaggatgaaagcaatcattgacttgagatttagggagctaacaggtgctgttgatgtgctgaactcaatttctgctataggtgacttgtgtaccaagctggatgatgttcaggggtatttgaacagaccttctacggctggtggtgtttggtttctagaatcaaatgccagaaaaactggagttgcttctgggtttaaagtccagcctgaagagagcgaatttcagtattgtcttaatgcctattttggtcctgaagtaagtcgaatcagggatgcagttgatgtttcttttcagagcatctttgaggatcttttaagtttcttagaatctccaaaggcttcccgaagattgaaggatctggcaccatatctgcaaagtaaatgttatgaatgtgtgtcttctatattgatgacactgaagaaagagctggatagtttatatgccccaacagaaaatggcgaggtgccaacagcggttactgttgaaaaatctcttttcattggacgattattgtttgcattccaaaatcattctaaacatatacccttgatacttggttctcccagattttgggttaatgggaatgcatctgcagttgggaaattaccagctctggtaaaacaatctcgatttgggtctcattctgctatctgtgatagtccgggaagacaaacgagccttggctctaaaagacaaaattcatctgtcgtatccgctttgcttggcatgagagaaggtgcaagccatgaattggaagaactgaataagaccattggggatctttgcattagagcttacaacttgtggattttacggatctcaaatgaactttctgccattgtctctcaggatcttaaacaagatgatgctttatctttgagctcaccctggaggggctgggaggatatcattgtcaagcaagatcagtccgatgagaacccaccagagatgaaaatatctcttccatccatgccttctctgtatatcatctcatttctatttagagcctgtgaagaagttcatagagttggaggtcatgtacttgacaagaagattttcaataaacttgcatcaaggctactggaaaaggttactggaatctttgaggactttctttccactgcagagagtggtcttcatcaagtgtcagaaaaaggagtcttgcaggttttgtt

SEQ ID NO: 12868 - DNA, 522 bp, Glycine max
cttgattgctgggctgttaatcaatcatgcatagttttttatcgtgttctgttcaaatatttagggatatatgcatcttcctaattaaatttatcatccgtcatggtgagtggttttgcaatggtaacaactgcatttagtggcaccaccaacttccatagaatggatttttaggtattggttccagtttccacttagttcctctgtcgatttatgtggattaagagatcttctgagggcttgggttcctctaggaattatgttagcagtaggtatagtatctaagaatacatccctggtaagggtgtggtcttcttattctgcaaatggtaaattattctaaaatttcaaccaatctgtactcaagttcaagtgcttccatctgctgttagctgaatatttagttgagcatagcaatgattaacatcatgccttttggccttttggtttcaaacaagagagaaaaagagactgaccctgttgtgttccttttctgcactgggtaaaatacactgggagtat

SEQ ID NO: 12869 - DNA, 421 bp, Glycine max
aaaaaagtaaattttaataaaaagatgtgtagaagagataaagtaggatttatttactatcctctaacaaaacaattgatttagattggattagacttaaatttagaatcaaactaattgatgttattgaataagatgattttgtccttcaaaaccatttcatttcaatctatgaacactcctatgagtggctattcacatatagtcgatgacaatatgtcacatcagacacaacttgtgcaatgtgtacagtataggcctctggtgtgtgcattaggtgtcttttatgttatcattttgtcttttatttttctctgctctcccttcgtatgtatgtgtgtgcgtgtgtgtgaaaaacctactagtctcctttgataattttttactttggcaaataaggcaattccaattgagcctggat

SEQ ID NO: 12870 - DNA, 917 bp, Glycine max
tgttggaatccttctcttcagttgggttgtgtcttggctcgctccctctcggatcagatctgcgctctccgttttcagatcgcgttttgtttcaattcgacactttcctcgcttcaaagattaagcgaacaatatggttgtccttgctgcatccattgtgagcaaatctggcaaagtgctagtttctagacagtttgtggatatgactcgcataagaattgagggtcttctagcagcatttcccaagttggtagggactggaaaacagcacacgtatgttgaaactgagaatgtgcgctatgtttaccagccaatagaagcactgtacctgcttcttgtaacaaacaaaaacagcaacatactggaagatttggaaactctgagacttctctctaaacttgtacctgaatattcttactcccttgatgaagagggtatttgcaaacatgcctttgagttgatttttgcatttgatgaagtcatctctcttgggcacaaggaaaatgtgactgttgcacaagttaagcaatactgtgagatggagagtcatgaagagaagctgcacaagttggttttgcagagcaagattaatgaaactaaggatgttatgaagcgaaaagctagtgagattgataaaagcaagattgaaaagaacagaggtgataaaggaggatttggtccattacagtcaatgggctctggaagaattgaaaatagctttagtgatttgagcatatctagcagtggaactggttttggaagtggctctggttttggattgacttctgatgtcgattcctttgcaaccaagcctaaaggtcgtccaacttcatcagccactgctccacctaaaggtcttggaatgaagcttggtaagtctcatagggacaaccagtttttggaatcattgaaagcag

SEQ ID NO: 12871 - DNA, 584 bp, Glycine max
ttcgagttaagagagcgaaagacgaaatttacgatagcttttgaaggtaccagtttttgtcatcactctctcagctgatcggtgcttatagatccagcgtcagcagattcaatttgacactggaagcaatttctcatttcaaagattaagtgaaaacatggttgtccttgctgcatccattgtgagcaaatctggcaaagttctagtttctagacagtttgtggacatgtctcgtatcagaattgagggtcttctagcagcatttcccaagttaataggcactggaaagcaacacacatatgttgagacggagaatgtgcgctatgtttaccagccaatggaagcactatacctgcttcttgtaacaaacaaacatagcaacatactggaagatttgacaactctgagacttctctccaaacttgttcctgaatattcttactcccttgatgaagaggatatttgccaaaatgcatttgagttgatttttgcatttgatgaagtcatctctcttgggcatgcggaaaatgtgtctgttgcacaagttaagcaatactgtgaaatggagagtcatgaagagaaac

SEQ ID NO: 12872 - DNA, 301 bp, Glycine max
gcgcaccgtatcgtgttttcattagacgctgcaatcgttcttctcttgagtttggtcgtctgggatcagatctgctctctccgtttggattcaattcgacactttcctcgcctcaaagattatgcgaacaacatggttgtccttgctgcatccattgtgagcaaatctgggaaagtgctagtttctagacagtttgtggatatgactcgcataagaattgaaggtcttctagcagcatttcccaagttggtagggactggaaaacaacacacatatgttgagactgagaatgtgcgctatg

SEQ ID NO: 12873 - DNA, 272 bp, Glycine max
caaaacgtttatagatcataactactgcgcggcgcgagacagctttggtttcagttttttgtcatcactctcagctggtcggtgcttatcgatccagcgccagcagattcaatttgacactggaagcaacttttcatttcaaagattaagtgaaaacatggctgtccttgctgcttccattgtgagcaaatctggcaaagttctagtttctagacagtttgtggacatgtctcgtatcagaattgagggacttctagcagcatttcccaagt

SEQ ID NO: 12874 - DNA, 419 bp, Glycine max
accacgcgtccgaacaaactcatttttcttttccccatttttctctttctttttatttattttttttcattttcttttccccttcgcttcgtctccacagttcacaccattctcgtctccctctccaacaaaccgtttcctcgggaattgagaattccaattctgcccctcgcggctccgcgaatttacctatccgagccatggctactgccaccaccaattcttcgccctcggctcagcgccacgtcggcttcagccgccgcacgcaggcgccgcgccagctcggacgacgactcgccgccggtgaacaagtaccggctgctgtcggagataatggcgcgcgcgccgtacgcggtgctggagagagaaacatacagcgacctcttgtgcgaccaatgcggctccggcgagctggcgga

SEQ ID NO: 12875 - DNA, 646 bp, Glycine max
atttatcttctgtgtatggcccaaggagtgtcatcacagttgttggcatgttgaagtgaaaaagggtgatgtcgctacaggcgtacactttactggcggttctttcagtggaatgtactgtttctattgagacataccactggtttgaggcatcccttccatgcttgatgcttaaaaggaacccaggagaaggtaccttggcttgtttattgggagattaatttcactgtgctggaatgaattatgatccccattaaaattcattgacagtgccggtagaataattgccacatttgagtgggagtttattaagatgagctgaatggtcatttttcagtcatgaggataatcaatggttattggtgatgtacgtttgagtacatgtgagcaaattaattgtttattttattagctaggtagtcagggggaggggaaatggttagtatcaaaccttcttcctcatccagatacagctgccactgggccatatgcctagctgctactgcctttaaatcatttcagtataaatgatggaatcccaagtactactgccttttctgcttcttgcttattattcttttcagttttgtaacttgagttgtgtgtgtagatatcttatttcttgaactgtacttgagttgtattc

SEQ ID NO: 12876 - DNA, 498 bp, Glycine max
gaagagaagactgagttagaaaacacgctcggtcttcttctccaatggcgatttccgatgagcctgaaagtgtagccactgctctcaaccactcttccctgcgccgccgtccctccgccacctccaccgccggcctcttcaattcgcctgagacaaccaccgacagttccggtgatgacttggccaaggattctggttccgacgactccatcaacagcgacgccgccgccgtcaattcccaacagcaaaacgaaaaacaagacactgatttctccgtcctcaaattcgcctaccgtccttccgtccccgctcaccgcaaagtgaaggaaagtccgctcagctccgacactattttccgtcagagtcacgcgggcctcttcaacctttgtatagtagtccttgttgctgtgaatagccgactcatcattgagaatttaatgaagtatggttggttgatcaaatctggcttttggtttagttcaaagtcattgagagact

SEQ ID NO: 12877 - DNA, 481 bp, Glycine max
gatctataaatcattctctctctctctctctctctcttacttacaaagtaaagagtagagtttgttctgtgaagaactgagggaggttcaggtccatgatattttgaaatctctctgtagtaggaagaccatgggacgagcttcatcattacttataatttttttggtatcctggttcttcctttgccacctataatgtggtaacgatgataaggcactacggatcttcagaaggtgtggctgttaatgatggtgcattgttttttgaccctattactgagatgcctgatcatgtaaagaatcggaagacatctaaagtgccctttcatgtcgcgttaacggcgacggatgctccatataacaaatggcagtgccgcgtcatgtattactggtataaacaacaaaagaagttacctgggtctgagatgggaggattcacgaggattctacattctggaaatcctgacaacttgatggatga

SEQ ID NO: 12878 - DNA, 579 bp, Glycine max
ttccacgcgttcgattttttttttctctcacacactcaaccaaagacgaaggaagaagaagaattacaaagtaccaccaaacaggctgcgacgacgtcgttctttgcaacttccagttcttgttcttgatgaatatgacaccagtttgcccctttgtcaaagctgctcgccccgatgataacaatgcctctaagaaatctggcgaaaactctatgaaacatcaggctgagtctgagagtaaggtgaagaaagaggttaatgactcagctagtacctcaccaaagtgcccttttggatatgattcgcagtcgtttaagattggtcctcttagctgtacggtgtgccaagcacttttatttgacaccagcaaatgtgtaccttgttctcatgttttctgcaaagcatgcatatcgcgctttaaggactgcccgttatgtggggctgatattgtgaagatcgagcctgatgctaatcttcaaggtgtagttgatagcttgattgaaggtcatgctaggagcaaaaggtctgttagtgcagacaaaggagaagaagcgacagagagtatacaggtcatatatg

SEQ ID NO: 12879 - DNA, 348 bp, Glycine max
ctctcacacactcaaccaaagacgaaggaagaagaagaattacaaagtaacaccaaacatgctgcgacgacgtcgttctttgcaacttccagtttcttctctctgtctcgtttccctcgatcctgttcttgttcttgatgaatatgacaccagtttgcccctttgtcaaagctgctcgccccgatgataacaatgcctctaagaaatctggcgaaaactctatgaaacatcaggctgagtctgagagtaaggggaagaaagaggttaatgactcagctagtacctcaccaaagtgcccttttggatatgattcacagtcgtttaagattggtcctcttagctgtacgg

SEQ ID NO: 12880 - DNA, 1352 bp, Glycine max
gggacataccatatatacatatattatagtttagtttgcactattttaatggtggctggctaccttaattccacatgctaaaattttgcacccctttattatataaccgtttcattctctatagcatctcaaagggtgtccaaagaaggaatcacacaagagaaattttgggtggatcttggtaatttaaatttggtccaaaaatagtaagaaaaaaaaaccatagttcatttaattttcatgtccttgctaacggtggcgcaccaaagggggtcaggtgagtttatccggttcacggaaagtcatggcggtggtggcgatgacgtcagtggtgacggtgaacatggttgtggacatgatgatggaagtggtgctggaggttcactagggttgaattttaaccaagtgatgcaacaaggtgaggtgacaatgcaaggtggttcattggtttcagggtataacaggggtgatccagagttgagagaaatagtttcagctttgacacacgtggtggtgtcttcagggtctggccagaggagcaccgaatggatccagcaaagtggttttcctatgatgtctgcatcttctctttcatgtttgtcttctttctcttctccttcttcttctggagcctcttgggttggccacaaaagaggcagagaagaagaagagagtagctcttcccataacatgatccaacaacaacaacaaagtgctccaagactcttcagaaacattggtgacttcatggtgccttctcaaggagactcatcttcagcgacagaagaagcccccacctccacaactacaagtgtaaccgctgtggcaacaacggttactgaaaccccacccccaccgggaggtggggaaaggaggagaaagtacaggggagtgaggcagaggccatggggaaaatgggcagcagaaattcgtgatccacacaaagcagcaagagtttggcttggaacattcgacacagaagaagcagcagcaagagcatatgatgaagctgcattgaggttcagaggcaacagagcaaagcttaacttccctgaaaatgtaagagcagttccacccattcaaccttttcaagccaccactaggctaaccgtttctgattccaccacctctcaattccggccactcgtcacggaggcgccgcccttcattcagcagccacagattcagggctcctctgacttgatcagagattacttgcaatactctcagcttctacagagtgattttcaacagcaacaaatacaacaacaatcaccttctagtttgcttcagcagttgtactataatgcacaattggcttcacttcaatcaccttcagtgctatcatcatc

SEQ ID NO: 12881 - DNA, 245 bp, Glycine max
ctgagaaggaatcacacaagagaaattttgggtggatcttggcaatttaaatttggtccaaaaatagtgagaaagaaaaccatagtttatatagttttcatgtccttcctaacggtggcgcaccaaagggggtcaggtgagtttatgcggttcacggaaagtcatggcggcggtggtgtgcggtgactgcgatggtgaatatggttatggacattattatggtataagtggtgtgggtggtggtt

SEQ ID NO: 12882 - DNA, 607 bp, Glycine max
attttcatccatgcgtgaacgacgcagttattgtagggttccggtcacgggagggaccgattacacggccggtgaagaacgccgacaaagccggcacctgaattctggagttggttgttttttgtttcgtttcgtttcttttctctcttcaaggaagagaaaaattgtgcataagaaaaaacataaacaagaaggaagggggtagtgatcacgtgcggaggggtatacgataagcgaaagagaggtatacctttacagttatgtgtttgacatttgattaattagttcttaggtgactataagcaattacgcataataatatatagacgatcttgccctaaggggaagaaggggcttttaattattgagcttttgtagagagggttgttttggaaatttcacttatcagttggattgctttggtccaacgtcaaaattggggtgcattgtattgtgtaggaccttaacaagagaggttgaagtgtttgctcatgcaataaatgcttcctcttcttttggcattgcataatgcatgttcattttgtagtacctcgtaaaagaatgcaaatttatataattggtatgttatgctagaagcttcgtattt

SEQ ID NO: 12883 - DNA, 634 bp, Glycine max
ggcgaacccaagcagcaacaggggatctttgccatccacggttcatgcgaattgcaaaaggacaaaaccataaaagaaaaattcgcaaaagttggtatcttcattcttccttctttaaacgcaacgaagtttctttccactttcaaaattcccaacccctcctttgttcgctctgtacatctgggtcatttaatccccgaatttcttcgcatcttgcctcatattccatccaattctcgctgtttcaacgatcacggtgttgacccttgatgggtttttctcgtcgatcataagcatacccgggtttgtgaaaaaggtttctcctttccacgtgtggcttcacttgtcatcgatcctgagctccatatagcttgcaacgctgtggaactgtgtactttgttgctccttttctctgtttccccgtgtgtcaattcagcttaggccataactggatcacatgaaaatgaagccttcttcttccaatgaagaaaaccatgacgtggaaaatgccaagttggacaaagtcaaagttagaactcccagggaatgcgaagggtagttaaattgcacaatcaggccttgttgtctggacttgcatattgcttttcctcatgtggcatgatattggtcaaca

SEQ ID NO: 12884 - DNA, 528 bp, Glycine max
ctgctgcagaagaattcaccagattcagtggagacgcactttctctcttttgaattatatatgagaaaacagaggattttgcttgcattccaggctgtgaagcagttactgaggttggatgctgaacaccctgattctcatcgttgcttgattaaattcttcaataaagtgggatccatgaatgctcctgtgaccgacagtgagaaactcatttgtaatgtcttagaagctgagcgccaaactattagtcagctgcatgggaaatctctgtttgagacaaataactctttcctagaaaaacaggaagattctttgacacacagagctgcttttggagaaatgttcgtatattttggatcccagcacaaggtccgaggctgtctagttgattgaggggtcagcaaataatcttgtgccaagaaatggagcgcttggaccaatcagggaatggacgcttaaagattgtatttcagttcattaacttcttgcaacagttcttgtcgacgacgatgctgcatcaagatggaa

SEQ ID NO: 12885 - DNA, 704 bp, Glycine max
aaaagagaacaatagagaaaagggtttttccccccaaaaaaaactcttttttttttggaagtcatcaatggcaaacataatgcgtaatcactagctaacaataagaaattgtaattatcattgaccatacattctaacatgagatgattatgttagaatatatgttagaagtcaacaatggtctttgataaatatagatattatttcaacataaatcattgtctttctttgcatttttttttctccagggaaaagttttaggattaagaagactagtttaaaaaagttacagatggggtttatcaatcagatgatcatttccacccacaagccaatgaagtgctctgctacaagcaaacaagaatagtttcacaagacaaagaccattggagaagagaacattaggagttccaaacttttggaagtcatcaatggcaaacataatgcctaatcactagctaacaataagaaattgtaattatcattgaccattcattctaacatgagatgattatgttagaatatatgttagaagtcaacaatggtctttgataaatatagatattatttaagcataaatcattgtctttctttgcatttttttttctccagggaaaagttttaggattaaggagactagtttaaaaaagttacagatggggtttatcaatcagatgatcatttccacccacaagccaatgaag

SEQ ID NO: 12886 - DNA, 783 bp, Glycine max
acgagaaacattatgggctttcatatgggacttatgtcaaagatgctttgatactctacttgaagctaggcatcttactagattattagtattgcactaactagctaaggcatttttactcttaacagatcagatgcaaacgctcacagactattcataagagttagtgaatgggaatgatgtacaggcactctcacatcaggggacgtttgttcctagtcaaaaggttttggcgctgaggaacaaattaattaagttcatggaggaacatatttaccccatggaaaatgaattttataaacttgctcaatcagactcacgttggactgttcacccagtagaggaaaagttaaaggaaatggcaaagaaagaaggcttgtggaacttatggattcctcttgatagtgctgtgagagcaagaaatcttctctttgatgggagcaataattatcactctagtgatgcaaatgacttgctattaggggctggtctcacaaatctcgaatatggatacctttgtgagatcatgggtcgttctctttgggctccacaagtgtttaactgtggtgcacctgacacagggtaatatggaggtattactgcgctatggtagtgaagggcaactacaagaatggctaattcctttgcttgaggggacaattaggtctggatttgcaatgacagaaccacatgttgcatcttccgatgcaaccaatattgagtgttctatcaaaaggcaaggagattcgtatattatcaatgggacacaatggtggacaagcg

SEQ ID NO: 12887 - DNA, 381 bp, Glycine max
  unsure (1)..(381): unsure at all n locations
aatntggaacattacatgcagttgtgaacaatattgtccgtcaactgttgcgtgcttgcctctcaaaatgttgtcagatatagaacatgttatccccatcagtggtgcatagctaacaatcaactgctaaggttcctggtcatcaacagcagttacgcgtattcacagattagttcgttaaaagaatcgaagcaaactggttttgaattctttaaatcagtttgattttatatccaaatagtcaaactgatttagacattggttcaaaatcgaaccaattttaaaaaattggttctaaattgagctaatttttaatcatttttaaatcaggtctaagagttgaatcagtttcgaactaatttttggactaattttttggaa

SEQ ID NO: 12888 - DNA, 670 bp, Glycine max
gggtgggaaaaaaataaaaaaggcagggaggagctgaggcgccgacgacgggattctcgtactatcggcgacaatgtacacgtgtgcggtgaactataaacgacgtcgcgtggcggttcaagcagtgtcgtgtgaagaaagaactaaaatggcctaaacaaccacttgaccattacattacatgtttggataatcaatctccttcaaagaacgaccaccgaatttttccccttcaaccttgtacttctacacacgcaatctcatcccattttttctttttcttctcccgatatcgcgtatccttccattagaatattcctcccttcaactatttttggaatcctagggtttcacattccggatcccaatccgcggttctagctgcacttgtatttcagattttctcaatttaatcagattattacgtatctcgatttttttttgggggttacgatgccgccatttttgtcgacctcgaaggccctttgctccttagcatcgcgcaaaagcggtggtagtcaattgattaggtctagcaagagcagttggaaactcgatggatgcagatgcatcactaccgccattaccggccatcacattcagccttccttctctcgcattggcttttcccctctcaccggaggattgtgcaatagtaatactaattata

SEQ ID NO: 12889 - DNA, 881 bp, Glycine max
caagtttgcaaagagatgctttcccagaaattaacttggttcgaggcagcactagcacccattccaaagacagtaacgtaaacaagaaaggtaaaggtaagtctgtagatagtagggggagtaactccagagagaaattagcaaataactttttaagcactgtacatcagctacaggcaaattataaatcttcagaagagaaagcggaggtgctatcaaggggtgattaccgcagtgacggaggcaaattaaaaatcgagcagcggattgatatgaattctggtagtcaacctacgatgaagcttggtgggaagactgaaacatcaaacgacagtttatctaatcaaagtaaagacgatgggggtggtgggaacaagcaacgcaagaaaacttctaagttcctgagagtacgccttggtgatggttctgtttcagcccttcttgatcaatcagatcctggaacaacagacggctcagaaggtaacaaggatgactctggaggagggcctcctgtgcgaggtgtttggcgaaaagggggaggtcataaactttttccctagttttgcttcaccgtgactttgaaaacgtgaagcatcaaacgcagttgaacttgctggctaaagccatggttgaactgcaatataaacatgaatttggttttcggcttagggagtggtattggattatatcggatttaagttagatttaaagtatatcaagctgggatgtgactttgacgttttgttgaaggccaaacgccattgcctgaatgggcttatattttatttttggtttggggtatacttcgattttgatcaaagacataggtgttcatatgccaagtgtactgtttgctttgtacgaaagtggccctgtttctt

SEQ ID NO: 12890 - DNA, 522 bp, Glycine max
gtcggtttcctccattccttggtatccaaatccaaacaaacaacattcccattcctatttccaacgaagttcttattttctctgtgttggtgaaactgaagtcccatgttggcacgcagcagtctctgcacgtgccacatggtgttctccgtcgaccggattactcccaccttcgtgtctgtgttttctgccaacgccagagtgttggctttccgcttccaattgcggaggaacacagacctcgttaccgcccaactttccaactctttcgccttcaatttcggattggattcccagagtttgaattccattgaatcccatgctgcaccacagttgccttggactggtccagttccaggtgacattgctgaagtggaggcatattgtaggatctttaggagttctgagaggcttcattctgcgttaatggatgccttgtgttaccctctcactggtgaatgcagtgtttcctacgaggttctctcggatgagaaaccgcttctagaggataaaatagtatct

SEQ ID NO: 12891 - DNA, 694 bp, Glycine max
gttttaatctcaacagatagggaccttgaggaattcaatgtcaacaaaagtactatgccctggcttgctgtcccatacgaggacaggacaaggcatgaccttcgaagaatcttcgatgtaaagggcattcctgctttggttctcattggaccagatggcaaagtcattagtgtgaatgggaagttaatggtctcctcatacggtgcagaagctttcccgttcaccgaatcacggataagagacctcgaagcagctcttagaaaggaaggagaggctttgcctcagcaggttgaggatgtgaagcatgaacatgtactgaaattggatatggccaaagcatatgtatgtgattcatgtaaaaagcaaggcaagttttggacattctcttgtgatgtctgtgactatgaccttcacccaagttgtctagaaaaggtcaacaaggactaaagttgatagagaacagaaacacacaagtttgctaccaattacatcaactagctatttttgtggtgatggaaataaagttgtaatacctaagaaactttaaacactatatatatctttctatcctatcagtatgttaaaaaaaaaaaaaaaaaaaaaaaaaaaggaagaagaacaaaaaagataaaagaaaaaataaacgtgcatgcaacatcaaaacatcatctatagtgtcaactaaattcaatta

SEQ ID NO: 12892 - DNA, 1391 bp, Glycine max
agatcaatctttatgtgatacaagcacctctctctcccctctcttttcctcaaaccaataaagccaatcaccccccacaccacacttcactctctcttcccaaaacaaaacaaaaaatggctgaaactctaaacctcccattgctactctcagtctgcatcatcttcacaaccctctctcttacaacctctcgcacgatcacaaccccatcacacaccaatgttctcgatgtctcttcttctctccaccaagcccaccaaatcctctccttcaacccacaacttctagaagagcaatcttcagaaacagaaactcccacttcaccatcttcttcttcttcttcattctctctccaactccacccaagagaaaccctcctcaacgagcaacaccccaactacaaaaccctagttctctcccgactcgcccgcgacacagcccgagttaactctctcaacaccaaactccagcttgccctctccagcctcaaccggtcggatctttacccgaccgaaacggaactgctccgacccgaagacctctcgacgccggtctcctccggcaccgcccagggcagcggcgagtacttctcacgcgtcggcgtggggcaaccctcgaagcccttctacatggtcctcgacaccggctccgacgtcaactggctccaatgcaaaccctgctccgattgctaccaacaatccgacccgattttcgacccgacagcgtcctcctcatacaaccccttaacctgcgacgcacaacagtgtcaggacctcgaaatgtccgcttgcagaaacggtaaatgcctctaccaagtctcatatggtgatggctcattcactgtaggagaatacgtcaccgaaactgtgtcgttcggagccgggtcggttaatagggtcgcaatcggttgcgggcatgataatgagggtttattcgttgggtccgctgggcttcttgggcttggtggtgggcctttgtcattaacttcacaaatcaaagcgacgtcgttttcgtactgtttagtggatcgcgactcgggaaaatcgtccacgctcgagttcaactcacctcgacccggtgactcggtcgttgcaccgttgttgaagaatcagaaggtgaacactttctactacgtggagctcaccggagttagcgtcggcggggaaatcgtgaccgttccgccggagacttttgccgttgatcaatccggcgccggaggtgtgattgtggattctggaaccgcgataactcggttgcggactcaggcctacaactcggtgcgcgacgctttcaagaggaagacttcgaacctgcgtcccgcggagggggttgcgcttttcgacacgtgctacgacctgtcgtctctgcagagcgtgcgggtgccgacggtg

SEQ ID NO: 12893 - DNA, 410 bp, Glycine max
ggaatagcgctaagaggccatggggccgggaggcataggaatcaatcgtggtgacgaagaccttccttacgcgaattcaaagggtgactctttactcgctttccagccctacctgaatgtaggaaaaactacctataggtcttagtggacgagaacctgggagaaagcattgattagatattacaccagttgatgttgaagtacgcgggaacgcttccctatcgccactgggtatatctcggtgatgacctgaccttagcgaatatagatattcaataccaaactggtctgaatgaagtccctattatattcaagttgagttggaacttctctcgcttaaggtcgcattactaattcttttttttactccagactttccgttacacgaataaaaattctctttggtttgt

SEQ ID NO: 12894 - DNA, 440 bp, Glycine max
aaaccgtaactgtacgcgatacactcctagaaatctgtctctttttcgggtctagtgaggattttgttttttcccatcattttcaatgcttttcaaattctactttcctaattccgaaacatttttttatttgtgaattgcagactcaaaacttgatcaaagagaatgggagaaacatcaagcagagagtggacacggatctacctcatctacggaatggatcagtggcaaaccttcgtcttccttctatgtcaagcggttctcttctcagttctctcaatactttaccttctctacttcaatgacatctctcacactttccaaagccttctctccatcgcctccgtgccctgcagcgccgcccgcttcgccgccgggtttatgggctccgtcacggcgctctccgcgctgtgcctcttctacgcggcggcgaatttctt

SEQ ID NO: 12895 - DNA, 495 bp, Glycine max
cacccacatctctttatttctttctctctctcaggcgttctactgtggaataaagttgattttgaagatgaactgttatggtcttcagcagaacgcctttgcagcctgtgaagagatgagaggccctgtgaattttgttgaacagaaggagcctgtcatttgccctaagccgcgccgagttggggttgtatctaacatgcctatgaggcatttgagatggcatttcaatccacaggctgagggttctgactcaaaagctggggcagagctattagagataatgtttaagaaggagagccatggggaggaattttcaaatcaggtagcttcatctcctccatttttttgtgggtctcctccggtccgagctgcaaatcccttagtccaggatgctcgtttcggagatgaaaagctttgtccgacattattaatttcatcgccctcaggtttactatctccatcatcagcgtcacgcaaaggagggtgtgttaggat

SEQ ID NO: 12896 - DNA, 548 bp, Glycine max
accacgcgtccgtcataacataaataaatccttgtgttgtggtcatagtcctcaattcaacttttcagctatatctcttgaaagaagaagaagaagaagaagaagaaggagaaatgggatccaacggaacatcttgggctgaccagtgggataacgggcctgacccagtgactgtctccaacgaatcgaagaaaaagaataacgccctcggcaagaccaaggcagtggcttccactggcgtcaagaagttgaaggagggtacctccgttggcttccaatggatcaagaccaagtaccacaaaactacccagaaacattaaactaacctatctttggttccttcttgtacatatttataatatctatagtctccccttttgattattatgtgtgttttttcaattcatttattgttcaggtgttatataggtttactttgtactattgagtattgatggatatagtcttttttaatgttttatgttcgatggattaggttgtatacatttttatgcatagagaataatggatcttaattttattctttt

SEQ ID NO: 12897 - DNA, 561 bp, Glycine max
  unsure (1)..(561): unsure at all n locations
ctcgagccgcataaacataaatagtactaaatccttgtgttgtgttctaagtcctcaatccaacttttcagctatctatcttgaaagaagaagaaatgggatccaacggaacatcttgggctgaccagtgggataacgggcctgacccagtgactgtctccaatgaatcaaagaaaaagaacaacaaggccttcggcaagaccaaggcagttgcttccaccggcgtgaagaagttgaaggagggtacctctgttggcctccattggatcaagaccaagtatcacaacaccacccagaagcattaaactacttcttacttatcttaatttgattccttctgtacatatttataataatctttgtcttcatatgtttttctttttttctttctggtgattatctatgtttggagtatgttttttctattcatttattggtgaggtgttaggtttactttgtactattgatggatatagnctttcttatgttttatgttttgatggattagggatggtgtatagtttttttatatagagaataatatggatcttttattctttt

SEQ ID NO: 12898 - DNA, 425 bp, Glycine max
cccacgcgtccgctgagtttgttttttataatctgagagataatagaatagaccgaattcaagattttgattcctacaagttttcatttctctctcatgattatgttccaagcttggttttgccatataaaaattaaggggatcattgctggcctgggactttggggttccaagaggcggtctgcatttctgtttccgactccagcaatgacatctccctcatcacacaaccttttgtgtgttttcaccgttatgctgctattatcgcttgtgttaagtaactagcaagtaggccttggaacctgcaggttggtcgttttctctgggagggaaatcagtgcgtggacaagatggctaaacttgggctgaactctggggtgggttttcagctggttgagtctccccacaggatttgaagcctctct

SEQ ID NO: 12899 - DNA, 879 bp, Glycine max
tcgccctcgcgtccgcaagccgttgacagttgttgttctatactgccgccgacttagacctgaccttggcttggagtaaacagaatagaagagaatattccaaagcaaaagaagagaagagaggttgattgatccgatccggttccggttccgattccgattccgatcccgatggcttctacagagggtctagtgcccataactagggcctttctggcctcttattacgacaaacacccttttactcctctttctgctcatgtctccacgctttcttctcagattcgttcaatggctaatgattttctcactcagcatcctcctatccaaggagagagcatcttaataaatgaagctgaccagcaacctccgcacaaaatggatgagaacatgtggaagaatcgagagtacattgaagaaacaatttttttacttcagagttctaattggccagaggcgctgaagcagcagtccacagctgacagtgttgaatttgccattacgcttgggaaactgaaagataaacttcatattacattgaaggctttggaatctttccaaactaaaaatgctgaacatgtatttaacacagttatgacatatttgcctcaagattttcgaggaacactaattagacaacaacgggaacgctcagagaggaataagcatgcagaggctgacactttggtaaattctggtggtagcatacacgaccggtatgctttgctgtggaaacagcaaatggacaggagaaggcaattagctcagcttggttctgcaacaggagtctataaaacacttgtgaagtaccttgttggggttcctcaggtattgcttgattctactcggcagataaatgacgacgatgggccaatggag

SEQ ID NO: 12900 - DNA, 462 bp, Glycine max
ggagttgtgacggattgatccaaagttgatggagaggatctaaatctgagttttgacgaactgggaagttacggcggaagaaaacctcttgcagttgttgacttgttggtgcaggtagttgaatatagtacattttgtcacacgaaagtttctgtgttgttacaatggaggagctgaaatctgctatggaggagcacatggaccttatggcagatcttgttcagaagctctcttcagatcttcgcgctggctttcgccccgcttacgataactttattggttttttccatgccattgactggaaggaaccttggctaatgggattattaggattccatgttgtgttgctgcttgtagctatcatctctaggaagaagacaaactttcaaatgttcttgttccttttgacattggctggtgtatattttgcggagagtctgaacagatttttgggtaaaaact

SEQ ID NO: 12901 - DNA, 271 bp, Glycine max
ctgggttcttcacatttcctttcatccttgttcgttaattcaattcacaacagaagcgcgacccctagacctgaatctcgccggtaacaacacacaatttggtagttgaatctagtacattctgttacacgaaaatttctgtggggtttctctgttacaatggaggagctgaaatctgctatggaggagcacatggaccttatggctgatcttgttcagaagctctcttcggatcttcgtgctggcttccgccctgcttacgataacttta

SEQ ID NO: 12902 - DNA, 443 bp, Glycine max
gtttgtccgtgtacgcaactttttactctcaatttatttcttccaatcccaatgatcccgccgaacagaaaaagagaaggtgagagaattgttgctctaataaagtttcgttaaactgcctgtaattctcttcctctttcaatcccctttctcaacacaatcaaaatttcttctggtttcttcgaatccgagatccgcttccaatctcgttaatgggtccattttattttggaacattttaatgggttctttcgcattgcaaacaatttagtcctcaaaagggtgttgtttcagatcctaggtttttctacatttcttcacatcccaacaatttattaaccaggtgaagcataagaatggatgatgcgatgggtcctgacttgatcagtgatcttcctcaaagcattatagagagcattctggtacagcttccaattagagat

SEQ ID NO: 12903 - DNA, 562 bp, Glycine max
ctcgagccgattcggctcgagtctctatctatcgagcgtgtctgaggattccgtgtccttgacgagcgagggtgcgactatgacctgcgacttcgatctccggcaatccgcggcgaggttcgtccagtaaaacggcgccgtatagcgggatctgcgacgctgggcggagtggcaatggagggcgagaacgcgagcaacaaggtgatcgagttgatgaacgagatagccagcatctccgattacaggcctccggtgaagaagcagtactgcaacttggcgcggaggctgaagcttctgatcccgatgttcgaggagattagggacatgaacaaagacgcgcttcccgataacacttccaacgccgtcctcgccttcaaggaagctctcgaatccgctatggaactcctcagattcggaagcgagggcagcaagctttacttggtccttgagcgggacgatattatgaataagttctacgaggtgacagctcagttggaaccgtccttgggtggtatttcccatgataaacttgatatatcagatgaagttaaagagcaggttg

SEQ ID NO: 12904 - DNA, 342 bp, Glycine max
atctatccttctcttaaaaccgcagtgtctgagacgagcgagccactatgacccgccgcgacttcgatctccggcaatctaactaaaacggcggcgtatagcgggatctgcgagcatggagggtgagaacgcgagcaaggtgatcgaattggtgaacgagatagccagcatctccgagtacaggcctccggtgaagaagcagtactgcaacttggcgcggaggctgaagcttctgatcccgatgttcgaggagattagggacatgaacaaagacgcgcttcccgaggacacttccaacgccgtcctcgccttcaaggaagctctccaatccgttagggaact

SEQ ID NO: 12905 - DNA, 400 bp, Glycine max
accacgcgtccgcccacgcgtccgcccacgcgtccgcagccattggcatgtcaaattgcaagtggataggaactggagagaacattttggaggatttggatatcaattcttgtcatggtctcaaatcaaaattgtccgagcattggatggatgtctacaggacagctggaggcaaagatattagttcacctaaacagaagatatttttctccctttgcagcagttaccgggatatactttactgtaacaagaggcctttctatctcaaaggtcttgaagacacaagcatcatggatgcatacataatgcattctctcaatcatgtcttcagaactagagactgcgtgaaaaaaaatgattccaaactgaccaagcttaaagagaatgctgatagtgataa

SEQ ID NO: 12906 - DNA, 437 bp, Glycine max
tggtcgcgtgggcggacgcgcgggtttagcgagagatatggataacgcgggagctacccccactcactaccaccagcgacgcctccgatactctgctcttttatcaattcggatatgtcttctgatcgtgctacggaaaatgcatcagtagttgatgcatcagtcactgattgggggaatgacattggaaattcagatgatccagagagctcaggttacaagtggaatgaaaacattcatccaactagggcagataaagggggacattctcatggccagatagggcatcctgcacgaattggagtggacaaatggcacaatataaaatactttatcattaagagtttgaaccatcaaaacatccatttgttaatagagaaaggaacttgggctactcaaatgatgaatgaaccgattctagaagaagcttttcataa

SEQ ID NO: 12907 - DNA, 427 bp, Glycine max
agattccaaatctcttcctctttagtctttataccgaaatggaatgcgttgaatcacgattcattaccttctcgactgttgctaggttatgttaactgttaccttttattcttcgtttacttcacactgcgcgttacttcatcaccaatcgtgcctacacttagaactccggggtcaattcggatatgtcttctgatagtgcaaaggaaaatgcatcagtagttgattcgtcagtcactgaagggaggaatgacattggaaattcagatgatccaggttttgataatatttctcttgtcacatgcatatcatgtgaattaaggagcttaaattgtgggggcaagaaatggaattagaaaagttataaaggcagaattacagaacatttcatataaaataaagttgttggaaaattaaagtaaagtca

SEQ ID NO: 12908 - DNA, 670 bp, Glycine max
gaattcggctcgagctcgagccggataatgtgtccgattttattagggtaggtggaattcagagactgcaggatggagagtttattgttcaagcaactaaagattgtgttgcaaagacattgaaaagattagaagagaagattcatggccgagtgctgaaccatttgttatatctcatgcgagtttcagaaaaggcttttcaaagacgagttgctttaactcttgctcacctttgctctgcagatgatcaaagaaaaatatttattgattataatggtttggagttgcttatggggcttcttggctcttataaccccaagcaacaacttgatggagctgtggctttatgcaagttggccaataaagctatgactctgtctcctgtagatgccgcacccccatctccaacaccccaggtctatttgggagagcagtatgtaaacaatgctaccttgtctgacgttacatttttggttgaaggcaaacgattttatgctcatagaatttgtcttcttgcatcatcagatgcatttcgtgcaatgtttgatggtggttacagggagaaggaggcaagggacatagagattccaaatattagatgggaggtttttgagttgatgatgagatttgtatattgtggatcagttgatgtcactctggatattgttca

SEQ ID NO: 12909 - DNA, 771 bp, Glycine max
ctcgagccgcgcaaaaactggaaaggaaaatcgtgccttcattgcagaagctggggcgattccgtatcttcggaatttactttcatcacccaatgcggttgctcaggagaattctgtgactgcgctgctcaatttgtccatttttgacaagaacaaaagtaggattatggacgaggaagggtgtcttggatcaattgttgacgtgttgagatttgcacacaccacagaggcaagggaaatgcgctgctgccactctgggcagtggacactgctgacatacctgtctgagctttctagcagatgagatgcgagcagtcgaggccctcgcaggactgttgcaagaggggactccaagaggaaagaaggatgctgtgacagctttgttcaatctttccacacacactgagaattgtgttagaatgatcgaggccggggcagtgacagctcttgttagtgctttggggaatgaaggagtttcagaagaagcagctggtgcactggccttgatcgtccggcagccaattggggccaaagcagtggtgaatgaggaatcagcagtggctggactaattgggatgatgcgttgtggaacaccgagaggtaaagagaatgcggttgcagcgttgctcgagttgtgccggagtggaggcgcagctgcaacagaaagggttgtgaaggcaccagctttggccggattacttcaaacccttcttttcacggggacaaaacgcgcaagaagaaaagcagcttcacttgcaagagtttttcaga

SEQ ID NO: 12910 - DNA, 661 bp, Glycine max
ttcggctcgagttttgtggtggctacttgcgattccaacaattcgtgagtacaactcataccttcatgtcagaaagccagtgaaaaaggttggggcatattgttggctctctcttgccatttgcattgtggaacttctgatttgcattaagtttggacacggcttgtatccaaaaccaatgcctatatggctggtaatattctggtcgggtgttggagtgaccattgttacatttttgcttttgtggtcttggcaactccatcgcactttagggaacaaaaagagacgataatttcacaattgcagcaagttgcaatgctgcattattctttgattgattccttcctcatttttatgggtaccaatccatagccatacacatggtgtaaatacatcaacctcataattaattgtaaatgaatattaatttctcctagcttagtatagtggaacagatcacagtttctttgggcggcaaatttatagttccagctggtagagaggtgtacttattattattatttatgaggcctgcttctgttctgaataggttttcaccattggtaaattgcccaatttcttcgcctccatcggaatgaatcattctgaaacgtgtatccagtcacctcaaggaaattgagtgaagaatgcttttgcttcc

SEQ ID NO: 12911 - DNA, 375 bp, Glycine max
agcccatacgtccgcccaagcgtcaggtgataaataatgaagcaataataattgtcatggtggtgcacttgttttgccaaataatctcttgccaacatcaccaaaccatccttcttttttgggtttgatgaacactatgccatcacttggttaccaatgggaacctaattcttcagctgctgatgttaatgttggtcaatggcaaaaccatggattttttaaccaaacagatgtacacagcatcgatgtggttccatttccgtcaacactggctctatcaactgggagtggtactactactaccatcatctctcagattttggtgtgtcctcctgctccgggatcaacatcacagccatactttccttcgtcaca

SEQ ID NO: 12912 - DNA, 399 bp, Glycine max
aggaggtagtacaccactagatgaatagataggtactgttggttcgtaatttgcattttgctgtgctgtgcgggtttcctcttcagattcatggcggcaacccaaccaacgcagggtccggatcgtaccaccgaagagataccagccgaaccagataacttgaaggagcagggtacggcaattataggtcattcaagggagaccacaagtcaatcaggatctttaggttcaagtggagattgtcctctgtatcctcctaatgtgtatgctccccaagcccaggctttctactatagaggttttgacaacggcaatggtgaatgggatgaatattcttcatatgtcaattctgagggattagacattggatctcctggtgtttacaatgaaaacccatct

SEQ ID NO: 12913 - DNA, 382 bp, Glycine max
tctaattagaacgagaacgaggtagtagaccactagatgaatagataggtactgtttcgttcgtaatttgcaatttggtgagattcttcattcttatgctgtgcgggtttcctcttcagattcatggcggcaacccaaccaccgcagggtccggatcgtaccaccgaagagataccggccgaaccagataacttgaaggagcagggtacaacaactataggtcattcaagggagaccacaagtcaatcaggatctttaggttcagttggagattgtcctctgtatcctcctaatgtgtatgctccccaagcccaggctttctactatagaggttttgacaatggcaatggtgaatgggatgaatattcttcatatgtcaatt

SEQ ID NO: 12914 - DNA, 696 bp, Glycine max
accacgcgtccgatgctttctctttttagttgcataaatttctggagtttagagcccccacagcacagttgggtctggaagtctgataaattctctagatgagtataaaatattgctatagtttggtactcttatcagcaatcctgcacagattcttggaattgtattcttcctgagttgctgcttttctagttgctgacatgatctgtcatggtgggaacatatgctaagttgatgcctcggatggcttcggagttctctgtggcttcaatttaaaccccatcatattgctgctggagctgcatatcttgctgccaagtttctgaacatggatctcgcagcttatcagaacatctggcaagagttccagacaacaccatccatacttcaagatgtctcgcagcaattaatggagctcttttaaaagtatggaagaactggattacagcgttcttcttagtagagtaggttttgagtatataattcaaaatgttatttactttggagggagacattaggaactatgacatatttggtgagttacaggattagtggttgtgtgacctacggatttttaagttttaccaacttctctgaatcttctgctaacatgtcgagcatgccttgcgttcatttttgttgatgctttgtgatctactgtcaatgtcaaaatatcaatcgtggttgtgtttagtg

SEQ ID NO: 12915 - DNA, 373 bp, Glycine max
tctctgtggcttcaatttaaaccccatcatattgctgctggagctgcatatcttgctgccaagtttctgaacatggatctcgcagcttatcagaacatctggcaagagttccagacaacaccatccatacttcaagctgtctcgcagcaattaatggagctcttttaaaagtatggaagaactggattacagcatccttcttagtggagtagattttgagtatatataattcaaaatgtcacatactttggagggagagattaggaactacgacataggattttagtgggtgtgacctacggatttttatgttttaccaacttctctgaattctctgctaaaatgtcgagcatgctttgcgttcatttttgtt

SEQ ID NO: 12916 - DNA, 555 bp, Glycine max
cggacgcgagaatttacaaacccatccccgacctcgtatttgtttttccaagcatggacctttccatcaacacacgcaccccttacacgctgcatcatcatcgctccgccggttgagatgttcccgccgccgccgcagacgaccctcccctccctgccggatctactcctcacggccctctccgtctgcttcctagtctcgtcctcgaagccccacatcggcggctccacccgctgccccttcccgcgtcgcttcctcaaaatccccgccatgtccctcacaaacacaacaacgtcgaaatcctcgaaaaacaacaatctcaacaacaccctcctccctccgcgccgccacagcttcgcgtccccgcagtcgctctcggagtggctgaagccgcggctcccttccgagtcgttcgcctcgtggggcgtgaagccgggcaccaagaacgtgcacaacctctggctcgagctctcccagggggaaaccttcctcgctgactccacccctccggtacgaaccgttcacgtcgtcctcgttcgcgtcaccggaaaacac

SEQ ID NO: 12917 - DNA, 350 bp, Glycine max
ctcgagccgcgcaatttacaaagccatacccgacctcttatttatttttgcacaaaaccacttaattttgaccccaactccattctcctctatttttcccaccatggacctttccatcaacacacgcaccccccacacgccgcatcatcgcttcgccaccacacgccgcggttgagatgttcccgccgccgacgcagacgaccctcccctctctgccggatctcctcctcacggccctctccgtctgcttcctagtctcctcctcgaagccccacatcggtggttccacccgctgccccttcccgcgtcgattcctcaaaatccccgccatgtccctcacaacgataaca

SEQ ID NO: 12918 - DNA, 789 bp, Glycine max
accgctcgtacaaacacacataagggtttttgcgagaccaccacatattggcgtgggtttcaattttgattgtcaatttcgcgcgaagaagaagaaacaaagaaaggtggtgctgggtattctatggcgacacccaacaacagcaacattaacaacgcgacggcgaaaccaggaaccctaggcgttggcgtaggtgcagctcctactccgcccaagtcccagcgcggccacaacaagcccaagtgcaaacagtgtggcaatgtcgctcgttcaaggtgcccctatgaatgttgcaagagttgctgttctagaaatcaaaacccctgtcatatccacggttcgttccttatccttcttttttctttctcacatcacaaagaaacattcttgttcttcttcgctaccctaaaataatgatatttctgtgttgctttgtgccgtttatgattgatttatcatgctttaactgtctgacttattgtttgccatgatctcaccttcttgaattgtagttaagaggaaggaatttgttgttaacatgtcatttaattagttcagcaaaattagggttttgtttttacctgtctctgaactttctctctgtttataagcttttatcctactcctagtttgctttactctttgtttcgttgtgccttttgttgctgttaactcgttatagttatgccttagattaacagtggtcatgccgttaagctatgacttcagtgttattgataaaactgagttaagttttgagtactttttcactattagtagaagtacgcc

SEQ ID NO: 12919 - DNA, 569 bp, Glycine max
ccaacagcccctctttctctctcttcagcgagaagaaaccgccagaaaataaagtgtgtgtgtgtaagtgtttgtgtggtgttgttgacctttggaattggaagtgggaatggccatcaataatggtgggggaagcgaggaaggggcattgcagacagtgctttacatgtggggctaccttcccggagctctgccgcagaggacgcccctcttgacgccggttgccgttagggttccgccgtgtgattactcttggaatgatgtttgcggcggtggctgtggattcgctattgctatatctgaatcggggaagctcatcacatggggctcaacagatgatctaggccaaagctatgtgacttctggcaagcatggggaaactccagagcctttccctcttccaacggaagcctctattgtaaaagctgcagcaggatgggctcattgtgttgctgtaacagaacatggagcagtttatacatggggatggaaagaagtattccctctcggagggtatttggtgaaccatcagcacgggtaagtcttgagaaagatgtgccaggaaggca

SEQ ID NO: 12920 - DNA, 522 bp, Glycine max
aaaagagaaagaaggaaggcgaagccacaaagaaagacaacaatagtttcagaagcagaaagaggttttccgttccgaaacgatgtcctccatggccatcaccaccagagacagagatcgagagcttctcatccccgtcgccgacacccccgccggcgatgccgccgtctccccttcccccaagccatcgtcgtcggcgtcgtccccgcatcattccggacgcgagactttttacaaagttgttagaagctgggcatcaaaaaagtttatgactggatgtgtcattctctttccaattgcaattaccttctatataacatggtggtttattcatttcgtggatggatttttctctcctatctatgctcagcttggaattgatatttttggtcttggattcataacttccataactttcatcttcttggtcggggttttcatgtcatcatggttggggtgcttctggtcctgggggggccttggggagtggttatcaagcgaatgcacttggtctcatattta

SEQ ID NO: 12921 - DNA, 438 bp, Glycine max
gagagaagaggaaggcgaagaccgcaaagaaagaatagttttcagaagcagaaagaggttttccgtcgtttcgcgtttagcgttttgcgttttgagttccgaaacgatgtcctccatggccatcaccaccagggacagagatcgagagcttctcatccccgtcgccgacatccccgccggagatgccgccgtttccccttcccccaagccatcgtcgtcggcgtcgtccccgcattattccggacgcgagactttttacaaagttattaaaagctgtgcatcaaacaagtctatgactggatgtgtgattgtctgtgcaattgcaatcaccatctatataacatggtggtttatacatttcgtggatggatttttctctcctatctatgctcaactttgaaactgatattttaggtcttgggattcataacttgcata

SEQ ID NO: 12922 - DNA, 366 bp, Glycine max
acacaactacgcaaactaacaacaaccacaacaacgtttgtgtcaggtcgtgttgtgttgttggggatttcatgacaacaataaacccttgattcctctccccattctcccaagagaagggccattctgttacaatgttggatactctcaaatggatttagaagacaagttccttgccaaggggagggttctgggctctagtgcaggtggtctagctactgctgattgatgcatacatgataacaagtttctggtgttcaaagcctttcattcagtgctcaaagtactccagtaaaaaatggccattcagatgatgcttcaaaaagttcagaacttctttaggagttcctaaaatctggtcctaag

SEQ ID NO: 12923 - DNA, 546 bp, Glycine max
agcaggtggacgcggcgtggaggcgtgccccgctgcggacgcggaccacatgccgtgcgaggatccgaggctgaacagccagctgagcagggagatgaactactacagggagaggcactgccccaggccggaggactcgcccctatgcttgattccgccgccccatgggtaccgggtgccggtgccgtggccggagagcttgcacaagatatggcacagcaacatgccatacaacaagattgctgacaggaaaggtcaccagggatggatgaaactagaaggtcaacactttatattccctggtggtggtacgatgtttccagatggagcagagcaatatattgaaaaacttggtcaatacattcctataagtgaaggtgttctgaggactgcgcttgacatggggtgtggggttgctagttttggaggatatatgctatctaaaaatattttaaccatgtcttttgctccaagagattcacataaagctcagatacaatttgccttggaaagaggaataccagcttttgttgctatgcttggcac

SEQ ID NO: 12924 - DNA, 460 bp, Glycine max
caaaagttggtcgtatcataatccaaaagacaagcatgtttggactagctccttctaggcttcaagttctatacagcttgcgtgactatagaactgaaggggcatcagaaccagagtggaaagaagtaaccgtcagatcaagtactgagatagtctttcagcctgaaaatgcttcaaaagttcgaaagtttaagctctcttcagtgagctctatgcttcttagcgcttgaagttgcccaaactaaggaaagttattctagggcgctgatttttgcagatggcatccatcgctcgtctatttatattcctcttcaagcatatgtatattcttcgttaagctacatgaaatggatacattactagccttagaaaatatcaatacagtcagatgtctttttccgcgagcttgtattatgtatattttaatataattaacagttttatttaaatgtgagaattt

SEQ ID NO: 12925 - DNA, 597 bp, Glycine max
cccacgcgtccgcccacgcttcccgaagaatgagaaatatgtgcctttgtttaccggcggtgatgattcggagatagttgaccggagaaacgggctgcgcaaacagattgaagataggttggttgcagctgctgcaagtggcaaggatttagaagagactggcagtgaggatgatggtcttttggatctgagtgatgatgattttttccttgctgggagttctagtgacgaagcagatgcggatgatgaatggacagacaaaagtgcaagagagcaggcttctagtgcttctgggaaaggtgtgtctggcatgtccagtgacgaaaaaaatcagaggcagatttctgcttgagctttgatgcctcctcctcgcccttcaaacatgaagttgtcaaggtttgggtcttcttctggccaaaattcatctagacagagatctgagatttccacatcgagcaacacatcaaatagcaaaagcagctcagacttcaaagtaaggggaccctcaagatcagggactggtcatggtagtagtctaagctccaactccgatgctcacaagccacggaggaagagaagacctaagaagagaaagaa

SEQ ID NO: 12926 - DNA, 412 bp, Glycine max
agcccacgcgtccgctggtttctctctctctctctctctctctcagaaatccaccttgtgatggtgccctagatccatggcttctctgtccaacctttgcatgtgtttcactgttgctgagtttcaaggctaccgtttatcctctcttccctctctgggtcctgggaaaccctttggtgggtcccacattcacaactttgcaaactcacttccacccaaaagcttgtaacttgtgaacacccttccagttagtatttcacgctctcttagttccaaatttggaatctttgatgcttccccgttcataaataactggtatttcattggataaatcattccactgagttaaaagggttttttttggtgctttatttttaccattttgaagatttccgaggtttggtttgtggaa

SEQ ID NO: 12927 - DNA, 659 bp, Glycine max
ctctgttttactaatttgtcccaaatcagaaccagattgagcttctgcacaaccagaccagagattcaacgcagaaactggatctgatttggttcataagagagtagtacacgtttcattgctcgaaatagagttgaaaaatctggagtttccatgtctgagaaaccatcttcatcgttgacatctaccgtagctgctcgagaagctgatcccgtgttgcaggatttgaatgaaaagaagcagagctttaggcgcaacgtggtgtcgttagcggtggagttgaagcagctacgtagtcgcctagcttcgcaggagcaatcgtatgccaaggaaactccaaccagacaggaagcagagacaaatgccaagaacatggaattgcaaattggaaggttgcagaagaatttggaagaaagaaatgagcagcttcaggcgtcagcctcctctgctgagaagtatctgaaggagttggatgatcttagaacacagcttgtaacaacaagagcaactgctgatgcaagtgctgcatcagctcaatcagctcagctccaatgtttagaactttgtaaagaattaaatgagaaaaatggttcactaagagagcatgaggatcgtgtcctgaggctaggggagcaactagacaatttacagaaggatct

SEQ ID NO: 12928 - DNA, 568 bp, Glycine max
atccactttgattcccattactcatttccaccatttcaccttctcaatctgtttctctgctttactaatttgtcccaaatcagaaccagattgagcttctgcacaaccagaccagagattcaacgcagaaactgtgcttatccctggtccataggatctgatttggttcataagagagtagtacacgtttcattgctcgaaatagagttgaaaaatctggagtttccatgtctgagaaaccatcttcatcgttgacatctaccgtagctgctcgagaagttgatcccttgttgcaggatttgaatgaaaaaaagcagagctttaggcgcaacgtggtgtcgttagcggtggagttgaaggagccacgttgtcgcccagcttcccaggaacaatcctatgccaaggaaactcaaaccagacaggcacgagatttcttggttttttttttgggttgttttattttgagtgtctttttgctcctatacaacccatttttgatgggtttttttctctctctctctttttggccaggctagaaaaattacaactttgatgtcaatcatttcta

SEQ ID NO: 12929 - DNA, 438 bp, Glycine max
aatatatatatatatataaataaataaatgataaaattattaatttttataacaattactttaatgtatcttatccaataacgaggtcgcgtaaattattttatgtcttgaaacctctcacctccgatccctctaattctcacccaaactgtagtcccattcttccgcaggtgaattgttccctttccttttgctcctttccacatgtgctgaacttatttccataaatcataattccacgcttccacctacatcttcagcaaccaattattttatttgctgaacttttcttttgtttccttttcttcactacccaacctttcataagggattaatgccaaacaataaacaacgttttaacatatgcgtaagtgaatcagaatggaagaggcaacggagcaagtacaaaccaaaaaacgtggtgtaaccaaacgtgtg

SEQ ID NO: 12930 - DNA, 419 bp, Glycine max
atgattatgtgctcatgacaaatagctgatattgcatgttttttatgctataactataggagcaaggtagtatggaaagactgttaatttgtattgtccttattttatatgccctacgtccgatgaggtgtcattttgttctttatcgggattgaaatttcgacactttgtagtagggagttcccttttaattgtaatctctaactaactttcgtgtgttgactgtattgtattgcctcctaaactttttattcctattttctgcatcttcttaatgccttggaattagatgactgcaccttgtagttttttacttttacttatatgccacttaaatttcactgtgtggctaaaattggtacttacctgagttggcactgcgaattctctgggttcactgcattatagtggcacaattc

SEQ ID NO: 12931 - DNA, 355 bp, Glycine max
atcagatagaaggccagctgacatctgtaaagaaggcactcattgctgtctctcatcggcttcgagattgtcctcctcctgatagaacaaagatgacaggaagcagacattatgaagtggttcagtctgagacattttcagttccacttgagtctttaactaatctgcatatagatcatcatctgcaaaggagctctacattatccactttatccaataggtctaatggcaatgcctctggagctcataaattatcagctgaagttaatagagtctcagccctggatccaaaagcatatcagcgggaagttacctttagaattatttgttccattgatagggttggtgccatttt

SEQ ID NO: 12932 - DNA, 349 bp, Glycine max
agtgaaggacactggcggaaatagcagcggtggtggtggttcggaacgagtcagggcgaaagtcgcgcttgagagggttgttcgtcttcgattggcagttaccgaaaaacaaccacacaaattttgcagaatttgaatcgagctaggtctgcttggtgaaaacggtgcacaatttcatggaggagcagccactggcgcgatgctcgtcatggaagaggatgaggatgaggagactcttctggtgagggttgtcgcgcgcggtgatgaggatggtggtggctgtcacgtgcacaccgagctgggtaggtagagggtcgtgagtggtcgcagaggaggggtggcggtgcaa

SEQ ID NO: 12933 - DNA, 400 bp, Glycine max
cttttgttggtcatgtttgtataggtggctgcatctgcattcggatgcgaaggaatgtccagtttgtaagcgagaggtgacacttaaaagtgttaccccaatatatggccgtgcgaacaatgtccgtggtcctgaggaggattctgcacttaagatccctcccaggccccaagcgaagagagttgagagtctgagacaaaccattcagagaaatgcatttgcactccctgtggaagagatgattcggcgtcttggaagcagaattgagcttacacgcgatttggttcagccacctgaaccggatgctgcccgtgaaacagctgagagaaccacttccttgctaaggttcttgactgcgccagggatacgtgcagagcatcagaatccagtgggcaccccc

SEQ ID NO: 12934 - DNA, 1221 bp, Glycine max
ccttcgcgtccggaaagggacttgttctgcctagtcagattaggtatgtcaaatattttgaacgagtcttgacttactttaatggtgaaaacccaccggcccgcaggtgcatgcttaggggattccggcttctcagatgcccttactggattaggccctctataaccgtctcagatcacagtggtgtgttgttctcaaccaaaaagcatctgagaaccagggagcttttgccagaagatttttggtttagtgcgccaaaaaagggagtgatggtctttgctttgccgggagagcctggccttaccgagttggctggggacttcaaaatccattttcatgatcgccaaggagatttttactgttggttgaacacaactatgacagaaaataggaaagtattgaacaccagtgatctggatggctttgacaagagaaaattgccttctccgggatttatggttgaggttgtgctggtggattataatggcaatgatgtaacttctaaaactgaaactactacaaagaaatcagatgagagttcaagtaacaatcctgccagttccgccccagtggaaaggagcaccacccctgcacagaatgcagacaaagaatcagatagtcatgataaagatgacgtgttttcagatggcgaggcagagcaatctgcttcttcaagaagcaagcaaacaaaagcaccttctgaagcagttgaaacagttacaaatgacaccagaatctccgaatcaaacagagtttcaaatgaaattgcaaatttatcacatgcaacagagcaagtttccttgggaaacaagagctctacgccaattcgtcatgctagtgagccaggaactaacgttgatggaaaaacagtgtccagtctcgaggtgcccagcgcagaaagtgagtttaaggccatggctgctgatgcttctgtttttacctttggagatgatgaagactacgaaagtgattgaactacaacaagaagggttactttgttatcttaatacttcaaatttgtacataaaattgcttgcaagttcctacacaacaatattttggtcatccatttgtttgtttgttgtaattataaatttggctatttcattggcttaatgcacaagttaaaaataagaatacgcggagttatctgcatgtattggtcccccttcccccagctgccacagtctgcattggatacacagtccaatttaattttat

SEQ ID NO: 12935 - DNA, 527 bp, Glycine max
tgaaaaactcacaaaccagatagagagaatctaatcagaacagagttctgttccttttcttctgattcccgaagaactcaacgatccaatcgcaaccggaagcaatcgatcagtgagtcaattgcttccggcaaggagaacaataatgacctcggagttagaaatttctccggcggacactcgcaaggctcccggcaaggagcagcaagccgccggcgtcggaatcctcctgcagatcatgatgctggtcttgtccttcgtcctcggccacgtcctccgccgcaagaaagtttacatcatccccgaagccagtgcttctcttctcatagggttaattgttggcatactagcaaacatttcagacactgaaactagtatcagggggtggttcaattttcacgaggagtttttcttcctgttcctgctacctcctatcatattccagtctgggttcagtctagcgcctaaaccctttttctcaaattttggagcaattgtcacgtttgctatatttggtaccttcatag

SEQ ID NO: 12936 - DNA, 483 bp, Glycine max
attccaaaaccatttcacgacactacatacccctcccaacccaatcaaatcaaatcttcgttcgaatccttttctctttatcgttcaccgcatcccaaactcaccagatccgtcgtcgattcggttttcccgctttctatttttcgtttcccattttctcccggaacgtgaagttctcgctctgatctcacgtgagggttttggaacctgatgagtgcgtatatgtgggtgtatcgtagtgaaggcgtgttttgagttatcgtcggtgttgaaggaatcatgttctggagggaccgtgagagagagaacaaagagttgaacggtggggtcctatgtggcctggtcagagtcctcgttgttggtgattctggtgttgggaagacttctttagttaacctgattgtaaaaggttctccaattgctcgccctcctcaaacaattggttgttcagttgatgtgaagcatattacttatggaaattca

SEQ ID NO: 12937 - DNA, 447 bp, Glycine max
tcaattttctgccaccatcgtcccaaaaccatttcaagacactacacacacacacacacaccaacccaatcaaatcttcgtctgaatcctcttctctttctcgttcaccgcatcccaaactcctcagatccgtcgtcgattcggttttcccgctttctaatttttcgttttccattttctcccgggatgcgtgagaagttcttgctctgtctgatctcggcgtgattctcacgtgacatgggttttggaacctgacgagtgcatgtatgcgtgtgtgtggtagtgaaggcgtgttttgagttttcgtcgtcggcgaagagagaatcatgttctggagggaccgtgagagggagaacaaggagttgaacggtggggtcctttgtggccaggtcagagtcctcgttgttggtgattcaggtgttgggaagacttctttagttaacctga

SEQ ID NO: 12938 - DNA, 800 bp, Glycine max
gtcaccgttacctttttgcgttggttctccgtgggaatcatccgaagaggctcaggaaaaaggacaacttcgcaactcgtgaatcgattactgtagaaatcgtcgattctatcttaaaacgtattgggcactggccgccattttgaattctggttgagggattgaagtgcgattataggtggaggaggatggcttgtaggggatgctgggaatgccttttgaagcttttgaacttcatattgacccttgctggtctggccatggtcggctatgggatttatctgtttgttgaatacaataaaactccggataatactctcactgtcggtgatgatcaaactctagttcaacttggccgacccatgctagtggctgtgtctctgtccaacagttttttagatgatttgcccaaggcttggtttatttacttatttattggaattggtgcagtcctctttgtcatttcttgtttcggttgtattgcagctctgacacggaatgggtgctgcctgagcttttattctgttttagtgttgttgttgatcttagtggagctgggatgtgcagcctttatattttttgacaaaagctggaaagaagaaattcctacggacaaaactggagattttgatatgatatatggattcctgagagagaactggaatattgtgagatgggttgctcttggaattgacatctttgatgtaagcaagaacagtcatgatcggcatttaaaaaaaaaaagcagtgttatttcatggacatgcttatttcatggtctgtgtacccacagagaatat

SEQ ID NO: 12939 - DNA, 655 bp, Glycine max
tatgatggcttatggaaatgcctcttttttgtgcagaaaacatattaggcactggctaccattttgaattctggttgagggattgaagtgtgattataggtggaggaggatggcttgtaggggatgctgggaatgccttttgaagcttttgaacttcatattgactcttgctggtctggccatggtgggctacgggatttatctgtttgttgaatacaataaagcttgggataatactctcaatttcagtgaggataaaacggaagttcaatttggcagacccatgctagtggtggtgtctctgtccaacagttttttagatgagttgcccaacgcttgctctgacacggaatggatgctgcctgagctttgtatccttctaaaaatgtcttataattacatagccaagcaaaatataatgttctcaccatgagatggagcatctcttcctctctctgtctgtgtgtgtgtgtgtgtattaatcttgatattagtttccttaatccaacaaagtattcagttttagtgttgttggtgatcttagtggagctgggatgtgcagcctttatattttttgacaaaagctggaaagaagttagttgtcactggcattttatgatatgaaattcaagaagttatttttgtatatttataa

SEQ ID NO: 12940 - DNA, 442 bp, Glycine max
gtaattgcacttttttttatcaatcgttgctctcgtccattttcgattttcttcactttgtatgtttcttcattactgaaaacctttcactttgtttttttaatccggattgccaatttatgtataatctttttgattcaattaattctcatcttgatgattggatgagctagattttgttggagattctggtcaattgcattcgaagcgacttgatcaattttttgaaaaaaaaaaaattggggatgtagtttgtattgaatattcacacacccaataaaacaaataaagagttccagtaacagaaccttttaggctttctagtgggtttctgaagaaagattgatgagaataagaaaacgtattgggcactggccgccattttgaattctggttgagggattgaagtgcgattataggtggaggaggatggcttgtaggg

SEQ ID NO: 12941 - DNA, 417 bp, Glycine max
cccacgcgtccgcccacgcgtccgcccacgcgtccgggatagaggaggagacgtaggaaactattgttatacaaattcattcaaatatattttataacttgtgattttttccaacagcatctcttgtaattttaattgaaatttctccttaagttgaaattttctgtattcatctagaatttatttttgaataggccgactaaggttgagaatttgtatcaaagtggaaatgctgtacgaactactttgggtccaaaaagagacattagagcagagaaagggaaagagtcttcaagacaaatagaagaaaaatctaacacaaaatgggtggaaagaacacgtcttcaatcataagtgaaggacgaaaaagaggcagagatgaaaacgctaaaacataatgtcaaaggcacatcctca

SEQ ID NO: 12942 - DNA, 1029 bp, Glycine max
ttcgtgctcaagagcttgctgccaggctgggatttcgcccggatccacaatttgctcctctaattaatacgtttcctggtcagaatcagatggtaacagatgttgctatcccacagaaacccaccaaggcccctgttcttcgtcttgatgctcagggacgggaaatagatgaacatggaaatgttgttaatgtgactaaacccagcaaccttagcacattaaaggtcaacattaacaaacagaagaaagatgcatttgaaatactacagcctgtattggatgtcgatcctgaatctaatcctcattttgatgcaagcatgggtatcaacaaaacaaagctcctgcggcccaagaggatgaatttccaatttgtggaggaaggaaaatggtcaaaagatgctgaaacaataaaattgaagagtaaatttggagaagctcaagcaaaagagcacaaggccaaacaagcacagttggcaaaggcaaaggctgctcctgatataaatcctaacttaatagaaataacagagagagttgtaattaaagaaaagcccaaggaccaaattccagagattgagtggtgggatgtgcctcttctgcattctggaaattatggtgatgttgataatggaatcataggcgaagataaactgaaaatagaaaaaatcaatttttatgtggagcatcctcgtccaattgagccacctgctgagcctgcccccccacctcctcaaccactcaagctaactaagcaagaacagaagaaactccggacgcaaagacgtatagccaatgagaaagagcgacaggagatgataagacagggtgtaatagaaccaccaaaaccaaaggtcaagattagcaacttaatgaaagtacttggcactgaagcaactcaagatcctactcggcttgaaaaggaaatacgtagtgcagctgctgagcgtgaacaggctcacatatataggaatattgcacgctaacttactcctgcttagcctctggtagaaaaagaaaaaaagcttttttatt

SEQ ID NO: 12943 - DNA, 1130 bp, Glycine max
  unsure (1)..(1130): unsure at all n locations
ccgattcgttgcaacgcattccaacatgtctctaccttttcatcttcagactttcatgatgtatgctcaatgtctcggatttaagggcatatctcactatgagggacctgattcagataatcacacagccttgccatgccctggggaactactagttgaagagcaccatagcaactatggtgaaccttgggccgggggaagagatgtgtttgagtttcttgccgaagccagtcaacttagaccagactcacaggtgctagagataggctgtggcactcttcgagttggtttgcatttcattcgatacctgaatcctgaacacttccattgtcttgaaagagatgagctctctttgatggccgtatttaggtatgagcttcctgcccaaggcctcttatacaaacggccttcgattgttaagggggatgacatggatttcagcaggtttgattctggcataatgtatgatttgatttatgctagtgctgtatttcttcacatgcctgataaactcgtgtggactggattggaaagattagcatctaaattgaaaccttatgatggacgaatctttgtatcacataatataaagttctgttcaaggttgggaggagaggaatgcacaaagaggcttgcaagtttggggcttgagtatcttgggaagcatactcatgatagcttgctattcaatcactatgagatatggtttgaatttagacggtcaaaggcataatatctggattgattccataaagaggcatcagaaacatctctaaatgtcctcatggaactaaatgtgctttgttcatcacgagaaatcttcagcaattcgatgatatccttgctttgagttctaagaggtggcattttttttactcagtggttcatctcgtgccagaaatcttaattctaaagagagaagaaccatatgtaattttgattgaggactctacaaaggcaaggagatttgtattattttttggggcccttttgtaatagtgctagcttgaagtttacattttcactctgtttctatgtagattctcatattatagttgtatttagctgtcttactaaaaaaaaaaaaaaaaaaaaagggcctctagccgnattcctagcttacgtncgcg

SEQ ID NO: 12944 - DNA, 753 bp, Glycine max
  unsure (1)..(753): unsure at all n locations
cgcagatggtggattcccacttctgagatctagcaattactacaattttaagtcttcttattttattttctttatttatttgctttgttaagccttatttgtgttttcttactgtacagtcacctattcagcccctgcatttgctggttcctgcaaattatcctaattgttctcccatactcctagacaaatttccagttgaatccagtaaggagaatgaagatctttcagtgaaagcaaggtcaaagtttagcacatctttacgcagtttatcacaacctatgtcacttggggagatagcaaggacttgggatgtttgtgctcgccgtgttatttctgagcatgcacaacagagtgggggaggaagcttcagctctaagtatggaacttgggagaattgcttgaccaccaactaatgttccttattgttccatgcagacctttttgtttcggcccaaacatactgtttcggttaatataagtaatttattggatgtagataaaagcctagttatgaagtagcagaccatggagtttgtcaatttctatatattgtttttgcattttgcaagggaataatcattattaggccgtaagggtgaaattatataaagcataaccacatattaagtggaaaattgtttcaataattgtttaccttttctatttcattttagctttataatgtataaaattttgatgnnnnnnnnnnnnnnnnnnnnnnnnnnnnnnnnnnnnnnnnnnnnnnnnnnn

SEQ ID NO: 12945 - DNA, 732 bp, Glycine max
  unsure (1)..(732): unsure at all n locations
tgaagcgctacactaatgcaacacccttgaatgttgtatcttctcctggtagcatgaatgacagtatcaagcagttaactgctgaggcttctgatttggattcaactgcaacatctagattcaagatgccaaggattgaggctaatcattcccttttggaagaaattagggaggttaatcagcgacttattgacacggtagtagacataagtaatgaagaagttgatccaacagcagctgctgctgctgctgaagggacagaagggaccattgtcaaatgctcttacaatgctgtggctctcggtccgagcttaaaatcccaatatgcttcagcacagatgtcaccaattcaacccttgcacttgcttgttcctacaaattatcctaattgttcccccatactcctagacaagtttccagttgaatccagtaaggagaatgaagatctttctgtcaaagcgaagtcaaggtttagcatatccttgcgaagtttatcacaacctatgtcccttggggagatagcaaggacttgggatgtttgtgctcgcattgttatttctgagcatgcacaacagagcggtggtgggagtttcagctctaagtatgggacttgggagaattgcttgaccacatgatgatccttgccgttccatgcaaacatcttttttcctcttaaatttgccanaacttgtgtcaatcattggatacggatttttgggtgcagtgaaagcg

SEQ ID NO: 12946 - DNA, 615 bp, Glycine max
  unsure (1)..(615): unsure at all n locations
ggnaataaagaagcttcagaagtacatgccccaattgttgcattagaaagtgatgaatgcaatgtcaacgtgtatgaatcgcttgataatccaacagtgggcaaaaagaagataggttttgctacttttgcaacagggatagtccatggcctgcaaccagatgcattgatgatggtgttgcctgcccttgctttgccttcgcgtttggctggtgctgcgtttctcatcatgttcttaattggaactgtaattgcaatgggaagttataccgtgtttataggttcgtgtagccaggcactgaaggatagagtacctaggataaccgagaaactcacttgggcttcctcccttattgcaatagccctcggattggctatcattattagccagttttttgggtttcgtctgtattaagtcttctttcatttttaatcagactttttttggtatttagaaaaagtagagacgttggacagaaatttgggttgtttagaggaagtacaatccaggaaacatgtgaaattgattgttgattatttactttgcacttgaatgtgtgtaggtatatgtaagttccatgattctgcaaaaaaaaaaaaaaaaaaaactcctcgt

SEQ ID NO: 12947 - DNA, 498 bp, Glycine max
cagatgcattgatgatggtgttgcctgcccttgctctaccctcacgcttggctggtgctgcatttctcatcatgttcttacttggaactgttgttgcaatggggagctatacggtatttatcggttcatgtagcgaggcactaaaagatagagtacctagaataactgagaaactcacttgggcttcttctcttattgcaatagccctcggatttgccatcatcattagccagttttttgggtttagcctgtattagtaaactttattcagccagggaccttttttatgaacatcgttttggtgtctagaaaaaagtagggacgttagagagaaatttgattgtttggagcaaggtcattatttatgcaagattttgattgtctattatttgactacgtttgtgaatgtatatatcgggtaggttccattactctactgccaagaactatgttgctgtttcatttgaagctttcgattgattttaccaataaaaaaaa

SEQ ID NO: 12948 - DNA, 790 bp, Glycine max
gagagagaaagaggggggcatgacacacaaagcagttggcacaaattagcagaaagttcaaaaccccacagagctgttttcaaataaattctgttctttttatcccattcaagtcaacttaacacaaaaaggtttagtctttggaattggggttctgggatttttctatatatgaattgaagtggagatgatattggtgtagttggtgagatgaagggtgttctttccatcagcttcttgttttgttgcttgctgctgacttttggattcttcagtttcacttcctctatgcgttgattcaagggcaccctttaccttgaacaagacacttgggttttgtccttacaatggaagcacgtgttgcaactccacacaagatgcacagattgagaagcaattccgagcaagcaacgtttcagatcctggctgtgccttggttttgaaatcaatactttgtgcgaggtgcgacccattttcaggggagctatttactattcaatcctcacctagatcagttcctgtgctttgcaattccaccataccagcaaattcttctcaatcaaagacagaagtggaagatttttgctctcaagtatgggacacatgcaatgatgtatctatagtgaattctccatttgccccttcattacaaggtcaagcaggagcaccagctcacagcaatgctaccaaactctctgctttatggcagtccaaaacagacttttgcactgcatttggtggagcatctgataattcatcagtgtgctttgaaggggaacctgtttcactg

SEQ ID NO: 12949 - DNA, 406 bp, Glycine max
gacagagagagagagagagagaaagaggggggcatgacacacaaagcagttggcacaaattagcagaaagttcaacaccccatagagctgttttcaaataaattctgttcctttttgtcccatcaagtcaacttaagacaaaagtttgcgtctttggaattgaggttctgggattttgctatatatgaattgaagtggagatgatattggtgtagtgggcttttcaactggtttggtgagatgaagggtgttctttccatcagcttcttgttttgttgcttgctgctacttttggattcttcagtgtcacttcctcgatgcgttgattcaagggcaccctttaccttgaacaagacacttgggttttgtcctgacaatggaagcacgtgttgcaactccacacaag

SEQ ID NO: 12950 - DNA, 426 bp, Glycine max
tcattccataacctaaccctaaaccaaaattcagagagaggcttttgtgttaacctttctgtcgatgctccgtgttggtgctaccaaggctcagtcggagaggagggtttcattgttaaatgctctctctcttcactctctgctcacccttttcccctttcatgtcttcaatcaccgcctctccttcagggtctccaaaaaccctactttttaatttccatcccaacccttttctttttttccatactgggaatttaatattcaattttagcctcctgggtttccaacctccatctcctcaccaacacgagtgattcaaagatgtttctatttgggtcatttactgaagatgaaactcaatcattgctgtcaaagcagtcttctggaaaaaaggaaaaacctgtggagaagaatcagctgcaattt

SEQ ID NO: 12951 - DNA, 1030 bp, Glycine max
ctggtctttcccttctcactctcttctcttcacaataaaaatccaatctgtgttgttcagcgcagcacgccaaatcaaagcgcgtgaggaaaggcagaaatggcggcggctacggcgatttctcagctaggctgtttttccgccgtccaccgcagctcacacctccggcgccgctcgtttctgttcccttcccctcgctccaagttatcggttgttatgagtctggagaggcatgacacggatactgctgggtctgataccaaaaatacactaagttatgcagttgatgtgtcaaagctacatgttgaagaaaagaagaactcatattcaacaaaagatggccatgatgctgaaaaaatagggtttggagaggcaacacaggaaagtgtcgatcaaccgaaaaggactgcaaagattcatgacttctgtttaggcattccctttggtggatttgttttaacaggagggattattggattccttttttcacggagtcctgcaacactaagcagtggtgtgctctttgggggtgctttactattcctcagcacctttagcatgaaggtctggaggcaaggaaactcaagtttaccatttattctaggacaagcagctttggcaggggttcttatctggaagaacttccagagctactcattggcaaagaaaatatttccatcgggcattagtgctattataagttctgcaatgctctgcttttatttatatgtgcttatatctggaggaaatcccccccctaagaaattgaagccatctgccagcactgcatgatgagatagtcaaggttatgctagcctgtatagaatatggggatatgatatcttatttttctgtgaattgaaataagttttggatgaaaatctgataatttgtttctatagtttttttttataaatcataatcgttattttcagtccattttagctgtatattcagaattgggctacattctggtccacatgtgatgtattggatgttcaatgatttctgatcgaaatggattcagctt

SEQ ID NO: 12952 - DNA, 574 bp, Glycine max
  unsure (1)..(574): unsure at all n locations
accaacgcgtccgattttcctggtaaatatcaagattgggcagccacagatccgttagatcnttttcaagctcaagttataaagaatgaatcaaacccaaaggcacatatatgtagacatttaagtcaagaagctcgtggatgtcgttatttggtattgtggttagattgtgatcgtgaaggagaaaatatatgttttgaggttataaagtctactggtttccatataaatgatacttaccgtgcacggttctcttctgttactgagaaagatgttgtgaaggctctagacaaccttgtcagacccaacagagatgaggcgctggctgtagatgctaggcaagagatagatttgaaagttggagttgcctttactcgatttcaaacgagttatttccagggaaaatatgggaacctagattccagagtcatctcctatggaccgtgtcaaactcctaccttaggattttgtgtgcagcggtatttacaaataaacactttcaagccggaaaagttttggagtttgcacccttacataattcaaaatggctatgagattcagctagaatggcaac

SEQ ID NO: 12953 - DNA, 618 bp, Glycine max
atgggttaaacatggaaccaagcccgttttgccccgattcgtttcccgtaaagtggctaagcagtcgcacaaatatcccagcggtggcgtgtgtgtataaataacccacccataaatcctctcattctaaaaccctctcatttcgtttcattcagtgggaacctttctcaaacaccatgagtgcattcccgaacggttccaactcgagcctcgacaacctcctcctccaaactatgatgggcaggctccagctgcgagctccgataaacaaccccttggtcacacagtccctcgaggactttttattcaacgacctcggcgacgacgacgacgacggcggtgacaacgaggacagcgagaaagccttcgaagggaaatcggagcttgcgagagaggaggccaagctggaaagagaagtcatcaagatcgtcctcagcggaaacggcgagtccgtcctcatgcccaattcgggccaggccgtgtcggttcgcgaccaccacatatgcgtcgggtttcaagacgaagaggattctgggtatcgcgtgtgggagtggcatggccacatcatgtcttttgttgaggaatttgggtataaccctgagtatatatacggcaatt

SEQ ID NO: 12954 - DNA, 395 bp, Glycine max
agtatcactttctgttctgttttggatatttctcaacataaccaagctaaagcgttttactattttgttttctaatttcctccatctctctctcatagtcaccttctctctgggtcactgcaatctaagtccaagcttgactgcttcctccggcgtacgacacctgttgtgccgtctcagtttcttcccaagcacgagattcgaaaccttaaccgattgtggcacccgtgggagagagaagctgttgagtacttcactttgggtgatctatggaatcgtttccacgaatggagtgcttacggagctggagttcccatcacgttgtccaatggggagacacttgttcagtactatgttccttatctctccgcatttcagatattcaccaacaacac

SEQ ID NO: 12955 - DNA, 630 bp, Glycine max
atatgcaaatgatgtcatgcctttggctttgaatatagaagtacaagatagtagcaaaacatttaatgagattgtagaagtagattgtgaagaaattgtacaaggtgaggaaaaagatgcatctaaggaagatataagttatcgatatgcaaataatgtggtgccaatggcaatgaatactaaagtactagatggtagcaaaaaatttgctgagattgtagaagtagatattgacgaaattttacaaattgaggaggccaatgaagaagtagaagacattccaaataaggaagttgacatgagtgttctaagggggaaaaggagtacatatatcagatcagaggtagaacatgctctagaaacattagacaaagccatttcaatggttcgtgaacagcgacttcattctcgggtggcatcttctagcgttgccgatgaagagtcccattttctgaaaaatgatgacagagttgatacatattccttaaaactcactcaaccaagttccaaaaatgaggttagtgttgaggtaccaaatggagatattccggagggagcttcacaagaagcgcttgggaataaccctggcatccaaaactcacagtgtacaggaacaaatccaaactcaaa

SEQ ID NO: 12956 - DNA, 472 bp, Glycine max
ctgataactctatcggcacaagaaacaaaaagtttcggttaggagttaaatttctgcaatctacttccgttagcgttagcgttagggaaggcagaagtgaagccttcagggttaaggataaacgcggagagccgtacaagaaacgcgaccgtccctcgttgaatgatgaggtatggtgtctgaagaatataagaagaaacggtgatcttcacaaggatcttttgaagaataaaataaaaactgtcaaggatcttttgcgcttgaacacaatcggttcattacgggagaaattcggcaaggttaaaaaatgggacgaaatcatcgaacatgctgaaaaatgtgcagttgacgatgatgggttctacatgtatcgctatgatgcaaccgtttcccttgtcttgaactgcatctataaggttgaggcgattttttatgggcaacactatcggtctctgcaatctctgaatttgga

SEQ ID NO: 12957 - DNA, 498 bp, Glycine max
ttagtctttggtttggtggaattgttgttttcacaatgaagaccattcacatagccctattcctccttctggtgtcaccgttaatccccatcgccgtcgcgcaggcccaatcccagcccaatgacttctccgacgcaaacctcaaccagttcagcccctccatagccataatcatagtcatacttgtcgccgcgcttttcctcatggcttttttctccatctacgtacgccactgcgccgattccccttccaccaccgttagccctctcactaccgcacgctcccggagggccgcgcgtgggcttgacccagctgtgatccaaacattcccaatcctcgaatactccgaggttaagatccacaaaatcggaaaagaagcgttggaatgcgcggtgtgtttgtgcgagttcgaggacaccgaaacgctgcgtttgctccccaagtgcgaccacgttttccaccccgagtgcatcgacgagtggttgagctcccacacca

SEQ ID NO: 12958 - DNA, 449 bp, Glycine max
tgaataacccaaatggaggaatctgtttccttctctttctcttcctctttccttttgcggcggcgcaacctgccaccaaccaaaaccaatcctattacaacaagttcagcccttccatggccatcataatcgtcatcctcatcgccgccctctttctaatgggcttcttctccatctacatccgccactgctccgactccccctccgccagcatccgcaatctcgccgccgccactggacgctcacggcgcggcacccgcggcctcgagcaggcggtgatcgacaccttcccgacgctggagtactcggcggtgaagatccacaagctgggaaagggaactctggagtgcgctgtgtgcttgaacgagttcgaggacaccgaaacgctgcgtttaatccccaagtgtgaccacgtgttccaccccgagtgcatcgacgagtggctagct

SEQ ID NO: 12959 - DNA, 455 bp, Glycine max
gcattttcaggtgatcttgctctgcaggctcgtctattaaaggctatatctccccatgaattgccgaaaatattcaaaaatgccttgtcttctaccatactaattgagatcatcaagtgtcttgcatctcttttcactgaggacatggatctggttgtcagttatttggagcatttgaccaaggtaccaagatttgatgtgattgtaatgtgcctttcatcaacaaataaggatgacatacgcaagatctgggatgaagtgttcagcggtgaggcaacaccaatagagtatgcagagattctggacaaccttcaatcaaagttcggccttggacagtgacatcttcccctgtatgttttaatatttttttttcctcggtggatcctctcccttccgcaactatcttcacttgtaaattattatgctattgaaatgtttgagcattattgacggtc

SEQ ID NO: 12960 - DNA, 404 bp, Glycine max
tccgctccttccgtctctccccacaccagaaatcccaaatgaacccaaaacagctccgcctcctcttcttttctctctttctcacaatcactttctcgttgaacgaaagatttgaagcctgcgatgccaagacatgtgggaacgggcagaacataagctacccattctacatccaaggcaagcaaaaacccttttgcgggcagccaggcttcgagctaacgtgcagccacaacggtttcccaattctgactctcatgtacaccccatacacaatccaccaaattttctacgacaaccaatctctccgagtgtccaatcccgtcttttcacaaccaaacctttcttcctgtattgccccgactcagaacctcacggtcggaaggtacagattccgagtcgctccg

SEQ ID NO: 12961 - DNA, 1073 bp, Glycine max
cccacgcgtccggaaacacaaccccattggacttgcttttttatgatgcagttggaaccttttcctttggtcttctttccttctctgtctctctgcttgcttcttgttgttgtaactaaggaacaagagattgcttcttcttcccttttgttttcaaatttcaatttttcatcgggttctctgaaatggagagagatttcatgggtctcaactcaaaagaacctcttgctgtggtgaaggaggagatgcacgtttatggcttcgaagactctggcttcacaaagggtcggattgcacagtggccattctcgaacaaagtatctgcccttccacatttgatgtctttcaaggcttctcaagatgataagactaagaagatagtgtctgatcccttaacatctgcagggtttatgtctatcttaagtcaagaagcatttgactctagtcagaaacgctgtgctggtgaaccccagaagtctttcaatcacgatgggcaaggtcgccttcatttttcgctgactccatatcctgtacaacatgatgtgaatcatcctcatgatgtgaagatgctttcagttcccaatcaagcaatttcactttccttggggaatccattcctgaagaatgattttgcaactgctggtcagaagctgttacttgggggaatacctgttaccacgcctcattctgttcttccctctgctgttgctgttgctggaatgaccgaatcatgtaacactgtgaaaccatctgcgccttctgctcaacttaccatcttctatgctggtactgtcaatgtctttgatgatatctccactgagaaggcacaagctatcatgttgttggctggcaatagcttatctgcagcttctaacatggcacagccaaatgttcaggtgcctgtctcgaagttggctgctggtgctggtgtgcctgtgagtcaacctgcaaatacatcacctggctctggtttaccaaaagcttctaactgatgtgattgttggcctttcgaagattactgtggccttcatacgtattctataagatatatattcgtatgtattactatttca

SEQ ID NO: 12962 - DNA, 869 bp, Glycine max
aaaccatctgcgccttctgctcaacttaccatcttctatgctggtactgtcaatgtctttgatgatatctccgctgagaaggcacaagctatcatgttgttggctggcaatagcttatctgcaggttctaacatggcacagccaaaagttcaggtgcttgtctcgaagttggctgttggtgatggtgtgcctgtgagtcaacctgcaaatacatcacctggctctggtctttcaagtcctttatctgtttcttcacataccggcatacagtcagggagtggctcaactagtactgataaaacaactggagttcccaccactcctgtttgcaatgtggagcctccaaagatagtcagtgcaaccactatgttgacatcagctgtacctcaggcccggaaagcatccttggctcgatttttagaaaaacgcaaagaaagggtgatgagtgcagcaccatacaacctcgacaagaaagtctgaagagtgtgccactgcagaatacgctggtgctaacttttctgccactaacactgttttggccaagcaaggatagtagcctgcacctttaggaaacaaagtatttcggagaaaaatattgttgtaaccttaaaaatgttgtaagcagatgcttttattttcgttgatcacaacttatgctgacattctcgggttcagcacatagataggccattaccataattatttttgtggtgtagggcttttaccttgttatttgaaaggttgtttgaatgttagcttcctacactgtaacattggaccactatgtaatgtaactcatgatttgtttaaatttgtggagtaaaagcccagtttagttatttttaataaatattaatagttaatttttt

SEQ ID NO: 12963 - DNA, 547 bp, Glycine max
ctatactcgagatcccttgatctctctctgtctgcctgtggagtcaacctgcagattcatcacctggctctggtctttcaagtcctttatctgttctcttcacataccggtgtacagtcagggagtggcttaactagcactgatgaatttctggctgctaaaacaactggagttcccaacactcctatttgcaatgtggagcctccaaaggtagtcagtgcaaccactatgttgacatcagctgtacctcaggcccggaaagcatccttggctcgattcttagaaaaacgcaaagaaagggtgatgagtgcagcaccatacaacctcaacaagaagtctgaagagtgtgccactgcagaatacgctggtgttaacttttctgccactaacactgtttttggccaagcaaggatagtagcccgcccgcacctttaggaaacaaactattgcggagaaaaatattgttgtaaccttaaaaatgttgtaagcagatgcttttattttcgttgatcacaacttatgctgacattctcaggttcagcacata

SEQ ID NO: 12964 - DNA, 440 bp, Glycine max
ctacccaattgaacttgcctttttctgatgcagttggaaccttttcctttggtcttctttccttctctgtctctctgcttattgttattgctgttgtgactaaggaacaaggggttgcttcttcccttttgttttcaaaggaagagaattttcaattttcaatttttcattgggttctctgaaatggagagagatttcatgggtctcaacttgaaagaaccactagctgtggtgaaggaggagatgaacaatgatggctgcaaaaactctggcttcaaaaaaggtcggattgcacagtggccattctcgaacaaagtatctgcccttccacatttgatgtctttcaaggcttctcaagatgataagactaagaatacagtgtctgataccttatcatcttctgggtttatgtctatcttaagtcaagaagcatttgacac

SEQ ID NO: 12965 - DNA, 831 bp, Glycine max
aaaaatacatagcacaagatataaaaaattaaaatttataaaaaagaaagaagagagattatagaaagcgaaagagagagggttcaagttcaacaagcctctcttctttgtgttcttgcgaagaagaaaaatccctccgagtcaactcggacgagttgcctcatcgtacggttccttcctcggactctttcctcttcttccccttccgaatcaccgttcgcagggttttgctctctctctctctctgtctctcgcttcgtttctagttcagatctcgcattggcttcagctgaaaccacgcggtttaatttcattcccttaaattagggatttatcttatgtcgaaacacttgaagtgatgatggtgtggttgttgtgagaaattaatgatcgttgagggtgtgggacattggtacagagctttcagtgtagttgacaactacctgggaggagggaagaagaggaatctttcttccgctgttgtcgtgtgccgtggttgttgttctgttgatgtctcggaaactcgacagccctgtgcagactcagatggctgtggcagtgataaggagcagtccccttgggagagagtatcatgggaagcaacccgcggggcggaggcgcgtgttcgtgcagacggagaaagggtgtgtgctgggtatggatttggatcgcggtgacaatgtgcacactgttaagaggaggctgcagcttgccctcaatgtcccggttgatgagagttatctcacttttggggatatggtcttcaagaatgaccttagtgctgttcggaacgataccccgcttttgctcactagggggaaaaataatcta

SEQ ID NO: 12966 - DNA, 508 bp, Glycine max
  unsure (1)..(508): unsure at all n locations
ctcctacacccaccaaaccaaaaacgcttcctttaatcagaagattcagaacaaaacccatcaccaccattcaacaaagtttaatccttttcacttcaattcatcattgcctcgtcgtttaagcacaaaagctatgccgaactgggagctcaggaactgttgtgaccacgaccagaaggtcttcattgcttgtgttgctgccttcaccgttgtaatcctcgtgctatggaggacctttctacttacaccttttaagctcatcaccgtgtttctgcatgaagcaagtcatgccattgcttgctggctcacttgtggcaaggtggagggaattcaggttcatgcaaatganggtggggtaacccagactcgtggtggcatatactgggtgatcctgcctgctggatatctcggttcatcattttggggaatggctttgatacttgcgttcacaaatcttctcactgcaaaaattgctgctggttgctttaatgctgctttaattgttgtg

SEQ ID NO: 12967 - DNA, 426 bp, Glycine max
atatcagtatcttcatcccaatcctgagttatctgcatgttgctatcatctttttgtttttgaaaagtaagaagcatggttatactgaaattacctttgaaaaagaagactttagctgattgacatataaaataatgaaatcgtctttcatatgacatttttttcatttaagaaagaatataaaaataaagtcatctttacaacaacgatgattccttcacatatgaaatcgtgttcctaaacacaaatcactcatttctcgtaactcatttgaaatttacatacttatgtgattaattagaaaaattgcacaaatgtggtaaaaaaaagactcattaatttcaattttgaccaaactaacaagaaggaacacaaaacaaccttaaattactagagacaaaaaaattaaattaaaatttgaaggac

SEQ ID NO: 12968 - DNA, 454 bp, Glycine max
tgggtgaagaaaaagcaaaaacactgaatacaccaaaaatggccaaaagcaaaaactgtcatgctttgcctcttctccttgccctgatcctcttcttcactcttcttggaacctctcacgcaggtggcatagccatctactgggggcaaaatggtaacgagggcaccctctcagaagcatgtgcaacaggcaaatacacccacataaacatagcctttctcaacaaattcggcaatggccaaaccccagaaatgaacctggctggtcactgcaaccccacaaccaattcctgcacaaagttcagctctgaaatcaaggactgccaaagcaaaggtatcaaggtgttgctttcaataggtggtggcattggaagctacactttggcttcagtagaagacgcaagaaacgtttcaacgtttctgtggaacactttcttgggaagcaagtcatcttc

SEQ ID NO: 12969 - DNA, 689 bp, Glycine max
ggcgtcggaaatgaaagtatgaaatagcataacaacaggtcagggagcgggttttcttcttccaccccttctaatttctctcttctctgaagctatcagaggctagagttctcctattcagtatctcatgtgcttcaaagaatggctgttagctttactgggcttgacatagaaggcagagaccagacagaagagaacatgacaatatgacatctatctagtggagtaataatttatttgtgatggatgaaactgaagtggaaaatcccatattcatggaaattaattctgaagataagagaaatgaaaatcaagagtttgcatcagagaaaggagaaggtagcagtgttgttttctcaagagaagcaccacttatgaggaaagagtcaagaatgtccactccttattgttgcaatgctaagaagctcaaatccagggatgttacaacagattgtgagcttggaagtaatgagaaatttgggttggagaagaaactatgtagacaagacaggattgagttgggtcggttgtttcagagtgcagtgagttcccatgactgggaacttgctgaaagtttgattttggttgcggagccacagacgctcaatgatgccttgtgtatcacactggattccttctggttcttgagcacagagctagagcttaatggaataatgggatttatcaag

SEQ ID NO: 12970 - DNA, 479 bp, Glycine max
aaaaaagaaagtggaataaaatacgaagccgcagcagaaagcaaagaaaacgacgcagtttaatttggtatttagcgaaggcaacggagaagaaaccgctgttggcggagagcgattactactacagggtggagttcagagcgtgcaaggacgacgcgtggtacgcgacgcgcgtttcgctggagggagaaacactgaaagtgaagtacttcaacttccccgacgaatacgacaacgcgtttcgagcctccgagtttggggacttggaaaagcttcaggagtttggggaacgcttcagaaccctctccaaacaggctcaggacagcgattgtcgttcactcgctgagggtgtctgggtctgcgcgtgtcagtgtttcggcgatgatgatcttcgctactacgacgctgtcgtcgacggggtgcaacatggaaagcattattggaaagcaggaaaggaaacatgcttttgcaccttcata

SEQ ID NO: 12971 - DNA, 372 bp, Glycine max
attaaaccctaatttctgtccgttgcattagctaaggagctttgccgcatgggttgttaagttttggcctgtggccattgcaatatgcagagcgagttctccgatgcgaagaagcgcagagaggaggacaaccctcaaacactcgtttccctcgtacacgacagtgagaagaagaagagaaagagaaagagaaagaagaaaatcgaggaatcaaacgagcagccccaggttgaggtatgccctaaatccttagtagactcggttatcccaattgttgcacaaaaggaaaatgctgaaaccaccacagagaattctaacccaacccccaagaaaaagaagaagaagaagaataagaatgtgcaagatgcagag

SEQ ID NO: 12972 - DNA, 571 bp, Glycine max
tctcattctattggctgaacaacatcgatccaattctgattttgcaatatagtaataaaaaaacgaatcaacgaacaaagcaaaatcaacaatgagaaactgaaaaacagtgaaaaccatcacacaatacctcacgcacctctccataacttccatcttcgccgaatcacaactttcaccaccgtcaccggcaccgatcaccgccctacgacaaccgtgaaggcaagacacttggacatctgaatcattggtataaaatggtttcgtttgaaatgaatgatcggaagaagattggattaggcttaacgggatttggtatatttttctcattccttggccttatcttcttctttgacaagggattgctagcaatgggaaatatactctttgtttctggagtatccctgaccattggacctgaaatccaccatgcagttcttcgtgaaacgtagtaatttcaagggaacaattccatttgggattggattctttattcttatcttggggtggcctattctgggcatgattgtggagtcttatgggttcattgtactcttcagtggtttctggc

SEQ ID NO: 12973 - DNA, 638 bp, Glycine max
ggtcgatcccttctttttcgagaaaccactctctctctctttcttaattcactttctctctctaaaatggcggctgcttctagaagatcaagcgggccagtcctccgaacactctcgccggcgggaaggtttcgcaattcccggccatcgccggcgaccaccgccttcgcgtcctcaacttcaaccttctccgcacgctccaccgctttcttccagaaccgttccagctctcccacacgtgacaatctatacggttcttcttccggttcggttccctccgtccggttcggttcaattaccccgaactcttccatctccgtcgcgggtgccggcaggcatagccaccaccagaagcggacctgcatgtgctcgccgacgtcgcatcccggttcgttccggtgcagccttcacaagagcttcggctcgcgctcggcagtggcggcggcgtcgcctaaccggctgaacgcgcggcggtcggcgatgacgaactcgctcgtgagaatccgcggcgtcgaaggcgaattggtgaagcgagccttggcggcgctgatccggccgtcgtcgcaccaacagcgccgccgcggcgattttcggccgcggccgagcagactctctatcatgttcacagcaaaagatta

SEQ ID NO: 12974 - DNA, 661 bp, Glycine max
gtagcaatgaaaagaaaaggagttgtgtaatctaggttttggttgattgcgggatggaagtggaggcagtgcaacaacagcgcaaaggagcgcacctgaagaagagggctctgaagaacaaagctttgggcatcactttcaacgagaaagatctcactgactacgtcaccggctttcacaagcgcaagaagaagagaagaaaggaagcccagaagcaacagaacgaggctctgcgccgcaaacgcaccgaggaacgcaaaaggaggaagttggaaagagaacatgttcttaatggaggcgtgccacctgatgaaattgatgagggccaagaagaagttgaggagcaagttgaatctattgctgaaatgaagacatacgagaatgatgatctgaaagtcactgttgtaacaagtgagatcaaccctgaagacgaaagttatcctagtgagaggaaggaggcagcagtgatccctcaatctgttgtgtctgataaaaggcaaggggtacccataagtaacaagaaatctttcaagaaggttgcaaaacagaggtctcggccaaggccatcaagtaagagagataaaaagaaaggaaagaagcgaggcaagaagtaatggcagctaagcatcttgcgtcttcagaacattccaagtctacaatg

SEQ ID NO: 12975 - DNA, 451 bp, Glycine max
  unsure (1)..(451): unsure at all n locations
cccacgcgtccgggtgccaattggtagtgggattgacatgtgtaattttgaggaccctttggatgtaaatcctcctgcattgatcagtttaggtggcaatgccaaattgtctgggtataatgataggattccctgtagcttgttgtccaaaagtcgtgaccatgtaccagtagttagtagagatgatgatgaaaactcttctgggtgtactcaccctataaatactgaaaccaagtcctttaggccaaagacttgtataggtaaaagaatggcttctaactttcagaaagttgctgaaaaaacaaagaattatgcactttctaacaatgatggagattggaagcgaacttacctcagcaagaggaactgcaataaacaccaaagttctcagatgaatattcctttcaaaaagaggaagctttntaattatcgctcttgtgcaaactctaat

SEQ ID NO: 12976 - DNA, 587 bp, Glycine max
gggtcagttgctagaacgaaaggcaaacgatttcaaaatatgatccatttctccaaccgaaaggtaacccattactgatttttcaaaggattttctgtttagatgtctttcattagctatggatatagtcaaaatatttttttttttgtaggatttggacaattttctggttctgaactagcttttcaatttttttgtctaatatggtattcaagtctcatggttggatcactatctatttcaacgagcttcgttaatgattatgtatatggtctggtactattcaaattttattaattccttttcttttgttatatatattccggttacgttataataattgttttaggcatgagggaactatagttagatatctcataggaactaaaaaagtggttaatgtacttcacataaaacttaagcaaatgatccttccttgaattagcaaagtggttaatatacttctcattaagaaaatatttttttttcaataacacgagtaatataatgcaggagatataaagttccttaatgattaagaaaaagacttaaggattgattttggttggagagaagagtaacgaatg

SEQ ID NO: 12977 - DNA, 557 bp, Glycine max
ggttgctttgctttggtgcaaaagagaggaacagaacagaactgagagaagcaagtgaaacactcaatcacctaggctaaaatcgtctcgtcttcattccttttttttccggtttagagaattgaaaagatttcattgataattgagcaaacacaatgagtgctccacctcatcatgatgatgacgacgacaacgaagaagttttccttgatgagtctgacatcatccatgaagttgccatggataatgaagatcttcctgacgctgatgatgattctgaactcctcgaagaggatgaggatggtgattttgtgcacaaattcactgctcataccggggagttgtactcagttgcctgcagcccaacagatgcagacttggtggctactgcaggcggtgatgacagaggatttctctggaagattggccaaggggattgggcttttgagcttcaaggtcacgaagaatctgtatccagtttagcttgcagctatgatggacagtctttggcatcaggaagcttagatggaattattaaagtccgggatgtatctgga

SEQ ID NO: 12978 - DNA, 454 bp, Glycine max
atttgttttttcacatgctataggataaagaaagaaagatccaattggaagttaaatgttattggataaatttctctcaggtttagagagagttgaagaaaacatttcattgataattgagcaaacacaatgaatgctccacctcatcatgacgatgaagacgacaacgaacaagttttccttgatgagtctgacatcatccatgaagttgccatggataatgaagatctgcctgacgctgatgatgattctgaactcggtatgaacttgccaggaggaggatagtaattttgtgcacaaattcagtgctcataccggtgagttgtactcagtttcctgcagccccacagatgcagccttggtggttactgggagcggtgatgacagaggatttctctggaagattggccaaggagaatgggcttttgagcgtcaaggtcatgaagaatccgta

SEQ ID NO: 12979 - DNA, 724 bp, Glycine max
caattttcagcaccttctccaccgccgttgcgcccaaatgcgccttcatcaatagcctcttcatcgccttcaccgctttgaggttcaccagctttagtttgttgattgaagacaacaacttccaacgaagctaccttcaaggatctcttcctggtggtggaagttcaaatttttcttcaaatatgcatgggataaatggcttctgctttggttcattatgtatgaacccagaattgtcagcattgaagagaagagaactcaagaagattcattagccaactatttgatcgaatatctggactattaactcaggacacgatgtacagaaacaggcaaggacatgccagtattgcaccagtgggtcagttgctagaacgaaaggcaaacgatttcaaaatatgatccatttctccaaccgaaaggatgtttggagatttgtgcatgaattaggctacagcaatgaatcatcatctaaaaccaaaggggagttgtactcagttgtctgcagcccaatagatgcagccttggtggctactgcaggcggtgatgacagaggatttctctggaagattggccaagcggattgggcttttgagcttcaagattatggccccattgtaagcggtaaaatagcagattatgcaagtcgtcgagttgcaatgggtttcttgaaggttttctgcatctttggatcacttatcatagcattctcaaagctaacatg

SEQ ID NO: 12980 - DNA, 528 bp, Glycine max
ctttaaagtaaagtcactttatgccagcaaaatcgaagtgcaggactataagcttctttgcttggctgatgttgaagtgagagatcaaaagttcactttggttggaattcttggtagttggtggcctatactgcatttgccattttgggaagcattctcttttttcagaaatagaattggaagcatcttggtgaaaacaacataacaagggagttgggcctctgttggttttgtcccttttggagcttcaactaaatcatgttattcattgaagataccatcccaaaagtgttatgcatagaagaagaaaataaggggcaggaaatgagacaggactgattattacttgcaaataaagtagcatttcaaatactaactgcctaggctataaggttatccctctcttgtttgatgagtcaaatatgcaaacatttatatctttgtaaaaatgtgacatctcaacattctgtcacagcccctattcttcctctgccactttttgatattttaaattaatcgttagtattg

SEQ ID NO: 12981 - DNA, 507 bp, Glycine max
tgtttcatctgaatccataaatatgaccgagcttcaacaatggaacgaactatccggtgaaggtggttcaagagtaaaaaaagcactaagctattttatgtgagaaaaccctttgtacaaacgtttctcccattgctgcctgtctagaagcctgcgtatatgaagctttttgccagcctcataatgcttgcggggcttgatgctgagctatttcgtctataaaaatgaaatataggtttttgaagtaccttttttttttctctcttttttaaaccctaacctgtgggatgttgggttttgaaaggagtggagccttacagaattttggccaggctctgctgcatgtattttgttcctcatcccctggctgccccctctaaaagatgtgtgtgttgaaagtgtcgccctagaaaaaagaagagtcatatgaccatgtgaaagtatttattggccctccgctaaaacaataagcatttaggtccaaaaaaaaaaaaaaaaagagagagg

SEQ ID NO: 12982 - DNA, 792 bp, Glycine max
gatataaaggagggaaagagaggaatattagcaaattaacctgcgcaagcgaaggtgctttcttagttgtgctgctaacgacaatccatggaaatgataagctccaaattcttcttcttcttcttttcaactctctgtcttctctacggattttccaacgccaccgatattcactattgcgataagaaagctgactatgatgttgaggtcaaaggggttgaaatatctcctgatcccatcgcacgaggccagcctgctacattcagcattgctgcaactacaggtaaagctttatctggagggaagctagtgattgatgtgtcatatttcggatggcacatacacagtgagacccatgacctttgtggagaaactacttgccctgtttcagctggtgattttgtgattgctcattcccaagttttacctggattcactccacctggttcatacactttgaagatgaagatgttcgatggaaacaagcatgagttaacctgcattacatttggttttgatattgggtttgggttcctctgtggctgatagctaattgaaattggtcatcgaaatctatgatcagaaacagatctatataaattacttgtacaaactgcaaagtacctttatgttaccagatccttcttctataatccagcatgaccagtgtctgaattaagaatcagaaaaatgtcttgtattttctgggattgaaaacacaaactatgtgtttctttatttatttttctatattcttactacactcagaaggtagatcaaaaaaaaaaaaaa

SEQ ID NO: 12983 - DNA, 842 bp, Glycine max
  unsure (1)..(842): unsure at all n locations
gccttcaaagttggagtagttcccgtcaggtaaaaacaatcgagccagccaccgccacatgactgagaataaccccaaaacccattacccttcttcgggtgggattcccagtcccagtgatgatggcccaaaaaagcttccagggaagcagaagatgcatttcaacccgccagagaaagagattccggacgcggccactctgagggatcaatggaggtatgccattaggcagtacagtaaatggtactctcacgcttggggcactgccattctcgctggcaccgccttcttcgccctcggctggttcatcaaaggagagaaccccataccctctttcaactctaacaaagacaaagacaaagacaaagacaatcacaattctcacccctgatgtcatgtgcccttcacttcttttcaggtaccattcactggaatcaagccacgcaagatctgcttttggttgacaatgccctggcaccttgcttgcaatggtctaataaggaattttgatgtttataaagtctcgtgacacagtggttattttgcttctcttgaactagtttctgtcgctgtttcgatatggatgtaaggcaaaagattatgtatattcgaatgctttcggcatggaatggatgtaaggataaagattgtacatattcaaatgcttcatcccaacttgtaatttatgggtgattatggtccatttaggttcaagttgttgggaaaaaagcacacacctcttcattacgcccacgatgatgagaaaaaaacataaaaaaacaacaccaaaaaaaataaaaaaatagaagagattcaaatcttaaaaaaanaaaaaaaaggaa

SEQ ID NO: 12984 - DNA, 450 bp, Glycine max
  unsure (1)..(450): unsure at all n locations
cgcagcagagggaaaataagcctggaaacgatggaagatgatgacgcagcgattgaggtgaggaaccatgtttccccagagccagaggtggaggattccagttgctgttgcccaatttgcttgggatcattccttcaactttcctacctcgacaaatgttttcataagttttgcttcaattgcattttacgctggaccaaggtggttgctagcaagcaccgttctccaccttcttctgtaaaatgccccctctgtaagactgaaaatttttctatcatatatgtagttgatgggagttgttttcaacgtcattatgtaaatcaagattttgagaatagttttatcttatcaagagctcacagatatagagtacaatgctattacactgaacaagattttgtagatgacatattcaatatatcacaatattgngagatctcaaaagtacta

SEQ ID NO: 12985 - DNA, 701 bp, Glycine max
agagaccaaaagcacaagaaacgtcacaacacacattctatattggggtgaaggaagatagaacaaagaaaaacctctgttttctttgtgtgatttctcttctggttccgagtattgtgttattcaccaaaagcttgcacctttctgttgtggatcacctaaaacttgggttttggttgagatggctgagaaggaagaagccatgcatgctgttttgaaggaagctgtggatttggaaaacgtgccacttgaggaggtgtttcagactctgaggtgtgattcaaatggactcacaacagaatctgctgaggagaggctggccatctttggccacaacaaacttgaggagaagaaggagagcaaggttttgaagtttttaggatttatgtggaatcctctttcatgggtcatggaagctgcagcaatcatggccattgctttggccaatggaggaggcaaacctcctgattggcaagactttgttgggattatcacactccttattatcaattcaacaataagtttcattgaggagaacaatgctggtaatgctgccgcagctctgatggctcgtctagcacctaaagctaagttccttcgagatgggaaatgggttgaggaggatgctagcattcttgttccgggtgatataattagtgttaagctaggggatattatccctgcggatgctcgtccaactg

SEQ ID NO: 12986 - DNA, 598 bp, Glycine max
aatagcctaaagagtcctccccaattgcttcaggcaattactgcatacactttgcggctgaaaagtctaatctccagagaaatagagaaaattgatgttagagccgatgcagagaccttgaggtacaaatatgaaaataacattgttatggatgtttcgtcatctgatgggagctctcctctacagtatcaactttatggcaatggaaagattggggttgatgtgcctccaggagggagtcaaaatcagcttcttgatagacagaaagctcatgttcaacaatttttggctactgaagatgcactaaacaaggctgcagaagcaagggatatgtgtgaaaaacttatgaaacgtttgcatggaggcactgatgtttcatcacgctcacttggtattggaagtaactcccaaaatgttggaagtctcaagcaacttgagctagatgtttgggccaaggaaagagaagttgctggtttaaaggcaagcttaaataccttaatgtctgaaatacaacgcttgaataaattgtgtgccgagaggaaagaagctgaagattctctaaagaaaaaatggaaaaagattgaagagtttgatgctc

SEQ ID NO: 12987 - DNA, 613 bp, Glycine max
gttaaagataaagaaaagcccaaaaggcccaaaaaggttgcacaccaccgcctcaatcggtgctatatgcatccattgtgattacggttgacacaacacaaaggaagacgtgatgtgatgtgatgtgatgtgatggagtctacaaaggaacaatctggaatgctgcacaagatcctacctccacgtctagaagatgccggcctcgaagatcctgcccttccacccgattccatccacgaagcttttctgaaggccgccgccgccgtcaaatcacgcgccgcctccattttctcctccaccgacgacgacaacgacggaggttgcgtcacgacccgtggcccagcgccaaggacgcctccgatgcagtcatcggagtcgaatcggaaaacgaactgccgggatcctgcatcgtagagaggggagtcgagcccgtcgccgacgaagtcaaagttgctggtgaaggaggcgacgcctccgccgacgtggtggtggagggaggagacaaattaggagaggatgtggaagcgtgcgttgatgagttgcaagggttggatatcaaggatgtgaagaaaggtggagaagaagatgatgaagaagacaacaagagacctac

SEQ ID NO: 12988 - DNA, 405 bp, Glycine max
  unsure (1)..(405): unsure at all n locations
agatcccaccaaatcctaagttcaaaggcctgtaaaaagaggttaggggttcccccgttgagtttgaagatcccagcaatccattgaaaccaggagttccagagaacttatttatgcaggccatcttttgtgcagcagttagatacttttaaacagatttattactggagtcatttgaggcatgttaatggtgtagacctccgacgaatgactctatccactttgcatcccaatactgataaataggaattactggtcatccgcagcgagccattttagtgttaggttaaacacgggtttatggagaanttgatttcgatacaaatggcgatttcacccatgctgctcgaagatgaaaaatctgattagtgattaatacatttgttttcacttttttttttctgt

SEQ ID NO: 12989 - DNA, 565 bp, Glycine max
atcccacgagtttccactacgctcttctctttgtctttgactatagtagagaagagaaattaaaacagatgggaagtttagaggaagacgagttggtacaaatggtgcaagattttatagaatccgaatcaacatcccccacaagttccacttcctcaaattgccacaccttaaaccaccgaactcaatattttattctacaggatattctaaggagtgatggtgatacagcatgtgaggctaaggtattgaagtgtgtattgaagcatatgagaggtagaaagggtgctgagaaaacaacaagtctcagtagatggcttgttatgaggatgaaaatggatggcctcaatgcttctatatgccacacctcttgggccacctctttgggttgtcctgctgcaggtgagtacgagtatattgaagtgataacagaggatgatgagaattatgccaaacctatgaggctgatagtggatatagactttaggtcccaatttgaagttgcgaggccaacacaaaactacaaggaattgacagactcggtcccagtgattttggttgggac

SEQ ID NO: 12990 - DNA, 501 bp, Glycine max
ctttgactatagtagagaagagaaattaaaacagatgggaagtttagaggttgacgagttggtacaaatggtgcaagattttatagaatccgaatcaacatcccccacaagttccacgtcctcaaattgccacaccttaaaccaccgaacccaatattttattctacaggtactggctgttcaatgaattcaatgttttgtcttggtttaaggttgtctcttgtgtgttttccccccctatgttttcaggatgttctaaggagtgagggtgattcaggatgtgaggctaaggtattgaagtgtgtattgaaccatatgagaggtagaaagggtgcggagaagactaagacaagtctcagtatatggcttgttatgaggatgaaaatggatggccttgatgcttctgtatgccacacctcttgggccacctctttgggttgtcctgctggtgggtctttatttctctgccttttctcaacctctaattcaatttttggatta

SEQ ID NO: 12991 - DNA, 619 bp, Glycine max
accacgcgtccgggaggctggaggacttgatgctgggccacgcctggtgaaaaaattagttggctttggagataataggacatctaagattgcggctagaattgctgatgaggaagttgcacatgtagcagttggtgtctactggtttgattctatctgtgaaaaactgaattgtgctccagatttcacttttaaaggttgtgaagtctggttaatatctgcttatctgctcacatacactgatacacacatattgaaggcatgcaatcttcaacataattttctgtaaccatgcagacttactaaaggaatacaatgtggaactaaagggtcccttcaattattcagctcgagataaatctggtattcccggtgattggtatgatgatgcatcatccgcaagcactaaggacaagaaagacaaagatggcaatcaaaaacagctctctgcagtaagtgacaatcatcctgctcattcctgcaacttttatgagcttaatttttatgtactggccatgtaaaactcaagtactcaactaataagaaattataatggatatgattttcaaaataattattttagatgttaacaaacttattatatattgatgattttgtg

SEQ ID NO: 12992 - DNA, 391 bp, Glycine max
gcttggaagaacctcgctgaagagttaaggagagaaaacatcaacatcaaaccaaaccataaagatgaagcccattgacgacaaacaagagacagtgacgataagaacggtgagccacgacgaggaagggaaaaagagggtggagaagacagagcttagcactcacaacatcgacactataaggtacgtcgagaagaagctcatcaacaagggtgtccagcgacaggaccgccaccccgccgacggcatcggaatcagccggccaccgccaaagtccggccacggcggcaagttcacgtgggagggccctgctacagtggagaatagcgaactcatggcggcgccggcggccatggacgaaggagaccccaactatgtggactgggaagag

SEQ ID NO: 12993 - DNA, 944 bp, Glycine max
  unsure (1)..(944): unsure at all n locations
attggattctctctatatatttcccctcgttcctgtcgtctttttcacccttctcctcccttctcttctctcacaaattcgtcaatcaatctcccaccgagttcccaacatggctgaatcggtggagcttccgagtcgcttggcgattctcccctttcggaacaaggtcctcttgcccggcgccataatcagaatccgctgcacttcccccaccagtgtgaagttggtggaacaagagctttggcagcgagaagagaaggggttgattggcatcctgccggtgcgtgatgttgctgaaattaagccagtgggtcccactgtatctgaaggagctgattcaacaaatcagaactcaaaagttcaaggcggttcattggattctcgtaagcttgatacaaaaaagcagaatgatgttgttcattggcataacaggggggtacctcctcgaccattacatttatcaaggggagtggagaaaccaagtgggagggtcacatacacagttgttcctgaaggtttgtgcagatttagtgtccaggaactgagcacgagaggaatataccatactgcgaggataacttcccttgaaatgaccaagactgaactggaacaagtggagcaagacccagatttcataatgttgtctcgccaatttaaagctactgcaatggagcttatttctgttttggagctgaaacaaaaaactggtggtaggacacaagtccttttggacaacgttccagttcacaagttggctgatatatgtgttgctagttttgagataagttttgaagaccaattatctatgctggacttaatttgaccccacagtgaggctttcaaaagctactgagttagntgacaggcatttacagtcaatacgtgtagctgagaaaattacacaaaaggttgaaggacanttgtcaaaatctcaaaaagatttc

SEQ ID NO: 12994 - DNA, 511 bp, Glycine max
aaaaatccaacagatctaaaagtaccagttttggacataaaaatgccaaagccatcagaaggaactgaagagaaacattctgtaccatcatctgctgcagtgatgcagacagatgaaaatgacaaggaagaagatgaattcagtgaagatgattgggatgcatttcagtcgtttcctgtctctaaaagtgaggatggagatgattcaaaaacagagtatgttgctgaaggaaaggatcctagcacagttaaaatgtcatcagaaatagaaagttctattggaggagttgagtttcaagaatgttctatttccaaatccatcaatagtgaaaaggagctgaaaggtgatgaatgtctggaggctgttaaagagaaacatgatcaaacttatcctagtgctaacaagccacatgataatgagaatcaagagatggaggaaaaattgcaaacctcagtgcttcaagaagaggggacatcaatcccaggaagtgaactagtttcttgtgatcaga

SEQ ID NO: 12995 - DNA, 609 bp, Glycine max
tgaggttcgcgggaatggcggtgacggcgggtcgaggactggtgggagtggcgacggtggtggtggaagcggcggtgaaggcggaggggggagtaatagacctgttcgcaggactgttagaatatatttgcggcatcctgatgctgctgactccgcgcaggacggtgctgaaaggggatgggagatggggaagttgggattgaaatttatgttttgtttcatgttgtaaaactggaaactatcttgtgcagctcagagcttccgtgaatagattgtagcattgcaatgtttacagaagtccttgtgaggaatgcaagaaatgttatttcccgtggcaaggaactttgttcgatcaaaggtctttgtttgttatggtagtagatagctggaacatgggaatgcacgaaaacacaactattgagattttaggtactgtgttaatgagcgttgataagaaacttcccgttacttttgtacagatcatcttccaaacatccaatattgattatcgtccttttgtacaatatgaactagtcctggtctatattgctcctgtgtgtgtgtataaaacgttttaatttagaaaaatgttcttttgacctaaaaaaa

SEQ ID NO: 12996 - DNA, 712 bp, Glycine max
atccaaacccaaaaatcatatcttccactccacaacctcaaacttctctctctctctcttcctattctcaatatcccacaaacccctttctctattccatctaaagattcattctttctgcaatttcgatacacgggtcttcattaattcactaagattctgcgtaaataatcgttttcactgaattttctgttccgatggagctaatttcaggattaccggaggacgtagcccgagactgtttaattcgggtttcgtatcagcagttcccaacggtggcgtcggtgtgcaaactctggaaatcggagattcacgcgccggagttccgccgtcaacggcgtagcacaaagcacgcccagaaggtcatagcgatggttcaagcacgcgtcgaaccgggaaccggttcgaccaagcgactgacgaacccggtttaccggctcagcgtgttcgaaccggaaacgggtaactggagtaagattccaccaccaccggaattttattcggggctaccccatgtctgtcagttagtgagtgtcgggtacaatctggttgtggtgggtgggtgacccgaattcgtgggagcatcaaattctgttttgttataatttcttgtcggcaagtggcgcgcggacagaccttggcggtggccgccgatgttcttctcgtccgtagatcccgaggggcagtttgtcgcgcggacccgccatggaaa

SEQ ID NO: 12997 - DNA, 475 bp, Glycine max
atccgagcttgcctcgtgaagacatcaattcaaccatcaaacgaactcttctgaagagcttggaaagccctgattggaacgttcgtatggagtctgttgatgctgtaaacaaaatattggaagaggctaataagcgcattcaagcaactggaactggtgagttgtttggggctcttaggggacgacttgttgatagcaacaaaagcattgtcatggcttccttgacaacaattggcaatgttgcatctgcaatggggcaagctgtagagaaggcaagcaagggtattctgtctgatgtattgaaatgtcttggtgacaacaagaagcacatgagagaatgtgtgctgaataccttagacgcttggctggctgctgtccatctggataaaatggttccgtatattgcaattgctttgatggactctaaacttggtgcggaagggcgtaaagatctttttgattggttatcgaggca

SEQ ID NO: 12998 - DNA, 542 bp, Glycine max
cggaaaacgagaagagagagagaaagacaaatagaagaagctgcatttgcagagacgccctgagagagagaattggaaggttgcgacgagtgatgatatacacatattgtgacggtagtgaaatcgaggaaaaagaggtagcaatttgcgagttgcaatgagtaacgaaaaggctccttcatcagcttcttcgagtagctacgagttgagcaaaggcatcaatggcctcgacaaggttattcttcgcgacgcacgtggtagctccgctgaggtgtacttgtacggtgctcacgtgacttcatggaagaatgaccatgccgaggaattgctttttctcagtagtaaggctatctttaagcctccaaagccaattcgtggagggatcccaatatgttttcctcaattttcaaacctcggtcctctcgactcacatggatttgctagaaaccaattctggaccattgatgattctcctcctccttttctgacaaatactccgagtaaagcctttgttgatttgattcttaaaccctcagaagacg

SEQ ID NO: 12999 - DNA, 522 bp, Glycine max
  unsure (1)..(522): unsure at all n locations
tcgagacgacagaaggggagagaaagacaaataaaagaagctgcatttgcagagacgcattcgcgtttgtctgagagagagaattggaaggttgcgacgagtgatgatatacatattgtggcggtagtgaaatcgaggaaaaagaggtagcaatcgtgagttgcaatgagtagcgaaaagtctccttcatcagcttctgcttcagcttcttcttcgagtagctacgagttgagcaaaggcatcaatggcctcgacaaggttattcttcgcgacccacgtggtagctccgctgaggtgtacttgtacggtgctcacgtgacttcatggaagaatgaacaggccgaggaattgctttttctcagtagtaaggctatatttaagcctccaaagccaattcgtggagggatcccaatatgttttcctcaattttcaaacctcggtcctctcgactcgcatggatttgctagaaatcggttctggaccattgatgattctcctcctccttttctgacanatactccg

SEQ ID NO: 13000 - DNA, 557 bp, Glycine max
tttctcaaagtgatttttcgtttctccatgatacaggggttaagtccatgccggggcagcagccatcaataagttcttcattcctaccgttggaaaaaacgagcctgcaaggtttcgctggcgttgatcctcaaacacagttttctcagtgcaacaataattttcaaagaaggtaagctagttatatatttgtagctacctccaggataactgctattagtatctagttatacttttgtagactgcaaaatgtttgtcattaagtatccttttattttcctggtgacatttgtaaatacattgtgaacataaggtctcgcttagtgttttgctttgttcgttgagaagatctaggtaagcaaagtaaggaggtacaggagtccaactgttgttgtgacaatgctatctaactactgtagtttgtatcttagttattatttgtttcaagtggtattatttcttattttctttctccttcagaaaatgctgtaaaaggcatataagctcacaattgcgtttgaagtagcttactctgagaaaataatttttttttggtt

SEQ ID NO: 13001 - DNA, 640 bp, Glycine max
tcagagaaaaaacaacaacgcggtgtcatcactggcgtgtccgttgctgagtgattacggttacagcgtggcgccgccggaagtgcaaccggcgaattggtttctgagagagtggtttgagtcaggtaaggggaaattagaagaaggactgaggctttgcgcgcacattgggtgcggtcgaccggagacgcggccacacgagtttcgccggtgttcggtttgcggcaaagtgaattactgttcacgtggatgtcaggcgctggattggaagttgcggcataagattgagtgttcgccggtggaaatgtacggtgatggtggtgttgatgtggagaatgagtttgtggtcccaaacgatgccgtttgaagaagtgtttcagcgacagaatcaatttctaaggttgaaaaataagaaaatagagaggaaaagaagcgattctataaattcaaaaaaaaatgtcaatcagttggtatgtactatgtacagatgaggtagtaccttttatatatatgtatatatatttatggccaactaagattaaaagttctttattaaaaaatggtttccgtgttaattttatcaacggtgctaaatgtttaatgcattacatgcaatacaaggaaatactttttatttgtc

SEQ ID NO: 13002 - DNA, 583 bp, Glycine max
caaagtcctaccactactccacactttcttataagttataacaatcaacccactctcagattacgctctgttgaatgaaaagctaaggaatatgagaaggccatggaagcattctaagaacaaacatgatctctttgaatgtcttccggacgatctcgttgttcttattctttccaagctcagcgccaccgcttcatctccttccgatttcatcaacatcatcttaacatgcaagaggctaaaccgctcaggcctgcaccgtcttgtgttgtctaaagctgggcccaaagtattcgccataaagccgaaaaattggtcagaatatgctcactcttttctcaaacactgcgtcaatgccggtaacgtggatgcctgttacactctcggaatgatccgattttactgtttgaaaaaccgagggagcgggctctcgttaatggcgaaggcggctatgaagctgcacgcgccggcgctgtactcgctggcggtgattcagttcaacggtagcggcggttcaaagcgcgataaagatctacgcgctggcgtggccttgtcggcgcgtgcatctttactcggccacatc

SEQ ID NO: 13003 - DNA, 405 bp, Glycine max
tactgttcatttcttataacaactctcatattaagccactgttgaatgaaaaccttgggaatatgagaaggccttgcaaacattctaagaagaaacatgatctctttgaatgtctccctgacgatctccttgtccttattctttctaagctcagctccaccgcttcttctccttctgatttcatcaacatcatcttaacatgcaagaggttaaaccggttaggcctgcaccgtcttgtgttatccaaagctgcctctaaactattcgccataaaaccgaaaaattggtcggaatatgctcactcttttctcaaacactgcgctaacgccggtaacgtggatgcctgttacactctcggaatgatccgattttactgtttgaaaaatcgagggagcggactctcgt

SEQ ID NO: 13004 - DNA, 532 bp, Glycine max
cccacgcgtgcgcccacgcgtccgcccacgcgttcggaatctgcaccataacaaaatcagcaacagatatccataaaaaagggaaaaataaagaaggagaaggagaaggagaaggagatttctgttgaatgatgaggaacctaccctcttgtgctgattgagaataagaaccagaacaggttgcagttaaaaaaatataacttgatgcaaagaggagtagcagaaccatataacaaaccgaaagtaaaggaaaagaaaagaagtgtttgaatttgatcgttaaactgagggagaagaagatgaatcacactcgcttggagtcttgtcatgaatctccccttaaagtatacaaattctgttttgtcccagaaaaacttggtgatatggttatactcttaataaggtttggcattcttgtgtgtcttgttgcatccatatcacttgctctccactcagcattctctaaaccagaccggtggttcccgttaccggagcatattcgcgccgtccagaatacttcagtcattgacaa

SEQ ID NO: 13005 - DNA, 571 bp, Glycine max
accaagcgtccgaaagaaggtaagtccaagcccaaggggcagctgggttacggacgaggactccaaaagcttggtcagtgtacactctgaccggttccggaggcactccattgccggttcatcggtgagagatgacgagagccttgctagctctccagcagttccaagctacatggtgccaactcaatctgcaaaagccaagtccaggacacaaagtccattagcctcagaaaatgcaaaagcagagaaaggttcctttgggagtgcaaagaagcggctttctttcccagcttcacctgccaggccaaggcgccattcaggtccaccaaaggttgaaagcagcagcttaaatgcagagttagctgtggacaagggtgtggacagttgatcatacaagtaaaaggatggaaaagcattaaagtaggattgaaaatatatcactgaagaaataaaacaaaaagagtttatttaaattgagtgttccatttatttatttttcatatttttacgtgtatcctaacgtttcttggaggcttttgatttggggtgaaaaaattgctttgcttactat

SEQ ID NO: 13006 - DNA, 491 bp, Glycine max
gtctccgccgtatgcgctagacttgggttgctccaatggaggatacccaagaaattgaggagcaaggacatgaagaagtgatttcagacaaaacattcaagaagcagcaggaaactcttgatgaaattctttcacgacacaggaaagagatattgcagctgcagaaaaaggaagttgagatgaaaaaggctgcagctagaggtagcaaggctgagcagaaagctaagaagaagcaagtggaaggaagaggtttgtcaactttctgctaagcttaaggagaatcatgccaaagaactgactgcattaggctatatcagtggtaatggaaatgaaaagagcaatttggacagtctggtgaaggccatagctggagtatctgttactagtcaacctgaacatacaaaggtcagcaaggccaaacagaggcgagacaaaagagctcaacaagaagcagaaagggagcagagaatccaagcagagcagagtgacat

SEQ ID NO: 13007 - DNA, 730 bp, Glycine max
attaaatcagttttcaatccgccacaaagaatttgtgaaaagggggaaaggaagagagtccctgctatgaacaaaaacttatgatcttggagaaaagaagaacacacaaaaaaacagatgtgtaacaaacttataagacaaaaactgggccaccatcgcagcaaaacgcgtgttcgcagcaacaaagaatcacatcgcaacgaatcagaggcccctttcaacgaatcacatggcagaaccgtcgtccaccgccgccaccatcgctaccgctgatcctccggttccagcgaccaaaagctgggccgacgaagcggacgaagaaaccaacgcctccaccgccgaggcagaaacctcctccgttaacctggaagcgttaaccatcgacgacaaagaaaagaactcttcaaaactcttggacgaccccgacgattctaatattcaagcggttacttctggcgatacgccgtacacgtcggcagcgaggttcgaggacctaagcctctcgccagagcttttgaaggggctctatgtggagatgaagtttgagaagccgagcaagatccaggctatcagtttgccgatgatccttagcccgcccaatcgggacctgattgcgcaggcacacaatggctctggcaagacgacttgcttcgtgcttgggatgcttagccgtgtcgatccaaaggtgcaggctccacaggcgctctgcatctgccccacccgggagctg

SEQ ID NO: 13008 - DNA, 800 bp, Glycine max
gtttcttttatgcagacaataaagtcattcacacctgccaccacagttgttttgcaatggctagtgtggaggaagtattttgactggcgtatttgggcttctcttatacccattgttggagggattcttctcacatctgtaacagagcttagttttaatatgtttggattctgtgctgccttatttggctgtttggctacatctacaaagactattcttgcagaatctcttctgcatggatacaaatttgacagcataaacacagtttattacatggcaccttttgcaaccatgatcttggcggttcctgccatgttacttgaaggcaatggaatccttgaatggttaaatactcatccatatccttggtcggctctcatcattatttttagctccggggtgttggctttctgtcttaacttctccattttttatgtgattcactccaccactgctgtaacatttaatgttgccggaaatcttaaggttgcagttgccgtccttgtttcttggctgatatttaggaacccaatttcgtatttaaattctgttggatgtgccgtgactcttgtgggatgtacattctatggttatgtgaggcacaaactctcccaacagccacaaatcccaggaactcctcggacacccaggactcccaggacccctcgtagtaaaatggagttgcttcctcttgtaatgataaattagaagataaggtctagttcatttagctacatgaggttttaagccttttgaaggcagtaatagcgataggtacaaatacattaaaataacttcgg

SEQ ID NO: 13009 - DNA, 738 bp, Glycine max
  unsure (1)..(738): unsure at all n locations
gcgnacgtaagctcggaatccggctcctgggtggatccatcctgctctcatccacgatgtgttgcatttgggtttttcacgatgctgaacccgaagccgcgcttcttctaatctcacacgacgactcattccgtacacttgacactctcgtcaacaatggccgatgttgccggagccacagtgagtccctctatcggtgaaaccaacgatgcgcagaagaatgtgttcgatttgggagcgtttgttggagacctaactttggaagatgatccaagcagcgatgatatatcattggaaggactagaacaggaactagaagagtgtaagaacaatgatgtagttgcaaatatactgtctaaaggtaccaaacttagggattatacaaaaggagttgagaacgatttgcgcaaagttgaattggattcaattcaggattatattaaagaaagtgataatctagtttctcttcacgatcaaattcatgattgtgatagtatcttgtcacagatggaaactcttctaagtggatttcaggctgaaattggttccattagttcagacataaagattctccaagagaagtctatggatatgagtttgagacttaagaatcgcaaggtggctgaatccaaattggctaagtttgtggaggacataataattcctccaaggatggttgacgttcttgttgatggagaggtcaatgaggaatatatgagaactcttgagattctcagt

SEQ ID NO: 13010 - DNA, 377 bp, Glycine max
tccttctcgtccgcccacgcgtacgccccgaacgatcccattctctctattttctttggactggtatcgggtacaggcttgtagtttcttcttcgtggatccattcagatcgcttccgatcccatccacgatgtgttgcattcgtctttcacgatgctgaacccgaagccgcgcttcttctaatccactcagttatcacacgacgactcattccgtacacttcacactctcgtcaacaatggccgatgtcgccggagccacagtgagtccctccatcggggacaccaacgctgcgcagaagaatgtgttcgatttgggagcgtttgttggagacctaactttggaagatgatccaagcagcgatgatatatcattgg

SEQ ID NO: 13011 - DNA, 945 bp, Glycine max
agcccacgcgtccgagttcggttggcagttgtagtgtgataagtagtaactcaaataaattttccagtgatactttagcaggttcttgccaggatgaagattccctttgcagtgatgcagaatctctagatgttgaacctgtgaatgaaggatgctccacttcttttgaagaggttgtagcagaaagaattcatagggccagtgtaggaggcttgcatgccttgcttccaatggctaagtatgatgctaggtttgcttcttttctctctgtaaattaattggtgatgtctaccaataattttctttcagagataagaaattttttaccactgttttctcactgtcattcatggcagaatatgaactttcttataagctgtggacgtaatcctcttatggaagatcttcctatagtacaatacagataatggtttaattcatatatatgttatcctgtcaattgaaaaaataagtgatgctaggatgtttcagtatgtgttatatcagggtagttaatcgcactggatttctgtcacatggcctccccatgatgcataagcagatgtgtggtgtgttgacatggcagcaaattgcagctgcaatagtgctttgtagccattactccagaccgggtttacaggaatgtctactgattgctaataagatccgttgatgacattgtttttggtcgtggatactgtgtctcattatattgctactattgctgggctgattaatctgttgacttgcatatcaaaacgcttgtggaaagtaagtacctgagaagatgatgcgaataagcaactctgatgtagtttgcctgtatctgcgtgtgtaaagtctgacttgttttccgtatttgaattctttctgatcatgttacgatgcaaataatcaattttagtcgtgtacgtaaaactgaatgtttaaattaatgtgctgttg

SEQ ID NO: 13012 - DNA, 403 bp, Glycine max
gtttttcctctttcgcagctcaaactcaaatccccatctattctctcctccgtacttgaggtcagtgttgtgttcaatcattcgatctacgctttggctggtcaggacagtagcacataatcttcttctataacatcgaccggggtcgtcctctcgaaaaatgctacctctgcgtccacaatcacaggttggagcaccaaaaacatcgctgtctcttgtttcctcagaccccctcctgtctcctgatgaacctaggtcaaactctgacaatctccgtgaatctccggctgaaagtgcaagttcacaagaaacttggcctatagctgatgctgccgcagcaaagaagatggagaatggaaaagcggagattaattgccttgagcagaaagtgattcatcgtgtt

SEQ ID NO: 13013 - DNA, 640 bp, Glycine max
ctggaaagtatctgaaatgtgagtattgtgtgccttctccacatagctggactgaagacaacatttcttgtgcttttgacaatcagttatacaagatatatgttcctcatacagaggaaagtctctttgggcctgcatttattgaggtggagaatgaatctggtttatcaaactttattcctgtactcattggggataaaaaaatttgtactgaaatgaagacactgcaacaaaaattagatgtatctctcctttctaaacaatttcggtctgcatctggtggttctatctgtagctcatgcgaaacttttgcacttagtcacacatcatcatcagacttacttgtagatatagcatggttgcttaaggacaccacttcagaaaattttgacagagtgatgacagcttcacaaattcaaagatattgccatttgttggattttctgatatgcaatgattcaacaattattttgggaaaaatattaccaaatttgataatcttgacagagagcgtggaatccaacaatgttgtaattaataggacaagtgatgttgacataacgcaactcctgaatcacatacataatgctagtaatgtcatatgtcagaaacatcagcaaagtagaagtatattgtgcac

SEQ ID NO: 13014 - DNA, 428 bp, Glycine max
ggataccctaacttctaccattctcagactgggatttctctggaacatcagcagcagaatccaagggaagcatcccttgctggctctcaaacccaaccacctaagcagtccccacaaatatggcaaaacagctactaatcttattcacctcccgggtttttaagggtcttgatgtgagtttgaaagggaccggtcacaggaggcatttccttccgcggtctaataattaaatgcaaccattgtttggtcccaagagaccatatatggcccccacctgccctgtgcgaagttgtattctatatgagttataatgatgctcgtgatgtttaacttccccctttccgtgtgcaaatttggtgtacaatgcactgtaccctttttttcaacattcttctcatctggttatagtggaaagtttcttggatgct

SEQ ID NO: 13015 - DNA, 361 bp, Glycine max
ccaagggaagcatcccttgctggttctcaaagccaaccaccaaagcagtcccaacaaatatggcaaaacagctactaatcttattaacctcccggtttttaagggtcttgatgtgagtttgaaggtggcatttccgcggtctaataattaaaatgtgccattgtttggtcccaagagaccatatattgcccgctcctgccatgtgcgaagttgtattctatacaagttataattatgctcgtgatatttaacttaggtatttaagtgtgctaatttggtgtacgacgtacagtaccctttttatcaacattcttctcatctggttatagtggaaagtttcttggatgctcccttggttttt

SEQ ID NO: 13016 - DNA, 1571 bp, Glycine max
aaccagggacaaggacagacatggggatagtaccaaatcaaggtagatggaccggaatcgtgatgctggaaaggaaagggaccgtgacagggaccgccatcatagagatcgacacatggattctggtgatagatagggaaggccagggatagtgatgacgatgattatcacaagagtcgtgactttgacagaagaagggattttgatagagaggataggcttaggcgcaggtctcggtctcgatctcaatcccggtcagggggtcgatctgagcatagatcaaggtcacgttcgcgttctcgttcaaagagcaaaaggactagtggttttgatatggctccccctgcctctgctatgttgactggtgcttctgctgttgcaggtcagatcactggggcaaatcctacaattcctggaatgtttccaaatatgtttccgttggctacaagtcagatgcagcaatttagtgctctccctgtcatgccagtgcaggctatgactcaacaggctacacgacatgctaggcgggtgtatgttggaggcctccctcctacagctaatgagcagtctgttgcaactttcttcagtcaagttatggctaagattgggggaaacactgctggcccaggtgatgctgtggtcaatgtttacattaatcatgacaagaagtttgcctttgtggagatgaggtctgttgaggaagctagcaatgcgatggctctggatgggattatttttgagggggcacctgttaaggtcaggagacctactgattataatccttccttagctgctaccctaggcccaagccaacctaacccaaaccttaatctgggtgctgttggcttaacacctgggtcggctgggggacttgatggtcctgatcgggtttttgttggtggacttccttattactttactgaaacacagatcagagagcttttagagacttttgggcctctacggggttttgatctagtgaaagatagagaaacgggcaactcaaagggttatgcgttttgtgtttaccaggatcttgcagttacagatattgcatgtgctgctctaaatggaataaagatgggagataagactcttacagttagacgagctaatcaaggtgcaaacccacagcagcctaaacccgagcaagagagcattttaatgcacgcacaacagcagattgcactgcagaaacttatgttgcagccagccttagtggcaacaaaggtggtgtgtttaactcatgcagtttcttctgatgagctcaaagatgatgaagactatgaagagattcttgatgatatgagacaggagtgctccaaatttggtactttggtgaatgtggtgatcccacgaccaccgtctgatggtgaacctgccgctggagttggaaaggtgtgttgttgaactattctggaaattcagtctcctactgtcaattatagaaattaagagcacataatttgtttgtctttttttcccctttcttaatgctgggttgatgtagctgtggaatcgaaataatagttaatgtgagggactgaggatttgtcagaaattactgttgg

SEQ ID NO: 13017 - DNA, 610 bp, Glycine max
tagtccccattctcatagagaatcaggcctacttaccagactgaggcctctataacctttgtcttcacatgcttgttcattgcatgtctatgaaaatttatttgcatatttcactgttttttgttttcactttatgcaggtactttggtgaatgtggtgatcccacgaccaccgcctgatggtgaacctgccgctggagttggaaaggtgtttttggagtacgttgatattgacggtgctacaaaagcccgtgccggattaaatggccgaaaatttgatggaaatcaagtagtagctgttttctatccagagaacaaatttgctcagggagattatgaaggctaattgtgtggtgtttggattctatcttgattagtaaggataatcttttgtattattatcataaacttgtaagctagagttgtggtcatagtacagaaactgttctatttagatgcgagtagtaagagagacatgatgacaatttgttaaaatagttttaccggtctacatggatctgtgtggtcccttgagaaattctcctgttgtcttagtgaggtttgtttcgaagtggacttctgcattaatcaaattaaacttgttcctggtg

SEQ ID NO: 13018 - DNA, 518 bp, Glycine max
ctcaatcccggtcagggggtcgatctgtgcatacatcaaggtcacgttctcgttcacgcgcgaagagcaaaaggactagtggttttgatatggctccccctgcctctgctatgttggctggtgcttctgctgttgcaggcaatgttgggctactagccccactctgctgacaattggcgtgagccgacatctgtagcttttatgtccacggaggaatcaatgcacctgtttttggtcagatcactggggctaaccctacaattcctggaatgtttccaaatatgtttccgttggctacaaatcagatgcaacaatttagtgctctccctgtcatgccagtgcaggctatgactcaacaggctactcgacatgctaggcgggtgtatgttggaggcctacatcctacagctaatgagcagtctgttgcaactttcttcagtcaagttatggctaagattggaggaaacactgctggcccaggtgatgctgtggtcaatgtttacattaatcatgacaag

SEQ ID NO: 13019 - DNA, 266 bp, Glycine max
aaatcctgattatgattttcgtttatatgatgagcagcagttacttgatctatgctttccacatgtaggatcttattatattattaaaggcttacagtgtttttcgctttggtggggtttacttatagcatgttttttttccccaccttggcgattcaataagctatgtttccgtttctctatagtgattttgtactttgtagtaagaattttgtattgagttataaattataaatgttgaagaactatgatgattaccccactcc

SEQ ID NO: 13020 - DNA, 2317 bp, Glycine max
atcaaagatctgcaactctctctctctctctgcaactctctctcatgatttttttctctgcgttgccatgacggaaccaacggagccatgcacgtcatcttcattggcgagggacccaaccaccgtgattcacccaaggcgcgagcccttcgagcacggcctcttgccaatcccgcgcctcatcttctccgacccggcgcaaaccctaattccgttgaagcagaagcttctcgagttatcctccaaccagcgagtcgactcggcggcaatctccgagtcactgcagatctccattgagcacgccaggctcgtcctcgataccctcgcctcgattctgcactccgactccgaacctctcgtcgccgccaagctcgtagaaatcgattccgtcggcgtcgacgtccatgatctggttttgttcctctacattcaatcctacaagaggctcctcccgcgcacgcataaggactccgccgccgtcaccgacgtctggccttccacctccgccttcgatggctacttgtccgctctctcgccgcttcagctcgtgcgcagcaacagtcggcggtttatgccgtcccaggctgatgaagaggcgcatcagttgtcgtatctgcaaaagcacttggctaacattgtgtctcttctagcacagcctgtggagggagaaggcgaagagtccctggttttaaccatggatagatttgagcaccttgggttcctaattcagtttggtgataagggatctgaaggaaattcttttagtcaatcttctcccttttttgcaaactcagaccctgacatgcctgctgttcctgttcctgccgcacaagttcatgattggcttctgcagaatatagcgtctgctttggaatatatttctgaacggacttcttcaaaggaaaatggcccagctagtgcctctgatcaggatgttgccatgactgatgcaagcactgtctcagttaacaaggtctcaacaagtactagaagtgcaagtttcattgaagggatctccaaatcgtcatatgtgaagcatgcatctgacattaaaggttcctctgttaaggttctaaattgccatgagtctgctatatacatcttagcacctttgagatatgcaactgtctatggatgttcagatgcaacaatagttctaggagcagttggcaaggctgtgagagtagaacactgtgaacgagttcatgtaattgtagcagcaaaacgtatttgtattgctaattgtcgtgaatgtgttttctttttgggagtgaaccagcaacctcttattcttggtgataaccataaactgcaggtggctccctataatacattttactcccaattggaagagcatatgaatgaagttggaattgtgcccacagttaaccgatgggatgagcctctagcattgggcatggttgatccccatgattcattatctcatccagcgggtgtctctgatgttcaagctgagtctgctacacgggtggaccctgatcagttcactaattttgtgattccaaactggtttggagcagagtccactggggctacaaaaggcaacccattcacgttaccagatgcctatatggcatctcagcataaaaatcacaaaaatttagaggagataaggcaactcttacgagaagcatctttagaagaaagtcgcaaacgagaattgtcatctgcgctccatgtctacttcaaggactggttatatgcttcgggaaacattcgtcagctttactgtctacaaggcgattgatctttgtcaggcaatgcaatggctcagtgaatgatggtacaggaacgaggtttctggcttcctttttgaacttcctcttcaattcctctcgacaattctattggccgcataggtagctgagatcattatcagatgacgtgaattagagtgcccacatatttatgccgtgacatcaccggtgcacagaatccaatgaaaaatacagttgctaatctgattgtaatatttttttgtgaaaataattactgtaatgtagtagtattttgttagcctaaattaatggtctttgtgaaaaattccagctgccagcatctggtgtactgcttttcatgtcttccaacttcgagttgttccatttaattaaacttcccgagtgtctgttgggtcctctcgctttgcgaatttaccttgtagcattctgaatgagaagtaatgagcgagaatgggttggagattgctctaggactataaatgatctaacttcggttcaatgtaaataactaatctctgtatttctgaactttatacgcagtaaatttttgcccgtag

SEQ ID NO: 13021 - DNA, 503 bp, Glycine max
aaaggtttctgtgtgttgcgagggaggattgtgatgtgagtgatgggaagcagcgaagaagtggttggcaaagaagaggttatcgcaaaactcaaggacgatggcgactttgacaggcttcgtttgaagatcgttcgcaagctcaaggacaacgaagagttgcgacaacatattacctcaattgtgaagcaatcagtggcactcaatcgtgctggagcagaaaatatgaaacctagacaactttctgatgccatacatgaagaagttggtgataaagctatgagccagatatccgatagtttatggcaaataatccgatccggggatgacatgaaaagtgaaatcatggaaacagtgcaatctgtgtatgacaaattggcaaacccgaaagggaaagatgaggttatgatgtccatgtctgatgtgatgccaattcatagacaaggggaaacagcttcagctactgagattgatgatactttgcatgaaaatgagcctgatga

SEQ ID NO: 13022 - DNA, 952 bp, Glycine max
aggaaaaaacgtaagaaatctaaattaacaactgatggtgaagaagaaaagagacttaagaagtccaaaaagtccaagagggattctcctgacatttatgcttccgatttggaatccaactcattagttgtgcaggatgaacatgcagaatcaaagacttgtgaaagtctggttgatttagaacagaaaacagcaagcaggagtaagatgggaggaaaaatatccatcactcctatccctttaaaacaggtctggatgataaaatcagaaaaaatgaaaaagggaaatcattggtccaaagattgtattccaccagctgatttttggctgcctcaggaggatgcaatattatgtgctgttgttcatgaatatggtcctaactggagtttggttagtgaaacactttatggcatgagtggtggtgggtcatacaggggaagatatcgtcatcctgtccaatgctgtgagaggttcagagaactattccaaaagtatgtcttgctgtcaatggacaatgcaaatcatgagaagatcaacagtccgggctctggaaaggctctgcttaaagttacagaggataacattcggatgctgttagatgttgcttctgagcaggtaaatagggagttactgctgcagaagcatttttttgcattgctttcatctgtctggaaggtggcatcacacgttgaccgcaggcgaaatccatcaccctcctgcaatggtctctatttcgatcagagtttctatacttccattggccagccttcacaaaattccttgaagaaatcctctgaaaggatggcatttgcaaatttggccccgagcaagaatttagtagcagctgcacttgatgatatcacaactaggcaagtgaatgacaaagtcattctgtctaaccaaggggaagacatgccagtgagtgcagatcagctggatataacactggagt

SEQ ID NO: 13023 - DNA, 555 bp, Glycine max
aaaccctaaaaacgaaaccaactatggcagcatagcaggcagaaagcgataaacgaagcagagtagaagaagcaaaacaaaggaacacagaagcaggaacgaggaggagcactgtgtagaagaaatggggaagaagcagaacgagatccagaaaacggggctaggtcgagccctggtgaagcagcacaaccagatgatccaacagagcaaggacaagtctcgcttctacaggaagaagttccttgaatccttcaccgaagtctccgacatcgacgccgtcgtcgagcaatccctagaacccctccccgaacttgccgctgccgcttcaaccactctcatcagccttgaaccaggttccgtgcccgatgaaacgacgacgccggaagaagcgaggaagcagcagaagcaagaggaggcgctccacgccagcagcctccgcgttcctcgccgcccgccatggactcccgacatgtccgccgacgagctgaacgccagcgaaacacaagctttcttgacttggcgccgcagcttggcgaggctcgaggagaataagaa

SEQ ID NO: 13024 - DNA, 784 bp, Glycine max
cagattggagagccacacaaatcaaagcttgccacaagctctgtaccctctctctctggtgctctgcttccctcaaaatcaaaccttgataatatgcaaatatcctaatccaaaaatcaacaagagcaagcgttacccaatggaggctgaaaggcccccacttccacaacacaactctcacactaagcccctctctcgcctcaacgaatacgtagccaaaaccagagttggcaaatggttcaagctctcccaacgcaactccaccttcaccaccgagctccgcgccggcaccgccaccttcctcaccatggcctacatcctcgccgtcaacgcctccatcctctccgactccggcgggcacctgctccgtctccgattgcgtccctctctgctccgacccatccacccctctctccgcctgctcaggcccatccctccgcgtcatccagcccgacgtctcatgcaaattcaccccagttaacccgggctacgcggcctgcctcgaaaacacgcgcaaggacttaatcgtggccactatagcctcgtccctcattggctgcttcatcatgggcaccttcgcgaacctccctttgggcctcgcaccgggcatgggttcaaacgctattttgcttacaccgtcgtgggcttccacggctctggcaacgtctcctaccaaagcgccctcgccgcagtcttcatcgaaggagcaatcttcctcctcgtctccgcaatcgggcttcgcgccaagctcgccaaactcgttcccaagcccgtcagaataagc

SEQ ID NO: 13025 - DNA, 723 bp, Glycine max
cccacgcgtccggtcagtgatttacatatcagtgaaagaaatcatgaatactccatcaataagcaacctgagtctgtgataccattacatagacctggtctttttgcagctgctccttcctctgatttttctaagtcttggtctcattcggcttcttcttgggaaatggccaatagcagcctaagccagaagttgatatcaattcagacacctccatgtataaatgcatctggtgctttgagtaagagttctcagtcacatcaaagtaatggggtattggaagaatgctggcctctaaatatcaattccaagcctaacccaggttttcgaagtgacgcacctatacagaatggattttaccctgggtcttcatctgggcccaaggaaccatcgatgaacatctcttcaattagctatgactatctcaatcataaaaatgattgtaagataattcctgatcacttcatcaacaatgtttcgtcaaaatcctgtaagggttcagattcaaattgcaatgacatgaagtctggaaaagatattgacttgaatgtgctgcttccgaatggtttatccaataacttagttccccggtcaggtgctgggataatggatggacaacagaacaatgaggagcgtcatgcagtgttgccttggcttagagagaagacaacttgtaagaatggagtacaaaacactgcaggagagtcgagtttattccatgct

SEQ ID NO: 13026 - DNA, 707 bp, Glycine max
ccaaaatcgccaaagcttgaaatctgattgcggcgtctcgcgcttccttcttccaccttccccgggtttcactgtgccgatgacttttcttctgagaaagagatcgtcatccatcgcgtgccttcgttttcccttcatgaaccggggcaggctttggcgttcttggaacttcttcttccgccactggacttgaccctacccccccccaattagggttatctatttcttccatttttttccttagaaaaaaaaacccgtttcttcttctctcgctgccgacgagtcttctttctcttcgaatctttctggctgctacattctgaagcacttcatatttcggtttttcattttcatttttaatttctttttattatccggatggccaaaccaaaaatgccagggtttcggtttcaacccactgacgttgagctgattgagtattttctgaagaggaaggttcggggtaagaaattcccttccgaaataattgctgaacttgacttgtacaagtttgctccgtgggacctcccagatatgtctttgctcaagaatggggatttgaattggtacttcttttgccctcggggaaagaagtattcgactggtgggaggttgaatcgggccacggaggctgggtattggaagactactgggaaggatagagcaattgaacacaataatagagttgtggggatgataaagacact

SEQ ID NO: 13027 - DNA, 432 bp, Glycine max
caaattcgccaaagcttgacatctgattacggcgtctcgcgcttccttcttccaccttccccgggtttcaccgtgccgatgactttttttctgagaaagagatcgtcatccatcgcgtgccttcgttttcccttcatgaaccggggcaggctttggcgttcttggaacttcttcttccgccactggacttgacccaattagtgttatctattattattcactttcttccatttttttccttactacaaaaaaaaaaaaacgtggttcttcttctctctctgcggacgagttttctttctcttcgattcgttctggttgctacattctgaagcacttcatatttcgctttttctttttcattttcttttatattatttggatggccaaaccaaaaatgccagggtatcggtttcaacccactgacgttgagct

SEQ ID NO: 13028 - DNA, 550 bp, Glycine max
ggagcctgaggcgacggttctggcagttgccctcgtctcagcctcgcgtatgtttccttgctctttcatcttttcctctttctctatgcaaataaccgattgatcaatcgaatttttttgtgattcaatttcgctcttttttctcggcgcgagaaatcatggctttgggaacggtgactcgacggttggggaataaactcttgccggcgttatctccttctcccaggcttctacattctcacgccaccagtttcgggttcaaacaagtaaacgaagaagaaaaggctcgcatggttggtgacgtattcacgagcgttgcttcaagctacgatctcatgaatgacctaatgagtgctggtttgcatagattgtggaaggataggttagtttccaagctgaatccgtttcctggaatgaagcatcttgatgtggctggtggcacaggggatgttgttttagaatcttgagagcatacacaagttagctggaggactcgagggctttcagatcttaaggcgaactcaatttgatggcatacctagagtaatgt

SEQ ID NO: 13029 - DNA, 545 bp, Glycine max
aaattttatttgtggcaatcctgatcaaatgcggggcaagaatggtaatctacattcacagccattaagatcaaactcttttcctttgcaacctccttttataccaaataattcattttccccaaatccccaaacttttgcaacttcagtagtgccacctagaactggtggacccagcttctctgcagcaccactacttaatgtaccaaatattagcaatcggaaaatttctggatatcctagtaatgctcatgatccacgccctgttaaacaatggaatggagacttgaaacaaagttctaacaataatgctccaagtcctgtaaagtcaattggcgaacaaactggacatatggtacagaacacacaacaattgtataatggccatccacatggtccagaataccaacctacatcattgacaactatgggtaataataaccttcctggcaatggtatatggggatctccaggatgccctaaaccttctgaatatgtccaaggtcttataggggttggtttacttgccttgaacacattaaaaa

SEQ ID NO: 13030 - DNA, 527 bp, Glycine max
aaaacgtctgtttgttttcatatacaagaccggtaaataggaagtagaaaggggcaagttcatgatgttagaagtagcaagtagagatgaggaaaggatgggaggatgaagacaaagtttgtgtgggacctcagaaaaacaaaaatctcttaattaattggtcttggtggaaatgatgatgggttctaaatcaagtgaaaataaggggttgtacagtcctttcattatcggaaaggcgtgttgtaaaattattttcagtcgtgctgttttggtttgttttgtggcattattctttgtatctgtttgtggtgaacgcggtacttctggtgccttctgttcttttggtcgtataataataataataataataataataataataataataataataatttactggatgtcaattattaaggaaatagtgccactatactatgctgcaaatttattgtttctgctttctagtgaaagactagataataatgtaatatttatattaaacttaagaaccaaaaataagtaat

SEQ ID NO: 13031 - DNA, 499 bp, Glycine max
actcgctcacggcgcatgttagcattgttgacaaaaaaacaaagcgcgtgggactcacgcgcctgagtcctcctcgtcctcttgcaaccgttgtcgacactctttctttctctctctaccttagttacgttcgtatctcggatccgtcgacgtttctgtcccttctttcggatccaccttcgttgtttcgatcgaatcttgttactatgatgagaagagatcaaatacgtgcacgtgagatgcgaaccccatccctggttgacctttgtgttcagaaagtaatagataatgtaaggtaccttggaaatgttggttctcttgaccagcatctgctcgagcaaattttgccgcactgcacagctgaccagttgatgcatgtggagaagtccaccaagggaagaaatctcagccctgtaactgataagttgtggaaaaagttctatgaaaagcagtttggcacaaataacactaatgaagtgattaagaggatgaaggaaaa

SEQ ID NO: 13032 - DNA, 407 bp, Glycine max
aacgtgtaccctggtccccaaccctccaaagctcaacagcatcgccaccagcaaacagggaacgttgccgatctggtttgtgatcccagtggcttgggacgaagaagaagaaccagtgggtcgttgccttccaacacagccatggcttgcgtgaacgacgcaccatccactgtcgcacgcatttacagcaactagtttctctcgttcttctccaagacgccccatttctgcaattgaactatattattccaaactcattccactgcaatggcaatgaatttgttagagtatcgacagtttaaaattcagtaaattgacggttttgagtgaaaatggggatttgagagttttaaggtagagcacaaacatgcttaacttcagtacctacgctggctagctagctcaag

SEQ ID NO: 13033 - DNA, 680 bp, Glycine max
agacgacagaaggggggtgagtggcgacataaataagcatttgcctacgttgttcgtgttggatgcttcccacctctcattgattggattaagcgccaaagtttccgaatttgcataatggtattgctagttgggcttacattgcttttgggtctcttcctcgctgttcttctattcaacccacgacaccgcaaatctgggcataaggcaaaagctcaagccagtttaaacgttgataaggcatcaaaatcctacagtaaaacagaagtttcgttgcataacaggagaacagactgttggataatcatcaagaacaaggtatatgatgttacctcatatgtggaagaacatccaggtggtgattccattcttgcacatgcgggagatgattcaactgaagggttttttggacctcagcatgcaactcgagtctttgacatgattgaagacttctacattggagatttggagcaatagcttagtcagttactccaggaatgtattgttcaagagatgtatgatttgagaatttcaacattctgctgctggttatctccccaatttttcactccttgtccgtgcttttgatatatatttgtgcatgaaatcatttgtgctctcttgtggatgtgtgcagaaatagtaaaacaaatgaggttccagtcttcatttcatcttcc

SEQ ID NO: 13034 - DNA, 350 bp, Glycine max
cttccaacttctcattggtaagttcagattgtaacatgattctgatctctcctgctccccaaaagtgcttgtaactattttatgaatacgaagggtgctcaatatgtttgcattaacgcatacccttttcttgttttccccgtttcatattggattaagcgccaaagtttccgaatttgcattatggtattgctagttcggcttgcattgcttctgggtctcttcctcgctgttcttctattcaacccacgacaccgcaaatctggttatgttcattttgatgtgatctatgttttttgttttctttttttttttttaatttgggtatgcataatgtactgtgtgaattt

SEQ ID NO: 13035 - DNA, 698 bp, Glycine max
ggctttagaaaagccttgcttttggatccctttaatgagtctgtcaaagaaaatatacgggtggctgagcgtaaattactagaagagcaacaccgtgcatatcccaaccagaatacaagatcatctcaagaattcccaaaccaatctgcacaaggaggatcaagaagccatggcgagccacctccattttcctctatgccgtttaacccccgtgatattgcaagcatgttcatgaacttcacgaacgctacaaatgcacagcagcaggggtcacattctcaggaaaggcaagaagatagcaatggtagtggagctagtgagcctgaaataagaattgggggaaatattagtgtaaacatggaggatatgccagaggatataacaggggccttacaatcaatgatggaaatgttatctggggctgcaccccctgggcaaccgcaagatcaaacaaatggaagaacagcaccaaactaagctatttcagcattctgagactgtaaagactcacaaaattgttaaatattttttttgcctgtttaagttttttgatagattacagcattaactaacaaaattctctctgtttacatcatatagagcttttgagtcactatcctttttggaagcacattatacaattgtcattcgtgcaatatccatacttttacaggttacaagcctaaaaaaaataaaca

SEQ ID NO: 13036 - DNA, 3037 bp, Glycine max
aaacgcgtcaacgaaggcggcttctctctctcgtctcagcttttctcctttcgttcgctttcgcttttcgtgtcgccgggcgagaaagtgtttctctgagaagagaattttgcaaatatggttccaccatcgggtttgatcaccatagcactcgttctttcgatgtggaagtgggtggttctcgcaaccaccacttgtctcgttcggcagtggagcggttccatgttggaaaaggggaaggtgagatctatgttgaacacgagcttgcctctgtggtgccaccgcccgagaagaagaggaagttttctccaattatatgggacctagcagtgaaggaagaaagagtctcttcaaagagtaggatctcgcagattgctgctctgtctcctcctcgtccatctctacctagcagtcctggagcctatgttgttgattgtgggaatgttatggaggagtttttgccagattcacgaagctacaaacaagatgtggaggaagagaatgatgtgcaaggttggacaatcaaaaagtcaagatgggattgtgatgatgttccgtcaccaaggggggctgatgaaaaacagaagcacggtaaagtgagctccagtcctgaaattggtggtggatcgtcggagagcacaatcactagatcatcaggaagcaatggaagagatcattattcgggtgcttcgtctgatgacaccgattctgaaaaggacttccttatggactccatggtcaatgttgaggaacaaagtgatgatggtgattctctgtcagattctgatgagtctggtggactgatgcatgggcagagaaacatgagcatgcttcagagttgcagaagtgtgtgcgagtttgagatgattaagaagataaacgaaggaacttatggtgttgtctacaaggctagggataagaagactggagaactagtagcattgaagaaggtgaagatgaacatagagagggatggatttccaatgtcatccttgagagaaataaacattctcttgtcttttaatcatccctccattgtgaatgttaaagaagtagttgttgatgattttgatggtacttttatggtaatggagcacatggagtatgacctgaaggggctgatggaggttaagaagcatccctttagcatgagtgaaattaaatccttggtacggcaacttcttgaaggtgtcaagtatctccatgataattgggttatccatagggacttgaaatcatcaaacatcctgctgaaccatgatggggagcttaaaatatgcgactttgggttgtcaaggcagtatggaagcccgctgaagccatatactcctgttgtggttacactatggtacagagcacctgaacttttgctgggtgctaaagaatactcaactgcaattgacatgtggtcagtgggttgcataatggctgaattaattgccaaggagcctctgttcagggggtaaaagtgaacttgaacaactgaacagatttttcgaaccctgggtacgcctgatgagaaaatttggccaggattatccaaattacctggggctaaagcaaattttgttaagcaactgtttaatacactaaggaagaagtttccagctgcgtcgtttattggtttgccagttttatctgagcttggatttgacttgttgcagcagctgctaacttatgaccctgaaaagaggataacagcagaagatgctctccttcatgattggttccatgaagcccctcttcccaaatctgatttcaagccaatttttccttcttggcagtgataggacaggtactcttgctggatgcatgaaataccaagatcaatgctatttttactgtcattatttccaactttgtcttaccttgttaatgatcatatacaaagaatgatatgattgcaagggacagggtaatggacttcattaggctcttgtttgttataaattagattagaagcggcagattgatgtatagacctgagaaggtatggcattacctgatttttttcctttactgaaacaaaaatgtatcctctcttgtgctggtgaaaatgatgtacatacatttcaggacatatttagtaatagatgatggatttttgctctggtatgttgttttccttcctgtaccatctatttccatttacaatggtttgttcctatccttttagctgccccattaaattgggggctatcaagacttgttcttttttctcctacatttaatctttacaacaggaaatgctcctgaaaattttggcttcattgatgcacaagcattggtagctgttggatgtgtagaaaaataaatcaattgcaaggaatattcattttgagcatggtcagcaggtaatgatgttaggtttctcaatttgaaagtggttccctgaaataaaatgatagtgttgttggcttttattaataatgtctcttttttcacacttccatattatgttgctcaacaaaataaaaggatctaaattcttttttactgtacaagttcagggtgaaacttttgatatacagggactgtcagcaagataacgtgatgtaatcttcatggttatgctatcgagttttgttccttttttgcctacatttaatttttacaccaggaaatgctcttttaaaaattttgggtgcattgatgtgccaagcattgatagttgttggacttgtagaaaaataaatcaattgcaagcaatactcattttcaacatggtcaacaggtaaacaatcgtaggtttttcattttgaaagttggtccttgaaataaaatgatgtatgcccctttaccgaaatatgaatttttaaattaaccagaggtggaattatgagtttaggcagtggattgcatgttgaactatggtgaagcagggtttagaagcttgtggagctgctgttaaaagagacacaggctgttacatagatggcgaagtccaccaagggtgctgaagtgaaatttgcgctcaatttgtgccttcttaacactgcaattggtgtaataatttgatgaagttcaagggaagtag

SEQ ID NO: 13037 - DNA, 898 bp, Glycine max
tctgttcaggggtaaaagtgaacttgaacaacttgataagatttttcgaaccctgggtacgcctgatgagaaaatttggccaggattatccaaattacctggggctaaagcaaattttgttaagcaactgtttaatacactaaggaagaagtttccagctgcgtcgtttattggtttgccagttttatctgagcttggatttgacttgttgcagcagctgctaacttatgaccctgaaaagaggataacagcagaagatgctctccttcatgattggttccatgaagcccctcttcccaaatctgatttcaagccaatttttccttcttggcagtgataggacaggactatttagtaatagatgatggatttttgctctggaaatgctcctgaaaattttggctgcattgatgcacaagcattggtagctgttggatatgtagaaaaataaaccgattgcaaggaatattcattttgaacatgatcaacaggtaacgaggttgggtttctcactttgaaagttgcttcctgaaataaaatgatgtgttgtggcttattaaaaacagtgtgcaagattttgggggctatcgaggtttgttctttttctcctacgtttgatttttacagcaggaaatgctcctgaaaattttgggtgcattgatgcacaagcattgagctgttggattgtggatatgtagaagaataaatcaattgcaaggaatattcatcttgagcatgatcagcaggtgatgatgtcgggtttctcaatttgaaagtggttcccggaaagaaaatgatattgtgttgttggcttactaaaaaaaaaaggctaaaatgcaattttcattttctcaaatctttgattttagtctccccactttttaattgaggcatttca

SEQ ID NO: 13038 - DNA, 456 bp, Glycine max
atcgagttttgttgctgacagttactgtatatcataaccatgaagattacatcacgttatcttgctgacagttactgtatatcaagataacgtgatgtaatcttcatgggtatgctatcgagttttgctccttttttgcctacatttaatttttacaccaggaaatgctcttttaaaaattttgggtgcattgatgtgccaagcattgatagttgttggacttgtagaaaaataaatcaattgcaagcaatactcattttcaacatggtcaacaggtaaacaatcgtaggtttttcattttgaaagttggtccttgaaataaaatgttgtatgcccctttaccgaagatatgaatttttaatttaaccagaggtggaattttgagttttggcagtggattgctatttttaatttttgtattctttgtaaattttcttttttagtttttatatatat

SEQ ID NO: 13039 - DNA, 394 bp, Glycine max
  unsure (1)..(394): unsure at all n locations
aacgcaacattaanaaaagagcaagcacgcctaacttcggaacccaccaagagacagctgcactgaacaaaacaaatttaaattacgatattcgtttcaagcagaggagaagggacacacagttcacacaataataacatcttcattcgtttacccacttttctttacgaccttattccttcgattctgtcttagaatgacgaattcactatctccctgaaaccatgactgtgagggacagtcatcatcattgagccttacccagaactaaaaaagcaatctttatcacatatcacaattcacaaagcttctgtggttgatgggtagaaggggaatccaactgtttgatgagaaaagagatgtttttttctctgtctgcaatttggggtttgaa

SEQ ID NO: 13040 - DNA, 277 bp, Glycine max
agttcacacgtccgaataataacatcttcattcgttcacccacttttctttacaaccttattccttcgattctgtctgagaatgacaaattcacaatctccctgaaaccatgactgtgagggacggcaatcattgtgcaaaaaagtaatctttatcgcatatcacaattcacaaagcttctgtagttgatgggtagaaggggaatccaactgtttgatgagaaaatagatgtttttttctctgtcagcaatttggggtttgaatccaaagatggcta

SEQ ID NO: 13041 - DNA, 463 bp, Glycine max
gtgctctctccaccctctattatattataaacattttgccatgacataactaaaaacttcaaaaggcagggtcatcttcagcttctctcactttgatgcaacctttaaattagtccaatttcaattattcaaagacagtcccacccacttcccatctttctctcttcttttctgtgcagttgaggaaaaaaaactatgctccaatccaacaacaagcaaagaagcttctcctcacttttcttctttatcttttctctctaagccttttgttctctctacttcattcatgatgagtttgtgttcctccaaaggaacctgttctggtgacaccaatgcacacgtttcctcttctactgttggaaattactcttctgacagaaaaaggcacatcaacatattcataacctttttgagaaaaaccatgtgggagtatgctttggcatgtgttggtgttgttccttgt

SEQ ID NO: 13042 - DNA, 683 bp, Glycine max
ccctttttgattccacagcgctttgtatctccttatgggggaacaacggtgttcctaaccggttctttcaccagttggtcgaaccatatagctatgtctccgatggagggatgccctgctgtgtttcaagttgtttgcaacttaatgccggggtttcatcagtacaaatttaatgtagatggtgagtggcggcacgatgagcagcagccatttgtaaatgggagctgtggagtagtgaacactatttatatagtgagagaaccagatatcttaccttccatcttaaatactgaaacacctggtcgatcacacatggaggttgacaacatggaagctaatcccaggatgactgtgtctgatctggaggtttctcgccaccgtatatcggtattcctgtccacgcatacttcatatgatttgcttcccgagtcaggaaaggtcattgccttggatataaatttaccagttaagcaagcattccatgttctttacgagcaggggatatctatggctcctcgatgggatttgtgcaggagccagttcgttggagttctgagtgcaatggacttcattctgaatattgaaagagctcggggaagcatagttcaaatttgactcaggaacaactcgagactcatactatagctgcctggctagaaggataatttcaactcttcagaaca

SEQ ID NO: 13043 - DNA, 345 bp, Glycine max
cacaaagctagctatagctgctacctcttattggcttttttgtcttactgtttcaataacagtaagctctaagccaccgccaagtttcatttccttctttaatttcctccctttctaccttgttgttattcttcttcaccttggttaccctgccctacccaaaagttcaatatcttttttgcagcgtcaataccctccaaattccaataaagatatacacacacacatttatatgttcatatatgttcatatagtatatggtacactacatggcacaacaatattcatcctcaagttggagctgcaatttatccaagatggcacggcttgcctttgtgctccctg

SEQ ID NO: 13044 - DNA, 461 bp, Glycine max
cacgcgtgaccacggccttcttacgactacaaaaagacgacttaatgggggtttgcaaaactaaaaatgtggtttcttggttggaaaggggcatcagggttctcagcctcttccacagccgaacaagtcactcaagggattgatggaaccgccctcaccgccatcgtcacaggagcaacaagtggccttggtctggagaccacccgggttcttgcattgcgcggtgtccatgttgttatggcagtaaggagtctggacagtggtaagaatgtcaaagaaacaatacttaaggaaatcccctcggctaaaattgatgtcatggagttagatctaagctctatggcatcggtaaagaaatttgcagcagattttaattcttctggtcttccactcaatatcctaatgtaagaacttttaactctatctggtttagatatcttgtaattaggtaatgtttttgt

SEQ ID NO: 13045 - DNA, 435 bp, Glycine max
aggggaagaaagagggcaacgcagatgaaacgaaggtagaaaaacaaaattgacaaaaaagttcgatcatattagggttagggtttttctacgcatcgaatagtcactcaaattcgactcaaattccccaaattggagaaacctcaacattactgccttgctagggatagaaagaaggggtggcatcaaaagactcaaagcagtggaaatgctgggagaataaatagttgagtggaaatgagtagggttgtctttcaggcctcgaccacttgacattcataagaagctccccattgtcaagtccatcaaggactttgatgatgatgaggcaccagcttctactacccggaattcacaattactgcgtgctgttcctgagatcgaaaatgaggtacctcaaactcccagcaagaaattggcttctgaaatacctac

SEQ ID NO: 13046 - DNA, 397 bp, Glycine max
tcacaattgttgataaaggtcttggtaacccgggtgttcgttggtttctggagcatgttcgagatgaatttaaaaagctagctagaaaaggttcaagaggaattttgccaaacatgaattcaatttacattcaggaaaaactggttcctgtcattcgtggtctgatcacttcattggagagtgtttcacatggtggtagtaattggagagatgaaacttccttgtcttttcaagtggatctgtctccatcaccaagtaatttgaatggacaaattgaaggtgctagttcaacaaaagccccattattgggaaaatctaacaagccagataagaagaaagtaaaagatcatgtcattgctatgagagatgttgagttggaggagcatcagaaatctac

SEQ ID NO: 13047 - DNA, 578 bp, Glycine max
acgtaaaatacagaccaccaatgttttgccaaagcacgggccaacttttctagtttatgtggaaaccaaaccaaacctcatttgtattttttcctattggaaaaatctcacttttaaattgtttctattgcagggactgactgacaaattcaaagaaaaggatactgcgtattctggctctgcaaccttcacctatgaatcgtttatgctgacagtcctgccattcctaatagcttaggaaatgaatggtgtgtgtgtggttggtagggtttgtaaatggccaggctgtatttggtttgaaaatgtgtggtcgaattactttactattgccagcctttaatatgctagtactccctgttgttttactctataagtaaccagatccaaaatactatggttttcagcttgttgataattatctttgggttatgcatgtgaatgaagcgttgaaaatgagatttcctggtaatggtaatccatgactggataatgatttgggtatatttctttcaaaagataaatcttgtataattttctttatacagaattaagaatacttctcattgttaatctgtgaa

SEQ ID NO: 13048 - DNA, 569 bp, Glycine max
ctctgtgttcgctttcttcctataaccaaagcttcagcctcagaaccgttcatcttctcatgtatcacttcaccaattccaacgtcaagaaaataggaccaaaggaattcacttctctattttacagtcttcagaactggaggtccatttttgagagatttgataaagacagaagcggcaaaatcgattctactgagttgagagatgctctactgagtctgggctatgctgtttctcctgtggtattggatttgctcgtctcaaagtttgacaaaactggtggaaaaagcaaggctatagaatatgacaatttcatcgagtgttgtcttactgttaagggactgactgacaaattcaaagaaaaggatactgcgtattctggctctgcaaccttcacctatgaatcgtttatgctgacagtcctgccattcctaatagcttaggaaattaatggtgtgtgtgtggttggtagggtttgtaaatggccaggctgtatttggtttgaaaatgtgtggtcgaattactttactattgccagcctttaatatgctagtactccctgttgtttt

SEQ ID NO: 13049 - DNA, 1037 bp, Glycine max
tcgacccagcgcgtgcggcaaacatgtccaccgcaacaactcacgtgctcgcttatcccttccctacctccggtcacgtgatccctctcttagacttcaccaaaaccctagtctctcgcggcgtccatgtcaccgttctggtcacaccctacaacgaagccttacttccaaaaaactattcccctcttctccaaacgcttctcctccccgaacctcagttcccgaacccgaagcaaaacaggctcgtatccatggtaaccttcatgcggcaccaccactacccgatcattatggactgggcccaggcccagcccattcctcctgcggctattatatcagatttcttcctcggttggacccacctcctcgcacgtgacctccacgtgccgcgcgtagtcttctccccctccggcgccttcgcgctctccgtctcctactccctctggcgcgacgccccccaaaacgacaacccggaagacccaaacggcgttgtttcgttcccaaatctcccaaattccccattctacccctggtggcagatcacgcacttattccatgacaccgagagaggaggtcccgaatggaagtttcacagagagaacatgcttctcaacattgattcctggggcgtcgttatcaacacattcaccgagttagaacaagtttacttaaaccacttgaagaaagaattgggacacgaaagagtctttgcggtgggcccggttctgccgattcaaaccggttcgatttcaacaaaaccggaagaacgaggcgggaacagcaccgtttcgcgacatgacatcatggaatggctcgacgcacgtgacaaaggttccgttgtttacgtgtgtttcgggagccgtacgtttctaacgagttcacaaatggaggtgttgacacgtgcgttggaaataagtggggtgaactttgttttgtccgttagggttcctgaaaaaggacaccttgcgaatgagcacggtacggtgccgcgttggttttcagatagggtgaaaggaatgggatttgtgattgaagga

SEQ ID NO: 13050 - DNA, 336 bp, Glycine max
ggatgggccccacagttggttatactgagtcaccgcgcggtgggggctttcgtgagtcactgcgggtggaactcggtggtggaagggttgatttcgggggtggcgatgctgacgtggccgatgggtgcggatcagtatacgaacgcgaagcttctggtggatgagttgggcgtggcggttcgcgccgcggagggtgagaaggtaattccggaagctaagcgagttggggaagagaattgaagaagctttggggaaaacgaagaaaaggtgaaagcggaaatgttgagggatgatgcgttgcttgcgattgggaatggtggcgactcgcaaggggaa

SEQ ID NO: 13051 - DNA, 1082 bp, Glycine max
tggtcaaacaagaatatgagaaacagcttgttgatggtcaggatcaggagacaggaagaaagaacgtgaaagatgtaggtgtggatccgatgttggaggcacctggaggaactccattagattggtctctgcaattcaagagacatcaaaaagagataattgaactgtggcaatcttgctgtgtaccattgacccacaggaccttccgctttcttttgttcaggggtgatccatcagactccatttacatggaggtagaacttagaagattatccttcctcaaagaatcattttctgatggaaaccagtctgtgagcgatagtcagacaatcacactagcttcaagcgtgaaagctcttcggcgagaaagaggaatgcttgtgaagcttatgcagaggaggctttcggagaaggagcgaagaaggctatacgaggagtggggcattgcattggattcaaagcgcaggagggtgcaactagggaaccgtttatggagcgaaaatgatatgaacctcgtaatgcaaagtgctacaatagttgccaagttagtgaggttttgggaaagaggcaaggccctcaaggagatgtttggccttagcttcacaccccaactcacggggcgaagatcatcttatccatggaaaaatagctcaacatctcttttatagtcgtttttattttttggccctcacgtgtacagtgttagagaaatttttatcagagttctctgattgcatgtatgcctcttcgttgagatgagagatgtatgagttcttcttgattgggcggttgtattgtcttttttatagttctggtttatcatttaacaaagtgacattttttgttttctgttcgttacttcaattccctggtgcaaggtttgctgtgttgcttgtttcattgtaaactactttctctccctcacattcgagtttggacgaagccgtatatacttttgtgtacgtactacgtacactgagacgatcgaattgtgtcatgaggcagagtccgcatagatcattttagctaaactgaattagaagacattaatattaataaaactttttatattatgattcgtg

SEQ ID NO: 13052 - DNA, 388 bp, Glycine max
tccagtttggaattgcggcctttatggaatcctcccgtgcctaagaagggccgtcacacaatagaacttaaggtaaatgcatcaaccaatttgtttgcaatggcagttggcataaaacagaaagatcttgtgagcaagatggttaaaaagtttatagacagtaatttcgtcgtgatgctcttccactatgatggtattgttgacgaatggaaggatctcgagtggagtagtcttgtcattcatgtgtcggcaattgatcaaagcaaatgaatatgattatattttcctttgggatgaggacctaagagttgagcatttccatccagataagtatgtttctattatcaaacgtgaagggctggagatatcacaaccagcactggatcct

SEQ ID NO: 13053 - DNA, 405 bp, Glycine max
agcaaaagcaaaatttggggcgagaaagcgaagcaccaggtggttttaaagtgctcaagtttcactaccacgcccactgttagatcttctcctttctcacctcttccaacaatacatcttctgcctactgctaggtgaaatgcagaatccagatgcaaatcaacttcccgaagttgattcgttgccagatgggtttgttgagagtactacagagcctcttgctcctgcaactccatctcctgaacaagagaaacccctgaatagttacaaggatgatggtccctctgaccttattcattctaatgaacgatcaaatgatttgggagaaaaagagtttcaaaacaatcatgactgctcagcggagagtccctctagaagctctatgcagcagacagaaagggcaca

SEQ ID NO: 13054 - DNA, 469 bp, Glycine max
atcagtgagtggaagtgggaagtgaagaaaaagactatggagggtttgaagaagagaaagctggagctggacgaagcaggcaacggtgaattggcttccaaggaagagcttcgcttcctcattgaacctctcgctaaaccccagctcgtcgatcttcttgctaaactagggtcccaatatccttcaattgcagaagaaataaaaagtattgcaagtgcagatcctgcccatcgaaagctttttgttcgtggcttggcctggaataccacttcagaaacattgcgtgctgcatttcaagagcacggagaaattgaggaaggagctgtgatctttgataaagtgacaggaaaatcccgtggctatggatttataactttcaaaaatatggaatcaactcagcaagcattgagagcccctagcaagttaattgatgggagattggctgtctgtaatctagcttgtgagagtc

SEQ ID NO: 13055 - DNA, 399 bp, Glycine max
agctctcatcctttacaaaaacctaaattctgcgaagcaccgttctctacatatccaaacgccaccgtttttctcttctctccgtcttccgaagcttcgagaatcatactgctgggatgtctggggaagtttttgatggacaagatgcaggctatgtgcctgagaaccctgagtttccacaaaaccattctgatgaacacgatggaggaaatgtgattgatgactctgggttcccgcagctgcagcctgatgaacatgatgctggagggtttccgcagctgcagctgcagcctgatgaacacgaaggcggcaatttggctgaggatgccaatcatcctgaacataattttgacgggaatgatgttgaaggtttgcctggaaactgatttcctcctcaag

SEQ ID NO: 13056 - DNA, 423 bp, Glycine max
cccacgcgtccggggttttggagattcaaagcaacaaattgttttccttttctcttcaattcattttcctaagagaaaaaaacaaaccgaaatttcgagcaaaatgagagaaattgtttctgtcatggaaaactagttttttttttttttttgttagttcacttcggattctccgacaattcgccgatcttacattcgccggaatttcgcttcgtctggttaaaatcgcgacctctgaacagcaggctttcaaattgagtgctcatttatctgatcacgggtcttggattgctggttttttgtgtttgatccatctattttggcatggttcctaagatatggtattgcagaaaaggttagagtacggatttaatggctatcaggctccggccatgccgcgagcttcccgatcaactaggagga

SEQ ID NO: 13057 - DNA, 661 bp, Glycine max
gaggatgtgacaggaacatcatcttcgaacagaaggttcaatttggaaagtggggacaataataatcatggaagtgttgtgagggctgatcaagagaatggcactgcttcctctattgccactctgcttaatcaactccctcaaaccccttcattgcaccaacaatcaatgttggggtcaataggcgatggacttctaagaacaacataccaaataccaggaatgaattggtatgcttagaacaatttcaggtttttatttattgatgaacaaggagatattgaattactataagaaggctatacgatatgattctcagctggtggaaacttacactattagattgtaaagattttaatgggatattgagattttggttgttaggaatttggaagcagttgttagactttgatcaattagatgggcctcatcacccaatgaagttcttcaaccattggaggtagctgcaagcaataacaacaccaaaggtcagggtgaagccgtgggatatttttagttaaactttaatatagctttatacgtatatatagatatttgcttgtttttattggtatgtaaataataaaaaaatggtggtgtgctcttaatgtattcaaatatttaaaagagaaaagctatttcgactcagctgttatatgcc

SEQ ID NO: 13058 - DNA, 2330 bp, Glycine max
agtaattaaaacttttttcaatgaagttggggcccaagaggcaataaaacccagcagcagcgtataagttccggagcggctccgtccgtatcttctcgacctcctttgttttcgacaaaccctccctccctctcaaactgtcacccctttccgtacgtccattcaaacatttcctctttcttatattcttctttttctctcttcactttcaaacacaaaccctaattcactttctaccaattcattcgcaaacaccttttccaatttccaacacacaccaaccatgggctacgaagacaatccgtatcgtgacgaggacggagagcccttgatggactacgacgacattcaatccgatcgcgagccatctcccgagcctcgccgccaggacgacgatttcgatgaggacgtcgacgagtggcgcggccgtgatcggtcgcagacgccggtctatgacaccgatccgtcgcggtcgaagccgcggaagaggctgatcaagaagagcgacgccgggaagcaggcggtggagccggagcttgaggatgaggacgtggaggggtatgttccggaggcgatgttcgacgaggcggacactggaaggaagaggaagaaggggaaggagggtgggagtgggaagaaggagaagaggatgaagggagagaagagttttgggagtggcggtgcgaagagtgggtccaaatttgggagtggaaagaaagggtttggtgggaaggcagggaaggatcatgatggtgaagttaaggagatgtgggatacaattgctgggggagattctgaggatgatcaagagggtctcaggaatgtggatgatgacaactttattgatgacactggagtggaacctgcttattatggtagtgatgaaccacgttctcctggtgatgctccccaggcagaggagggtgaagaggacgaagaaattaaggatcttttcaagataggtaagaaaaagaagaagaatgagagaagtcctgcagaaatagcttatttagttgagactgtcatggctgagcttgaggttacagctgaggaggatgctgaacttaatagacaggggaagcctgccattaataaactcaagaagttgaatcttctgactgaagtcctctcaaagaaacagcttcaactagagtttttagatcatggagtgctaactttattgaagaattggcttgagccacttcctgatggaagcttgccaaatataaatatacgctcggaagttttgaagatattgaatgattttcctatagatctagagcagtatgatagaagagaacagctgaaaaagagtggtctgggaaaggtcattatgtttttatcaaagtctgatgaagaaatcagtgcaaataggaaactagccaaggagctggttgataagtggagccggcctatatttaataagagtacccggtttgaagacatgagaaatgtggaggatgatagggttccttatcggaggccatcagttaaaaagccggcaaataaatctgcaggaatggaatctagggacagtgatcttgatttggaactttcacagcctaggtctggacagtcctcttctaggcagcatgcatcaaggccggaagcaacacctttggattttgtggtccggccccagtctaaaattgatccagaagaaattagagcacgagcaaaacaagctgcacaagatcagcagcgtatgaagatgaataagaaattgcagcaattgagggcaccaaaaaagaagcagcttcaggctacaaaactgagcgtggaaggtcgtggtatgatcaaatatttatcaatgtgcccacgttgatactggatgggtttgtttgtcctgctgcaagcttttcatataatgtgctgcctgcattgatgtggattcttctaaaggtgggctattcgttcagtgatctacatggaaatttgatggagagggatgttatgaaaataccatccgtatgctgcatttgtgtattcatctagtgcagtaggaaatccaaaatacattggacggttatgcattcgtatatatagtcaagcttgtcatcagtttaatgaaaatgtggattttgcattcgtccttggtacaagtaatctttgtagtgcagcgctgcagcagtaataccaaccaaaatacactggacggttgtgtacatgttttaagatttttatttttcaattgaataatcaagcttgttttatcaaactcaaaaaaaaaaagaaaaaaaaagggggggccccggactagtgcgctcgtagcccggggatttaattcgggccgggtccggcaaggggtcccagtttccccaaaagggggc

SEQ ID NO: 13059 - DNA, 438 bp, Glycine max
cggacagatccatctgtatcttcccgagctcctttgttttcgacaaacctcccttccttgtaaactctcaccctctcttctttttcacccttttctctattccatatcaatcacaaaccctaattcactttctacagattcattcggaaacaccttttccaatttccaacacacaccaaccatgggttacgaagacaatccgtatcgcgacgaggacggagagcccttgatggactacgacgacgttcaatccgatcgcgagccatctcccgagcctcgccaccagctcgacgatttcgaggaggatgtcgacgagtggcgcggccgcgatcggtcgcagacgccggtctacgacaccgatccgtcgcggtcgaagccgcggaaaaggctgatcaagaagagcgatgccgggaagcaggcggtggagccggagcttga

SEQ ID NO: 13060 - DNA, 400 bp, Glycine max
atgaagatgaataagaaattgcagcaattgagggccccaaaaaagaagcagcttcaggctacaaaactgagcgtggaaggtcgtggtatgatcaaatatttataaatgtgtccccgttgatactggacgggtttgtttgtcctgctgcaagctctcatataatgtgctgcctgcattaatgtggattcttctgaaggtggagatccagtgagctcgataaatggaaatttgaaggagagggatgtcatgaaaatacacccgtatacggcatttgtgtattcatttagtgcagcaggaaacccaaaatacatttgacggttaggcattcgtctattatttcgttttctgttgaataatcatcatgcttgtcatcaatttaatgaatatgtggattttccct

SEQ ID NO: 13061 - DNA, 460 bp, Glycine max
ctcgagccctaaatttcaaacaaaaaaaaaagcaacgaaaacaaaatctctctttctctctcctccccagaagcaaatggggcaagcttttctctctgtcaaaaccgaaacgcagaaaacaaaacaaacacacacaacacagcacaacccaaacgactagccaacagcaaaacgcaaacactctcctcaaaacgacaaccgccacaaaacaacacaaccaccgcccctcaccgccttcatcttctctctctctctttagggtcgatggctgaattcggaaacaacaacaacaacggcgccaacacgacgtcgtcgaggttctccttcttcaaccgttccctcacgacgctccgcaacgaaaaaccgccgcagctggaccgttctgtcacgaagctcgtcgaatcttcgcgcggcggcggcggcggcggcacgtcgtcaagcgctttgcagttcttcgaat

SEQ ID NO: 13062 - DNA, 483 bp, Glycine max
acgcccacgcgtccggcaaaacgcaaacactctcctcaaaacgacaaccgccacaaaacaacacaaccaccgcccctcaccgccttcatcttctctctctctctttaggtatcatcatatccatcacaacattcatcatcaaaaaatgtttcttgttatttttcttgttattaattattaattataatcatttacctgttttaaattcccatgatgaagcttgaaaagacgaaaacttaaacctttttgttacgaaaaaaacagggtcgatggctgaattcggaaacaacaacaacaacggcgccaacacgacgtcgtcgaggttctccttcttcaaccgttccctcacgacgctccgcaacgaaaaaccgccgcagctggaccgttctgtcacgaagctcgtcgaatcttcgcgcggcggcggcggcggcggcagcgtcgtcaagcgcctttgcagcttcttcgaatccgcaaaatcttcct

SEQ ID NO: 13063 - DNA, 627 bp, Glycine max
cggtcttcttgggtctggggcagccggaggcagagaggcataagaagataattggaagattgaagaaggagtgattgtaatctggaaggatgaggagtactattgttttacgattgggaagacgtgcgcgtattccattccaacgagcattagcaacgcagagtaacaataataacactctggtgtttatccctctccctcgctgcctcagcgcaacgcggtcgtttcactttcagcgcaattcaccgtttggattctccagcgggcatgggcaacgcaagagcatgttcatccaaacgcagcccacgccaaatccctcgtctctcatgttttatcccggcaagcccgtcatggaagttggaagctccgacttcccaaaccctcgttctgcaatgaactctcccctcgccaaatcgctcttcgcaatcgacggcgttactcgcgttttctttggatctgatttcgttaccgttacgaaatcggaagaggctgcgtgggaattcctcaagcctgaagtcttcgccgccattatggatttctactcctccgctcagcctctctttttagattctcaagccgccgcggccatggatacagctattcacgaagatgattctgaaacagttg

SEQ ID NO: 13064 - DNA, 504 bp, Glycine max
cccacgagtccgcccacgcgtccggggaccgatcaggtcaaagaatgagcttcagaatctgcctcctgttcctcccgtagatgcgattttggaaccacaccatcaaacggtgccagttggaattgttatgtcgactcttggtgctcaagtcatcgtggaaggagtggagaagcatgaccctcttaatgagggttctattctttggtcgactgaaagccgaaaaccactaggtttaattgatgaaatttttggaccagtcaagaacccttattatgttgtgagatacaattctgaaagtgaagtccccacggggatccatgagggaaccttgatctcctttgttccagaatttgctgatcatgtgcttaataacaaggatctttataggaaagggtatgatgcatctggtgcagatgatgaagagttgtctgatgaaatggagttttcagatgatgagaaagaggctgaatacaagagaatgcaaaaaccgccaaagagaggcgc

SEQ ID NO: 13065 - DNA, 1074 bp, Glycine max
gtctcaggatgaacataaccgggatgaacttgctgagaaatctcctgaaagaaagttgtccagtctcacttctccagcagaagtaccattgaactcttcatcctcaactgttcttaaaaaggtgcctgacacttcgatgccaattgacaatacttccctcttcagccgtttctacctttccaaacttgacatttcggtggacttagtactgccagaattgtatgaccagtgcatgtgtgctctgaatattgacaagaatgctacaggtgatgcagttgccaatacagaactattattaaagaatggttcaagaacacgacagaaatatgctgccaccttttcaaggcgttcaccttttccagaaattgataattctatcttccagagagccatagacctttacaagaagcatagcatgaacctacttaacaagggggaggtagatgatattgcggtatccaaccagatgcaagtggatgagtcatttcctattcctagtttggagaatgggcatgtttttgtctcagcatccaatgggataaaagatgtgccaatgcctacattagaatcaggcaaagtggaaactacatctcctgcaaaggagcaattggaagagatcaatcaaacctacggccaaatggagcaagatcatgacaaaactggcatgtctagcccatcttctagtcgtgtgaaccaagaagaaactgtagcaggtttgcaagagaaagagcccaaaatcacttatgataaggtgaattcaggggatgcagaagaggattactccttggcagctaaaaatgaagctcagttggcccatactttgcaccaagagggtgaaaacatagatagcgaagccaaaactactggttatgcccattgtgcagatgaaaagctgggttttggtgacacaaaggttaatcctaatcccttaattgttgaggatgggtctcccaaagcttgtgatgctttgatgcctggctcaaatgagtctgagtcgctaattttaagccggatacatcattctcctgacaggacacattgagacaatttctatatctttcattgctttttatc

SEQ ID NO: 13066 - DNA, 481 bp, Glycine max
atttagattttgacgaaattttcgggattaaagaactggcgttaaaaaatgccgcccagtgcttcaaaatgcgaaaacaatgaagcagcatttttcagaaggtgttcgacctttaacgccgtggcaaactgtatataaactgcaccttttttcgtccattttcttaccataaatattcaattcaatgcttcatcctcatctattgcctattgcattcgtacctccctttgttttcgctattgctgtgtctctcgaggattgtctcaattgagttggtgctgaatccgaggtttattttagctggtgtggaatcatttcaacattatctggaagaagactttcagatttttagtcaaatttaatacttaaagatggggttatacgagcatccagatgttgtgcagtggggtattaatctttttgacagtgaccctgcctatagtcctggatactacagtgacataattcaacatgatactgg

SEQ ID NO: 13067 - DNA, 496 bp, Glycine max
gggattaaagattaaaaaatgccgcccagtgcttgaaaaatgaagcagcagcagtggcagaagatgttcgacctttaactccgtggcaaactgtatataaacgcgtgaactgcaccttttttcgtcctattttcttaccataagtattcaattcaatgcttcatcctcatctattttctattgcattcgtacctcgctttgttttcgctattgctgttgttgctgttgctgtgtctcttgagtattgtctcaattgagttggtgctgaatccgagcttatttaggcacgtttattttagctggtgtgaaatcatttcaacattatctggaagaagactttcagatttttagtcaaatttaatacttaaagatggggttatatgagcatccagatgttgtgcagtggggtattaatcttttcagtgaccctgcttatagtcctggatactacagtgacataattcaacatgataccgttgatgtctataatggacac

SEQ ID NO: 13068 - DNA, 566 bp, Glycine max
ctcttacgtccttcaacacatcacataaccgagcaccttcctctgttctcaaacatatttattcatctttttctccaaaaaaacaaaacagagcgcccggcaccctcctctgttttgaaacagagaacaaagaaccatcgccatgcttgatccgagaacacaccaccccaccaattctttcgaattgtacgacgcaacacgacacaaaccccacacatgggatgttacgaactccggtttgtggccttcgaaaccggctttggaggaggcagaggtagatgattccgggatttgttcacctcccatgaggaccacgagccccccacgccgaaaaaacaaccaccgaagcctctcgccaacgtcgaggacgcaagccatagtgagagggcagagggagctcatggaaatggtgaagaacatgcccgagtccaactacgagctctccttgaaggacctcggtgagcaccacatggttggtgatgctactagacatgaaaaaaacgcggtggaagagagaaacttgagcagcgtgtacaacaagagagaaaaaaatggtggtagtagaa

SEQ ID NO: 13069 - DNA, 384 bp, Glycine max
  unsure (1)..(384): unsure at all n locations
agattgtcaattgtttcatcatccattattttttccgatttgcttatgatgttgttgttttctgttgagatcttctcacttcaaagttgaaacctttctgtgcgcaacaattagaatccctcagcccctcgtctaacgcatactctgttatctaaatttgcattcttttacccaacaaaaccaacccacaaattataacaaaacataacctctcagataaccaccttaaaccggaaaaaaccactatttccccacaattttcgccggaaacccgctattgtgccttgtccctccatacccacgtcaccgataccggttttccgatacccacaagcctcttttctggccccaagtcatttttaatccgtcnttgacgggtttttt

SEQ ID NO: 13070 - DNA, 453 bp, Glycine max
ggaaagtcttcacagcgttcacctgctaaatctccatcaagatctccctctcattctcgctcaaggtcaaggtcccgttcgttatcaggatcacggtccaggtccaggtctccattgcctccgcgtaataaaagccccaaaaaacgcagtgctagcaggagtccaagtaggagcaggagcaggagcaagagtttgtctcggtaagctctgattgttgcaattgaagaagttgtggatgatggtgagtgctaccaagtttttctagtaaaattgacattagccaaaaaaggcatttgggttttatatttgatcttctttttaattgaacttgagacttctgaccctattggcgtcttagttttaatattgaggatttgaaggaccctagatttctgtaatagactgttaaatgtcaaaaacatgtgctatttggttaattatgccagtttattt

SEQ ID NO: 13071 - DNA, 876 bp, Glycine max
gggatttttagatttggtcacatgcccggaaaagttttcacaagggggaccttaagggcaaatttgaagcaaaaaacaacgcattcaacccttaacccccttccaacaaatttccttttcttttcggttttgttttctttcgttttgcttaagttcttaagaaccttaacttcttgatatcaaggattaaggagaaaaaatggaatcctaaaaggttgctggattcggggggaaggccttcgtcacattctgcaacggtctcggctctggctgttgctatatgtctccaagaaggggcagggtcacccgcctttgctattgcagtggtcttggcatgtattgtgatgtatgatgccacgggagttagacttcatgcaggtagacaagcagaattgcttaatcaaattgtgtgcgaacttcctccagaacatccttgttccaatgttagacctctgcgtgattcacttggtcatactccacttcaggttgttgccggtggcacattgggatgcattatagcatttttgatgagaagatcaagttaagatgctatgtgatgtgactgatactaatcctctaccttgtaaaaattgtcggtacatggctgaaatgagatcatcatggaaagggcataaaagccttctgttgcaagtgagtaaagtgcgttgaaggctcaccttgaagatcctgtgtcctgacttatggacattcagacttctcttgtacacaggaattaatcggtttgttgattctgtcttaattgatcgttcaacacattttgagatcacactggctattctttgacttattttttcacctattgttgcaaatcgaaacttggaaggcccctggcacggaggttgcattttgtgtttc

SEQ ID NO: 13072 - DNA, 423 bp, Glycine max
cggacgcgtggggcgcccgacacgcaccggatacgtgttggacacgcactcgctgtgtgcagggtgttgccggtggcatattgggatgcattatagcatttttgatgagaagatcaagttaagatgccatgtgatgtgactgatactaatcctctaccttgtctcaaatgtcggtgcatgaccgaaatgagagcatcatggaaagggcaaataagccttctgttgcaagtatgcaagtaagtaaagtgcgttgaaggttcacctggaagatcctgtgtcctgacttttggaaattcagatttctcttgtacacagtaattaatcggtttgttgattctgcttaattgattgttcaaaacaatttgagatcacactggctattctttgacttattttttcacctattggtgcaaatcaaaactt

SEQ ID NO: 13073 - DNA, 422 bp, Glycine max
  unsure (1)..(422): unsure at all n locations
ggcttgtctgcgtagactcaatcatcagcagagaagcaaggagtaggaggtggagtgcgggcgagggtaacttaccaaccctaaggagttgttgagtttggtacatgggcggagaagtgttgacgatggcggacgtcacggccaacttgcaagcagcaaccaccgcatccaccccttacgcgcttcccaccaatctccctctcctctccgcttttctctccttcgctctcgctcagttcctcaagatcttcacctcctggtataaggagaagagatgggattctaaaaggttgcttgattcgggtggaatgccttcgtcacattctgcaacagtctcggctctggctgttgctatatgtctccaagaaggggcagggtcacctgcctttgcgattgcaatggtcctggcatgtantgtgaag

SEQ ID NO: 13074 - DNA, 479 bp, Glycine max
atcagactggggattggtattatcagagtctgaatctacaaattcaaaatctgtaaatagtgtcagctcttgcaagtcgaagggtgtccatgtggttcctttggaagagagtggtatctcagaggaatctgtggaaaatggaactgaaagtgtttctgcacaagaggaagacactgagcagtattttagctttctgaaagtcttgactgaggggaacaattggaggaagcaatgtgaagtagtagaacagttaaggctgctgctgagggatgacgaggaagccaggatttttatgggggcaaatgggtttgttgaagcacttttgcagtttttgcaatcagctgtacgtgaaggtagtttgatggctctggaaagtggagcaatggctctcttcaacctggctgtgaataataacagaaataaggaaattatgttatcggctggagtattatcattgttggaggtaatgattcctaaaa

SEQ ID NO: 13075 - DNA, 533 bp, Glycine max
cagaagtgtatgagctcaagacattttctgaattgcatgtagctgaagaacaactaactggtgccaccactagagaagcatgtgttaggataactaataactggcacattggcacacatggggatatagcatccagaagggcacttctccaagaagcaaatggtgaaaagaggggtgatgatgacacagaaactctttcaccatcaccttttccctctacactatcaccagttcctgagcctttctcaccatccgagagtccctcagattcaccaatatcatctcctgaagtttccccttcaccatccccatctctctccactttctttttcactctctcaccctcaccttcacctgaggtagcaccaactccagacttgtcacctccagcaaatccacctatggttgtgtccacaccaccacagtccaattggggttcaatgccttctcctgcttcatcttcaaaccaagggaatgcatacagttcaaatccaaagcaacataccgcgattatttggtccacagttggggga

SEQ ID NO: 13076 - DNA, 1140 bp, Glycine max
atcaggttccctaagtcttcgtattgctccatagtctagtcgtctctgaagactgaagctctcacaaaaaaaaacaaaaaaggcttaccttagcgtgttatttgtttgacccggtgaatatctttctcttatgtgtgttctcatcacaattcatgaaacacgctctcttctttcccatcatcactatttctgattctctctctcccttggtctagtcttcctttgttatgccttgccctttccttcgggcaaagtggtgtttccatgttgtttctgagtttacttcctcaatatcccaggatatgtgtgtgttcttatgaaggttgcagtgctaaggagtctatagattttatgctgcagcttcattagataccaattttggtgaatttttcttgataacttgttcttggatttttgttttgtggtgttgatgaagatggctatgggtggcctaatttccggtgctggtgttattattgttagtttctttctgctgattctctgtggcatggtttgtgggactgagagtgatatattctgcttgaaaagtgtaaagagaacacttgacgacccctacaattatttgcaatcctggaatttcaataacaataccgaagggtatatatgcaagtttactggggttgagtgttggcaccctgatgaaaacaaggtcttgaatctcaaactgtcaaacatgggactcaagggccccttccctcgcggcattcagaattgttcaagcatgacaggattagatttttcgcttaacagactctctaaaaccattccggccgatatatccacacttcttacatttgtgacaacccttgatctttcttcaaatgattttacaggggagatacctgcatccctttcaaattgtacctatcttaatacaattagacttgaccaaaaccaactcactggtcaaattcctgctaacttgagtcagctcccgcggcttaagttgtttagtgttgccaataatcttttgacagggcaagttccaatctttgcaaatggtgtagctagtgccaatagttatgcaaataattcaggtctgtgtggtaatcccttattggatgcttgccaggccaaggcttcgaagagtaacacagctgttatagctggagcagctgt

SEQ ID NO: 13077 - DNA, 769 bp, Glycine max
gctcaattctttggaatcaggggcggaagagatcgactagttcgttcattgttcggtagctctaatgatcctccaaagttgatatttactgctggtgggaagcagcttaataggcatctgactatatatcaggcaattcaaagacagcttgtgctagatgaagatgatgatgagagatttgctggcagtgactatgtatccagtgatggaagcaggctgtggggtgatatttacaccatcacttatcagagggcagagaaccagccagatagggctccccctggaggttcaacctctaatgcttcaaaatctgccaaatctgggtctgcattgaattctagctctgaagccaagctgaatcagacatctgtattagatagtattttgcagggagaattgccctgtgaactggagaaatctaatcctacatacaatattttggcattattgcgggtgcttgagggtttgaaccaacttgcatctcgtttgagggcccaagtggttactgatagctttgcagagggaaaaattttggatttagttgagctaagtgttaccagtggtgctagggttcctacagaggaatttataagcagcaaacttactccaaaattagctaggcaaatacaagatgcccttgccttatgtagtgggagtcttccctcatggtgttaccagttatctaaagcgtgcccttttttgtttccttttgagacccggcgacagtatttttattcaactgcctttgggttatctcgtgcattgtatc

SEQ ID NO: 13078 - DNA, 1170 bp, Glycine max
gtaataataggtgaggaagggtttgtggggggtggggttggagcatccatttgtggatgtgaaggaataggaggttgttttggggtgaaatgagggatgctatcaaggttgatggactttctgactgcctgctggcggcgaagatccttctccgacggcaagggtggttccgaggttacggggcggaaggaagggctgctgtggtacaaggatgcggggcagcacttgtttggtgaatactcaatggctgttgtccaggccaacaacctgctcgaggaccagagccagattgagtctggtcctctcagcctgcttgacactggcccttatgggacctttgttggtgtatatgatggacacggtggacccgagacgtcgcgctacgtctgtgatcatctcttccaacatctaaaacgatttgcatctgagcagaagtccatgtctgaggaggttattcggaaggcataccaagccacagaagaaggttttttgtcagtggttaccaaacagtggcccatgaatccccaaattgctgctgtgggatcttgttgtttggttggtgtgatttgtggtggtatcctctatattgctaaccttggtgattcccgtgctgtgcttggccgggtggtcagagcaactggggaggttttggcgatccagctttcgtcagagcataatgtggccatagaatctgtgagacaagagatgcattctttgcatccggatgactcaaaaattgtggttctaaagcacaatgtatggcgggtgaagggtctgatacagatttctagatccattggcgatgtttacctaaaaaaggctgaattcaacaaggaaccattgtatgctaagttccgtgtgcgggaaggttttaagaggcccattttgagctctgacccatcaatttccgttcatgaaattcaacagcatgatcaatttctcatatttgcttctgatggtctttgggaacaccttagcaatcaggatgctgttgatatagttcaaaacaacccacacaatggaattgctcggaggctcatcaaagctgctttgcaagaagcagcaaaaaaagagagagatgaggtactctgattagaaaaaaattgaccgtggtgtccgccggcatttccacgatgacatcacaggtgtagttgtatttcttgactccaa

SEQ ID NO: 13079 - DNA, 613 bp, Glycine max
accaggtggggagcggagcaaaacagagaagccaactttttctaaaagctccttcacctagcctttttttaaaatgcaacccgttttccctttttctttataaaaattaatatacttaaatttttaagagttttttataaaatgtgttggccaaatttcttcttttttggagaaaaaaaaagctagaccaaacattaccttaaacttatcatgtataatacaacttagtaatgaaatttttgtgtggcagatttctagatccattggcgatgtatacctaaaaaaggctgaatttaacaaggaaccgttgtatgctaagtttcgtgtgcgggaaggttttaagaggcccattttgagctctgacccatcaatttccgtccatgaacttcaacagcatgatcaatttctcatatttgcttctgatggtctttgggaacaccttagcaatcaggatgctgttgatatagttcaaaacaacccacacaatgtaagataaatgtactatatggttgtttctattttgttttatattttgcattttttattgcttggttactgtagttttgtccagtcataatttacatgcccccaatcatttcattaaatttcaaat

SEQ ID NO: 13080 - DNA, 1606 bp, Glycine max
tttagattaaggaagtggaataaccaagaacaagagattttaaaaaaagaaaaacaaattaaaaaagcaagagagagaatagatagaggatgatggtgagcacatcctctgtttccattcccagttttttcctttcctcttcctcccattgaagcatttttcacaagcccgtgatttttccgccatctccatcatcgaatgattttctggttcgggttttgattgatgctcggaagatccgatgctgctagatcgaatttgacaaaacccacttcgtgtctgatcgaagcaacaactgggttctgtctgaattttgagataagatggaatcggatcttggcaagctcttcattgggggaatatcttgggacactgatgaggaacgtctaaaggaatattttgggaaatatggggaggtgatagagactgtgatcatgagggatcgagtaaccggtcgcgctcgcggctttggttttgttgtctttggtgatccttctgttgctgagagagtcattatggataagcacataattgatggccgcacagttgaagcatagaaagctgttcctagggatgatcagcaaaacattaataggcaatctggtagtgcacatgtgtctcccggtcctggacgcacaaaaaagatttttgttggtggtttaccatcaactatcactgaaagtgattttaagacgtattttgatcagtttggtacaattactgatgttgtagttatgtatgatcataatacacagaggccaagaggttttggcttcatcacttatgattctgaagaagctgtggatagagttctttacaaaacttttcatgaactcaatggaaagatggttgaggtgaagagggcagttcccaaagaactttcccctggtcccagccgaagcccgttgataggatataactatggtttgactagggccagtaactacctaaacagttttgcccagggttataatatgagtccaataggaggatatggaatcaggatggacggtaggtttagtcctcttactagtggtagaagtgggtttactcctcttggcaacactggttatggaatgggagtgaatatggattcaggattgagcccaaactttggagggacttcaaactatgggagcaatgtaggatatggtcgaatatttagtcctttctacagtggcaactccggccgatataccactcctataggctatagtgggggtaatgggagaagcgattctcttatgaattcaccttctcggaatgtatggggaaatgggggcctcaataatgccaataaccccatcagccccagtcctttcttaggatctggaagtggggcttttggtgtttcaattggaaatagtggcacaggttggggtccatcacttccagcccagggtagaggggctgcttctggctatggtactgggaataatgtttatgaaggtgcagatagcagctttggattaggtggggggagggtacggatggatacagcagtactggtgtggctccatcctcttcatttaatgtgtcaactggtgggtatgaaagatcctatggggacttgtaccgcagtggcagtggctccgtttacaatgac

SEQ ID NO: 13081 - DNA, 618 bp, Glycine max
ggtccctagtggaagcaagcaagcaacaagataagaaagcaaagaaggagagagagaggatgacaccacatcctctgttttctttcattcccattcttagttttccctgccattcaaattttcacatgacctctcattattattctttttattattattagttcttttttgtttccatcaccaaccaacctctcatctttggatggtgaattccccatctgagttcctttgatctcttcgccttctctcaatttcttcttctctgatcccagcaaagaaaagaaaaaaaaaacaaactaaaaaaaacattagaaacaattgttttttttaaaaaaaaacatagctgcttggttttccctctttgctggattagatattttggttcagtttttattattgatgctcctaagatccgattctcttagatcgaatttggcataacccacttcgtatctgattgaagcaccaactgggttctgtctgagattcaacataagatggagtcggatcttggcaagctcttcattgggggaatttcctgggacaccgatgacgaacgtctcaaagaatattttgggaaatatggagaggtgatagaggctgtgatcatgagagatc

SEQ ID NO: 13082 - DNA, 437 bp, Glycine max
ccctcgcgtccgggtgcttggatttttatggctgcattggattaagcttgaactctttttgcttataggacaggaagctgacaatgagttgcagatttgatccgcgtgtgttgcgctgccaatttgcaggtcgaagccaagaaagctgttcctagggatgatcagcatactataaacagacagactggtagcatccatggatctcctagtcctggacgcaccaaaaagatttttgttggaggtttaccatcaacaatcacagagagtgattttaagaagtactttgatcagtttggtacaatactgatgttgttgtaatgtatgaccacaatacccagaggccaagaggttttggcttcatcacttatgattcagaagaagctgtggacagagttctctataagacatttcatgaactcaatgggaagatggttgag

SEQ ID NO: 13083 - DNA, 809 bp, Glycine max
  unsure (1)..(809): unsure at all n locations
ctcgagccgctcattcctaaagcctcaacgacaacgcgagaaggagctaagagagagaacacacccaacacaacacaatacaatcgatagtttccgattcttaaaaaacccgaaagtacgaggtgatgttcgaatggagccaaacgaggagaacggaggcagcacgagcagggaggaacaggaagaggcattggtggctttgattgaacaccgaacccacgaagtcaaaaaccttcgtcaccgcatcgcttattataaaacccagcttgatgaagcggagaaaaggttgcaagattctgaatccaaattggctcgccttcgaggtcagacagtgtcatctagaagtaccttagatgatggaatcaaaactttaaagacagagcgcagatcaaatagtcccattgatagaaacgaaggttctaccaaaaaccgacatcaatctaaaccagaacttcttattccttcactgaatccaaaaatatcacaacctgtattgttgccaaagtcttcttcaaaagcttcaataacttccagttctgaagccactcctggagtccataattctcctatcacgggtggtagctctaggggaaaatctgacaagtctcagagtaatagactttcttctgagcagcanaaaactgaagtcaaggagaaagggacaaaaaggaaatttgaacaaaaaggacacaaggaattgattcctttagtacgcaagagttcttcaccaagcttggtaacctgtcaaacaagcaaccacatctcaagtcaacacaagaggaaattgcggagtantgctttgtgtcctg

SEQ ID NO: 13084 - DNA, 1336 bp, Glycine max
ttcacccgaggatgattcttatttgacgcatgaccttgatggcctgacacataagataagagagctggaaacggctatgctgggacctaatgcagatatgctagatatctatggtaccgtaaatccagaacctgattcatttttgttagaggctgagaagtggaagaaaatgatggaaatatcatctagaggggatttgaaagagatgctttatatgtgtgcaaaagcaatggctgtgaatgatatggagacaactgattggctggtgtctgagttgcgtaagatggtgtccatttcgggcaatccgattcagcgactgggagcatacatattggagtcctttgttgcaaggatggctgcttcaggaagcacaatctacaagtccttaaaatgtagtgagcctactggtaatgaactactttcatacatgcatgtgctttatgaaatttgtccatacttcaagtttgggtacatgtcggcaaatggagcaattgctgaagctctgaaggaggaaagtgaagtccacatagttgactttcagattggccagggaacccagtgggtgagcctgattcaagctcttgctcgccgccctggaggccccccgaagatccgaatatccggtgttgatgactcctattcggcctatgccaggagaggagggcttgatattgttgggaaaaggttatccgcacttgcacagtcatgtcatgtgccttttgagttcaatgctgtaagagtacctgctactgaggtgcaacttgaagaccttgaacttctcccttatgaagctgtggcagtgaacttcgccataagtctgcaccatgtgccagatgaaagtgtgaacagtcacaatcatcgtgaccaattgttgagattggcaaagcgattatctcctaaagtggtgactctggttgagcaggaatttagcaccaacaatgcgccgttcttgcagcgcttcgttgagacaatgaactactacttggctgtttttgaatcaatcgatactgttcttccaagggagcacaaagagaggattaatgtggagcagcattgtttggctcgcgaagttgtcaacttaatagcatgtgaaggagaagaaagagttgaacgtcacgagcttctgaataagtggagaatgcgtttcacaaaggctggatttacaccttatccattgagctccgttattaattcttcaatcaaggatcttctgcagagctaccatggacactacactctagaagagagagatggtgcactatttcttggttggatgaatcaagttcttgttgcatcttgtgcttggagatgaaaatcctataacagttcatttttg

SEQ ID NO: 13085 - DNA, 783 bp, Glycine max
cccacgcgtccgggcagcttctagaactatctcttttccagtaccaaccttagcccaactgggtggcacaacacaacacttgttttcttaaaagttcaaactgtctgagttttgcagaatccacggagctaagaatgaaattgtagaagaagaagcactttcacagaaaacatgaaagggttaggtcctcatgcccctttggtttcaaggggaaagcttcctccttcgttggcagtagtggatgccttgccaacatgctcttcttatttctctagaaccaccgtcctatacccattaagatgcagacaaaaatcaaggttgagcttggcccgtggcacaattcgagcccaagcatccaatattagtggtgttgaacctggagattatggaagcaatactgagaaagatggtcagaatgtatttgaagggaatgttatcgaaggcagttcttctaatgttgtaaaacctcctgatcggatcccttatcctctctctatagcttttgtgctgttgggatgtgcacttgtgttttcactaatagcctttgtgaaaggagggccttcatcagttctagcagcaattgcaaaatcaggattcactgctgcatttacattaatatttgtttctgaaattggagacaagacattctttattgctgcactcttggcaatgcaatatgagaaaggattggtcctattgggatcaatgggtgcccttgcactcatgtcaatcctctctgttgtaattggccgaatctttcaatcagtgcctgctcagtttcag

SEQ ID NO: 13086 - DNA, 617 bp, Glycine max
aagtcagctttgttgaaatcaagggagttacatattgtggctcgtcgactacgtcaaaattgacaatggataatgtcccttggcatgctgatgtgaaagctttttctgaggccctagctttgaaaagccaaggagagtatgaagttgcatgtgagcatgctcactcgtgctgtgtcctcttagcaaagactaataagttcaaaattgatggccagtggtatacatggatagactatgaaaaatttcatgatctggtggcatctggaagaacttttgacagcagagattacatggctgccacaccatcgtggtccgtctatggatcagaggaaggtggatttgatccaggacaattgagatacaggatagagagacatcacaagtctacccgcaatcaagcaggttagacatttaagagcctttggcagccaacactcattttcctgttgatcttttttcttcagtgtataactctaggttatacaacatacttcaataggacagttttgtaatacatggcttcacacataggttagtaccatttctgtgtatttaagccccattgttttcccaatcagcagttgaatgaacagaacattttttcttatttaccacaa

SEQ ID NO: 13087 - DNA, 522 bp, Glycine max
agtcaaaatcaggctctacgaagggagggtttctcggggtccacttactggaactccggtaacttttaaggtttatcctggaaggcgagctgggggagtcgtggctgatgcactcgctgcaaatgagttgaatacacacttgtttcttcagagcagttctaaaggtattggtcagaatcttgtgctgcttgtaggtgggtttgaaacaacgactggagagcagactatgcaaaacttgcaagtgagagggtatcgagagatcgagaagggtcatcctggaacccctttgagcaaggactgacaaccaaaaggagacaaaattttatgcataaagatgctccaaggtgtcatgaagggtctagcttacttgcatgaccacgataggttgcaccagagtctaggaccgttttctgtggttctcaacacaatttcagaaagagaaggttcttatttgattccaagactccgagatctagcattttctgttaatgtcaggtacacagaactagatgattcgggaca

SEQ ID NO: 13088 - DNA, 2063 bp, Glycine max
cccacttttccgctctggtagtaatgctgatgagctctcaaatgaaaattctgcacgtgctgaaaagacgaaatattcatttatttgcgaatgcttctttatgactgcaagagtgctcaacttaggccttttaaaagcattttctgacttcaaacacttagttcaggatatttctaggtgtgaagatgctctctccacacttaaagccatgcaggagcgaacacccactcctcaggcagaattggatataaatcgacttgagaaagaaatggaattgtactcacaggaaaaactatgttatgaagctcagatattgagggataacacacttattcaaaatgcgctttccttctaccgcttgatgattgtttggttggttggcttgctgggtggattaaagatgcctctaccaccaacttgcccaatggaatttgctaccatgcctgaacattttgtggaagatgccatggaacttttaatatttgcttcccggattccaaaggccttagatggagttgtgctggaagaatttatgaactttataattatgttcatggccagccctgaatttatcaaaaacccatatcttagagcaaagatggttgaagtattgaactgctggatgccccgcaggagcggctcaactgctacagccactctatttgaaggccaccaactctctcttgagtatcttgtgaggaatcttctgaaactctacgttgacattgagttcactggttctcacacacagttctatgataagtttaacatccgccataatattgctgaactcctcgaatacttgtggcaagtccctagtcatcgtaatgcttggagacagattgctaaggaggaggaaaagggtgtctatctgaatttcttaaactttctgattaatgatagtatttatcttcttgatgaaagtctgaacaaaattcttgagctaaaagaattggaggctgagatgtcaaatacggttgagtgggagcgacgaccagttcaagagaggcaggagaggacccggttattccattctcaagaaaatattattcggatagatatgaagttggcaaatgaagatgtcagcatgcttgcatttacttcagagcagattactgctccattcctacttcccgagatggttgaaagagtggctagcatgctcaattactttctgctgcaattggtgggtcctcaaagaaaatcgcttagtctgaaggatcctgagaaatatgaatttcgtcctaagcatttgctaaaacagattgtgcacatatatgttcatctagctaggggtgacacgaattccatcttcccagctgccatctcaaaggatggccggtcatacaatgatcagttgtttagtgctggggctgatgtccttcacagaattggcgaggatgggagaattatacaggaatttattcaacttggcgctaaagctaaagttgctgcttcagaggcaatggatgctgaagctactctaggggagataccagatgaattccttgatccaattcaatacacattgatgaaggatccagttatcttgccttcttcaaggatcacggttgatcgtcctgtcattcagaggcatcttcttagtgatagtactaatccattcaaccgttctcatcttaccgcggatatgttgattcccgacgatgagctaaaagcaagaattgaggagtttgtcaggtctcaggaaatgaagaaacacttaagcctacagagcaccaaggccacaattcagactacaaatggggaaacaatgttgattgattaggaaaatatcttgagtttcctaagttgtcgaatgaaatatggattcgggccatgcgcataaagttagatgttgaaccttaacttaatcttattcaatcatttttggaaaaaattgaagctatcattagaattttaaggctgtaaagatatttggaacagttaatgtaaagaagtcatccattgaatactacgatatatatcttattctatacacagatatggaacaatcttgatcgattaatgcccttaataccatgaacttaaaaattcatcttgac

SEQ ID NO: 13089 - DNA, 411 bp, Glycine max
agttcttttccttggtgatggttcggaagatgggaaagtcccacctgggtcactctgcatgatctcgcacaaggaaaaggaggtactcaatgctctagacgatgccggctttccagcaaacgatgaggaggttcagcaagaagtggttgcaatgtctaaaacaaatatatttaggcccgggattgatgttacacaggcagttcttttgcctcagttgacttggaggcgacaggagaaaacagaaatggtagggccttggaaagctaaggtgtatgatatgcacaatgtagttgtgagcataaaatctagaggagttcctggagccatgacagatgatgagctcttttcttcttgcaatgaacatgaaacagagagtgaagagctcaatgatattttgactgaggatgaaag

SEQ ID NO: 13090 - DNA, 474 bp, Glycine max
gtcctatggaagtctatagctaaaccagctttgaggatatcacaagctgaagaaccattgaattttaactaaccaaactaataagcaaaaatgttggcggtgtttgcaaaagccattggaaaaccaccggaggaactgaggcttccggcaatggggtccaataattcaaagaccccagaagaaattgtacagaaatttcaatctttgtggccagattctgcagtttacaaccttccacatgggaattttatggctctgtctcatgaagatgaaagtccaatacaccccaggtgtattgttgttttggatgatatcttctgcatttttatgggagctctagcaaacatagctgagcttagacatcattatgggctcccaagacaagcaacagaagccatgattgtgattgaagcctataaggccctaagagatcgcgctccctacccacctgaccaagttgctaaacatcttgat

SEQ ID NO: 13091 - DNA, 538 bp, Glycine max
aggagaaatttgacgttttcagagaattggaaactggagacttcactttcattcgatcaatcatgataactcgatacgccgattccgcctcgaaatccgcaacccctaaggaagacgccgccgaaggaaatcccctgcggccaagcgcaccaccgcgacgaaggccagagccactaaaaagaacgagctctcgcccgcagtcgattccaaacccgatcaatctcctcgatttcaggtttctttcatccatgacgatgttgtaattgtggaacagagatcgttaggtagtgctagcagcgcaaaatctgtgaaaaagaagactccggggagatcgagaagtacagcaatcagtactccgaattcggaagagcaatgtgaggcagtagctgatgaaactccaattgaagatgataccgaggtagcagagaaagtggaagatgttggagtggttgatgcagataatgttgagggtgagaaggaggggggaaaaggtgttggttctgttggattgtctgatgagacggatcgtaagtcgatg

SEQ ID NO: 13092 - DNA, 363 bp, Glycine max
agcaatcgcgatgtcaagtatcggtactggatctcactttcattcgataatcatgagaactcgaaacgccgattccgctgctccaaatccgcaacccctaagaagacgccgccgatgaaatcccctgcggccttgcgcaccaccgccacctaaaccagagccaccaagaagaacgagctctcgcccgcacccgattcctaccccgatcaatctcctcgtggaacagaaatcgttaggcagtgctagcagcgcaaaatctgtgaaaaagaagactccggggagatcgagaagtaaagcaatcaatactccgaattcggaagaacaatgtgaggcagtagctgatgaaactccaattgaagatga

SEQ ID NO: 13093 - DNA, 811 bp, Glycine max
agggaatctgaaaaaaatgatgatatggctgctcaggatcatgctaagcagtctttgaagcaaaaaaatgagtctgaaaatgatgctattatggtgcccaagaacagaggtttatgttcaggtgcgactggtcttgatgctgaatacgtggaagagaattcaggtacaaaagaggtttgtgaccaagttgcaggagcaggacagatactgcacacagatttacctagctttccttcacgagaaatggatcagcgttcaggtcatagggattcaaaattggctgccatggaatcagaggaagcagaggaatgcacctctaccactggagatacctcttctgcgtctgttgctggtgtctcagaagtggacacaaaagttgaatttgatttaaatgaagggttcaatgcagatgatgggaaatgtagtgagatgcctgggtctacacctgctgcaagattggtcagtcctgttccattttctgcttcatccatgtcttttggtattctctcgatcacagtagctgctgctgcaaagagcccctttgtggcacctgaagatttattgaaaagtaaaaaggagcttggttggaagggatctgctgctactagtgcatttcggccagctgagcccaggaaagttatggaaattcctcttgatatgtcaactacccctattcctaatgatgaagctagaaagcagagccgggcaccattggattttgacttgaatgtttctgatgaagtaatacttgatgatgtttcttcccaaaattgtgctcgtcagactgattgtggaactcattcagacaatg

SEQ ID NO: 13094 - DNA, 1251 bp, Glycine max
ccctttcgtgcgtttcattccactcattttctttctgcttcgtcgttcacttcagaatccaaaaacagtctaaaaaagaataataataaacagcgaagttacgaagattctgtagagaagaagagcaatggcgtccaacgattccgattcgcagatgaagatcgtacatggcgatgctggttacatacttgaagacgttcctcacttcgccgactatattccaaatcttcctacatatccgaatccgcttcgatccaatcctgcttactcggttgttaagcagtatttcgtgcacatggacgacactgttcctcagaaggttgttgttcacaaggatagtccaagaggtatacattttcgacgtgcagggcctcggcaaaaggtatactttaaatcggatgaagtgcatgcatgcattgtcacgtgtggtggactctgccctggcctcaacactgtcataagggaaattgtctgtggtctttcctacatgtacggtgttaacaaagtccttggcatagatggtggttatagaggcttttattccaaaaacaccattactttaacacctaaggtggtcaatgacatccataagcgtgggggtacaattcttgggacatcccgaggggggcatgatacgggcaagatagttgacagcatccaggatcgaggaattaatcaggtttatattattggaggagatggaacacagagaggagcgactgtgatttacgaggaagttagacggcggggtctgaaagtagcaattgctggaattcctaaaaccatagacaatgacatcccggttattgacaaatcttttggttttgatactgcggttgaggaggctcaacgtgccattaatgcagctcatgttgaagctgaaagtattgagaatggcattggtgttgtaaagctaatgggacgttacagtggttttattgcaatgtatgccactcttgctagcagagatgtggactgttgcttgattccagagtcacccttctaccttgaaggaaagggtggactttttgaatttattgagaaaaggctgaaagaaaatggacatatggtcatagtcatagccgagggagcaggacaagatcttcttacagaaagcatgcaagccatggatcagaaggatgcttctggaaacaaattacttcaagatgttggtttatggatatctcacatgattaaggatcactttgcaaggaaggataaaatgcccatcaatcttaaaatatatagaga

SEQ ID NO: 13095 - DNA, 251 bp, Glycine max
gattctgtagagaagaagagcaatggcgtccaacgattccgattcgcagatgaagatcgtacatggcgatgctggttacatacttgaagacgttcctcacttcgccgactatattccaaatcttcctgtattttctctctctctctctctctttaggagttcttcgattacatatgcgaactgcattgcattgacgcattcacttgcggatcgtttgtgtactacttttttttttttgcagacatatccga

SEQ ID NO: 13096 - DNA, 558 bp, Glycine max
acaacgcgtgggcggacgcgtgggcggacgcgtgggtgtcgatgtcagttccatgttcatagttaggaaaaacggcaaaacttcactgcacaatgctgctaggtatggtgtccatcgtattgtaaaaacacttattgctcgggatccaggaatagtatgcatcaaagataaaaaaggtcaaactgcactgcatatggcggttaaaggacagtgtacttcagttgtggaggagatattactagctgatccttctattttgaatgagcgagataagaagggtaatacagctcttcacatggctacaaggaaatgccgttcacagatagtgggccttttgctaagctattctgctgtggatgttaatgccatcaacaagcagcaggaaacagccttggatttggcagataaactgccatatggagattcagctttggaaataaaggaagcccttgcagaatatggtgctaagcatgccaggtatgttggcaaagaagatgacgcaatggaacttaaaagaactgttagtgatataaagcatgaggtgcagtcacaacttat

SEQ ID NO: 13097 - DNA, 586 bp, Glycine max
tttataacagcggtggaaggtctccttctctctcaatccacaaggatatataacagcgctagctcttgttaaattcttctctaccttactactccctcactttgtgttagaatcatcatgggtttgcaaaaccaattaaacgacgtgtcgtcgggttcgattccgcttctggtgttggcgcagatagccacctgcgtcaactacctccgctccatgcttttcgcgcttttgcaaaccctaggtctcagccgattccactccgaccagatcgtcgacgagcgcttcctcgccgccgtcggatccggcctcgccggacttatcatgctctccgatcagctcaccctcagcagccaattcttccaccatcaccacggcaccgccgccggccacgaccacgaccacgaccaccacccctgcgtcgtgtgccaggccaccttcgaggacggcgaccaggtccgcatgctccccttgccgccacgtcttccaccgccgatgcttcgacggctggctccaccactacaagttcaactgcccactctgccgctctccgctcttctccgacgagcgcgtggcactcacggagcgc

SEQ ID NO: 13098 - DNA, 253 bp, Glycine max
gcgacacgatacataacaccgctagctcttcaattcttctctccctcactactctctattccttagtgttcttcaattcttcatcgcagacttagaatcatgggtttgcaaaaccaattaaacgacgtgtcgtcgggttcgattccgccgctggtcttggcgcagatagcgacctgcgtcaactacctccgctccatgcttttcgcgcttttgcaaacccttggtctgtgccgatttcactccgaccagatcg

SEQ ID NO: 13099 - DNA, 651 bp, Glycine max
cgtccggtgagtggccgtttgaagtttgaagtttgaagtttaaacatagagaaacgaaattgaatgcaacccaacaaaacacattaactcccatttccattcattcatcctcaaactttttttataaaaaaaccaatcttgctcacctcggagagagagagaaatagaatgaccggagtggtcatggtgaccaagggcggtggatgcggcggcggcgggaagcggacgaggtcggcgcgaaccgccgaggaggaagaagagcagcagaaccagctgtcgctggtggcgcttctcttggcggccatcagaaaatcgatggtgtcgtgcagggtggacccacccgacgacgtaatctccaccgtccatcacatggagatcggatggccaaccaacgtccagcacatcactcatgtcaccttcgaccgcttcaacggcttcctcggtctcccctatgagttccaagttgagatccctgctagggttcccagtgctagtgtaagcgtgtttggggtctcagcagaatctatgcagtgttcttatgatccaaaaggaaacagtgtccccactattctcttgctaatgcaggaccgtctatactcacagggaggcttaaaggctgaaggtatatttcgtattaaccctgaaaatagt

SEQ ID NO: 13100 - DNA, 1218 bp, Glycine max
tccaaatccaatttcaatatgatacggattcccacttgttgccgcaatcacacaacatatttccttcttctttctctgccccttcgtgatttgctaagtcatactctctctccactgggtaaacatgcttaattctgaaggagatcttaaaataagttttggctataaatgcaatagcgatagaggtattccttgtgaagttgccagtggctgcaaaatccttcctggagtatgtagaacaagcagtttctcctgcttgtcaggtgcagccttaagtgcatatgctacattagcaaacacaaacatctgcaatggtaagataggagaagaaatccttccaagttgggactctcctacttcatttcgaaaggtaacctcttcgccaagtctttcaaagttggacatactatcatcctcccccccgaatagtttgtcttaccttagctgcagtccttctactgtaagtgatatccttgaatatgactcttgcacattaaaatccatgagtgatccttccagaagtgaaggttttcttaatgctaaggaagttcaggtagcaggaggagctgctggtgaagatagagttcaagcagtttgttctgaagaaaatgggtggctattctgtgcaatatatgacggctttaatggaagagatgcagctgactttctggctggtaccctgtatgaaaccatcatatcttactttaataagttaatttgggaattggagccgggttccatcaaagcttatgataaaggatgcttgggtggatccctgcaatataagttggatgatagtcttatttatcacgagaatcaatctctgtcgagatttaagggaataaacaattctaatcatggttgttttgcaaagtgtaatccttctactaagtcagaagtatcatgtgattcattttcacatggggtacttgatatccttcaacgtgccattagtcaggctgagaatgatttcttgtacatggttgagcaggaaatggaggaacgtcctgatttagtttctattggatcttgtgttttacttgtgcttcttcacggtaatgatttgtatacacttaatctaggtgacagcagagcagtattggcaacatgcggtacagctgatcggatggataagagtgagagactcaaggctatacagcttacagataatcatactgttgataataaagttgaaagagctagacttctggctgatca

SEQ ID NO: 13101 - DNA, 571 bp, Glycine max
atccgaagagttcacgcagtttgttctgaagatgagtggcttttctgtgaaatttatgatggctttaatgggagagatgcagctgactttctgataccctttatgactttatcatatcttattttaagatgttatactgggatttggaaccagattccctaaaagcttctaacaatgagagtatgggtggatcctttcaatataattttaatgatagtcttaatcttcaggagcgtcaatctctgtcaaaaattaagggaaacaattctagtcttgactgtttcacagacagtactccacattccaattcagaagcatctcctaaatcattttcacaaactacagtacttaatggcctccaacatgttcttagtcaggttgagaatgatttcctgtacatggttgagtaggaaatggaggaacatccagatttggtttcgattggatcttgtgttttacttgtgcttcttcatgggaatgatttgtacacacttaatctaggcgacagtagagcagtggtggcaacatgcatcacagataacagtttgaatgcgaatgagagattgaaggc

SEQ ID NO: 13102 - DNA, 490 bp, Glycine max
cccacgcgtccgcccacgcgtccgggagagaccattcaatataaggacattggctcaactttcagtttttgaggcagatgtgtaaatctgactcaagaagactgttagttggtaacatccacgtactttacaacccaaacaggggagaagttaaattaggtcaaattcgttttctcttgtcaagagcacaatacctctcagagaaatggggtaatacccctgttgtgctagctggtgattttaatagtactcctcagagtggaatatataagttcttgtcatcatctgagcttaatgtcttgctgtatgacagacaggaattatctggacagaaacgctgtcgtcctgcccaagttttaggcgagaatatacaaacagttggtccgattgtcgcactagatgggtttatcccagtatgatgctctcaacctactgtttccagcttgtttaagtgctggacagatgaagaggtaaaactagcaactggagt

SEQ ID NO: 13103 - DNA, 492 bp, Glycine max
atttacgtgtagtaaattctatggataccatggcatgtaataaagggcaaaccgtgagaaatgcgaagaagaagcaggtgaaagacgagttggatcgtcttaaacaggctgagaagaaaaagaggcgcttggaaaaagcactggctacttctgccgccattatttctgaactggagaaaaagaaacagaaaaagaaagaagagcagcaagaggctcgacgaagagggcgctgctattgctgaggctgttgctctgcatgtgctacttggggaagactcggacgagtcgtgtaaggttgtgatcgatgacggtgggtgcaagacctggaactgcaaccgaactctcggcatctccttgggtggagaaagtgcttgcttccctcatctagatggtggcagatggtcttttgaaagagtgggttaggtctctgatgcatacagatatggttgcaagtggggtgctgctgaaaatggtgaatggtcattctcatca

SEQ ID NO: 13104 - DNA, 327 bp, Glycine max
aaaaagaaacagataaagaaagaagagcagcagtggctcgacgaagagggtgctgctattgctgaggcagttgctgctgcatgttctactcggcgaagactcggacgagtcatgtaaggttgtgatagataatggtaaccaaaatattggcatctccgtaagtggagaaagtgcttgcttccctcatctagagggcggcggcggttggtcttttgaaagagtgggttgggtctctgatgcatacagatatgggtgcgacaggggtgctgctgaaaatggggaatggtcatttctaactgagccctttgagaagaacatgcatgaacc

SEQ ID NO: 13105 - DNA, 697 bp, Glycine max
aatgcttcaaatccatgcactgattatgtcactcagttacgctagaattgaaatcaagactgcacagtctctagaatcttggagtggtggtgttcttgtgatggtttctggatctgtgcaagttaaggactacagccggaggaggaaatttatgcagacattcttccttgctccccaagagaaaggcttttttgtgctcaatgatatttttcactttgttgaagaggatccagttcaccaacaacaaccagtcttgttacctcagagcaatcttgattcaaaattgaatgcttcaagtgcaaccaataaacctgtgtccaactacctgctgggtggagatatccaagctagggactacgttgctacaaatgaggtcacagaaaatggtgtagttgataattatggattttcagagcaaagcatgcagcgggcccctgatactgagcatattagggaggataatactgctgaagagtcaaatggttcacttcaatcttcagtgaatgcagtgcaagaccatgtgcctgtttctcctgatgaacctgctggggagccacaaaagcacacttatgcttccattttacgggttgctaaaggactatctacgccagtagcgtctcagccttctcataagaatgtgtccccttcagaatgggatcatgctccacatagtagtagtcagcaacagcaaacgatt

SEQ ID NO: 13106 - DNA, 416 bp, Glycine max
acattcaacaagaaacaagaagacgtgcttttcaataccaagaagcaattatgcatttcctcagagtcacaagggaaacaagttgctgttttccaatgtgaaagtaatggagagttagttcttgaactcatttctcgcccaagtttcaattttagaggagtaaggccagccaaagtattgggaaaaacttcaatcaatctgggggatttgcaagatgtagcatctaaattgccaaaagagaagtggttagatttgacatctacagtctattggtcaaagcctattggtattcgcattggtttgtctttaactcctccagtttcggcaccatatgagttgcactttgtttctatgtatccattcaaaggaagttagttttccttcctgcttccaagaaagttccagcaaacaaaatg

SEQ ID NO: 13107 - DNA, 607 bp, Glycine max
atgcacacaggatgcacattcaaccatcgttatgtgaaatcaaatccacgagaagtagagaatgccacttggatgctcacagtatttcattgttttggccaatatttctgccttcattttgaagctttccagcttggcatggcccctgtatacatggcattccttcgttttatgggtgatgaaaatgaggctcggaattatagctatagcctagaggttggggccaatggtaggaaactcatttgggagggtacaccacgaagtgttcgggatagtcaccgtaaggttagggatagccatgatgggctcatcattcaaagaaacatggccctatttttctctggtggggatagaaaggaactgaagctcagagtcacaggaagaatatggaaggaacaacagcaacagaattcggaagctggggtgtgcatgccaaatctctgtagttgacacgttatttgaaggggaatttttatcgtgtgtttctgacactcttttgagatatatttataccaactttgcgcatgttgtaatagattaaggcactaaggtgactctaaaattttcagatttcataagctgtataataaacaagttttcttccttc

SEQ ID NO: 13108 - DNA, 703 bp, Glycine max
  unsure (1)..(703): unsure at all n locations
ataaaacgacgacaatgcgatcaagaagcgtggttgggtcacgtggacgtagcagagaggtctctgattaaactttcacgctcacacctctcatacacaacgcaatccaaattttccttgcttcttttcttccatggatttggattggtcgtgttcttccaccaccaccaccaccaccggcaacccctactgtctcctcttccaagcgctatcactcattccaatctcgcactacctcctcttctcctccttcgttttcctctccttcctctaccgtttcctggagctccatttcctccaagacctcttctccctcttctccggctcctccgtcaccttaacctaccatcccgcttcccaattctacgacgccgtggtttccaaatgcaggattctccacggcacctacctcgccacgccctggctctccagccctcatctccagaccgtgtttctcaacttcttcggcagacctcccttcttcaaatacagaagacaactgtttactactcctgatggcggaaccgttgctttggactggctgttgagttctgacgtttctgctggtgctatccatatggaagatgttgtttctacagatgaatccactcccattgttgtagtaattcctggtctacaagtgactcttatctgcgtatctaaacatcttgcatatatcaganagtgggatgaaaagtgtgtc

SEQ ID NO: 13109 - DNA, 1760 bp, Glycine max
aattaagatggctcagcctgatacctctctttggattaaaagctctgatggcaggaatgaagtactgaaccatgatgagtatgcaagactgttttctccttatattggatcaaaacctgctgctggttatgtgactgaagctacaagaggaactggagtagtatcagccagcagtttgggccttgttgaaatattgatggatgcggatcaatggtcggagatgttttcatctatgattgctagtgctgccactgtggaagtactatctagtggcacgggtggaaccagaagtggagcgttgcaagtgatgcttgctgaggttcaattgctttctccactagtccctgctcgtcaagtgagtttcctcaggttttgcaagaagcacgctgaaggtttatgggctgtggttgatgtttcagttgacattggtcgtaatgttaccaattcacatccattaatgagctgcaggaggcttccctcgggctgtgttattcaggacatgcccaatggtttttccaatattacttgggttgaacattcccaatatgatgagagtgtcatccaccaactttatcgcccattggttagttctggcattggttttggtgctcagagatggattgccaccctcctaaggcagtgtgactgcttggcaatcctcaggtctcctcaaggcccatctgaggaccccacagcccaagcgggtaggacaaacatgatgaagctcgcacaacgcatgaccgagtgcttctgctcagggatctgtgcttcatctgcttgcaagtgggacatactgcacattggtaatctggctgatgacatgagaatcatggcccggaaaatcgatgacccaactgaggctcctggcattgtgctgagtgcttcaacttctgtttggatgccggtgtcacggaaaagggtgtttgattttctgcgtgatgaaaatttgagaggtgagtgggacctgctgtccaaagatggaccaatgaaggagatgctccatattgctaaaggacaagaccgtggaaattgtgtttccatccttcattctgctaatagcgagtgcaatgtgctatatctgcaagagtcatggagtgatgcctctggctcgatggtagtgtattccccgatcaacatgcaagccttgcagatggtgatgagctgtggagattcatcatttgtccctctccgtccatcaggctttgctattctgccagatggcacttcaaacaacggtgatggcagtgacggtggtggcagctgcttgcttacagttgggttacaaatgttgccaaatggcaaccaccaatcagccaagttcacaatggagtcagttgatgctgtcaataacctgatctcatttaccattcagaaggtcaaagatgcacttggagttgcatgatccatttctttaattttagacttaaatatgatcacaaacaaaaagactttttttttcttttttcttttgaaagaaaacataatagagtgttttatattttgggtgtatagagtattcaagagtagaggctgaggctgaggcagaaaagggtttgagtcaagaacgaaccaaccgtgaatgctttgtggtggttcgggtattgactcgttacctgttacaagtcttagcttttactttgtccaaaaggatatgctgtgtgttattcttacaccctttacttaatagtaaagtgaaactgctcaactttgctattagttgttaatcttcatttcttgaatgcattttcatattttagttc

SEQ ID NO: 13110 - DNA, 459 bp, Glycine max
aaatatcttgtcctcaaatgtgccatagaaacaaggacaaaaaaatcccatgtttctgaagttagcaggtttggagttccataagtagaaatgggaaaaagacaatctttgcgcaacaaagccacccacctcgtttctgtccttctcaaccccatctccgattccgacactcccaatcccaaaacctccaaacaccccccaccggcaccaacacctgcacctccttccggacaagtaggtgagtggatcagagacaaatgatgaagagggtaaccgtggtttagttgatgggcctgatactttatccttcactgcgttcctctattccttattgtcttcctctgacactggagataatgcaaactcctcacgggtgctgagtgatgataataaagctgcagcacctgatcacataagtatattatggccttaattgtgtgtatcacagacataataacg

SEQ ID NO: 13111 - DNA, 430 bp, Glycine max
gggggtcagcatctgcatctgcatagttgggtgactcaggaatctgaaagctgcaacccaccaacaaagaacaccaccactaagttgttatcttgttctcaaatgtgccgtagaaacaaggacaaataaatcccatgtttctgaagttagttcccaaagtggaaatgggaaaaaggcaatctttgcgcaacaaagccacccatctcgtatctgtccttctcaaccccatctccgattccgacactctcaatcccaaaacctccaaacacccccaaccgacaccaacacctgcacttctttttggagaagtgggtgtggggggctcagacacaagtggtaaagggggaacccggggtaaatgagggggccgagactttataccttacagtgggtctctatatcctatagtgttcctctgacactggagata

SEQ ID NO: 13112 - DNA, 417 bp, Glycine max
  unsure (1)..(417): unsure at all n locations
aaattaatttacaaaaggtcaagggaagcacggaaacgctttgacaaggctagccttatttatgaccagactcgtgaaaggtttctgtcactaagaaaaggcacaaaaactggtgtagctactgccctagaagaggagcttcatagtgcaagatctacatttgagcaagctcggtttaatctggttactgccttgtcaaatgttgaagcaaagaagagatttgaatttttggaagcagtcagtgggaccatggatgcacatcttcgttacttcaaacaggggtatgaattgttgcaccaaatggagccatatattaaccaggtcttgacttatgctcagcaatcaagagaaaggtccaattataagcaggcaacccctaattaaaaaaatccaagagtacanacgacagattgatcg

SEQ ID NO: 13113 - DNA, 2106 bp, Glycine max
ctcgagccgattcggctcgagggacaaacaccttactctccttccttaaccgtactttttcttcttcttcccatgccttcatagcttcctcttccttccctcttttcccgcaccttgcttcctaccccagcttctctttctctctgtttcgtccactctcttcatctgcacctgctacattgatggaggtggtcaaagcaattgccaagcacgaacctgcagctcctgaaagtgttgctatcagagctgatcagaagagttatagttacaagcaactcatcacatcggcacagaagatatctaatctcttgtgtggcagtgatgcacagacaggaaatctcggtggagctcgagtaggaattgtagccaaaccctccgctgaatttgttgctggaatacttgggatttggcttagtggaggtgttgctgttccgcttgcaaccagctatccagaagtagagctcttgtatgtgattaataattcggatgtatctgcaatactgagtactgaggatcatactgaaataatgcaaagcgtagccaataaaagctcttctcagttttttcatcttccacctgttctcaacaagtcttctgagaaaagcagagataaacattcacagaatgggggaattcatacagataaaattttgttggataagtttggaagatcaagtgaagatccagcactgattttgtacactagtgggacaacgggtaaacctaagggagttgttcatacacacagaagcatcatttcccaggtacaaactttgacaaaagcttgggagtactcatctgctgaccagtttctgcattgtctaccactacatcatgttcatgggcttttcaatggtttaatggcccctctctatgcaggttccacggttgagtttttgccaaaatttagtgtgagaggagtttggcagagatggcgtgagtcatatccaaccgatggttctaaggctgaagaggctataactgtgttcactggagttccaactatctatgcccgattgatacaaggttatcatgcaatggatcctgagctacaagctgcttcagtatctgctgcaaagaacttgcgtcttatgatgtgtgggtcctctgcacttccactgcctgttatgcaagaatgggaagccatcactgggcatcgcttattggaacgatatggcatgactgaatttgttatggcattgtcgaatccattgaaaggtgagcgcaagcctggaaccgttggcaaaccatttcctggtatacaggtcaagattattgcagatgaagagagtgtgaatggaaatactggaatgggtgagctttgcattaaaagcccttcattgtttaaagaatattggaaacttcctgaggtaacgaaggaatcatttactgatgatggattctttaagactggagatgcagttactacagatgaagatggatatttcatcattctaggacgtactaatgctgatataatcaaggctggtggatataagctgtctgcattagaaattgaatcggttataatagagcatccagctgtctcagaatgttgcgttttaggcctaccagacaaagactatggagagattgttagtgcaatcgttgtgccagaggccgatgttaaacgaaaacaagatcaagaatcaaagcctgttctaagcctagaagaattatccaactgggccaaagacaaaattgcaccttacaagattccaactcagctaatcgtgtgggataaactccctcgcaatgccatggggaaggtaaataaaaaagagctgaagaagctgcttgtttcagaacagtgaacaccatttgatcatttattcatattcactaggcaaagttaatttattgaaaccagtttaagatggtggcaatctcaaataaaattgcaccaattattgagtgaaatagaaacctttatattatgacatttataagttgaataagttttagcatattattagggggaagataaaggagaaagtatagcataattttagcattttagctgtatgaaggcgattgattgaatgtgtttaataagaagtatttattgtcttgccaatgaaaaaaaaaaaaaaaaaaaggacggaa

SEQ ID NO: 13114 - DNA, 426 bp, Glycine max
gaattatccacctgggccaaagacaaaattgcaccttacaagattccaactcaactaatcgtgtgggataaactccctcgcaatgccatggggaaggtaaataaaaaagagctgaagaagctgcttaccatttgagcatttattcactaggcaaagttaatttattgaaaaatcagttttagatggtggcaatctcaaataaaattgcaccaattatttagtgaaatagaaacctttatattctgacatttattaagctcaataagtttgagcatattattagggggaagataaaggagaaaatatagcataagtttggcattttagctgtatgatggtgatttgattgaatgtatttaatgagaaatatttattatattgaaaatgaaaaaatatttaataaaaaaaaaaaaaaaaggcggccgc

SEQ ID NO: 13115 - DNA, 501 bp, Glycine max
agactcccacctccaccaccattgtcaaaacccccaccagtagcaagagaacggcttccatctctaccacccctccctgagaaagttgacccacctattgtcactctggatgatctcttccgcaaaaccacagcaactcctcggatctactatcgacctttgtctgaagagcaagttgccgcaaaactttcaacacagggtaaaagcgggaggcagtagataggccattagcctgcaaatcttcccttgcagccctttaactgatttggatatttttattagtgctatgggattattttgaatgcgtcttgttggcagatctggtggtgttttgtctcgggaagaaattgtcattgctaatgtatcttgagacttaaatttatttagttttagaagtcgtgaactaagagctactggggttggatagattttccccactgtttgaactaggcttgagcaaacctttacctgaaattttatggaaaaatttggcgtttaaaa

SEQ ID NO: 13116 - DNA, 483 bp, Glycine max
gaacaagtctgaagctgaagtgcagagtaggatacttctttcaaatttatgtgatcgggaaccctaaacccccaaagcctttgactttgttcaatccttcgacatgagtatgacccaattcgccatggttgaggaattggcttttcttgtcaaggacaatcttccttgcaagcatctagttctcacaatggaagaatcccttgttaactttcttcaggatgatgacactagttcagatgggatcttggaattggagccaatgaactcttacaatcgtcttctattgcatcgccttgctgaaatatttgggtttgcacatgaatctgttggcgaaggagatgatcgccatttgattctggaaagatgtccagatacgtccatacctccagtccttgttagtgatatcctatggaagtatgatgaaccacaatctttggttacatcccaccaaatattaaggagaagtgtagcctctccagtctc

SEQ ID NO: 13117 - DNA, 252 bp, Glycine max
tctcgagccgaatcggctcgagccaaatatctcagcaaggcgatgacgataaaagacggttgtaagtgttcattgggtttgcccatgaatcggttggtgaaggagatgatcgccgtttgattctggaaagatgtccagatacgtccatacctccaatccttgttagtgatatcctatggaagtatgatgaaccacaatctttggttacatattacgatatattaaggagaagtgtagcctctccagtctcgc

SEQ ID NO: 13118 - DNA, 747 bp, Glycine max
ttttttctctcatttttcatctcacccttcctctatttccatcatttcgtgacaacaacaacataaccctctcgcccccaacacacacctcttctttttaagggtttatcttaaaccaggatttttggcactaatttctctatgggagaagcaccagcattgcttgttgatgacgtgcaggatggggctctgaatggccttgaattgaaaaatggaacttgcaaaacaactgctactgttggcgataagatgtatgtcattggtggagctgatgatggaactttgtccattgaagttcaaatttttgaccgtagtcttggagaatgggttcgtcccactgtgcggggcaccaaacctgtgtcgtgcaatggcctctcagctgtgcctttggaagaccgaatactgattcttaagaagggttctaagcctgatgatcggatatggttcctggagattgacacccaatatgttaggcagctgcgaaaaattttggggtctgaggtggttgcatggagtaaaggtgtgataggcaatgctgagaagcctgttgctattagtggcccttctggagtaggcaaaggaacactgatatcaatgcttatgaaggaatttccatctatgtttggtttttccgtgagccacaccacccgtgctccaagaggtatggagaaagacggggtccattaccattttactgagatgagtataatggagaaagaaatcaaagagggaaagtttcttgagttt

SEQ ID NO: 13119 - DNA, 679 bp, Glycine max
cccgtcccagaccacacgatacaataaccatgacttgacttttgtatctgagtgccagcccctctatattgactttgacttggtctctctctctctctctctctttctttcaccattcccttgttcttagtttttacttccatccctcttccaagtctcagaaacgtataggaagatgtctagtttggttttgttgtccgtgttatttctccttctccaacgtcctctctcatccttctcagccaactccgaaggaaacgctcttcatgctttgagaagcaggctttctgaccccagcaacgtgcttcagagctgggacccaaatctcgttaatgcttgtacttggtttcatgttacctgcgactccaacaatcacgtcattcgcttagacttgggcaattctaagctctccggaactttgggaccagaacttgcccagctaccccacctccaatacctggagctctacaggaataacataagtggcaacattcctcgggaactttctaaattgaagaaccttattagtatggatttgtatgacaaccaatttcatggcaaaatccccaagtcttttggcaacttgaactcacttaaatttctacgcctaaacaacaacaaactgacaggagcgatcccaagagagctcactcatcttaaaaatctcaaaatccttgat

SEQ ID NO: 13120 - DNA, 515 bp, Glycine max
cacagatacaacaattagcagcaatttatcaattgcagagtagcagccaaggatctggcaaaaaaagatttgtgacagtgatgcgaacgcagtctacatccatgccatcttcaagtggtagacagcgcctggaaaagttgttgggagttgatgatgaggatgccgatttttccgtggctgactatgtgaataagaaatctgtgagtggagacagaagactgggaaagaaaaatgctaaaaggaatgattttagattccaagaacctcaatctgcccagaacaagtactcaggaagccataaagtgaaggacaagaaagggagtggacaaaagggttcatatgctaatcagcctgtgtcatttgtatcaagtggcttaatccattcagaaactgtacaggttacagttgatgctgaagagactaataggaatggtgtcaccagctctgctaatataggttcatttgaagaacacactactggttttggttcaaaaatgatggctaaaatgggatac

SEQ ID NO: 13121 - DNA, 858 bp, Glycine max
ttccacgcgtccgcccacgcgtccgcccacgcgtccggttcttcttctttttctctctctagaattttttttttctctctctctctcccatctctcggaaaatttttcagagcttcctaaagcctttagaattctctggaacctttttgttcgtccgccgaggatcgcaattcctccaaatcgtcgtcactcgtcgcttagttcggttctaactgcatgaactggttcgggaagctggattcatcatcgtcgaacttgaacttcaatcacttcgttacttgtctgttgatttttatcctccatttttcgcctcaatcgctctcttccaccttcgatagtaacactaatctcgaatttaattccgaatatggagtcgagaactaagagtaatccccaattaacaagagctctttgctatgcaaacgatggcaatcagcagggaaggtcaccatctgttattgtcattggcggtggcatggctgggattgctgctgctcgtgcactccatgatgcttcgtttcaggttgttctcttagagtcaagggatagaattggtggccgaattcacactgattactcatttggttttcctgttgacctgggagcatcatggttgcatggagtttccaacgagaatccgctggcttcggtgattgggaggctaggtctacctctttaccgtactagtggggataactccgtactctatgaccatgatttggaaagctatgcactttttgatatggatgggaatcaagttccccaagagttagttacaaaaattggtaaaatatttggagtgattttagaagagacaaataatgtacgagaggaattcagtgaggatatgtccatact

SEQ ID NO: 13122 - DNA, 524 bp, Glycine max
cctacgtgtccgcccacgcgtccgcttctctctctagaatccattttctctctctaaatttttctttctcattttctctctctttcttatctcggaaaatctttctgagctttcaaacgaactttggaattctccagaaccttctcgtttttccgccgaggatcgcgattccgcagaatcgttctcaatcgtcgcttgattcggttcgattccgtggttcgagctgcatgaactggttcgggaagctggattcatcatcgtcgaacttgaacttcaatcacttcgttacgtgtctgttgatttttttcctccatttttcgcctcaatcgcacttctctaccttcgatagtaacagtaatctcgaattttaattccgaatatggaatcgagaactaagagtaatccccaattaactagagctctatgctatggaaacgatggcaagcagcagggaaggtcaccatccgttattgtcattggcggtggcatggctgggattgctgctgctcgtgcactccataatg

SEQ ID NO: 13123 - DNA, 531 bp, Glycine max
caattatatgaatgaatgaattttctccgattctctttttccttgtctgagttttctcggaaaccaaaccccgaccaacctctctcccccaccttcgcgttctgattcagctgagagtggttgggctctgcaaaaattagctgcatgagctggtttgggaaactccgtttattctccaatttcaatccctttcacttcattacttctttgttaatttttaccctccatttttcaccccaatcgcgcttttccctccaacccctgttattgatccacgctaaaaccaatctcaatcgtaatttccggttttcgtcacaatatggggttccgattcaagagtaatccccaattacgcagaggcctttgctgtgcaaatgatgacaagcagcaggagaggtccccatctgttattgtcattggaggtggcatggctgggattgctgctgctcgtgctcttcaagatgcctcatttcatgttattcgtctagaatcacgagaaagacgtggtggtcgaattcaaacggacgactc

SEQ ID NO: 13124 - DNA, 813 bp, Glycine max
tttcccttgcgtccgcccacgcgtccgtcctagctagaagaaggaaatcacttttcactttcgggctatttgctttcttagggcatctctaacaatatggccaaatccactttctttgtctgccttaacctttcattactcttctctctagtcacagccacttactactcaagtttaaccccaacacttttgggttttcgcgaggagaagttcacccacctccacttcttcttccatgatgtcgtgtcgggcccaaagcccagcatggtgtttatcgccgagcccaacgggaaagcgaaggatgcccttccgttcggaaccgttgtggcgatggacgaccctttaaccgtggggcccgaacaggactcgaaacttgtgggcaaggcccaaggaatttacacttcaatatcacaggaagagatgggactaatgatggtgatgacgatggcattcaccgatggagatttcaacggcagcaccatcagcgtgttggggaggaacatgatcatgagtgaacctgttagggaaatggctattgttggcggcacgggggcttttcggtttgcacgtggctacgctcaggccaggttttactctgttgatttcaccaaaggagccgctatcgtggaatacgacgtattcgtcaaccattattgagtcctacgtaccccttttatagtggaatacgatgtattcgtgaaataggtgatagctgcttagaacaccttgcataagacttaaatttctttgggtctttgttctaaattccctaatgttattttcttgacattattgttaaaaaaaaaaaaaaaa

SEQ ID NO: 13125 - DNA, 539 bp, Glycine max
agaaaaatcatgttacaatggtgataggaaagagttaaatgacatagtttcatcccaaggctctgttttttcctctcaaatatctggagatttttcaaatgatcaaaatcctgagaaaataggatcatgctcagatagcaactcagaagtagaagttctgtccagcacagcaaagtacaaccattttggtagcaacacttccttcagtaaactccttgaaatggttagttcgaccaagttttatgaagataccagtcaaaaaagcgaatcaattgaaatctcaggaatgcttgaagttaacggctttgagcctttcaaaacagaagcatcaacaagtgacctaaagaaaaaggatgaaaatggcatgaacagatctagtcttcaaacaacagaacctgcaagccaagttgcaattacccattctcaaagtattgcatctcaagtccatcctcgggaacaaagcaatcaccagcagcaaagctttttcaacatttctggactaactcaagatcttatgcataatgaaaggtggtcaatgt

SEQ ID NO: 13126 - DNA, 707 bp, Glycine max
aaattattttctcttctccaaaattcaactcaataatcccttccctggttcccatcatggacgaattagaagaaaccctactcacccaaatcgactgggaatcgttcctcgacgacatacctgaacttaacgtcgatgattttttgcaggacgacaacgccgttcctgttgttaccgacaatcattcctccccgaacgacgaccccgttttgtccgagatcgagaacatgctcatgacgcaggccgaaaacgacgctgtcgttttgcccgagacgccgtcttcggaggccgggtattacaagctcttcgaggagattctggtggaggagcccaaggaaggacccgtgagcccgccttcaaaaatagagtccgaggaaggctccgacaaagacaagaccgatgatgctgcttccgatgaacccatgtcgaagaaattaaagaggcagttgaggaacagggatgctgctgtgaggtcaagggagaggaagaagttgtatgtgaaaaaccttgagatgaagagtaggtacctagaaggggaatgcagaagactggggcatttgctccagtgctgctatgctgagaacaacgctttgcggctttgcttgcaattgcgtggtacatatggtgcttcaagaccatgcaggagtctgctgtgctcttgttgggtaaggcttgcgattgcaagctgtattaccttttattgccat

SEQ ID NO: 13127 - DNA, 508 bp, Glycine max
gacatctctaagctagctgcaacacaactctgaaatttttgtgagtatttggatgatgaattctcgtgtcgttcgaagcgtttcagaatgttttatcaaaccgttgggccaagctaaagagtcaaacctaatatgtcatttaacaccatgggatattgctatgatgtctttgcactacatccagaaaggtctactcttcaagaagcctgcaacacttgttgatccacaagatttcatggagaatctgttagagaagctgaaacactctctttctctcaccctcttccatttctatcctttggcaggccaacttgtcacccaaaaaacccaagaccctccctcttatactatttttgtcgattgcaacaacactagtggagccagattcatctatgcaactttggatatcactatatctgacatactctccccagttgatgtcccacccattgttcactcattctttgaccatcacagagcagtcaaccatgatggccacaccatgcca

SEQ ID NO: 13128 - DNA, 467 bp, Glycine max
ggcagagaaggcgaaagagatgggccagagttcgctcctctcaaccctcatcgtccatgacaagtcctgatggtggatgcaatgatagtgatacggatataagtagagaaaatcgtggaatttcttcaaggcaggtatcaaaacatggaaagcttacttggggaaggggtggatttagaagtaacactcggcatggtagtggtggcagtagcaatagcaaaagttctcgcagtagtcgattatctaagtttgttgatcatctccgcaacttggatgaaaacactgatgagtttgatgtccatctcatgcttgtttctcttgaccaacaaagttcatcaagtttgcagcaaccttacctttgctgtcgaccaactttgtctgtcaggcacctttacgaacacgttgctcgtcagacacatttgccagttgaaggaattgagatactggcagtcaaaggatgctgcagt

SEQ ID NO: 13129 - DNA, 451 bp, Glycine max
acagaactcaaaattccttcaatttgtgtcaaagatgagccgtggtgagttgattattgatatggatcaagttaaagagaatgcattacctgcatctggagattgggcaacagaatacaatcagcaatataatcatggtcatgcatgggctggagaatttttgaatgataaggtttatcatggacctgatcagtgggcgaatgaatttacaagtgaaggacggcagcgtgatgcagttgatgatcagtgggttaatgaattctcaaagttgaaagttaatgattgggcaaatgaatttggtcagcagtttggtgaaggagccttaggggatagcacttctgatagttgggcacaagcatatgatgagttcctaaatgagcaagtggctgccaagcagcagtttgacattttcgaggggtgtgtttgtcttttacttatttaaaaccttgtt

SEQ ID NO: 13130 - DNA, 1216 bp, Glycine max
  unsure (1)..(1216): unsure at all n locations
ctatgatcgcacgcctgcccgacgcacgtgaaattcggcatcgaggctcggggaaggttatctacccaaaacttctagttgccagccctcacaagcgaggaagtgttgatttgggaagcaagtgaggaacctgtgaaaatctatccaaagaagcatcccaattgtattgttaggagttctttggagcagaaagacctccctatttttgcccttcaagatgacagggtggttgaagtagttggggatcccgctggagtgcataaggcattagagttaattgcctcccacctaaggaagtttttagttgatcgcggtgtaattccaatttttgaaatgaatatgcaaacagccaatccccaccatgcagagcacatgccaccccaccaatcttggggaccatctcagggtcttcctccaaatgttggtggaggtcctggttttggacctccttctcaatacatgccacctccacgacaacttgatagttattatccatcagctgaaatgcctcctccagtggacagacagccccatcaaggtatatctgcttatggaagagatgcttcaataggtgttcatgcatcttcaaatactcaatctgcaccttccttagtcacacagatcacgcagcaaatgcaaattcctctatcttatgctgatgctgttattggaacagctggagcaagtataagctacatcagacgagctagtggggctactgttaccatacaagaagcaagaggtgttcctggggagatgacagttgaaatcagtggaactgcttctcaagtccaaacagcacagcaactaatacagaattttatggctgaagctgcagctgcagctgcagcaccagcacagccgcaaacaactgtgcctgctgcagaccaaggatacaattcttaccctgcccatggttctctctatgcgtctcctccttccaatcctggacatgctggaggctatagctcagtttatggtgcaaactatgggtactaggctggactgtgcaactaatgcctgctattattgaaatgtaaaatgctgggaacggaattactgtaataatttaagaaatattagattattgtctgacctccccgttcccttgtacacgtagtcatttggaaatcctaaaacatactactcgtggcttnntgatgtatcattaacatgttctatgattctatctaattggtgcacctatgcctctaaa

SEQ ID NO: 13131 - DNA, 490 bp, Glycine max
gaagagctatgacggcgcatggaccccgtccgaaagttcggaattcggttcgaggttgaacaagaaacagcagtgcctggcgaagaagagaaagaaaacaatcatgagcttcattctgtttccgattctctttgcatttacctttctgtcctcgcccgttctctctgcttcggatctggtcctcgccaaggttgaccgtcgcattgatctgacttcacagattgtgcgcatcactacttcactaaaggtgcagaatacgggatctgatgttgtgtctgagattttgctgtcctttcctgagaaccaggcaagtaacttggcatacttgaaggcaacacttggtgatgggaagggaaaatcaaaaccatcttctggtgttggtttacctgtcgaagttgtccggcctaaagatgtgccaccttccttgacaatttattccgtgtctttacctaaggggcttgggaagggagatagtctgacgttggatgtc

SEQ ID NO: 13132 - DNA, 415 bp, Glycine max
atttgttgatttttttttaggttaaatttcttgtgactgtattaaaaaatgatttcgtggaactggtgattttttgtagacgaagaataacttgaatttattattttacttgcattgttaattttatcaagggtggacatactctagttggaagtggtaaattactcgctaacagggaaggggagttgaacaagaaacagcagtgcctggcgaagaagagaaagaaaacaatcatgagcttcattctgtttccgattctctttgcatttacctttctgtcctcgcccgttctctctgcttcggatctggtcctcgccaaggttgaccgtcgcattgatctgacttcacagattgtgcgcatcactacttcactaaaggtgcagaatacgggatctgatgttgtgtctgagatttt

SEQ ID NO: 13133 - DNA, 382 bp, Glycine max
cccacgcgtccgctctcatcatctacgatcatctgatgatctttggggtcatcaccctgatgcttttaagagttcactccatggcaacaatgggcatgtggaaaatagctggattgatccacgggtgcaaatacagcaacaccttgaagctgtgaggcagagaagagagttaggagatactgttacatcagcatgatctaaacatacctgcatctgctggtgctcatgaagagagttcagcacgaggttttatggaacgacttcatcaaaaactgggcgttcaatccacacaaccatcaactggtgataaatggcatcctctttcatcatgaagtgacaaatcttggcatgttcctgaggctagttcaataatgcatccttt

SEQ ID NO: 13134 - DNA, 1244 bp, Glycine max
tcgccctcgcgtccgaaacaaccccttcttcacgttacctacgttttcattcaaaaccacagtacgacatcgaaaaaaacaaaaaagtcataatatatatcaacaaaagggaacgatattttcagcaaagttttgctctccacgtttattgaatcaaggtcttttctaatgctaggtgttgaatttggttaaccagtcttggaggtttatctgctattattaaaagtgttgggatacaagtaccaagcagaagtttgccaaggcagctgcttttagctgatgccatcatcatagtatggacttgaatcaatttttaaattttaacgttattagttcggaaggattcccttgcacatcgtcttgtactcctatttcaccaatatccaaccagttgcttggatccttgaaacttgacataggaaactcacctaactcggccctttctagtcattttgattctgatactctttcttctgcattaagtgacagtcaggaattgcacacctctggggaaattcactctggtgtcaactcttgcaagtctttgcaggaaagcaatcattatttgcacaggccagtctcatttgtagaccatctccaagacggtttacatctatctactaggagctttcttccacaggatgcaagttatgaccatgaaactagacatgcattgctggaattagaaacagctttgatggcacctgatggtgaagatcaaatcaccacatcaagcacttctttgggtgttggcagtagaccaacaacatcttgccaaagaaataggtcctggagctctgagggccagtcaagtgatgttgcacatgtagagaagcaccacaaatcagtggaggaagaatcgctgcaaggatttccatcatgcaatttgaaacaattgctgattgtatgtgccaaagccttgtctgaaaacaacatgcaacattttgatcaattgatagaaaaagctagaagtgctgtgtctataactggggagccaatccagcgccttggtgcttatttggtagaagggcttgttgcaaggaaggaggcatcaggaaataacatctaccatgccctaagatgcagagagcctgagggaaaagatttactctcttacatgcagctactgtatgaaatctgtccctacttaaaatttggttacatggctgccaatggcgctattgctgaagcatgtaggaatgaggaccaaattcatatcatagactttcagattggtcagggaa

SEQ ID NO: 13135 - DNA, 444 bp, Glycine max
gattcaaacaaccccttcttcactttcattcaaaaccaaagtcccacaccgaaaaaaaccataagagttgagctctccacgtgtattggaatcaaagtcttttctaatggtaggtgctgaattgggttaaccagtcttggaggtttatctgctattattgaaagtgttgggatacaagtcccaagcagaactttatcaagacagctgcttttagctgaggccatcatcataggatggacttgaatcagttttcaagcttcaacgtaattagttcagcaggattcccttgcgcatcatcttgtactcctatttcaccaatatccaaccggttgcttggatccttgtaacttgatataggaaactcacctaattcggccctttctactcattttgattctgatactgtttcttctgcattaagtgacagccaggagcagcacaact

SEQ ID NO: 13136 - DNA, 287 bp, Glycine max
cccactcgtccgaaacaaccccttcttcactttcattcaaaaccaaagtcccacgcgcgaaaaaaaccctaaaattttagctctccacgtgtatttgaatcaaagtcttttctaatggtttatctgctattattgcaagtgttgggatacaagtcccaagcagaactttatcaagacagctgcttgtagctgaggccatcatcataggatggactggaatcagttgtcaagtttcaacgtaattagttcagcaggattcccttgcgcatcatcttgtactcctattt

SEQ ID NO: 13137 - DNA, 878 bp, Glycine max
ctgtggccgaagacgttgagagacaaaaatctagaagtgatatggtctttatatatggaggtgtaagtccactgcattcaggatgttacgcatagcagcgcattgcagaagcttttggtgttcgtttggctccagatgaagaatttgaagaatatctcaggcatattattggtgatcagtgtactggtgaccgaaatgagatggctcaattgcctgagggcataactgaattgtggcatcatgacaaattgtctgtgcccttgatcaagtgcgaaaatgtaataattcttagtgcaacaaatgttccggagatggaaaagcagtgggactgttggattgaattagcaaaatctagtgacctactagcattgctggaaccatatgtatcaaagcacgtgacaactaatctgtcagatgttgaaattgctcaacctctgtcaaagctttgccttgaatttccagatctttatattggctgttactcgcaatgccagatatggatctcttatagtaagcttcaaaggaaaggacctaacacgcattgaatcagctataaaagcattacacaagaagtttcaacccagtgctttcgttgagatgaactaggatgatgttctaaatgctatggtccatttcttttggatgccaacagaatgaaaacctttcatggctgggatcatatcattctcatattatctacaaatataagatgcattgggataaagatggagagggcagaaaatcaaggtgctgctgtgttgctagaagaaagaacaatggcacaaggaggtggctgaatcttcaattctattgccatacacagcacttttaactgcttcatggagcatggacaacctattgattattatggaattatt

SEQ ID NO: 13138 - DNA, 1032 bp, Glycine max
  unsure (1)..(1032): unsure at all n locations
ccaacatcttgcttgttgagaatttcacagccaaggtttctgattttggtctttcaaaggatgcaccaatggggcagggtcatgttagcactgctgtgaagggtagctttggttatcttgaccctgagtacttcaggaggcagcaactgactgaaaagtctgatgtgtactcatttggggtggttctgcttgaggcactctgtgcaagaccagccatcaaccctcagttgccccgcgaacaagtaaacttggctgattgggcgatgcaatggaagaggaagggccttcttgacaagatcattgaccctctcctagttggttgcatcaatcctgaatccatgaagaagtttgctgaggctgctgagaagtgtttggcagatcatggtgtggataggccttcaatgggagatgttttgtggaacttggagtatgctttgcagcttcaagaggccttcacacaaggaaaggctgaggatgagactaagtcatcatcagcagtccctactgcagctgttcctacttcacctgccccaccaacacctnccatttcttctgatgaccgcccggctgcgcctgctcgtccggaagtgaataataatacttcatcggatgtgcattctattgatgaccattctggaactgcaatgtttgctcagtttagcaatctcaatggcaggtgaaggcctaatttggtttcatgaatggagcaaccatcacctggacagctacaaatttgatcatgtctaggaagatgttatagtagctttctgaaggcttggaccaaaaagtttcctgtgtaatggtgtgatgctgtatgctgactgctgtttctcttctaggtactcttgtctttctgtattgtgtgtgggggtactattttgcatgatagcaaaaagaaaaggtgtcaaaatatgtaatgtgattaagttgttggtttgtaagtatacatgcattcaacagtaccattaatcacatatggtattatattaatgaattgttgtatattgatatgtaatttttagggggggtaat

SEQ ID NO: 13139 - DNA, 387 bp, Glycine max
tcgaaggcaagagaaggggaatgttgggtgtgtaacaaattgttgaccctactttgggatcagattatgatgtggagcagatggagatattgacaacagtggctttggaatgtgtggaggaagagaaagatgtgagacctagcatgagtcaagtcgttgagaggctccaaagtcatgattcttgaacctgattcttaatctcttgtgcatgtcactttcttgtttatcattgtctattgctagcctctagatattttcatcagtttagataattaaggagtgtttatatttctcatgttgagcagtagagttaaattaataagtgtttgtttagattcacatgtacttaatgtaaatccatcttgaagttaagtactccccaagccc

SEQ ID NO: 13140 - DNA, 403 bp, Glycine max
ggcacagctcaatcccgattctggcacttacgcggtgaagccgtgtaaggagcatgctggagcaacgcttgaacttccctccgaagaaattattcggaagtcagcatagggacaagaggcaagcggttagaacaaagtctagatttttatttttgcttaggatcaataagcagtattgcctctgattttatgggggtgtttgattattatttttttgctcccaatcctttgtttcctttcaaatctatttagcggagtagacaggatataaatctgactggcaaaagtttatgatgccctttttttgttgtatgatcacataatgtatcccaagtttttttgtttaatttgccttcagcagaatttcaaattggtttggatcaaaacgaaatccaaactttgc

SEQ ID NO: 13141 - DNA, 476 bp, Glycine max
ctcaagccatcctctcctactatgttctccttaaaaaaaaaacgaaaacagtgggcttgaaaaatttctcttttatttgcagaaacgagccaaggcttagggtttggtcttttggtgtttttgcgaattagggtttgtgattggatctccatcttcaccaatcataccattaccataacttgatcttctctctcgccatgacggacggcttctggaatcggcagcagcagcagccgcttcacccttcttccgccatgctcaaacgacctcgtactgaatatgatatgtcaccttctggtctgacttcagggggtaatgagatgcataattatattgctcgaaatgatgaccataccggtcatcgaatgctaaaggacactaaaacacttggatctgcttatgaccgctaccttcaaagcgctggggtaacatcttaacatgtcttatttacattatttgtgtgaggatgtgctttc

SEQ ID NO: 13142 - DNA, 451 bp, Glycine max
ctcgcactgttatttctgagcatgcacagcagagcggtggtgggagtttcagctctaagtatgggacttgggagaattgcttgaccacatgatgatccttgccgttccatgcaaacaaacatcttttttcttctgaaatttgccaaaacttgtgtcaatcattggaatcggagtttttgggtgcaggtgaaaagcaattttgcatcaggtcaaattggttccgtttcagtgaattgtgtattccgttagtatccattttcttgtttatttatatctcaaattgcgatatttaccgctgcctaagatatgtggtagatttgtgtgacttgaatcaaattgccttcaccaaggctttgttcataactaatatagtagctcaacagtttaggcccgtaatttctgcagaagaacaactcttccagatgctcataattaaattgtagttatgatt

SEQ ID NO: 13143 - DNA, 578 bp, Glycine max
gctttagtaatgaaatatgtttggcagtatgatcccattaaaaactcttggactgaggccagtccaatgtcagttggtagagcctattgcaagacaggtatattaaacaacaagctttatgttgttggaggggttactaggtgtcgtggtggactaagccctcttcaatctgcagaagtatatgaccctcatacaggcatgtggtccctgttacctagcatgccttttgcaagagctcaagtgttgcccacttgcttttttggctgacttactcaagcctattgccacaggaatggcttcatacaggggaaggttattcgttcctcagagtttgtattgctggccattttttgttgatgttgggggtgaagtttatgatccaaatttaaattcatggcttgaaatgccaattggtatgggtgaaggctggcctgcaaggcaagctggaacgaaattgagtgttacggtcgatgatgatctatatgcacttgatccttcaaattctcttgacagtgcaaagatcaaggtatatgattatgaaggtgatacttggaaagttgcagcaggagatgttccta

SEQ ID NO: 13144 - DNA, 776 bp, Glycine max
agcaaacagagtcttccccacaccatcctttcccccaagagaatgagcccgttcatgctcctctaccaccgaacacaccccgccaccaccgaacgctaacgcgcgccccttccttaccctgcgcctcggcactctcccttattccccctccttcataagctccgcgtttctctctctctctctctctctctctcggatcggagcgaggctggcggttccggcgttggggacgttagggttagggtttccgagagatgtggtatgctccaggcattgatgaatctgttctcgctgtgttggaagccgtttggccgcgatgctgatcgaatcgattccatcggagttatcggaagagaaggcaaagacggcttgctctggttccgcgacttcggaaaatatggctccggtgatttctccatggctgtcgttcaggccaaccaggttctcgaagaccagagccagatcgagtctggtcctctcggcaccttcgtcggcatctacgacggtcacggaggacccgacgcatcaagatacgtttgccatcacttgtctcgccattttcaagcaatatcagctgagtcacgcggggttgtgacaactgagacaatcgaaagagcatttcgccaaacagaagacgggtacatggccctcgtgtcaggctcgtggaatgctcgacctcatattgcaagtgctgggacctgttgtctagttggagtgatatttcagcagacactctttgtggcaaacgctggagattcccgtgttgtattgggtaa

SEQ ID NO: 13145 - DNA, 445 bp, Glycine max
  unsure (1)..(445): unsure at all n locations
ctagggttcacaatttgtttttgccgaacctttttcaccatcatttgggtctggtttttctgccaatacaaacgaacaaaaacttgattctctctattccatggcgcccggaaggaagaagcggcaagggaacacatccattattcctgtggatgcaaaccccactcagcaaaaagcacaatctttggatattgatgctgagtgtgagagtgagaccaaaagaatgaaatttgctgaggaagatggtgatggggcagggggttcttcttctgttgtgaaaaagaagcgtggcagaaaaagtaaaaaaggagaagcatgacacggaaaagatgttagagagcaatttgtcggaaaagaagatactcaaggcgaataccacggtgaaaattgtggagtatgagggtcttcttctgttcaagaaagtgcgaanaagaaacgtggaaga

SEQ ID NO: 13146 - DNA, 610 bp, Glycine max
gcgtgcgtgggatgggggcgctaaggaggcgttcaatgtgctcagaagcaccgttgaccggagttattttcctgatgggcagacgttttgcacccttgcgagtgctttgtgcagggagcgcaagattgatgagatgaggagttgttgtatcttgccgtggggcggaatattgtgcctcctacgtcgatgtatgacaagtacatatcggctctgtgccgggctgggagagtggaagatggttatttggtacatggggaacttaagagtgttgctgccaagacgtcgtatgttaagatgattaagggttttgttaagtctggtaggggagatactgctgctcggcttcttgttgaaatgaatgggaagggtcatacgccgattcctcggttgtgtagatatgttatttgcagcttgcttgaaatggacaattcaagagggcgctttttcaatttactggagatgctgacccgttgtcaacattcttgtgagacttacaactttttccttgatggagctggacatgctatgaagcctgagttggctagggaagtatttgagttgatgcaaaggaatggcattacgcccaatatgtgttctcttattcttatga

SEQ ID NO: 13147 - DNA, 544 bp, Glycine max
cgcaaccctcgcgcttccgccgccacactcgtcggagcacactcgccggaaaacactccccggcaaaaaaagaaaacctcaaagactaacccgagtcgttatagtgggttggagtgaacgaaaagaaacaaaggcaatacaaaaagggcaaacacgaatacacggttttcattctttcaccactcttgtttccttttacgacgtcgttatggaactcaagtttatgcagttttcgcaacacgttcttcctcattccccttcttcatctcaaaccctcgcttctgcactctcttccccttcatcgtccaaaacgcgaaccctagtgtgtcgtttcgtgaatcgctcgagcctctttccgaccaccacccgccttcttcggagaaccaaatcgtttgagcaccacgcgcttttcacgcgcagggggagtttgagaagggcttgcagcgctagcttggagcctttctccgacgaagagttcgcgaagaagattgaagatctcgcactcaagtttcagctctctgatgaaaataccaacgcgaacgat

SEQ ID NO: 13148 - DNA, 478 bp, Glycine max
tggcttcaacggttgaatgaataaactcttgatccttccctttatatcctccttagttgagtctccgttttcgctggcgctggcgctgtggggtgatttgcagaggagaagaggcaatggcttacatgtgtgcagacagtggcaacctgatggcgattgcgcaacaagtgattaagcagaagcagcagcatgagcagcagaagcagcagcagcagcagcagaccaatccaattccatggaacagcactcctcctctccctcccaccgatttccccgaccccttccaatccgatccccccttccacttccaacccttccgcttctccgacttcgactccgacgactggatggactccctcatcgccaccccctgctcctacaccaccgattttccctttcccctcctccgatctcaaccgcctcatcttcccgccccaatcccccgactcggactccccacagcagcctctcctaaaag

SEQ ID NO: 13149 - DNA, 511 bp, Glycine max
gtggagttgaattctttaccctcaagtaatcagaataataagggtctggttgcaaagtttacaagtaatgctcctgcagctaattctcttgtagcagagtccaagcccagagagatggcgtcacggaacatgttcaaacagccagatactaatggagttgttaatggagagttggctaatgtaaaagtcacaaatacaagtttgaatagacaggtgactggttcttcacctgaaagtacatcaaaccaatcaagcagagcagctccttctgttgtgcatgggcagggtgctagtgacccagttcagttgatgagattgctcgcagaaagggctcataagcaacacttttctttcaatgatttgcttgttgatactcctccagtgacactgtcaggtccatctggacagagagatgactcgggcaatgcttcagcagcagctgccgaggcatggatgtctgctggggcaggaaggtttaaaacaggacccaaaaattctagttcccccaaaa

SEQ ID NO: 13150 - DNA, 500 bp, Glycine max
agataactaaaagaaagtttttacagtccatgtgatcctattcgcatcgaaacaaagtaatggggagcttggcgtggaagcagcttcttctcaacgctctggaatccaacgctcgcctcaagcactcttctttcatgcagctcgcaaccctaggaaccaacggaacaccttccaaccgcactgtcgtcttccgaggattccaagacaacactgataacatccaaattaacacccatgcccgcactcccaagattgaagagctcaagctttgctcctctgccgagatatgttggtatttcacagattcctgggagcaatttcggataaatggggatgtagatatcattgatggtttgaatcctgatccgctaaaacttcagcaagagaaaaatcctggtttgccagttcattgagatcaagattgcaatatttgttgcccaaccctggacttccctgtctaaatgagcaagcactgccagaaatatcattagatccttcta

SEQ ID NO: 13151 - DNA, 939 bp, Glycine max
aggtagaaggttttcctagtggcagtgtgaaggatttttcaacaaaatcttccattttgggcaagtctactcaaatatgtgcaaacaatgaatctgacggacagcatgaccaggaaaactgcgatcaagttgtctctgtcaatgatcaggagcatgaaaaggttccttctgattctagccagaagcattgtgatgtcgataagggtgttgtttcatcatctattagtgaaggtagcatggaaatcgagttgacaacttccacagtatcaatccatctcacacctatcaataattctgtttcacaagttgtttcggaaaataatagtttgacatcacatgagataatagacattccaccttctagcaaagttgtttccactcatgaagttactagtcacaatgaatttcaagggataactcctgttggaaattcttctgccgaggaaaagggagaatctacagcaaaagctgaggaagcaggcacatctaccctcgttggatcttctgaactggaaactgctccttgtcctgtcacaggaactgaaaaacatcattcttctgatacttcaaggctattgttacgtgacagtgattgccagcacaatgtagggactagtgctataaagattggtgaacctcaaggaacagcaaatgataaagttattcaggaatctgcaaaagagactggtatgcctcaagttctatgtgcatcatccaagaaacagagtgacgttgtcacagtttctttagttaaggatgacaagaagactgtgcaggagaatcctaacgagtcttcctcagaaaaattaggaggtggaagccttttccaaactgacaaggacagaaatcaagttgaggcttgtgctaatcagaacacccaagtttctgaggtgataaatggtggtccgaataatacattgactactgctgaagatctaa

SEQ ID NO: 13152 - DNA, 523 bp, Glycine max
cttcaagtgaataagaagaagaagaagagatgagtcaggttggtggtcagggaggaggaggatctcattcgctggcgttccgcgtgatgcgtttgtgccgcccttccttcaacgtcgaacctccactccgcctcgaccccaccgacctcttcgtcggcgaggacctcttcgacgaccccgctgccaaaccccactctttctcctccgctgccgcccacgacgacgactccgatcccaactaccgtaaccgcttcctcctccgccacttctccgacgccatgggcctctccggcctcctcgttctccctcagtctttcggagccatttatttgggggagaccttctgcagctacatcagtatacacaacagctccaattttgaagtcagagaagtccttatcaaggctgacattcaaacagagagacagagaatacttcttttagacacatcataatcgccagttgaaacgatacgtgcgggtgggcgttatgattttattgtagcacatgatgtgatagagct

SEQ ID NO: 13153 - DNA, 1000 bp, Glycine max
gctcaggttgagcacttgcatccaactttcttgaaaaagaccaacatcaattcttttttgggcctagggttagggtttcaattcctttctccctcaatttcaattatcaaggagtggtgaacatcaatctcctcccccgccgtgctttggacggacaacatgggaggtgatgacgctgccgctgagagtgccaccacagagcggaacgccgcaaacgaagtcaacatcaacatccgctgttccaatggttccaagttttccgttcagattggcctcgattccaccgtcagatccttcaaggaggcggttgctcacaattgtgatatatcctctgatcaacagcgcctgatttacaagggtcggatcctcaaggatgatcaacccctccaaagctacggtttggaggctgatcacactgtccatttggttcgtggtttttctccttctaacaccactggtgggactaatagtggtggtggcggtggtggaaataccacaactgccaacacgagaggtgctggtgctaatgagggtgggggtttaggagggccaggatttggagcttcaccgtttcctggacttggtggtaacaatgggatggggggcggtggcctcaatggcttatttggagcgggctttccggatcttgaacaaatgcagcaaccatttgtgtcaaatcccaatgtaatgagagacataatgaacacacctgctgtgcacaatttaataaataatcctgacatagcgcggaatcttataatgaataacccgcagatgcaagaactaatggataggaaccccgagctggcacacatacttaatgatcccagcactcttcgtcagacacttgaagctacaaggaaccctgagatcatgcgcgatatgatgaggaatacagatagagcaatgagcaacattgaatcttctcctgaaggattcaacatgctgaggcgcatgtatgaaaatgttcaagaaccgtttttaaatgccactacaatgg

SEQ ID NO: 13154 - DNA, 616 bp, Glycine max
gatgggaacagatttttctgtgatacagaagacttttttccctgataaaacacggcatcaaattaagttgaagtacaagaaggaagagcggcagcagcctttacagctaaccgatgctgtaaataacagtgcaaaagatcaccctcattctaagttgtttattgaactactaaaactagcttccaccaaggcagaagaataccccggtagagatgcctcagatttggtgatggcggaggaggttgtggacctaaccgctggaactcatgaagaggttccgaaggctgcaacaaaaaaggaggatgccgatgttaaagcacaggaagattctgtggcagttcctagtccagagcaatctgatgacagtgacgatgactttcaaaaatggtctcagtataaatgtggctattagtgattaatgataaagaatgaaatttaacttacctttatctcatttatttttcattatggttagtatgaaattcttttaattgctcaataattgtgaaatcatttttccatcttctgattccatagtccagggcatttattattatattttttttcaattttgcatacagtattttctcaagaatgtattgtgaatttgtaatct

SEQ ID NO: 13155 - DNA, 971 bp, Glycine max
gagatgtagccttgggcattcttctcactaagctataccacaattgcatcagttattgttacacctctgttaactggtcttctgattggatcagtagtgccagttgatgcagttgccatgtcaaagtcaattctgcaggttgtacttgttccggtgacccttggtcttcttctcaatacatatgcaaagtcagttgtatctgttcttcaacctgtgatgccctttgttgccatgatttgtacttcactgtgcattggcagccctcttgctttaaacaggagtcaaattttgacaggcgaaggtctccggttggtttttccagtattaacatttcatgttgttgccttcactttaggatattggttctcaaagattccatccttgaggcaggaagaacaggtgagcaggacgatttcactatgcactggaatgcagagttccacccttgcaggactccttgcaacgcaatttttggatagtagtcaggcagttcctcctgcatgttctgtcattgtatggctataatgggtctctgtcttgcctctttttggggaagtggctttgtaattagaaacctgttgccattacctcctctcagaaccaattctgctgttaaaacttaacttttttgtttctgatgcgtgtcattgaggcttattttttagcatcagttggagggtggaaacttgataaatttgatcttttaatggtaacaattagaaatggctagggaaggtagattaataggaaaaattcaagtgtataggttagtcacatacaaatcagcaagaaacaggtttcattagtaacattgtaacattatccagagaaaaaagttacatagtaacggggggtatagatgcatagatactatcatttgttacctagctgcaaatcagtacacttctgtacatagactcaaactatgtcatagatcatttaccaattaacagttttctctgtcccaaaga

SEQ ID NO: 13156 - DNA, 637 bp, Glycine max
cccacgcgtccgcaacaatctcaagttcagcagttgcttcttgaacagtttatgcatcagcagatccctgatcccaattttgggcagtcaaaacatgatgcgtccggggataacctgttagatcaggtacaattgaggagatatgtgcatgaattgcagcagaatccacattctttaaggcatcccgatccatcaatggaacagattatccaagcaaatatgggcatcaatgctgcccaaggaaggcaagctgatttggcagacctcttgttgcaagcaaggcatggaaatgtattgccttctgaacaacagcttcattttcagcaagatcagctgcaggcacagcaattatctttggctcttagacagcagttagggttggatggagaaaggcattttggtaggtcatggcccatgaatgaaactggacagttggttagaactccagcaacccacccactgggtcattcagctggatttaatgtttcagatatccataaacagcagcagaggcttgggactcaagaggagcaattaaattatttggggaggaatcttccagagcagaaccagagagggttctatgataatcctatgatgtttgagaggtctgcacctatttcccaaggaagggaat

SEQ ID NO: 13157 - DNA, 540 bp, Glycine max
ttcagattctcttctaaccaaatcagaggacaatctggcaagaaaaaaacaggatctacatgatctataatgttatgccaacctccttttgcttaatttgggcaattggctttgttcttactcattgttgtttatattttgcgttagattattctcagagttttgtgttttgttaatttgaaagggagttggtcaatatgcacatatcctatcagttgtatgcattcttatcctgcattagaatatccatatcctaaattcttctaaaatttgcgtatggctctgtttgtttaaagctttgtttagcaatggagcataagcttcaagtctttatttatgcttttaaccaacttttgtgttctatttctttgcctttaagaaaaatttgggtgtcatttccttataatccttacgtggggaatacaaccaattgactgtcattaattggaagtaaaaaaaaactgtggattactgaatttgctttggttgttttcatattttaacaagtagctcatgtcaatgcttgcaaatttttctttc

SEQ ID NO: 13158 - DNA, 811 bp, Glycine max
ccacgcgtgcgcccacgcgtccgcccacgcgtccgcccacgcgtccggcgtcactctcactcagaccattttgcgcatggggttcttcaaaccgctttttttctcgaaccgggcggcggcggcgcttgcggcggcactcgattgagttgtagaatgcgagtgatcggattccgaaatggcttcgaacccttcgcttctccctgagatcggacccgatggtctcgctaaagaagctcccgtcatcggctacaccgagaagatcatcgaagcagaacagcttcaattgcagaaatacattcaagaaaactattctaaaattcgtgatgtggagcgtgagcttgcaaatctttcactggagatgaaactaacagctgggccgaaaaaagcagctcttgaacatttgaggaagaaaatagaggaatcaacagaaagaattcgtgtggccaagctaaaggaagaacaggcacggaaggtgtgggaatcagcatcaaaagtagtaagagatgaggaagcattaaagcaaaagttatgtgaagacttgagtaatctggttcaagagagcagtaactctcagtttgctcggctggaggaattaaaaagaagattggaagctttgaatccaactcgcccatcaactaatctttatcatgatgggagatcaggagcgtcttctcaggatagtacaccccaacctggttcctctgttcccaatgccaaggactcatatgagggatcaaccgagagtgttcccaaccaaagtaatggtcagcaagttgcagtgcaaaatgggcctaatcagcagcctaatgaa

SEQ ID NO: 13159 - DNA, 440 bp, Glycine max
gtgttggtgccggtgcaggaagagagggcttgttggtggatccgattcagaaaaaatgggttcaaacccgtcgtttgtcccggagatcggatccgatggtcttcccagacaatcttccgttatcacttacaccgaacagataatcgaagcagaacagcttcaattgaagaagtacattcaagaaaactatactaaaattcgtgatgtggagcgtgagcttgcaaatcttggattagagatgaagcttacatctggaccaaagaaagcagcgctggaacatatgagaaagaagatagaggcatcaaccgagaaaattcgtgtggcaaagatacaggaagaacaggcacgcaaggtgtgggaatcagcatcaaaaacagtgcaagaagaagaggcaataaagcagaagttatgtgaagacttaagcaaactggatggaagat

SEQ ID NO: 13160 - DNA, 323 bp, Glycine max
caggattgacatcatccatccacgataacggttaactgtaacagcgtcactgactcaggccattttccgcatcgggttcttcaaaccgcttttttccctgaaccggacgtcggtggagacggtcgagcctggttaaagccgctgctcggaaatcccaaaccggacggcgacggcagcactcgacggagttgtggaatgcgagtgatcggattccgaaatggcttcgaacccttcgcttctccctgagatcggacccgatggtctcgctaaagaagctcccgtcatcggctacaccgagaagatcatcgaagcagaacagcttc

SEQ ID NO: 13161 - DNA, 472 bp, Glycine max
cccacgcgtccgtgctgattgaccgtatgggccagaaagattcagtcctggaagacgaagttagatatcgttataatagtgtcatcttgaattacaagaagtcacaagataatgctcagcgagtttctcccctaacttttgaacttgaagctactttgaaattagcaaggtttctttgcaggagagagctggccaaggaggtggtggagttgttgaccactgctgcagatggtgctaaatctttaatcgatgcaagtgataagctcatattatatattgaaatagctcgtctgtatggaagtcttggataccaaagaaaagctgcattcttctcaaggcaggttgcacagttatatctgcagcaagaaaatagactggctgcaattagtgctatgcaagttttggcaatgaccacaaaagcttatcatgttcaaagtagatcatcaatctctgatcattctttgcacagtaa

SEQ ID NO: 13162 - DNA, 532 bp, Glycine max
atcaggttccagttttggccttacattattcttatgatcatcttctgccttgtcacgccagacgttggacgagcttcttatgcctataataaccttatccgcacttgcatctccttaaatccacaagcaatcatatgtaggttaaataactggaggaagttttttgtcaagaaagatgactttttactgcatgtagagagatatctaaacgagaatggaactgaagccttagagaaactcattgctagcaagaacaccaacctattgaagaacacaacttataaacctgatgcagaagcaacaaatgcaattatagcaactgataataatgaaacgcaacagacaaatgagacaaaactccaaacacagcaaaaatccatcatagatttggaggtgattgagataaaagaaattcttgcaggcaagcaagatatttctgttgtgcctaaccttgtgccaagttacaaagcttcaccagccatggtggaaactagaatattactggggaaagacatagctagtggagagcttc

SEQ ID NO: 13163 - DNA, 476 bp, Glycine max
ggttttcggttatttcattcacaacttcaacccttcctttcaatttttttcctacctacctaccaatcaacacctcgctggttcttgcagtggcgttacacatggatcggattccgatctacacgccgatggtgctaatcggaggattcgaagcctggtgccacggatctacctactgtacagaggtgtggcgatcgtgttcgtgttgctcttaaggtcgctttcggaagatcgtttgttcaacgatcggagattgcagcacagatcgagtgaagaaagcgtggctgtgttcttcgcattccgatgtcggttcatgttgtggtattgaaattatgatggggtttttaatgggggaaattattgtgttgcgtgggttttatgaaacagagaaagttctggtaaactttgttaaccgacctttgccatggcaggtgcgcttgcatggcaggtcaaaaatattaataaaaaatcaaata

SEQ ID NO: 13164 - DNA, 590 bp, Glycine max
gttctgctaatgctgattctgattcctttgaaatggaacttgacaaggatgatgagatgactactctttcagaaactggttgcgatactgaagaacaagaaagcactagcagtgaggaacttgatgagttggcaatttctagagacatgcctcacctctatcctcgtccgcatatatcatgcaatgaagctgtatccaaatggaagttaaaaggaaaaaggaataatcgtaatcttgtaaaaaggtctgttggtgctgctgatgggaaaggtgttgttttatatgaagcagatgttgaaggattaagaagccgtttaaatcacaagaggttggtgcctagtatgcattattatgggaatggtattagtgatgtttttgctgacaccgatcaaatgtttgggtttgaagatgaatattctccaacttccaaagcactagcaaaaggtcaaaacaaaattgatcatggtgttgattgggatgaatgggcttgggaggatcagactgctttgaaaggatattgggaaagtcaagggtttgctccattatatagtgatagatatcattttgatggaaggatcaggtcgatgctg

SEQ ID NO: 13165 - DNA, 965 bp, Glycine max
agcaaacaagtctccttacatctgcgcccagtccatattccaattccgtgtgcccactcacttcatcagaccgaccacgcctaaatcccaattcccaaattcctcccattagggtttctctctctctctctccaattcatgttctcttattcttgattgattctcttctattcgattcgattgttctatggaaccgcagcttcagcccaagctggaccccgcgccggaggttgttagcggtggcggtggggattcggagaagtcgcatgtcagtgatgtcaccgaggttcgcgacgttgacatggcgcaggcaaacggcgcttgttgcccttccgttttgaaacggaagcgcggccgcccggccaagggaaaccgcgttccgaaagggattataccgccgtcgaggcagaaacaggaagaagaggatgtttgcttcatatgcttcgacggtggaagcctcgttctctgtgatcgccggggatgccctaaagcgtatcatccctcgtgtattaagcgagacgaagccttttttcgctcgaaggccaaatggaattgcggttggcatatatgtagcgcttgtgggaagggatcgcattatatgtgctatacttgtacctattctttgtgcaagagatgcacaaaaaagtgccgattttgtctctatcagagaaaataaaggtttatgtggaatatgcaagaggactataatgctgatagagaattgtgcccagggtgataaggcggagtgtgaggtggattttgatgacaagagcagctgggagtatcttttcaaggtgtactggatgtatttgaaagagaagctatctttgacatttgatgagatccttcaagctaaaaatccgtgcaaaggtactgcttccataagttttgaggttcaaacttgctcatgacctgtgagccaactgtgaatatatgtataataaagaactaaatttaccctaatg

SEQ ID NO: 13166 - DNA, 472 bp, Glycine max
ggacgcttctgagcattttctcgttccaaagaattgtgaatatttgaattgattccccaatttcattcaatctttccctcatcagttttagggtttcgcctcgcttccctttctcacccataattgagtctatatttgattcaaacttctctctttcaactctcggctttgcgttctcggcacgataatactcattttaggatttcatttgattttcctcggatctttctggtctggggtatctgcttggtaggacttcatttttggagagtttagtttaatgtctgaatcagaagctgagcttcctactgcctttgttggtgatgttctattgtggaacaggtggcatgtttccttgggtgtcattgttgttgcaacagttgcctgggtcctatttgagtggaccagtttaccatttttaaccatttgttcagatgtcttgctgattttgattgaacttgtgtttctgcat

SEQ ID NO: 13167 - DNA, 822 bp, Glycine max
ccttggcttaactcaattcaactcagctattctctcttctctataagttcctctcctccattgtttttccctcccattcttccatttctgttttctcccatccctctcgcgcgctctctctcccatggaatcctccgctgccattcgatcttttcactatcccataggcactatgtcccatgtgcgagcctcccttgagaagcaggctgtagttcccattcataatgccggatggaactctaaaagtaggcttttcatccagcatttggcatatggtcagaagcacattaattcccacacgaaggggaaaaacacactaatttcatgtggaaaaacagctgaagctatcaacgcatccaaatctgatgcttcttcagataacactccacaaggctcattggagaaaaagcctttgcaaactgctacttttcctaatggatttgaggctttggtattagaggtctgtgatgagactgaaattgctgaactgaaagtaaaggttggagattttgaaatgcatattaagcgaaacattggagcaacaaaggttcctttgtctaacatttcaccaactacaccaccacctattccaagtaaacctatggatgaatcagcacccggtagcctgccaccttcaccaccaaaatcatctccagaaaagaacaacccatttgcaaatgtttccaaagagaaatcaccaagattggcagcattggaggcttctggtaccaatacctatgtcttagtatcatctcccacggttggcttattccgaagaggtagaacagtgaaagggaagaagcaacctcctatctgtaagag

SEQ ID NO: 13168 - DNA, 565 bp, Glycine max
catcatcgttttcatattttagagagagagatagagagattgtgcgatccacgaaggtgcgttttgataatcaaccaagttgcagaagcgatggatctggaggtggcagggcggcacgcgatgctgttcgacgacgacggcatggcggcgttcgtgaactcagcggaagctctggtcgaatggaactctctttccatcgaccgctacgatgtccgccatcttctctccgctcccctgcccccgcgcctcaagcgccgccctcctccgcccgaacccgacctcgatcaccagcgctatctcgatctcccttcctcttctgccgacgatgaacaacaagattatggttcagatccagtgagttcaactggctttcatgctgtcgcctttgcgtatggaaattctaatgtgtccacggagacaaaggacaacgataccaagtctagttttgatcctaaattcccagtaccagaaagcctactcaataacctgatgctcggagcataaatggagttcttatgactcaaggtagccattcacaggcaccttgattccttttgatgtcatg

SEQ ID NO: 13169 - DNA, 583 bp, Glycine max
caattccgagagtgatgaagggttgttacttgggatctgtagggatggacgaagaatgaaattgaaaagtgaaaagtagagatggaagaagaaaaagcagcggcatactacgacgagctgagccgtaagggcgagggagccgcgaggttcaagcaaggtctcggcttttcctcttccgcgccaaacgacgacgttccaaaaccctcctccttcctctccaaattcgtcaaagcctcctccactgcgccttcaaactctgagaagcaagcgcagcttcaatccatccaccacaagctcaagaaaaagccctcttccgagtctagggtttcgagcagcgatagcgatagaagtagaagacgaagcagagatagatacagggaatcgcggaggcgaagtaggagtagagaaagacatcggcatagggagagagggagacggaggagtagaagcgtttctcctcgcaagcaacgcaggtcggagaaagacgcgaacgatagagggaaagtgagtgatacgaagaagaggaagaatgctgagattgattattacacgctaattccaggttatgaccgcatgtcatctg

SEQ ID NO: 13170 - DNA, 535 bp, Glycine max
tcgggtctaattctattgtgttttcttacaattcatggagagtgaagagttgttgtgagaaggatgaagaatgaaattgaaaagtgaagtttagagatggaagaagaaaaagcagcggcgtactacgacgagctggcccgtaagggcgagggagctgcgaggttcaagcaaggtctaggcttttcctcttcagcaccaaacgacgacgttccaaaaccctcctcctccttcctctccaaattcgtcaaagcctcctccgagtcggagaagcaagcgcagctccaatccatccacgacaagctcaagaaaaatccctcttccgagtctagggtttcgagcagcgacagaagcaggagcagagaaaaacgtaggaaaaggagcagaagcggagatagatacagggaaacgcggaggcgaagcaggagtagagagagacatagggatagtgaaagagggagacggaggagtagaagcgtttctcctcgcaagcaacgcaggtcggagaaagacgcgaattatagagggaaagtcagtg

SEQ ID NO: 13171 - DNA, 826 bp, Glycine max
ccttccgtaagctcggaattcggttcgaggtcaatgtcatcgccttgaagaggccgcggagaaggcacggttaaggctaagactcttccctctctttggaccattcaaattggctgctatacacgatagtttcttatgatctagactagaggcttagttagggttttctgttaccgccatggatttcgagagtaggaggcttcatttgctcatctccgtggttgccatcattgctcttagcttcacagctgaaaaatgcagggaacttgttggggaggaggggtcatcccagagtggaaagtttacaatcttaaattgcttcgatatgggttctggaactgtagcatgtgctgtcaaggaaggtgtgaagctctatttttacaatattaggtcttctcatgctgaaagagcgaggagccaagcaattgagtctgccctcgttgatgctgttactcaggggatgtccccaacagattcagcaaaacatgcacagaaagaaggtaagaaggcagcaaaattggcttcccgtcaagccaagcggattataggtcccatcatttcctctggatgggacttttttgaagctatttactatggtggtactgtcacagaagggttccttagaggcactaggtactttgtttggtacttatgctggagggttccttggggagcaaaggcttggtagaattggctatcttcttggaagtcacctgggcagttgggttggtggtagaataggattaatggtttatgatgtggtcaatggagtgcatttgttgttgcaatttgttcagacaggagaaattgaagttcatgaaaaatc

SEQ ID NO: 13172 - DNA, 277 bp, Glycine max
gctagacggttggttttcttctgggtattgtggtcaacggtcaatgtcatcgccgtgaagaggccgcggagaaggcacacggttgttcaagcattaaaagtaagaccattcaaattggctgttatacgcgatagttgctctatgatctagactagaggcttagttagggttttctgttaccgccatggatttcgagagtaggaggcttcatttgctcatctccgtggttgccatcattgctcttagcttcacagctgaaaaatgcagggaacttgtt

SEQ ID NO: 13173 - DNA, 783 bp, Glycine max
cccaaaatgaactgagccaaacacgaacacccattctaccaaaacagccaccatcggacatcgaggccagcaaaaacagttttaggagcaaagaactcaggaacagatatgactactagacgtgttcgttattcccctcttgccacagatgaggatgattatatcggtgataggaatagaccttttgacccacgatttgattatacaccgaaagccttggataaagttccctggaaatcaattgctctggcactgttcctgttattccttggtacaggacttttgttcctttcatactttatcttcactggtcatatggggggagaaaagtctcaagcatatggccttttagccctagggttccttagctttctcccaggtttttatgagactcgaattgcatattatgcatggaggggtgctaaaggataccgcttttctgccatccctgattattagagtgtgacggtaaatgagaaatagagctatctataccgtgaaaacatagtaatgatcaaattcggttgcaacttgtatgcttcaatgggcaaagatggaacaaaatggtagaaaagggtaatcgtacttgatacttaagtagttaattaggtaacaaaatttagaaaaatgatgcattaaagtttgaggttagaaaaataagcttaaattgtatcgtgaaattgtttcttttaggcaaaattattgcctttgtgcctgttttgttcccttaaactcgtgattaacgtttggttgtaacaaggtttgccaaggatagttttttag

SEQ ID NO: 13174 - DNA, 421 bp, Glycine max
cccacgcgtccgggcaggcgagtgacgctgtgaatccagaccgacttagagagaacgaaacacagcagtgcgtatcaacacactacaatggagcgtttggccaggtcagctcgaacgtggcgttggcattggcgttcattttcctctttccaaaccctagcttctcgctcctcacctccttcttcctttcccaaatttgcgtcttcttggtctacctcttcctctgtttcgagttccagagttttccccgacgcttatccgtcgcttccggttgtcttagctggtatatttgggacgggattcgtggaagctgcatatgcggataatggtgctgttgatgtccaagaaagtgctaagaaggaacgtgagcgaattgaggagttgcttagaagtagaggaattcgatatggctcttatcctc

SEQ ID NO: 13175 - DNA, 925 bp, Glycine max
tttattgattctctctctatatctttctctctctaactagttcttcgtagtggtgtggagcccatagctggacctgtgctttgctggctccaagctcttcattgatagtctttttatggggcttctccgctgagttcagaacaaaacaagagaaaaaaaagggtttcacactttgtccgatctttcacagtgaactcttcaattttcaattctctttttcttgcaccaccctctcctttcttcttcttcttcttcttcttcttcttcttcaaacaccttcaccatttgcataccacttagctccaaaaacccatttctgtttctttctgttgatttgatggatccgcagatctaatgatttcacacactttcctcactacggatcattgtcttcttcatctggggcaccccaatagcttcttctaatcgacagtccaattttgttggtttgtggtggatcatcttcgtcgttgtggtgactagtgaggagtgcaggactatacctatctatatagtgtatgaaaattcaggggggtgaagtcgtttttggagtagttgataaatgttgaaatccttgacggttgtttggtgaaatgagggatgttatcggggttgatgaacttattgagggcctgctttcggccgggttcggatggatttacacttgcaggttcggatgctggaggtagacaggatggactgttgtggtacaaggactcggggcagcacttgagtggtgattttctaatggctgtaatccaagccaataacttgctggaagatcagagccagattgaatcacgctgtttgagctccaatgagtccggcccttacggtaccttcgtcggtatctatgatggccatggagggcccgagacatcgcggtttatcaatgatcacctatttcaccatctcaagagattta

SEQ ID NO: 13176 - DNA, 556 bp, Glycine max
ccatagctggacctgtgctttgctggctccaagctcttcattgatagtctttttatggggcttctccgctgagttcagaacaaaacaagagaaaaaaaagggtttcacactttgtccaatctttcacactgaactcttcaattttcaattctctttttcatgcaccactcttctttttcttcagacaccttcatcatctgcataccgcttagctccaaaaactacacacacaagaattctgtttctttctgttgatttgatggatccgcaggtctaatggtttcacacactttcttcactacggatcattgtcttcttcatctggggcaccccaatagcttcttctaatcgatagtcaaattttgttggtttgtggtggatcatcttcgtcgttgtggtgactagtgaggagtgcaggactatacctatctatatagtgtatgaaaattctggggggtgaagtcgtttttggggtagttgatagatgttgaaatccttgacggctgtttggtgaaatgagggatgttatcggtgttgatgaacttattgagggcct

SEQ ID NO: 13177 - DNA, 505 bp, Glycine max
gcagtaatggctaccaagcacccctagatcctggctatagcactggtgctgcaccagcatatagtacagcccaaccaagtgggcagccaggttatgttcaacccactcccactcaaactggttatgaacagtctaacacgcaaccagctggttatgcagctgtaccagcaagtgcttcggctgtgtatggcaaaacattgtccccccagccggctgcttatcaatacgactccacccaagtttatggtgctcctcgataatgtttttgtatgttaaccacatcctagtattagcatactctaatttgatggctccttcggtgtaacctgctattgattttcttgtattctgtactgctttaaattatgaacatcaaaatataatttttcttagctcgagtgctctgatgttacgatttcttgaaaatcaaagttcacttggcctgttgtttcctcgaaggattcaaaagaaaaattaattgagattatgatgccttactttcccc

SEQ ID NO: 13178 - DNA, 642 bp, Glycine max
ggggagaacgaattgagcagagtgtttcaaggatgatgtccataattgatctagccagaaatcatccgtgagcgtcactacaagcctcttaagactccactaagggagatgggtatacgtcatcccgatgcagacttccttgatgacatacatggaaaattgaaggagtatgtgctggaggaactcaatgtacgatcccttgtaccatgtcatgatactttagaatatgccactttacgcgccgagcctgaatttagtgttttaggcaaaagacttggaaaatcaatgggcattgttgccaaagaaatcaatgctatgtcacaggaaaacattttggcttttgagaatgctggagaagtcgtcattgcaaatcaatgtttgaagctgactgatattaaggttctccgtgattttaaacgacctgatggtatgactgacaaggaggttgatgctgctggagatggtgatgttctggtgatattggacttgcgtcctgatgagtcattgcttgaggctggtgctgctcgagagattgttaataggattcagaagttacggaagaaagttgctcttgacccaactgacatggtggaggtttactttgaatcattagatgatgacaaatcggtctctcatagagtc

SEQ ID NO: 13179 - DNA, 858 bp, Glycine max
cctcactctggctttgccttcaccttcacttcttcgccaaatcccaatctcaatcccgaaaaccatttcactgatcccctacccctccccctccctccaacaatgttccgacacccttaaaaaatcaaaacctcaaaaaccaaaaaacatcaaaccatgttttccttccctcacaatgtcttcctacccatccttgtctttccaatcattatttcttgctcctgggcctcgtcgttgggcctgagtagcaatgcgacgaccatctacgaggtcctgagcgagcacgggctgcccatgggcctgttcccgcagggcgtgcgggagttcgcggtgggcgaggatggtagcttctgggtgcgcctcgacgaggcctgcaacgccaagttcgagaacgagctgcattacgagcgcaacgtctccggccacctcagctacggcatgatcgacgccctctccggcctcgaggcccaggatctcttcctctggttccaggtcatgagcatccgcgtcgacgtccccagcaccggcctcatctacttcgacgtcggcgccgcctccaagcgcttccccctctccctcttcgaaacgccgcccgaatgcgtcgccgttagctcccaacaacaagacgccccttcccaccaccagggtcaggttcaatctggaaggcttcggcataagctcaatcagggaacctctggaagagatgttctatagagtatggaccgtgcagaagaaggtgaatggagcttttctgtagcacgatcatcgtggattctccaatcagattgtatgcctacggagagtatacattagtaggtccattgtttggacctgttgtgttgtgtgttatcttcccat

SEQ ID NO: 13180 - DNA, 858 bp, Glycine max
cccacacattcgttgacacatgggcggactcttgggttttattcaatctttcactgctgtgttgctcaaaaaataaagagagaatagtactccaatcaacataccccacactgtttgattaggaattcgggttgcacacctactccttctactttccaacaccagctgtctctgactttctagtcacagttgggtgggttggtaccaaaggtgaggcctgggagactcagaaagagatggctgaacacggaagagttatggcaaactgtgtatatgctcccaatccctaccatgaatgcacggaggcttgcgtgcataggatcaaggaagccaagcctggcaagccatctaaaactaaaaagggtaccgctttcaaagattatcgcagaagtgttacagatggtgaacttggcaaaaagatgaaagaagaaaaacgcaggccctcaggttgccctaaagcgtctaatccttaccatgtctgtgatgagtattgccagaaggctgattcaggtaccatgtctttaaactttgacaggaggaagaaggttggttcaaagccagaactccccgttcttgacagtgttccaccctcaaaaattggggctatttatctctctgatgcttcatcgcctttatcaaattattctgaaaagacaaaggaggagtcaaaaagcaatgagatcataccagtttctggagaaatacatgtccaagatgtcatgcctaccaatcacaaggtccaatcaaagcacaatggggacaaaaatgcttcaccaaaagttgttccaatcacctctgttgatgacacgggatgtcttactaaaccagatggtggatccatgaatttttgtttgtctg

SEQ ID NO: 13181 - DNA, 415 bp, Glycine max
  unsure (1)..(415): unsure at all n locations
cccacgcgcttggtcggttccggcatcgtgctctgctctgcacacctttctctttctctctgtctgaggctctgagcagtgagcacaccacaaactgaaacaaatccctttgagcattcagcaagatgagccacgagctgttggagacgtacgcgtgcatgcccacgacggagcgcggccgtggggttctcatctccggcgatgccaagtccaactccatcgtctacaccaacggcagatcggtggtcatgatgaacctccagaaccccctaaacgtgtccgtgtacggggaccacgcctaccccgccaccgtggcgcgcttttcccccaacggcgagtgggtggcctncgccgacgcctncggctccgtcaggatctggggcacgcgaaacgacttcgttttgaagaaggattt

SEQ ID NO: 13182 - DNA, 421 bp, Glycine max
ccgacagcatcaagcaaccaacacaaactgatttctcatttcgtagcatcaaccgctaactatccagatactaattttcgctttggtttggttcaattctgtccgcagacatggttttcaggccaatgagtggtaattggttagcactgttaagaaacagttatggaggtaaagccgcgtacgcaacctcaacagcaccaaagatgaaagcgtatgcagctgcggctgattacggacacaagcaacaacatgggaagtcggccaaacgggactttgtggcaatttacgtggcgattgggatgatagctctgtccacagggctgggtctccacactgcgtggcagcaactgaggaattccccgacggtgagcgtgaagaagcagaggaaggagaccctccccgaagtggtggaacccgacca

SEQ ID NO: 13183 - DNA, 459 bp, Glycine max
  unsure (1)..(459): unsure at all n locations
cgcttctagnnaactatgttggtannncccccggngnnctgcaggannnattcggcaccgagggccagagagcacccccaagacccctattatcctcctccaggctatgcccctccttatcccccacaacagggttacccgccaccgggttacccgtcagcgccgccgcagcctccgcgcggggtactcgccgtacccgccgccgccgcagtacgaaggttaccaaggctatttcaatcaagggtatcctcctccacctcctcccaattaccactgcccccacgttcagcatgataaccccgggtttacttccttcttcaaggctgcttgcagcanttgctgctggtgttgtaaaggaatgttgcttttttgatatattanaaggtgtctgcgtngggtgcctgngtgggtatgctcttgaaaaatgtgtctaattgctctattatgtcgnaccgccag

SEQ ID NO: 13184 - DNA, 549 bp, Glycine max
cccacgcgtccgtccacgcgtccggttttttcaatttcaatctacactacacaggcgtgaggcccctccttatcccccaccacagggttacccgccaccgggttacccgtcagcgccgccgcagcctccgccggggtacgcgccgtacccgccgccgccgcagtacgaaggctaccaaggctatttcaatcacgggtatcctccgccaccccctcccaattaccactgccaccacgctcagcaccatcacaatgataaccccggttttacttccttcttccaaggctgcttgacagcattttgctgctgttgtttgctagaggagtgttgcttgttctgataatcatattaaaagatgtatctgcagtttggtgtacttggttggttatagctctccggataaatggtgctctaattgtcttgatatgtgcgggacctggctagtgttgctcattcttgtaactcctggtttttaccgttgccctcactcatctctgggctgttcatagattgtgatgttatctttgtgaatttcttcgtatgggtgct

SEQ ID NO: 13185 - DNA, 1312 bp, Glycine max
cggctcgagctctcctactgttaacgttttctgttttctttccgtcgacgttctggctgcgtcccaagaatctctgacgccgttgtcggttttctccggccacggctacttccaacggatggcgacgacgaccacggagttcgatctcgattacgagttccccgatctcgattacgaccttcgctatctcagtctcgccggaatcgatgccctcaccgctttccaaaacctattaccggatgcggcgatgacttcattttcagcttgtggactaatagaccctcattgttctcaaaacctcactcccatgcattccaccatcactgctaccattgattctcggctcgagatttgcgccaccagtaatgttgggagcccaatctcggcaaataaaccagagggcagagagaatcgtaccaaaggagccacgagtggttcctctgagccgtctgatgaggatgatgaagcaggtgcttgtgaacagagcacaaatccagctgatatgaagcgccttagaaggaaggtttctaatcgcgactctgctagaaggtcaagaagaagaaagcaagcgcaattgtctgagcttgagttgcaggttgaaaaactcaaagtggaaaatgcaaccctatacaagcagttcacggatgctagtcaacattttcgtgaggctgatacgaataatcgagtgctaaaatcagatgtagaagctttgagagccaaggtgaagttagcggaggatatggtcactaggagctcttttactacgttaaactatcagcttcttcagacacaacatcatcaaatgagcacacccccgcaactgaacacgactaatctgcgccgcatggcgcatgtttcgccaacaatcaccgttcatggaaatgatgtctcgtacaataatggtggacagaattcagcacttggaaacttggatatgagtttcaatgacatcaatgaagtcatgaacgatgctatgagttgtggaactatttggccactcgactagacagactctctctgtagcttccaattagatcgatccatcttttatattttacgtcttgtctaatttgattagtaggctatatatgttaatgtcaagctatgctatttgtcttcgcttgattcctctttaatgaagcctgtttaaaatggcgtcttctttcgttgtatgtagttttgtataaaaggacttgattgctttatccatttctgattgtaattgcaaaacaaaatgttttctaattagggtcatgccaatgcttatggagcatttggctgccaaaatataacacatgagttaattttgttt

SEQ ID NO: 13186 - DNA, 455 bp, Glycine max
ataccccacaagctgctgctctcattcccttttccctccctattctctctcctactgttaacgttttctgtttttctttaagatggcgatgacgacaacgacggagtccgatctcgattacgagcttcgctatctcagtctcgccgtaaccgataccttcactgctttccaaaacctcttaccggatgcgatgacttccttttcagcttgtggactaatagaccctctttgttctcaaaacctcactcccaagcattccaccatcactgcaaccattgattctcagtcatcgatttgcgccactagtaatgttgggagcccagtctcagctaataaaccagagggcagagagaatcatacgaaaggagccacaagtggttcctctgagccatctgatgaggatgatgaagcacgtgcttgtgaacagagcacaaatgcagctgatatgaagcgcc

SEQ ID NO: 13187 - DNA, 388 bp, Glycine max
gttttctgttttctttccgtcgacgttctggctgcgtcccaagaatctctgacgccgttgtcggttttctccggccacggctacttccaacggatggcgacgacgaccacggagttcgatctcgattacgagttccccgatctcgattacgaccttcgctatctcagtctcgccggaatcgatgccctcaccgctttccaaaacctattaccggtcagttctctctctctctctctctctctcactcactcactcaattcacgttcgattggagccatctttgccacgccatcaaacatgttctatgacctatgacgtgccaaactgaaaatctattaccgctcgcgcctgacgcttccttaaccctaataacaatgagaataaataa

SEQ ID NO: 13188 - DNA, 519 bp, Glycine max
atatggtcactaggagctcttttactacgttaaactatcagcttcttcagacacagcaacatcaaatgagcacacccccgcaactgaacacgactaatcttcgccgcatggcgcatgtttcgccaaccatcaccgtccatggtaatgatgcctcatacaatggtgtaacagttggtgaacagaattcatcagcacttggaaacttggatatgactttcaacaacatcagcaatggagtcatgaacaatgctatgagttgtgggactatttggccacttgattagactctagctatgttatttgtcttgtctaatttgattagtagcctatgttaatgtcaagctgtgttatttgtcttcgcttgattcctctttaatgatgcctctgtttaaaatggtgtcttctttcgttgtatctagttttgtataaaaggacatgattgctttatccatttctctgaatgtaattgtaaaaagacaaacatctcaccttgccatatatatcatctaatagacagac

SEQ ID NO: 13189 - DNA, 523 bp, Glycine max
tagaaaagtagagaactacactcttgaggtccattctcaatcttgttaatatatttttgtgtagatgaagatcaagagaaggtgttgtcatgctaccttccttcaaccacaaaccctctctccctctaccacccattctcttttctctctctttctttccccctccctctctcacctactcaatctcatcaccaccaccatcatcatcatgatcttctccaatctctataaccttcaatcactcaaaacctcaccattaaaccaaatgagttgacccatttgtgagaacaattctccctaagaaaaggtcaaaggctgcaactttttcttaaccaatctcacaacattttgcaacgttttttctggttcggtttggttttctgggtcgtcttggaattcaaaaaagattccaactttgaagatgggtaggggcggaaccgccgcggcggcggtggagatcgccgaacccggttcaaggccggtttttttcaaagaaccgcgttataagggcgtcagaaaaaga

SEQ ID NO: 13190 - DNA, 636 bp, Glycine max
taataacacctctcaggattccaaacccacgtcttctattagcacaagttatgggccccttggagtagaaaatgatgataacttatttgatggaatcttaggagttgatcatcagagcatgtagcatgatgtttctgattcccaacaagtgtcttcaaagggaaacttccctatgaaaagagaactttcgtcacagtacttttggaatgacacagggtcatcctcttcaagcaggagattccactgtgatcttaattatgctggaagcagcactgttgaggaagacaattccttcgtttctctgcttagccacctttcacagaacacaacatcgtttcacccaaatgcgcttcttggccctattggtaatggagtattgaggcttcagtttcaacttccaagcatgaatgggagtacttagggtggttaatttggcttagggtatatactgggttggataataatgtagcggctattgtaggtttatattataagttaatttaccccgagttttatgagccatataaaacaaactagagagagagagagagatcatgactgtagcttgtatttttgtgagttttgtctttgaagcttatattaaactgaatacaatactactgctctatatcaaag

SEQ ID NO: 13191 - DNA, 413 bp, Glycine max
gaaatagactaagatctggattacagagcacttgaaagtggatatgttgcagtgactgcgctgtctctttctcctgatattgagactgatattcaaatggcagcttctgattggatttctgctgtgcttcctggtgaacaataaatttagtatgattgtgtacatttgagatttatgatgattcttttttctctttttttctaccttaaagcaaaaatggagcagaagcggtagtcacaccaattcaatagtggatttccacttgtactatttttctttttctacattattttgttccctttttcattgtttcagtccctttggtcacttagttatttctgatttgaagcaaatgcttcttgtaatttcttgggcatattttagaaaaatgccatttcgtctgtttgtatact

SEQ ID NO: 13192 - DNA, 416 bp, Glycine max
tattttagaattgtggaaacgcacagtgttggtatctataacatcgagtggtgccctatggaaatatgctccgattgtggattcgtttgtagcactggtggtattttgcgtgaggatggaaggattttctttgccttggatggtactccacttccagttgtgtttcagaaaaaagatgattaatttgaagcactaagtttgaagaatattgtggccgtttagtcatagttctttttatggtggatagggattaatatatgatatatggagctatcatccatttattttaggaagaaataaagatacgtgtattcagtattctgttcttgatttgaataaagctcctaattgttatgagtttgtaattcatttgctactttggttattatatattatacttcttttatttcatcttt

SEQ ID NO: 13193 - DNA, 790 bp, Glycine max
ataaattcaattctgaggagcttttctagccttttgatacattgatctacttcaagttacaattcatcaatggtgaaatactgcttccttgtctggcgtctctaaaaatcttcttgggtgtaattgatatccttcgaggggttcgttgggttcttcaaatgtttattaatgtagcatgttttattgatgtaaaatatctttttgtgctatcaatttcattattcattatccctgcctagtgagggctcatgagtcatcctttttttccgggttcaagagaggatccaccctgaagtgggtcctgggtggccctccttttatacttgtggtatgtatagtaggatgtcttgaatacatataaccatggattgacaccaaaagctgcaatttatatggatcttcgcacaagcttctgcattttatacatttaaatttgtttgtcatcagcggtactgtttggttgagtttgttcaactattttgcttgatgttgggacggcatagtatttagtctactcatgaaaagcttttgcacgttttttcgtttgttcttgaatagttctgtatattcaactttatttctatgtacatattgcgggtggtgtaaataagccatgtcgagttaagctcttgaaagtttcggcttagattgtatgaagatttcaaactttgattcacttggttaaatgagtcaaattaaggggaagtaaagcttctacgtggtctgtataatgaatgttattactgtctgacttatttagttaaataaatcaactataaagcttgagtgg

SEQ ID NO: 13194 - DNA, 487 bp, Glycine max
tgggtgcccttggaggcaacactcaaagttatagcagcatccttgctttgcaggacgagttagtaaacctttgtctttcaatcagtaatggcttctatatcaattcaacatacataccgtcccctcctgatctatcattgtcatcgtgatatcgggtccgagtacttcgacttcaactgatcgtaattaagcaaaactcaagaaaccaacaatttggatgggagctgagctgacatctccatttatcattgggaatccactccacctcaattatagtgtgtaaatgctttagcttgagaccaactattgtggaagaggtgagcaactgcatcctttgagtgctctccatacaacatctccgggtcacacttttgtaaattatttaccctgtcaccacatatatacacttttaacatatattgcgcatagatcgtaacaagagagggcttcctctctctttaaaaaaaaaaaataaaaaaaaacataa

SEQ ID NO: 13195 - DNA, 432 bp, Glycine max
agaattcggctcaaggaaagagagtgattctacattacaacacctcaaggggaagaatgctgatgattatcaagaagccactgaaatcagagatcatacagaagcctttcaaaagcaaacaggagctagcatcattggctcatttcaaatgcaatatttggagtcacttaccgtaggcgttggcttgatgatactgcaacagtttggagggattaatggcattgctttttatgcgaactctatatttatatcttctgggttttacagaaagtattggaactatatcaattgctgccgttaagattccaacgtcatctattggcgtactattaatgcataaatctggatgacgaccacttttagctggtttctgcatgagagaacatgctgaggatgctttctggcattcttgacattccatttgctggactt

SEQ ID NO: 13196 - DNA, 526 bp, Glycine max
ctccagatgaactttcatacgaggaattactggcattgagtgaagtagttggaactgagagcagaggtctttcaactgatactattgcctgtttaccttcagtcaactacaagactgggagtgatcaacatggaagccatgattcgtgtgtcatttgccgggtggactatgaggatggtgagtccttgacagttctttcctgcaaacatctgtaccatcctgagtgcattaacaattggttgaaaataaacaaggtttgcccagtttgtagtactgaggtatctgcttctgggagcaacttgtaggaggatttaatagatgttcttcacttcaaattgaagaaaatttgtgccaagttgggggctaatatcccttgttctaatagcatttccacattagggagatagtctgtgctattgtctccagctccttcattttaagtgtaacatgtgacttttggaacctgctctctacattgtctttattctaatggaaaatgaatggcatttaagtggccagttctttt

SEQ ID NO: 13197 - DNA, 1163 bp, Glycine max
  unsure (1)..(1163): unsure at all n locations
aattgttttgccttgattcgtttgggtgggttaaaccggttcttttatttgttttccttgttcgtgaaacaaagtaccttttgtaacaaatagcttttgagttggaatcgtttttcttcaggtgattgttctgattgaatgggaggagattgtggaacctgggcaccacatctagaatcaccaaatttgaatctccttgacactgggaagccggttggtatttctgcagctatgaaccctggctttaatatggtctctagcaatgctacggtgcctgctttcggatcctctacagtgcctcatttgcagttaggacattcctatgaacccagtggttggtcttattgtttgccctgctttccacagggatttgctcctgctctgaacttcaatgctgagggaaaccctcctgctgaccatgtaaaaacttttggggacaaaattggtccctatggtgaatccagttcccttcagaaacaaattcttgttattgatcagacgggtggtcaaacaactattgtttatagctccaggtttggcagtcctggtgagtgccttgcttcttggcattcaaaactgcatggtgctaactatttgagggggaacgaaccttctttcatttggggtttgaatttgaacttgaacgtgaatatgactgagccaactttggctcataaagtggatgggaatctcggaaccagcattgaaagtgagatgcatgaagacaccgaagaaattaatgcattgctttactcggacagctatggctattctacccaggatgatgatgatgatgaagttactagcacagggcactctccgagtacaatgaccactcatgataactgtgaaacctttaggggggataccgcagaagaagttgcgagctctgccgggaaaaccaagaagaggaagctattggatggctattacgatgacatacaactcattgatactgccagttctcagaatctgaacaagtcttctgcaacgggagatgatgacgcagaatcaagatgttctagtaacaacaatgaaggatccttgtctggcaataagaagattaaaaaggagaagatacgcgatgttctgagcattctgcagagcataattcctggtggaaaggataaggatccggtcatgcttctngacaatgccataca

SEQ ID NO: 13198 - DNA, 751 bp, Glycine max
acgacagaaggggacagaagcataatcttcagcgataataaccagaattttcgagagagaaaaaaatcaagaactcggaatcagggttttctctcagattcgtgaaaatctcgaaagaggaatacgatttaagccttaggtcgattcccttaagatcaaaccctaaatctaatattctcccttcccaatttatttcagagaaaaaaggaatttagggtttcggtctctctttcccggtgccggttttcacgatcagcgatacgactttattctcgaccgttccgtttgaaatcgttatagccggaaccgttaggcctagggtttcgttaagatgaacgaccaatcgcagatgatgatgaatttgaaccagatgagccagcctcagatgatgaatcaggtgcagattataggtcagtcgcagcctcagatgctctcgcacaatcagggaatgaatcagcaagcgcagcagcctcagatgaatacatcgcagattatgatgaaccagtctcagcctcagcctccgatgatgaatcgtggatacaacaaggtttggtctcagcaacctcctctggaccctaacatgaagtttcagaaccctatgaaaccgaattaccggagcaattggaaggggaagaaggtcactgacaaacgcaaggaccctaggagaatggaaaaacccaatccaagtggaatcgctactcttagtatttccaacagcggtgtcgttggttaccagcccccaacgttgcac

SEQ ID NO: 13199 - DNA, 326 bp, Glycine max
aaaaaaggaatttagggtttcggtctctctttaccggtgccggttttcgcgatcggcgatactacctcgagccgcttattcttgaccgttcgttagaaatcgtaacgatttatagcccgaaccgttacgcctagggtttcgttaagatgaacgaccaatcgcagatgattatgaatttgaaccagatgaaccaacctcaggttatgaatcaggtgaagccgcagatgctctcgcacaatcagcaagcgcacagcctcaaatgaagacatcgcagattatgatgaaccattctcagcctcagcctccgatgatgaatcgtggataca

SEQ ID NO: 13200 - DNA, 785 bp, Glycine max
ggaagtaaattactctctacttgtggatggcgctgttagtgtcactttcagctgtggttttgttcccaaaattttgattgtttcttattcgaaagaaattttagatgcacgagacttggcttctgaacagttttaagtcttgagtttgtggaaatcggtctccgagcttccagacttgctgtgtttcgatctgtttatccatccaccttcatcgaccttagcatctagagagatagtaaatttccactcgtatggtaggagattttcaagtgactatggagaaacagagcagttttccggcatctacaatggaaaaacagaagagttttcgtggatttatggaaaaacagaaaagttttcgcattgttatggagaagcagctcagcttcatgggaagtgaaaggaagaagagcaaggaatcacctgggaaacgtggtgacttaccaattcatttagcagctcgggcagggaacttgagtagagtgaaagagataattcaaaactattctaataatgagacaaaagatttgttggcaaagcagaacctagagggggagacccctctttatgtcgcttcagagaatgggcatgctttggttgttagtgagatacttaactacttggacctgcaaactgcttctattgcagccagaaatggctatgatccattccatattgctgcaaagcagggtcatcttgatagttttgtttaaatttcagccaaactaccatgggtgagaagcctggaggtgctgagagaactactgcactcctttcccaacttg

SEQ ID NO: 13201 - DNA, 507 bp, Glycine max
  unsure (1)..(507): unsure at all n locations
ctcttccaccccatttctgcatatatacacccaccaaattccttccataaaagcttccgaaaaaaataatgggtcacccatcactttttctcgtgcagcttcttgttacctctctcctctttctctcttttgattatggattcggtagggtggaactgacggagactcatcaggattttcccattcgcacgattgtaaagtatgacattgcggattattctgatccacagccaaataccaatccaaagaatgggtatgttttgagtcctccttcatctccaactccaattcatcctccaagtccttaaatggaagctcaagattggactttcaccacttgtttatgtctttctgaacggttttgtaactggggtagtgtgtgatcgcttccagtttgacacgggattcgtagaattaggatcatgatacttgtgttgctgtgaatttatatcctttagttnttcactgtgttttcagaatgcagatttgtgaatggtgctaataaat

SEQ ID NO: 13202 - DNA, 439 bp, Glycine max
  unsure (1)..(439): unsure at all n locations
accatcttttaagtttttcttttttcgtttggttttgtcttttgtttgattcctccttgttgtgatgttctgttcttaccttttgtcaattttaaggattcggtagggtggcactgatagagactcagcaggattttcccattctcacggttgtaaagtatgacatggccgattattctgatccacagccaaataccaatcccaagaatgggtatgttttgagccctccttcgtctccaactccaactcatcctccaagtccttaaatggaagctcacgattagactttcaccacttgtttgtgtctttctgaacggttttgtaactggagtgtgtgatcgcttttagtttgacacgggattcatagaaataggattatggtaactgtgttgctgttaatttgtatccttctatagtttttcatgtgttntcagaatgc

SEQ ID NO: 13203 - DNA, 363 bp, Glycine max
ctcccttaacccacccaaaccccaaatctgaaaaccgtcctattcgtcgttcgaattaggggcatctctgaactggaacaaccagatgccagcgatttgagcgatgcacagtcaagaagaagctgcgtagtgcgtttgcgtttcgttcttccaaatggcggtttccgacagtcccagcggcggctccacgccacctcatcaggaacaacaagccaacagcaagtacggtttcaccaagcccctctctctcgcgggtcccaccgacgctgatctccagcgtaacaacgatttggacaagttcttgctcgattcgggtctctacgagagcaatgaagaatccgctgcgaggaaagaggttcttca

SEQ ID NO: 13204 - DNA, 400 bp, Glycine max
gcttgtcgcgtgggggatcaaccagatgccagcggggggagcgatgcacactgggggggaagaggaagaagaagaagaagaagaagaagatgcttcgtggtgcggttgcgtttcgttcttccaaatggcggtttccgacagtcccagcggcggctccacgcctcctcaacaggaacaacaacccaacaagtacgctttcaccaagcccctctctctcgcgggtcccaccgacgccgatctccagcgtaacaacgaattggacatgttcttgctcgattcggggctctacgagagcaatgaagaatccgcggcgaggaaagaggttcttcaccgccttgatcagattgtgaaaaactgggtgaagcagttgacgcgccaacgtggctacacagatcagatg

SEQ ID NO: 13205 - DNA, 1550 bp, Glycine max
cttctttgtctcggtgcgtccattgctccaatccattttttctttttccttttccgactgtaacacccattttccttcccttgtctcattactcctataaataatttatccatctatcttatgcattgttatttattacaaaatttaataatatcacaccttccaacaacccctgccacagtaatcttgggctccaaaagaaggagaagatgaacgtggatctggaatcattggcagaggcaacttctggggccataggatcactgatcagcaccactattctctacccccttgacacctgcaagaccaagtaccaggctgaggcacgttcctcaggtcgaacaaaatacaggaatctcactgatgtattattggaggcaatatctaaccgtcaggtgctttcactttaccagggccttggaacaaagaatcttcaatccttcatttcacaatttgtctacttctacggatacagctattttaaaagactgtatctagaaaaaagtggttataaatccattggaacaaaagcaaacttggttattgctgctgctgctggggcttgcacagccattgcgactcagcctctggatacagcctcttcaaggatgcagacaagtgaatttggaaagtctaaagggctactgaagacccttacagaaggaaactggagtgatgcatttgatggcctcgggatttccttgctgctgacatcaaaccctgcaattcagtatacggtgtttgatcagctgaagcaacgagcactgaagaataaacaaaacaatgctgataaaggaacatctccagcatccctttccgcatttatggcctttcttttaggtgcaatttcaaagagcattgctacctgtctaacatatctagctatcaggtgcaaagttatcattcaagctgcagactcggctgaaccaacctccaaaacaatgataaaatcacagaaaacagtgtctagtgttctctatggaatatggaaaagggagggcttactgggatatttcaaaggattgcatgctcagatcttaaaaactgttttgagctcagcactgctcttaatgatcaaggaaaagatctctgctactacctgggtgcttatccttgcacttaaaaggtacctattacttccaaggggtaggattaagaacttgtaatttataatagcagttactggaggaagaagcttcaattcgttgcggataatgaatgtggttggagtgcaaagtgtgcactttaacagatacatgcatctcttcaaagttgagacgagattgttttggtggcttctcttctgtcctcttccctggcttattgatatagaacaattagtccaggaatttatgcaaaagactgatagagcaaggcaaagtagaaaatcttgacaataaatggttttttttttataaatatttcttgtttctaataaaggcttgcatcacttatttattttttgtagttagttcttttatataaataagcatcctctttaatgtatgtagtcacttcagtttcagattactaaatatttttgttgttct

SEQ ID NO: 13206 - DNA, 601 bp, Glycine max
cttacgtttccgaaatcacagaaaacagtgcttagtgttctctatggaatatggaaaagggagggcatactgggatattttaaaggattgcatgctcagatcttaaaaactgttttgagctcagcactgctcttaatgatcaaggaaaagatctctgcttctacctgggtgcttatccttgcacttaaaagggtggtgctgtttcgtgttctttttattggcggtaaaatgccagaagatattgtttaccaacaccctttgtttggtggcaagatatctagcacattcccccacagattccaggatgtcagcagcattcgacaagtccctgatcatcaggaggtgtttgcggacccgagccgtgatgaaagcttgatctttgagcttttagaattcaagcctgatgttgctgataatgggagtgctgggtggtttcttcaagacctggctagtgaacaggatgctgaatgaagtgtggttattgagcagtcaggagttcttgaagcacctggtttgatgtacaacaatacgcctgcagttgtaacaactgcagtgggtcaaatggcaatttctaaaagacggcaaggaaaggaaagcacaa

SEQ ID NO: 13207 - DNA, 491 bp, Glycine max
cagaaaataaaattaccgtaacgaactcttccgagttccagcgagaaacccagttccgagttggcgactcagcaccgatggacgagtggggttatgcgtcctctccgccgcggccggtggcgatcgagggcggcgagggagacacggcgctggcgaagtcgcgcgtgctgacgcgggaggaggtgctccggcggcggctgcggcgaacgaggcagctggggcggtgctaccgggcccactactgggccctgatggaggagatgaggtccaagtaccgagactactgctggagctacggcaagagccccttcaaggaagatcacaatgacaacagcgacaacaacaacaaccaaaacggcgtcgtttctggtggtggtgacgacatcgtgcagtgtcgttataacggatgcaagacgaaggccatggctttgacgaattactgtcacactcatatattgagcgattccaagcagaagctttaccagggatgc

SEQ ID NO: 13208 - DNA, 421 bp, Glycine max
  unsure (1)..(421): unsure at all n locations
cccacgcgtccgcccacgcgtcgagagggagagggcatgggaatccgatcggtattcgatggcggcgagctgagaagggaagtggagaaaagtggaattgacccaaaattcattccaaagatatggaagcatatcctcatctctgccaaagatgaagattgggattgggagaaacaagttccctccttgccctcttcggcctactctctccttcgttccaacttcaaaacccctctctcttcctctattcactccgttttccactctgccgacaacctcaccaccaagctcctcatccagctccaccacaatcatggacctttcgtcgaggctgtcattatgaggtacgatactcgtttgggcaaatatgccggccaacctcgccccggtggtctcagagctactctgtgtatntcttctc

SEQ ID NO: 13209 - DNA, 639 bp, Glycine max
tgatactttactcatgtgccgggatccttttcctcatcctctctctactcttgataagaggtacaatatttggcgctttatatattattcttggaaagcgaatctggtttttccctaacatccttgccgaggaagcaacactgcgggagttgttcagattttggcctaagaaagatgaagaggaaaagcccaagtggacaacaagacttttctatgctggggtagctgtgctgttcatattattgctgaggcatcatgcacccgatgaagctgccagagcaaggtaccagaagagggtatctaacatcattgatgatgttcttgaatggtctccgactctagccttgtctgggatgatggataagcaacaaaatgtggctaatgccacagggtccgccgatgcgagcaaaaatggaccggaggatgcagctccagccgatggtgacgatgcaaaagatttcatggaacaggataataatactgaagaagtcataaacgatgtggatgatgataaacatcatgattaaaggttatcatatacctaaatgaaatatatttagtgactagatcacaattttccttttgagtgtaaaagtaccatgtatgaaataataacagtaaaaatggttcttcgccttc

SEQ ID NO: 13210 - DNA, 450 bp, Glycine max
ggggtttgcaaaatgggaactcgaacaaatttctacaagaacccatcaatctcctacaaaaaacgtttaagcgtctcctccgttcttcagaacctccatgcttacaacatcgccgccggcaatgttcctcccgccgatccaccgcaagcgacttccaccgccaatgttcctcccggcaatccaccgcatctcactccctccgccagactcaaacgcagccggaatcccgagccaccggaatttctacgcgaataccgtgacgatgccccttcctctatgtcacaccacgattacatccaaaacagaaggaaagaagtcgtttcgtctcggaatcacgatcgcgttgaattgactgaagaagttttgggaaactctaattctactcttcccttggtggattatgatgcatgtgatgaagatactccttcagaatgtgaagaaacacatact

SEQ ID NO: 13211 - DNA, 391 bp, Glycine max
ctcgagccgctcgagccgtgtctgtggggtttgcaaaatgggaactcgaacaaatttctaccagaacccaccaatctcctacaaaaaacgtttaagcatctcctccgttcttcagaacctccatggtccattccctttcctctttcaaactctctctatctcattcgatgctctaacttaatcaattttcaaattccagcttacaacatcgccgccggcaatgttcctcccgccgatccaccgcaagcgacttccaccgccaatgttcctcccggcaatccaccgcatctcactccctccgccagactcaaacgcagccggaatcccgagtcaccggaatttctacgcgaataccgtgacgatgtaccttcctctatgtcacaccacgatt

SEQ ID NO: 13212 - DNA, 577 bp, Glycine max
gctgagagtgcattttgtgctagccaagacactggtttgttggagaaaagaaaaattagaaaaaaagccaagaagagaattatttcaatattagaagagaatttagatggtgatgcatctgatcatacacaagaacagataagtcaaggacagatttctccaaatttaaaacaagaattggacattgatgattctactgaattttctgggcgcaattactctacccaagagaatgatgatttgattgtgacatatttcaatacaagtattgctgattctgaagctagtgaggtctgtagtcattgtatgcgctgtaattgtgtccttcagagggagacaaactataaagaaagcgaagttgcagtgttgctgagcagccataagaagctctatttgctactaatcaacgttgattctaatgggtcaggaacacttttgagtgtattgagttgccacaaaattgaagaagtttgtgaggtgctagtaggaatgggacttcaagtgttaagggtaaattttgagaatggggaaacgtatctttttgtaacaagaagcattgagaaatcaagagaattac

SEQ ID NO: 13213 - DNA, 749 bp, Glycine max
cccacgcgtccgcttgaatccctccctctctctctctctctctctgactctgtcactcgctatttctctcttctccacgtctccaaattcttaatgtttatggaatggagtctcactcttgattcctctcactcttcctcctccaccactaaccacaacatgttccccactttaggatttccggtcaaccttagcccctcctccgatcacaatcggacggtcctcggtgaagttgacttcttctccggtgctagaaacatctcatcatctcacaccaacaacgatcatggaaccccccttaagtgtgatccccatgtaaatactggtttgcaacttctcaccgctaacgctggaagtgatcagtcaaccgtggatgatggggcttcatcggatgctgaagataagcttgtcaagatcactgagctggcacgattgcaagaggaccttcggcgcatgaatgcagagaaccaaaagctgaaggagatgctcagccatgtcagcagtaactacgcgaacttgcaaatgcatcttgcagcagtactgcaacagcaacagaaccaacgcactgagagcacggaacaagaggttggtcaaggaaaattagctgatgagagaaagcatggagttggcggatgaacggggcctagacaattcctgagtttagttccaagtgaaatagatgatcaattatctaattcttctttccgtgaaaggacttgatcaaccacaccttccagcaattaaaatga

SEQ ID NO: 13214 - DNA, 1186 bp, Glycine max
gccaaacaaaactttgacctccttcagatctatacccttctctcgctcgccctctctttctttttcttcccatttcacccctcgtctttccttgtttccggtgagggccaaccacaacatatgttaaacaaggaacaacctccaaaacataacatcctacgccaaacaaaactttgacctccttcagatctatacccttctctctctctctcttctattttcaaattctacatcatgggcacggaggttctacggccacaagattgtttcacccaacgcatcggtgttccaccgcctggcttttcccggcgaagaacctatggtacccaccacaacaacaaaaacaataacgttaacaattatttcaggggtaaccggaagccgacaacccgacccgaacaaagaaaacgggttgtggacaaaaggcccagtttagatgattcgaggttttcgagtttggagatggagaaggtcacgattcttcggaggggggaatcgctcgattcgaagctgaaaacagaggctttgaagaaggaaggtgataatttggtcgtggttgggacccagaggctcggacccgacccggatatggtcccgaagcagatccggatcgtggatttcaggtccgggcgcgagatttacgccggatcggcgttctcggtgtcgccatcgccgaccgcgctgcccttgccgtcgttttcgaagaagcagccggcggttgcggttgccgactccgcgacccgtgatctcaggcgtcttcttcggcttgaatgagccgattcgcgtccatttctgggtttcgggtcccaattttaacctaccttggcttcctttcttcgttctgttcattaatctagaatcttctgcttctccgttacgctccctctgattttggagtcctgacctgaccgtgatttttttaaacgggagggcggatctggaattggggaaagtttgggggccaaagtgttaataaaagaagtttggattagtttatgacatcttgtaagattgtaagatcttgtggttgttgtggtggaggttggttgttaagggcaagtttaggttgtaatttcagattagaatggagaaaataaataaactaaaagtaaaaaaaaaaaagaagaagaaagaagggagggagatggggtgtttgatttgtaaaatttccggaagtgtattatgg

SEQ ID NO: 13215 - DNA, 772 bp, Glycine max
ctcgagccgccctctctcttttcttcccattttgccccttcctcctttccttgtttccgaggagggccaaccacatatgctaaacaaggaaactaaattctaacctccttcagatctacaccacccttctctttttttccagtttcataaattctacaccatgggcacggaggttctacggccacaagattgtttcacccaccgcatcgctgttccaccggcggggttttcccggagaagaacctctgggacacacaacaacaattacttcaggggcacgcggaagccggttacccgacccgaacagagaaaacgggttgtggagaaaaggcccagcttcgatgattcgaggttttcgaggttggagatggagaaggtcaccattctccggaggggggagtcgctcgattcgaagctgaaaaccggggctttgaagaaggaaggtgacaatttggtcgtcgttggtacccagaggctcggacctgacccggatatggttcagaagcagatccggatcgtggatttcaggtccgggcgccaggtttacgccggatccgcgttcgcggtgtcgccgtcgccgagcgcgctgcccttgccgtctttttcgaagaggcagccggcggtggcggttgccgactctgcgacccgtgatcttaggcgtcttctccggcttgaatgagccgaatcggtgccgtttccggatttcgggtcgggtctgacccgactctaacctatcttgtgttcctttcttcgttctcttccttaatctaga

SEQ ID NO: 13216 - DNA, 551 bp, Glycine max
attgagaagttccgagctgtggaattggaacaggctggaattgaaactgtgaagacgaaggaagaagactggcagaaagagattgaaagtgtgaggaaccaacatgctttggacatggctgctcttctctccaccactcaggagcttcagcgggttaaacaagaactcgccatgacttgtgatgcgatgaaccaggcatggaatcatgctgatgatgcaactaaaattgccgagattcatgcagagaaagcagagttcatatcatctgaatcgttgcgactgaaggccttactagattcaattgtgtaaacagaggcatgagtgaatcacgttatatggaatcttagagcagatcttgtagctctcacggcagcacttgcttaagcagcacgctacaacgagtttaccgcgagacagagagagaaaacatggatgaggtgaataggccaacctgagatgattcgaggttttgaaggttagagatggagaatgttaccattctccgataggaggagtcggtcgattcgaagctgaaaaccggagctttgaag

SEQ ID NO: 13217 - DNA, 945 bp, Glycine max
ctcgaagaatacaacacaaagcttcggaccttttttggtctctggagttacaccacagccacggagctctaggactgctcattaggtagttttttatttagaggctaacatgagctttgctgcgccatcacttggttctgctggtggtagatctgctagaagagcatttgagtttgggagaacctatgttgtcaggcctaaaggtaaacaccaagcaactatagtctggttgcatggcctcggggataatggctccagttggtcccagctattagagacccttcctcttccaaatattaaatggatatgtccgactgctcctactcagccaatatctatatttggtggctttccgtccactgcttggtttgatgttggagatatttcagaagatgctcctgatgatctagaaggtttggatgcttctgctgcacatgttgcaaatttgctgtctacagaacctgcagacattaagcttggtgttggagggttcagtatgggagcagctactgccctgtactccgtgtcctgctttactgctggaaaatatgggaatggcaatccttatccggccaacctaagtgcagctgttggtttaagtggctggcttccatgctcaaagaccttgagtaacaagttacaaggggtagatgaagctacaaggcgtgctcagtcctttcctgttttgctgtgtcatggaaaagttgacgatgttgttccttataagtttggtgagaaatcatcgaagtgcttaagttcaactggatttcaggatgtaacttttaaagcttataatgggcttggacactacacaattccagaagagatggatgagatttgcttagatttctgttgatggtatgcataatatatccgctacccattttgtgaacacttgagtctgagggaatcttcatgacaaggtactgttattgaaacaaaaca

SEQ ID NO: 13218 - DNA, 735 bp, Glycine max
cccacgcgtccgtgcagacattaagcttggtgttggagggttcagtatgggagcagctactgccctgtactccgtgtcctgctttactgctggaaaatatgggaatggcaatccttatccggccaacccaagtgcagctgttggcttaagtggctggcttccgtgctcaaagaccttgagtaacaagttacaaggggtagatgaagctacaaggcgtgctcagtcctttcctgttttgctgtgtcatggaaaagttgacgatgttgttccttataagtttggtgagaaatcatcaaagtgcttaagttcaactggatttcaggatgtaacttttaaagcttataacgggcttggacactacaccattccagaagagatggatgaggtttgtgcttggctaacatcaaaattgggccttgaggggaacattgcttagttagcaagcaaaatgtgaaaaataattcttttcgtttttggtccattgtaattttatgttattgcagatttgcttagatttctgttgatgatatgcataatatatccgctacccattttgtgaacactcgagtctgagggcatcttcatgacaaggtactgttattgaaacaaaacacggtggttcttaaagcatggtgatggaatatgctgctaatatattatgccggagaggattctaccatgctagttgggttttcgttttggcaaatgatctttatggatacagcttgtggagcg

SEQ ID NO: 13219 - DNA, 469 bp, Glycine max
  unsure (1)..(469): unsure at all n locations
cgcacttcccataataacaaggatttggagttttaccagaagacgcaaacccggagccctaaccttgggcacaggtaaccaacaatggcggcggcggcggcggcaaagcgttgccacggcgaagtcctcggcctcccccgcgactgcgcccccgacggcatccgctccgcctaccgccgcctcgccctgcagcgccaccccgacaagctcgtgaaatcgggtacgactcccaccgctcccaaatcctcttctccgaccccaacaccgtctccaactccttcgtccccgacctcttctccttcttctccaacaccgtctattccggctactccgacaccgcaaagggattctacaaggtctattccgatgtattcgataaaatccacgccaacgagatcaatttcgcgcgtaaattgnggctgggtgttgatgcggttagacaggcgcctgttatggggaacttggacag

SEQ ID NO: 13220 - DNA, 264 bp, Glycine max
ggatttggtattttaccagaagacgcaaacccggaaccctaaccttgggcaccggcaaccaacaatggcggcggcggcggcggcaaagcgttgccactacgaagtcctcggcctcccccgcgactgcgcccccgacgagatccgctccgcctaccgccgcctcgccctccagcgccaccccgacaagctcgtgaaatcgggtctctcccaagaagaagccaccgcgcagttccaggaactccagcacgcctacgaactcctctc

SEQ ID NO: 13221 - DNA, 547 bp, Glycine max
cccacgcgtccgcccacgcgtccgggaagagtgaaaatgaaaatgagaatggggtcggggggagtattgaacacaacacccactgcacacggcttcataactaaaccgccatcgctatctccaagactttctgcgccccaaagatgagaaaacgcaccatttacgcatggctagtagcacttgtttgcttcctcctactcatgatcgtcaccccagccattccccagtcacaagaataccatgatttcgccgaccaccgcaccttcctcggtattcccaatgcacttaacgtgatatccaatttcccttttctggttattggcctcgttggacttgtgctctgttatcatggaaattactttaggctcagcttgcaaggtgaactatggggctggacatgcttctatgttggtgtggctgcagttgcagttggatcttcattctatcatctcaagccagatgatgctcgccttgtgtgggatcgcttgcccatgactgtcgcttttacatcaatcatggcaatattcatcattgagcggattgatga

SEQ ID NO: 13222 - DNA, 564 bp, Glycine max
actttttctcgcagcacacacagcatagtaccatggatgcgctgcgcgtcgcccccaccaccccgcctctcctccgccgccaccctctccgcaaaatggcgccccatcccctcaccgcgcgtccccgccgcgcgcccctcatcgtcgccacgctttccatgccgccggaggccactcactcctccgccgtcgccatcgtcgaagatccctcggaggcggctcctcctccgcgcccccgcgtctcgccggattccctccagtacccgcccggcttcgtcggcgcgattcccgccagctctcgctcagacggcggcgacggcgacggtatgaataatgccatgacttatttgacgaacattctctcttcgaaggtatatgacgtggcgattgagtcccctctgcaattggcgccaaagctctctgcgagactcggggttaaggtttggctcaagagagaggatttgcaacccgttttctcatttaagctccgtggagcttataatatgatggcaaagcttccgacggaattgttggaaaagggggttatctgctcgtctgctggga

SEQ ID NO: 13223 - DNA, 863 bp, Glycine max
atcaaaaggtctgttagttcagacaaaggagaagaagcaactgagagtaaaaaggtcatatatgaggatgtgtctttggaaagaggttctttcttgggtgcaacaagccatgagggcattccgtgctcagaatttagaaagtgccaaatcaagactcaatctctgtgcagaggacattcgtgatcagttagaaaaagttggtaacacttcagagttatgttcacagctaggagcagtcttgggtatgcttggtgactgctgccgagcaatgggtgatgccagttctgcagttgcttattttgaagaaagtgttcaatttctgtcgaagttgccaaaagatgatttggagattacccatacactttctggttctcttaacaaaattggagatcttaaatattacgatggagaccttcaagctgcaagatcttactattttaaatctttgaatgtgacgtgatgctgtcaagcacaattcaaacgttccatcccaggttttagatgttgctgtctctcttgcgaaagttgcggatgtggacagaaatctaggggatgaaaagttagctactgatggatttcaagaagccatagacttactggaatcactcacgttgaaatctgaagctagtgggctcgagcagcggcggcaatccgtcctagacttccttagaagccaacttccagataaacaagaacaagctgaggcaccagtctgagataggtggtccacatgaagaaaggaaacacagattccgatgcaataaggggtttcggtatgccgtgggatgagtttgtaaaataagctcagcttaacaaaggcactactaatggaggaagaggagatctctgagtaatgaatattc

SEQ ID NO: 13224 - DNA, 587 bp, Glycine max
tatctttttgaccctcaaaacaaagtgaagcatatagtagaaaagaaacgaacacggcaatgcaaacgcgcgcagcgttgacaacaaaaccacaaaccaattaaccgaacatgaattccgattgggacaccggcgccggcggtggcggtggcgcgacgctcatcccgggtctcccaaacgacgtcgcggcgtcgatcctctcgatggtcccctactcccaccacgggaggctcaaagccacatgcaaatcatggaaactgctcctctcctcgaaatcgttcttagcctcgctgaacggaaagaaccaccttctctgcatcttcccgcaagatccttcaatcgcttcaccctttctgtttgatccgaacgcgctcgcgtggtgcccgctccctctcatgccctgcaacccccacgtgtacggcctctgcaacttcgccgccgtctccctcgggtcccacctctacgtcctcgatgggtccctcttcgacacgcgctccttccccatcgatcgcccctcgccgtcctccgccacgttccgcttcagcttccacgacttttcgtgggagccacgcgcccagatgctgtct

SEQ ID NO: 13225 - DNA, 512 bp, Glycine max
ggatgctcttgtcaaggctgggattgaaattgacgaggaagagcttgctcgctttgtggagcatgttgacaaggataataatggaattatcacttttgaagagtggagagattttcttctactttatcctcatgaagcaactattgaaaacatatatcatcattgggagagggtgtgccttgttgacattggagaacaagctgttattcccgaaggcatcagcaagcatgtgcacaggagcagatattttattgcaggggggatagcaggagctgcttctcgtacagcaactgctccacttgatcgtctaaaggtggtcttacaagttcagactggacgagcttctattatgccggcagtgatgaagatatggaaacaagatggcttattagggtctttccgaggtaatggattgaatgttgcgaaggtagctccagagagtgccatcaagttttatgcttatgaaatgctgaaaaatgtaattggagatgctcaagatggcaagtcagata

SEQ ID NO: 13226 - DNA, 522 bp, Glycine max
agactctcccaaggtagaagcctacaaagaaagaaagaaagaaaagaaaactacactgtaagataatgtcaatgaagagagaggtttctattttacagagagaaactctttagagatagaaagtcagtgacaagcaccagaagaagtgcctagcacccaaaaacgacaccagattctggataaaaatctaatcttcatcgctcttagatccattgagtttgttcttgcacatcatgattttccctgggtcaacaaccggttgagcacacagaagaaagagaagggtgtgaagagatgggtttgatcatgacccttttgatgagtcacatgcccacctagctcactagttttaatcgcgttctttttcgtgtatgttatgaaatttgttcatgtgggtcatgctaattcccttcgatcgacgagataattcaccttctggttccattcagaattgggttttctttttattgcgtgaaataagagtttttttttttgaggggctcagtggattttgatgagcca

SEQ ID NO: 13227 - DNA, 1841 bp, Glycine max
tgtacctcctcatcacaaattacaagctgcagagattgcaatgacactgcagacttcggtaaatacctaatcatggggcattccctcatgtcaatcttctctaagcatactaatctaccaatctcttcagggaagcatgtgaggttaacacattgagaaatatcaatatacttcaatctcttcatgtcacacatgctaggaggaagtgtttctagatctggacaagcatataaacggaggatctctagtgatcttagtttgccaaattcaacaggtagttgactcaaattgtggcagttggtgagactcaagttttgtagtgactttattccacaaatgcttgagggcaattgagttagatcatcacagtgatcaagagtgagctcagagaggttagggaactgtttcccatccaaactattattaatcttgcagaggactacaaataatttgcccaagttttgcaagacagtgcctgataactgagggatggaaaccttttcaagccagagacttctcaagttggtcaaattcctaaaaactgaaacattttgaaggcgggcatgtgaggtgctgtagtttattattatcaatgccctcaaatttggcattttattgataaagggaggcaaaaagtattcactggatgtgaaattaatgatcaacacttcagccttgggaaaatccagatcaaaccagtccattttggtcatttcacctgtgttgattgaaacaatctgtgcttcaaagggttggtcctcgtatctagaccattctttggggagtagtccattttcttttcgtgtagccataactagccttcggtgttgatgaatgctgccacggttgctcaaatgaagagcaaggtccctcaatatatcatgttgagtgacagaaatctcaaagcaactgctatacatgcccccgacacgtgcctcttgtactaaggtgagaagattcttgtttgaaagctcaaccacaatggcatatgcttcagcttcatcgatgtcatagatttcaacccacatattgattaaaacttctagaggaatctttctatcctcaggaaaagaacacaggtccaagaagcactccttgatcttttctggcaggtagttagtactaattgccattctatcaatcagattggtttcataggtttcaccaatgctttggccttgggagagcctgcttttaacactcaaccaaaacatttcgttctggtctcgcaaagaagctccaatcaccttcagagccagtggaagccttccacactcagccacaacctgcttcaccaaactcacattagcacccataggaattgatttctgtccaaaagcatggtgacagaacaaagaaagggcgtcatgttcacccagcaattccacatgataagtggcattaaaaattgttgggaagttaaatctggataccacaaggaatttgcagccaggaattttcaacacaagcttgtccagcactgagagtgaccacacatcatccaaaacaacaagtacttgagtttccactttacactcaaactgtggcatccattgtggaaccgcataattgccattcaaaccttggttgcccatgatgtgtacccagatactctctctcagctgctccacattcggggactgcgacacagtcaaaaacaagatcctctccttgaaataacatctcacttggtcatctctgcagacctctctagcaagagtggttttcccggacccaccaatcccgcaaataccgacaaccgaaacatcaccactcctcgtaaaaatcatctccaaaaccttgttcttcccgaactccaacccaacccgaaaaccgttatt

SEQ ID NO: 13228 - DNA, 607 bp, Glycine max
ctgtgatgatttgatccaactgccctcaagcatttgtggaatgaagtcactccaaaacttgagtctcaccaactgccacaatttgactcaattgcctgttgaattaggcaaactaagatctctagagatcctacgattatatgcttgtcctgatctgaaaacacttcctaatagcatctgtcacatgatgaggttgaagtatatggacatttctcaatgtgttaacttgacttgcttccctgaagagattggtagtctggtaagcttggagaagattgacatgagggaatgctccatgattagaaatgtgccaaagtctgcattgtcgttgcaatctctgaggcttgtgatttgtgacgaggaggtatctgggatttggaaagaggttgagaagccaagcctaataattttcatattcaagtttcagagcagtactttgatttggactggctcaaagagtgacataatatatcatatatgtgtatatatatgtttttgtgatgtttttactttccaattcaatgtgaatacttgtagataacttctatttgaagtggaaattacttttctccaaaatcaaattcttgtgtcaagagtattgattgat

SEQ ID NO: 13229 - DNA, 431 bp, Glycine max
ggctcgagtttgaccccagcaaacagcaagagagaaatggaagcagcatcggccacaattctgctactgatactaattcttgctctgatatgctcatggaaggttctgaactggttatggctgagaccaaagagactagaaaaactgctaagagagcaaggttttcgtggcaatccatacacccttttctttggagactccaaggagtttctcaagatgagaaaggaagccgtatccaaacccatgaccctctctgatgacatagtgccacgtgtctctgcctatgtccaacatagtgttaacaagcatggtaagaattcttttatctggtttggaccaatgccaagggtgaccatcttagatccggagcaaatcaaagatgtatttaacaagaactatgacttcccaaagcctaatttgaatccacttgt

SEQ ID NO: 13230 - DNA, 408 bp, Glycine max
ctcaattccaccatgagaacttctttggggagtttttcttcacccttcacaagcttccgttccgcctcatcatggttcgaggtgtacgccgctttctccacattcatgatgcttctgagaaccgcgatcaacgatctcataccccaccaagttcgcaccttcatagtcacaaagataaaggctttgttctcagatcgccaaaatattaaccaggtctcactccagatcaacgagatttgggatggccaaatcaaccagctcttccaagccgcccaagagtatctccctgctcaaatatcccactcttacaagtccctcaaagttggaaagctcccaaagcacaagaacattgcggtggcagtggatggaacacaagaggtcgtggatcttttccaaggcatcaagctc

SEQ ID NO: 13231 - DNA, 1029 bp, Glycine max
  unsure (1)..(1029): unsure at all n locations
aaaataaatgaagagaaaaaggagggtaaggaggtgacaaaagaaaaagactaaggagcgaaagtaccttattttagctgggcatgattctaaactgatccgaaaccaacgaaaaaaagcggaagatcatgcaaacttgcacttaaaagctggtttttgcctcattctcttccttctgtgcgtccacgcttcatgctattgcttcctatctctttctcatgaccccttcatggagtccactttgctcaccaatctactagtcttcaacaacaccctccaaccagagttaatgaggagtgtgcatgtgtaccgccgaggggatggagagaaaagggaagttgagagagagtttgtgttttcagagagcggctcctatggggaaatgcaggctaccccaattcctggattggtaaaatctcgtgtttctgaagtgtgtgaagggcaccgaaatggagtgtggctttgtgtctttgcgttccatgccgatcacactcctcaattttgccgcattccaccggttttgttggtcacaagaaacccaaagcttaagatgattccaaacttgcttgatgatctccatgtgatatacaagttggaccggaaggaggaagacagtgatatagcacaagactctacaggagaagaaaggcaaggacacagcaacaatttccaaccatcacgaaaagtctttcccgttcttgatcaggatctcaattttcttccttatgaagactatgagtctgagtcaccggacaatgagacagatgttgaaagctcaccaggttcagagtcaatgctctcagttatctaacagacataacctatttagcaagtttgttctgcagctttgttactacatggacatattcaatcttttggtgaaacctatctgttacaatatctccaagttttgactgtcatgaccatatttgttgtaacttaattctacggttctgaatgtagaaaagttctcaaatgctaatcaaatacaggaatcctctntatgactgacatanaaatggaacttct

SEQ ID NO: 13232 - DNA, 448 bp, Glycine max
tgatccccaaaaaataatacccaggataatgcatggcttactctctctctctgcaacaattagggttttaaacctttaatccaatccagaaactcacatttattatcttactgcgatttttccacctcgcgcgatatggtattgtccctttccatttcccattagcttcttctcctcacgcccgctcatgagccaccatcgcaacaaccacgctgcgctcactgtttcaaccggcgatgcgaatcccgatgactgtcaccaaccggtcgatgctcccctttccgcagcagaacagattagggttagggtttcatcggaggacaacgcggcacccgcatcctccaccgccgatcgcttcgaccgcatcaacaaccacgccgcgtcgagcagaacgtctgaattagcaagattcttgaactccgaggtgaaatcgcttgctatcggaatt

SEQ ID NO: 13233 - DNA, 424 bp, Glycine max
ggctcaccctgatttgatacatgcattccaagctgccgcagttgctgggggatctggaagttcaggtgcatctgctaacaaatctctcaatgctgcagtaatgggtgaggcactgcccagaggaaggggaattgatgaaagggctgcacgtgcagctgctgaagtcaggagaaaggctgcagcaaggggcctgatgatacgtccccatggtgtaccagtccaagccttgcctccccttacccaacttctgaatattataaatccaggtgtgacttcagatgctgtggacaatggaaatgcagatcgagtaaagaaggaagcaaatgacattcctccaagtgatctaattgataccaagaaaggccaaacaactcctgtgcaacaacaggaacaagctccggttggtttgggcaagggcttgtca

SEQ ID NO: 13234 - DNA, 680 bp, Glycine max
cgcactcttgcagatcgaacgcacccaaagaaaccctgctactgccaccgcgctagctagggtttcattccacccactcccaacaatctcccaatagaatgctgaaagagaattgctgattatcgcttcactcaactctaccaaatcgcatcactgaccaatctggtggagccgattccacagtagatgacatgaaaccgtgcttgcggacaaagcctcttcttcttctgctctctctgctacttctccacaacatcacattcgttctctccgatgattccagcaggaaaaacaccttccgcgagcgcgaagcctccgacgactccctcggataccccgaaatagatgaggatgcacttgtgaattcaaagtgccccaagaatttggagctcagatggcaaacagaagttagttccagcatctatgcaaatcccttgattgctgatattaacagtgatgggaagcttgagattgtggttccgtcttttgttcactaccttgaggttctagaaggtgctgatggggacaaaatgccaggctggcctgctttccaccaatcaactgtgcattctagtcctcttctatatgacattgacaaagatggagtgagagaaatagctttggcaacctacaatggtgaagtgctgtttttcagggtttcgggctatatgatgtcagat

SEQ ID NO: 13235 - DNA, 510 bp, Glycine max
tcaacaagttcgttacttcgtttccacaataaaaaagaagaaaaaaaaaactctacctcgccgggtattcttcaaatggccaatactcaccgctgccgatgaagatctccggcgactccacccgccctctgcgtccattcccgccggccattgcagccccctcgccggactccgatctccagccgctccggagggccacccgccgccatccccgaactccgtccacccgcctgaggcgcgccggaggacacaccggaaaacggagcaggcccgaaacccccttgttcaagtggaagatccacgacggcgtcagggagagggagcgtcgcgcggcgatccgctcgaaggaggtcggccggaagaaggaggcgccgccccatgccttccgtgtcggcgaggaagctcgccgccgggatgtggcggatgcagctgccggaagaggcggcgggtgatagtggaaggcgaaggggttcgagaaagatcggtgaagatcgtttgggagttcagcat

SEQ ID NO: 13236 - DNA, 1055 bp, Glycine max
gatactaaacgatggtaacatcaggataatgccatcgatggcctagcctaaacttccctgcaaaatcagctttggttttcttctgtcactgctctaacctttaaacctctctcattcattgttctttctccaccgtcgaaaatccctaagttcctgctagtttcaaccttcgagtgctctctggaagattcggtatctcataccgttgggttcaagttctccctctttgttctagttttgggtcttcgggaggaatctatggagacacaatcagatggtaatgaggacaacatagctgccattaaaaatatgaggcagcagcttgaaactcgcatagagtcgcaacacaaggctcacatggagatgcttgcttctatgcaaactgtaatacctaatcttgtttcatcccttgacctttctctcaaggttgtgtcttctttcaaccgtcgtccttttgctcctacaccttctctgcctcagcctgatccaaaactgagtcccaaaaaaccggttgaactaactcaccgtttcaatgcggaaacctgtgctgatggctctattgaggcaaacttgacaaatcccaagaatcaaaagcccaaaacatctatgcattcaaactcagcatttcaagtagagtctgagaaggttagtccattagcggtggttcgatcaatggtcactgtttgtctattagggcgagtacccttctcaccgattgattcttccaccgtgtcaaggaaattggaaaatgatcagatggtgacaccaacagagaaggcagcacttcaggaacttggaggggattcgggggcaacacttgcagtggagatagctttaagggcaatggcagatgataatggtggtgttgaagtggaggagtttgtgctgagtggcaaggcaagaattatggttttaaatgtagaccggactcggcttctgagagaattgccagaaagtgtgcagtatcagcaacttgaatcaagttctggagatgggaatgcgaatcaaaatcaagttcagcatatcactcatagtggttctaatgtgaatggtag

SEQ ID NO: 13237 - DNA, 625 bp, Glycine max
cagaaactggtcatgatgctgaagaacacgaaagcactagcagtgaggagcttgatgagttaccaatttccagtgacatgcctcacctttatcctcgtgacttaataacatgtagtgatgctgtgtctaaatggcaacttaaagggaaaaggaataatcggaatcttgtaaagaggtccgttggtgcttctgaaggaaaatgtattttggatggagcaggagcagatgttgaaggaaggaatggtcatttaaggcacaatagaaagggtccaagtttgcaccgctacaaatttgattttggtgatacttttgatgacgatggtcagatttttggactggaagatgaatactctctaacttctagatctatatcaaaaagtggaagtaaaattcatcgtggtgtagcttggaatgatttggcctggggtgaccatcttgcttcaaaaggatattgggatgttaaagcatattctccaatgcatggtgatcgttatgattttggtgggagggtgaggtcgatgctggttgatgtagatttgaaggttcaagcaagctataggaaagagcatgtacctttcatttctctgatgagtaaattagatgggagggcaatagtagggcaccc

SEQ ID NO: 13238 - DNA, 1048 bp, Glycine max
ccctctgccacgttcatctcccatttggtggttccttccaaaaattgagggcattctagtaaaactctaacacaacacacacaccaaatctgagagctggatttatgtctctgtttacttctcattggctgcacctcttcacaaactagatggaatgttattttataatccttctccatcttttctcttgagccttccttcccacaccaatcttctccaccacttcacacaaccttaaatccaacccaaaaccaaaagaaacacacacactcagaaacaccaagagaagaattttatttttttcaagaattcgagaagttggtgtgatctgatgctagtgtgtcgaagataatctgagaagaacaaaaagagaaaaaagtttgattggcttctttttccaatggagtcagatcttcggcagcaccctcccatgtttttggatcaccaccaccaccagcagcagatgaattctgggttgacacggtaccgatcggcgccaagttcgtatttttcgagcatcattgaccgtgagttctacgagcacgttttcaatcgaccctctagccccgaaacagagcgaatgttgacacgctttgtgaatagtcttggtgggggtgatgctgtgatgctgatgcagaggattcacttgctactactcagaatcccccaactgttgttgcggttaaggaagacgttaatcagcaacctccggatgttacatccatgaataatgaaccacttgttctccaacaacaacagcagcagcagcaacaacaacaacaaagtaataatatgtataattatggctcttctggtactcagaatttttaccaaagcactggacgaccacctttgccaaaccagatgaagactggtcatggaagtagttctaatcttatcagacatggtagctcacctgctggattgttttcaaacattaacattgatattactggctatgctgctgttgtaaggggcatgggaactatgggagctgctgctgctaataacaccagcgaggaagcaaacttttccactgatgctgttc

SEQ ID NO: 13239 - DNA, 1084 bp, Glycine max
ctctctaaggcctaagctaccaggagctccctatctacagtgtttccctctctttctctctctctctctctgcaaaagctacgaagctgtgttctgatccttcaaattaggttgtttgctttttttggggagttaaatggatgctaggccgtggatttggtcaatttgatctcaattgaaattttttagtatttctgatggactcgaaaactagttctagagctctcccaaaacaccatcagaagacggctgggattcaaacccttgaggcaaaagacacagggtcttctttgcagaagggggagaaaacagagctggctgctcctgtggatttgtctatgtatgcagcgaacgcatccaagcagaataccggggaaacggccgaaatcaagaagttaggaggtttaaccctaaaggggtctgctgattccttgagcaataaaagtggttctggtgcttcctcatctgttctcgacaaagctgttcatgctgctaatgagaacataggctcacaggaaagctctattgatctagacaaaaagacgtcggaagatggaagtgtgaagaacagttctgtttctgccaaagttagtgatggggccagcagtcttgcaaagacaagtgggagtgccaagatcagcaaccgagctgattttgttgagagtggtaagagcagtatttgcagaggaagcacaagcagtgatgtgagtgatgagagtacttgtagtagctttagtagcaccataaacaaacctcacaaggcaaatgacttgagatgggaagctatccaagcagttcgaagtagagatggggtgttgggtttaggtcactttagattactgaagaggctgggttgtggggatattggcagtgtttacctctccgagttgagtggaactaaatgttactttgcaatgaaggtaatggacaaagggtctctagcaagtcgtaaaaagctacttcgtgctcagacagaacgagaaattctgcagtctcttgatcacccttttctcccaactttgtacacccattttgagacagaaaaattctcatgcttggttatggaattctgcccaggtggtga

SEQ ID NO: 13240 - DNA, 265 bp, Glycine max
ccctcgcgcccgctctctaagctaccagtaccaggagctccctatctacagtgtctctctctctctgcaaaagcaacgaagctgtgttctgatccttcaaattaggttgtttgttatttttggagacttaaatggatgctaagccgtggattaggtcaatttgatctcaactgaaactttttagcatttctgatggactcgaaaactagttctagatctctcccgaaacaccatcagaagacagccgggatttgaacccctgaga

SEQ ID NO: 13241 - DNA, 654 bp, Glycine max
cgcatttacactttttattcatttctctctctctctctctctccttcccgtgttcatcctgggcgggcgagaaccccacctgctccggcagcagctacagaacttagcggcaggtgaaatgatcgaacttgcagcgtaattatttcagtccagctgaaattgaaagtaactgctttctgagattctgcaaccgcatgaaaccctagaaatgagtgccgcaggtggtgcatttggtggcaatagggggctccgtccagtgcctcccgaaaaggggatatttccattggaccacatgcatttgtgtgacctcgagaaaatagaatatctcaattgtctaaagactgctgggcaccagtctgaaaaatgcaggcaattctcaaaaaaatacctgcagtgtcgcatggagaagaacttgatggcaaagcaagacctcggtgaacttggttttaaggaaagtaatgtagaaactcctggagggaacattactgacagggttgataatcaagaacaatgaaccccaagattaagaatgcatattgattttgaggttgagttttggtgatgccattttttccgttgtctttcaattcatttgattagtaatgtaccagcactgtgaacaaaagatgatggacaatttgccctaaaaaaaaa

SEQ ID NO: 13242 - DNA, 722 bp, Glycine max
agagcacaagtcttctttacgtaattctattcgaatcgaataggattaacatgaatcacaaagtaaatattattttaatttgacagaatttaagatttaaattcttaagaaataattaaataataacatgctatcataattttgccgacttggtgtggaattttaatagtgctaatagatagtattttaaaagtgctattataattggatttattgttcaatctgactcacagttggactcttccaatctagaatctagagtaggcaacaaaagttttctgtcaactcttgctacttttgtcaaacgacaaacacataacataacgcggtatgtaccgacctcggctaaggtgcgtaccccctattatgctatacgtcgtttttcaagggtgccaaatgagattagaatctaactaataaaatagtgaagacatgagtaatggcacaatcaacacaagacaaagatgaaactggagtgttgttgttccaagttgccgccgccgcgttcatcctaggccagaatgaggcggttgcgttgcgttgttgttcctcctcggtgagtattcagtgttgttcgatctggaatggagaacgtgttttatcatgattttcattgttaataattttaaggaagcgtgccacatcatcgtcgacctcttctgaactagacaagaacacgcgtatgtgtttcatttcaaaaaatgtataccaattttattttg

SEQ ID NO: 13243 - DNA, 381 bp, Glycine max
cccacgcgtccgcccacgcgtccgcacattggcgtagacaacagctaatgatggatgagatatctgctctttcctctcccaactggaaaaattccatgcctaatagtccatcttttcgtgttcctttgaatgatcacactggggagttaaataggctttcaggggtgaagcctgctaaccttgaagatatgtttggatcgctcgatccatcaatttcgtctaaataccatggaatctcacttgatgttgcatgacctcagttacaggctgcaaccggaatccaaatgcgccataatgggaaccagcagctaggatggtattcattcagccattccactttgaatgtgactggatcgcgggccttcatgcttgaacaatctg

SEQ ID NO: 13244 - DNA, 528 bp, Glycine max
attccgccagacctaagaacgcgaacacagattcattcacctaccgttcctacccttctctctctcgccgcctcttcttcttcctctcgcatgctccttctctgaaccaaaccaatccattattcatttgaatcttcttatacatcccaaaaaaacccaataaaaaaggggtctttagaaggttctggttgatgggtaggagaggaatcaagctattcgatgaagaaaggaacggtcttttttcaatttccaattttgggtctcaatggggtggtgttagaggtgatggtgttcaagaccctgtgaatttggctgtgtatgcaagcattagtcaaatgggaatggggtttggtgttcaagaaccaaacccttcttcttcttcttctgatggtgataattcccaacacaacggtggcatgagcatgagaatgaggattccgtgcaccgagttgtacgttcggtacgtgcaatccgaggggcaggtgaagattcacggggttcctgaggaggaagaggtggtggaggggg

SEQ ID NO: 13245 - DNA, 282 bp, Glycine max
cagagaaacgcgaacacacagattcagtcacctaccgtcctacccttttctctctcgccgcctcttcttctccctcgcgcatactcaacagaagcccaaaaaaggggtctttagaaggttctgattgatgggcaggagaggggtcaagctattcgatgaagaaaagaacggtcttttttcaatttccaattttgggtctcaatggggtggtggtggtgttcacgaccctgtgaatttggctgtgatggcaagcattagtcgaatgggaatggggtttggtgt

SEQ ID NO: 13246 - DNA, 423 bp, Glycine max
cccacgcgtccgcccacgcgtccggattctgattcatgcagtggcagccacctctctggtcttctcttgtcttttgaatcgaatcaaatcactgatccacaacgacatggcactctcgcgtcttcgtcaccctctcttctctcgctcccttcgcatcctctcttctcccgccagatccctctccagaacttctaattcatccatttttaccctcggaggtgatcatcacaatataataaggcctgcattttgctccaggcttactggaattcatgatagatctttgaagtcaaagtggactgatgtcaaatacttttcatcttcagattcttcacatgaagtccttgggatgcctgctttatctcctacaatgacccaaggtaatattgctaaatggaggaagaaagaaggagaaaagataga

SEQ ID NO: 13247 - DNA, 696 bp, Glycine max
cccacgcgtccggaagcgggatgctcagggatcaggatctgacagtagttcatcagtgaataccggcaatgttgctgctcctgttggtcgtgggttcacctacatcagaacagaatctaagcccgaaggcagcttgggtacgacaacatagtttatttcttaagatggtgttggactgcgatttcatcagagtgctttttcatgtccgatggcctaaaaattggtaaaaaaaaaattattgatgtacgaagatgcctgccctaaattttcgattttttcatatgtacatggaggatattttatatctaggtgtctatgtaggtaaagtaatgacgtttctaaaaaaagaggtaaatgacgttcaataatgtttatttttttatgtcatcggttgaagctacaggggaggacattgattttgttagagtgcacagatgagaagaatgttgtggatatgttggaattatccgtacatttgaagtgtgtggataaggtggatcttgtggttttggttgcgggatagcatgtttctctgcaatttttttgtcatgtgctacctatgaaaagattaaataaaaaaaaaggggtaaaggggaatagttgaatttcatttagactgcgtaattatcttcactgtttcagaacttaaggaaattaaatattttattctttctgtaaaaaaaaaaaaaaaaaaga

SEQ ID NO: 13248 - DNA, 761 bp, Glycine max
acgcgacttcagccttgatcttccaagtaacttaacttccgtaaatggttgacagatacgagaaaaggagaaagttgaaagagagagaaacatcgagctgcagttctgttctagggttacacttgtttccattgctggtaaagaatctccaatcttccaacactgcgtcactcgctttgttcccaattcagtccacaatttactttttccactttcccctaacctcccactcggaactcgtcgttacctatcgataatgaatttggggttacctcgctcacatccatcggtgtttactctgtaattaggaaccatgtcgaggcccatgttgcttgttttcttgctgattatacttataatcacctcacagttcgagtggaagcagcagcttgtggccgatgttgactctaaccccaacttgcctcagaagcagcatcagatttctaaggctgaagaaaccgttaaggagaagattattttagtgcaagagaagaatattcgaaggctgaatgagctagtgcggcatctccaggaacaactgcagcagtgtagaggacgcaatggaacaataaatggaactgtaagccctctagctgagcggattcttgagcttgagcgacagcaaattttagagggttaagcaaatgcggctagtacggtaatgaaggtcggtgttatgctcaagctgtgaaggtgttccttaattcgggtgggaggaatgttgtagaagatttgctcccttgctgatcaattacgatttt

SEQ ID NO: 13249 - DNA, 252 bp, Glycine max
ttctttttcttcttcgtcaaactcatcaatttgaattcaccatggattcccttccttccgtctcgccctccatggtcctccctccgagccatcctttccgccgcctccctcccagcctcgtctcctcccgaaccagaagccgccgccgccgccacgtgtcggtgtcctgcaccctcgccggcgacggaccgatgacgaagtcgaaagggctcttcacatggacggcgcattcccgcactccgacgagttcgt

SEQ ID NO: 13250 - DNA, 431 bp, Glycine max
tctgttctgagaatatctgaaatgctacatttattatctacagagtcctgaatctgtgtatgggttcaatgttgatgtaacatgttagactgattctgccacacttctgattttatgacattaaaaggagtctacacaattttttttatcacaccagaattttttcatgtattgctggttgataggcttgcagtcatgttattaaatattgataatcatctttcgaataatggggttttagtatggtaaaggcaccattcaatgtatttgctgagaaaattctgcattggcctttctgacatcttaattttttttctggccgaatatttctcccttaccaagaattttggatttggtaacacattgatgattgggattcattttgcttaacgtgcaactaacctccagagtccagacctccccttcccctg

SEQ ID NO: 13251 - DNA, 788 bp, Glycine max
actatgtggtaaatcatcaaattgctagctatgctgataagttgttgtcattttttgtcaataaatttattttattttgtctgtctgcatcaggatattcacaaaatagagaattatctgccatttctggaaattttgatatccctatgctgatgcaacaagtaccatgaaccaaatccaaatttctcaatggaatgcggctcttaagatacgctggagtagtgccctgaccacatcttctttcttcaaaatcaagggccccaaattttttcaaattaacaatttgcgatttgagcttggtatgaccctttttctttgtggtggaatcctgcgagagagggctttagaagttttatcaaccgatttggttcaatctgccaccattttcagacaagctgctggcatttatcatcacctagcacaagaggttcttccccacttagagcctgaattgccaccagaaaaaccccctgaagctcttgctgcagtatcctccattatgagcctcatttgcttggctgaggcccaggcagtaaccataaggaaggctgaagagaaaggtacttcttcaagtctcctggcaaagttgcatcatggtgttacactttttcttgaagaagctattggaatttttcatacagttgttacacagtgcaaagacatttcatcacgcttgtcggaatttatgtatttctgcaagtgtttacatgagttgaaaggtcagcaatatcttgcagaaagcctgaaggctcgtggtcaaataggggctgctattggagttcttagtt

SEQ ID NO: 13252 - DNA, 1350 bp, Glycine max
  unsure (1)..(1350): unsure at all n locations
ctctctcttctcttcattctccctcttaattcttttctcttttctttctttcacacaaactcctcttattatgatgggtcttgatcaagatgctagcagcaactctggccttcatcttattctagggttagctttgactgccaccaccaccactactccatcactaccatccatttccaacaagcttgatcatgttgatcatcatcaccatcttataactcttagaccaacaacaaagtcaccctataattcctctgaggctgaaccatcattaacgttgggtctttcccgggagagttacctcaaagtccccaaaagcatcataggacacaacaacaacaaagtctcatcctgtgatgaccctcttgacttgtccacacagactaattcacctcatcacagtgctgtttcctccttctccagtggcagggtcaagagggagagggatctcagctgtgaagaagttgtggatgcaaaagagattgatcagagggatcttagctgtgaaggaataataagagccaccgaagaagaagaagacggcgccgccaccagaaagaaacttaggctcaccaaagaacaatctgctttgctagaagaaagcttcaaacaacatagcaccctcaatcctaaacagaagcaagctttgtcgaagcagttgaatcttaggccacgacaagttgaggtgtggttccagaacaggagagccagaacaaagctgaagcagacagaggtggactgcgagttcctaaagaaatgttgtgaaacattaacagatgaaaacagacggttacagaaggagcttcaagagctgaaggcactgaaactggctcagccgttgtacatgcctatgcctgcggcaacactcgccatgtgcccctcttgcgagaggctcggcggcagcgccgtcaacggtgccggcggttcccccaagacatcattctccatggcccctaagcctcacttcttcaaccccttcgccaatccttctgcagcatgttgattgatattgttattataattaggcttttagttttcattaaaaaaaacaaaagcagcaaccaaagaagagttcccccacaacctttgtatttttttggttgagggatacgtcttatgaactacatagctagtgaaaaaaaggctaaaggtgtaattaactaatatactgtagaaatttgtaaccgctgattagaattactttttactcttcctttattaatgtatgtttataaatcgttatagaagacatccatctatgaaggaattaatgactattttttttaatagcccnaaaaaaaaaaaaaaaaaaaaaaannnaagcggccctctagaggatccaagcttacg

SEQ ID NO: 13253 - DNA, 354 bp, Glycine max
cgctcgagccgaatcggctcgagcggctcgagcttcctcttttctttcttgctcacaaactcctcttcttatgatgggtcttgatcaagatgctagcagctactctggccttcagcttattctagggttagctttgactgccaccaccaccaccactccatcatcaccaccatccatttccaacaagcttgctcatgttgatcatcaccaccatcttataactcttagaccaacaacaaaggctcgtatcgtgatgaccctcttgatcacttgttcacacagactaattcacctcatcacagcgctagttcctccttctccagaggcagggtcaagagggagagggatctcagt

SEQ ID NO: 13254 - DNA, 429 bp, Glycine max
  unsure (1)..(429): unsure at all n locations
cccacgcgtccgaatgatgagtcagaccaaatcgaatgaaaacggagaggagagctttgaggagttgcaacagctgtttgaagacatgtttcaagcggatattggattggacggaggcccttctcttgcttcttctgattcctcaacttcatctgcttacatgacttacagtgaaagttctagttcaaataaacgcaattcctctgagatgaatttcgggaaggcagagaattcttctgtctttgatgccggttaccagaatttctggtttgggacaggtgaaccaactccaagatataaagaagaaaaaggggggaattctaggaggaggtagaagtagacacagatatggcagaaaggcaaatatgtnctatgcccatgatgtttaatcgaatgactaccctgnaaatttcacaaagtaaatgacct

SEQ ID NO: 13255 - DNA, 488 bp, Glycine max
cccacgcgtctagtttgcaattgtttgacattgagttaggaaaaatgggttccaaggctttgctcgttcttgttatgctcttggcttctgtcctccttctttcagcggaagttgcatccaaagatgtagataagaaacttgataaaaatgatggtaaccatgatacaaaaggagtcgatgaaatgaaatattatggtggttgggggtctggttgggatagataccgccgtggttggtattgccccaatggttgttgtcaatggagctactactatcaaacctgttggaggtgctgctattatcctggtgaacatgttgatgtgcgtactgatgctcaacctcgcaactaaacatgaacattgtgcttaaagtataggctattgttatctatataaataaaacttcatgggacgtgtacttcatgagacgtgtacttatctagttatgcatgaaataaaagtgaaaatctttcactgtgcattattact

SEQ ID NO: 13256 - DNA, 451 bp, Glycine max
cccacgcgtccgcaagtcccaacccgtagaagagaagagaaggatggctgtggtttttcagtgtttatggtgtgctcggagtgaccccttcctcactcttcctttccaacgcaaaccacttctttgctctgtctttctttcctctcgccctcgtaacctctgctcttcaattgtcgctgctgcttccaaaaacaaaaacaagcaaaaaaagtctcgtgatcatgttactaaggacgatgaagatggcgtggacgcttttgagctgctcttcaagcaactcgaagaagatctcaaacgcggtgatttgtcagacgatgatggtgaggatgagataagtgaagaagacatggcattgcttgaacgtgagtcggaaaatgctttgggggactttgatggtgaattgttaaactcggatgtaatcgacatcgaaactggcggtgatccagaaaat

SEQ ID NO: 13257 - DNA, 561 bp, Glycine max
gtaagaaagcccgctagttattttagtgcagttgaacctccatacagactatatggttgtcagagcaatgtaatgtactcacggcctcaatcgtttgatggagttcctccgttactctctcggcgaatacttgaaactcttacctatcttgctcgccatcatccatttgtggcaaaaattttgcttcagtttaggctgcatcctcctgcattaagagaaccagataatgctggtgttgcacctggcaaagctgtgatggtggttgaagatgaaataaatgctggttacatatccattgcaatgcttttgggtctcttgaaacaacccctttatttgaggagcatagctcatcttgagcagttgctaaatttactggatgttatcattgatagtgctggaagcaagtctagttcatgtcataaatctcagatatctactgaggcagtagtgggtccacaaatttctgcaatgggaggtagatgtgaatattgattcagttacatcttctgctcttgacgcatctcctcatgtccatgaatcctccaaacccacacctcccag

SEQ ID NO: 13258 - DNA, 560 bp, Glycine max
gggcaaactggagtaatcgcgaatggaggggctcaaggtctccaaagcgaacttaacagtatacattcacccttccaaaagtaaccaagtttcccaagccgttctccgccaactcagctctttgcttttcacgttcagcgaaatcttcgacggcgtcgttttggcctacgatgtcaattccttcgacacgtgcgcaaagatcctctccggcgttcacccttacttcggcgtcaaactcaaggtcaatctgttgctcttttctcccaagccaaacatgctcttagaagggaaggtggttaaggttacgcaagagtccattcacgttgttgtgcttggcttttcctctgcgattatatctgagaaagatatcagggaagagttcgtgtgcaaaacgaaacgagggcaagaggtgtatgtgagcaggtctcacaagcggcatgtgataaaggtcgggaccatgatacggtttttagtcaagagttttgatgaagaaatacttcatgtttatggatctctggttcctgatcacacaggcagcatttattggttggataagaatt

SEQ ID NO: 13259 - DNA, 618 bp, Glycine max
caaaaaggcttggggaagtgaggatggtggtgtagccaatggctccgtggagaagcccaagtccaatgggaatgctgccaagagtccgaatccgaagaagaaggaatccggtagcaggaatgtggcttctgctaagaaaccgaagcctgaaacaaatccggagccggcgccggtgccgtccttggagtttaaggagtctgaaaggatggagattgatcaaaagcctgatggtggtgatgcatgtttgtttttgcgcgaattggttcgatacaaagagggtgccaatgtttctaggctggatgaggatgatgtgaagagggggttggagttgattgaggaatcaaagagggcagagttgagggggaagtggaagaaattacatcatgctgagatggaactgtttgcgaatcgctcagaactgattggggagcagactaagttgatactcgaggcgcttcggtcatccaatcattaggattctcaattttgtttggcggccttttcggtactctgggccatatattttgtgatctatcctctatgcattgtaaccttgtggttatggtatagtcttttaattcagtagcagtagcagtgtttagttattgacattgtcaa

SEQ ID NO: 13260 - DNA, 343 bp, Glycine max
gtttggacaaatgttacaactgcaaccaatggtccttctgctagattttctgtggctggtgactgtttagacccttttaggagtggtgttcttatattcatcggtggttgtaataaaagtcttgaggccctggatgatatgtattacctatatacagggattgcacgggaaagtgaacagagaccagaaaaattatctttaaagaagcaattgaaactgaaatgcctagaacaaaatcccaatcctagccaaaatcaagttctcgttagatatggagtgggttctgatgtgggacagatcatgacagtgttgaattatagccaatcaagtagagtaaatatcc

SEQ ID NO: 13261 - DNA, 574 bp, Glycine max
cccacgcgtccgcccacgcgtccggcaccagcggctcgccattgtctctatcgtgtgcatttccctttccattcgtcaaatcttcctcttcttccttctttcttctcgttcagtaaaaatcactgaacagttccaaaatcaaatcacccaaatccacatcagaaccccattttcttcacactcagaatctttcttggtctttttcttgaattcaagtaccaaagtttgagtcttttccgactttggttgaaccccattgaaggagccgcatctgggtgttcgtgtgcatgcgggttttgccaaatctttaagcttttccccattctgctgcgacccaattgatggaactctaatgggttccttggaatcagggatctcattgaagaaagggagcttgttcggttctcagttcagcagaaaagagaagaaccctttttctcacaggttcagatcgagcttctcgaggttgctcttcaagaagctcgattacgtgcaatggatttgcacggtggtggtgttcctgtgcttggtcattgcgttccaaatgttcctgccagggtcggttttggaaaac

SEQ ID NO: 13262 - DNA, 836 bp, Glycine max
gttcttttgtaagataaagaaagtaactcagtttgcaagttaaatgtatgtttttgtttgagttagatacataatacatagttttcttcatttttttaatgtcaaagcaaatgcttcttatcaatgttgtcttcaggcattgctttgtatgatagcatctgggaaatgtccctttggtgcttcatgtctttccagtggtgcctttctactcctgctgtgtctttccagaagtttcttgatagttcttgatatcattttgttattcattttagaaagtgcttttattttcttaaaatcagaaagcattatgtttttgtttcagaaattccatccaactggaatgggtgaggctgaaaaactgagtaataagctccttgagcatagttctgatgctggtagtgacttttcagacaaagttttgaagtcaagaatgcctgcaaagtttcatcaaccatcctcttctgaacctgtgaaagagcagtgtccagtaatatgcccgattgagctacggcaggaattgaggccaaaaagggcagatccatctggccatacttcagatgacaataatatagttactgttcccactgcaaaaggagggatgaggaggaagcatcatcgtgcatggcctcttgttgaggtgattaaattggtggaagcggtgtcacggtgtggagcagggaggtggtccgaaatcaaacggctctcctttgcatcatactcatatcgtacctctgttgatcttaaggacaagtggaggaacttgctcaaagctagctttgcactgacacctgcacctgcagatgaggggataaatttgcggaagcatggtacggctc

SEQ ID NO: 13263 - DNA, 496 bp, Glycine max
gcagaagaaagatgctttagagttgttgaaagccaagggtccatcaccaaaggcttcaaagaagaagaggagcaagaagggtgggctttctatgtttctgagcggcgctcttgatgaagccccgaaggaggtggctccccctccaccaacaccaacaccaaaacacgagggtcctgcatggggtggggccaagttcacgaagggttctgcttctcttcgtgaaatccaggatgaacaaagcaaaattaaaggttaacaaaccggctgggagcaaagataaggtggaagatcttcctgattttggcagtggcggcaaaattaaagttgagttcatttcttccttccagcccaatccctgttacctcgtctcgaagttcccaggtatctgatggagaaacaagcacccctccttgggctgcgtcaggaaccccttcccaaccttttcggccatcgttaagggacatccaaatgcaacagggaaagaaacaacaaagcc

SEQ ID NO: 13264 - DNA, 749 bp, Glycine max
cccacgcgtccgctctcaatctcaaacctctccattccttactcagtttatcattgcctgtgtgtagcggagcttttctaccttaaaaagattgcaccttcacccttcttcaggtttgcttaatttctcaagcaaactttgtttcatttccttcacaacttgtgattttcaaccttgcttacccaccatcacaatacgctgctatcttttgctttatttctcattcaatttcaaggacaatcaacaattggggtcatacatatatacatgcataccatctttcattgccctcatttttcttaaaacaaaattggaaccaattccatccaattttaatgatgtaatctttttttgcgctcccctcttgcttatttcattgttcttttctaaacattgaaggatttgaattgtcaaattacttactcaccctgcttgacaattgaacaaggtttgctggctggccttattcaactttgcctcaattttccaaatgtttccatttccattcaattttttctttggaaaatgaggaagccaaaaatatggggttccgtatcttcaaattgattacttcaaaggaaaaaaaagagaaagtaaaggtctttctggataaaatcaaaatgccatattcatattatgatattgggaccagctctcactaacatgcgccgcagcactcattgcgttcacatgcgaatcttcaatttcggattttcatttcataaattatgtaaattagtaataataat

SEQ ID NO: 13265 - DNA, 1597 bp, Glycine max
cggacgcgtgggctcaatctcaaacctctccatttcaaacctccatctccatttggtgtgtgtagtggagcttttctaccttcaaagattgcacctttacccttcaggatattttcaattgtcaagaaaatggttggacctaacttcatggatgagatagactgcggcagcttctttgaccacatcgacgaccttctcgattttcccgtcgaggacgtcgacggcggcgctgccaccttgccttccgtctccgccggaaacagcaactcgctggcgagcatctggccctccgagtccgactcgtttcccgcctccgactcggtgttttccggcaacagtgcttcggacctctcggccgagctatccgttccgtatgaagacattgtccaattggaatggttgtccaactttgtggaggattccttttgtggggggagcctaacaatgaacaaagtggaagagccatcatgtaccactaaggaggactcagtcaacacccaatttcacacatcaagcccagtttctgtcctcgaaagtagcagttcttgctctggtggcaagactttgccacctcgcagtccagagatttacatccctgtgccgtgtcgacgtgcacgcagcaagcgtccacgtccagcaaccttcaatcctaggcctgccatgaacctcatttcccctgcctcttcttttgttggggagaacatgcagcctaatgtcatatcatccaagtcatcttcagattctgagaattttgctgagtctcaacttgttcccaagatgccaaaacaagcttctgaggagcctaagaagaaaaagaaagtgaagctgccacttccattagttccagctgataacaatcaaaatgcctcacaacctgttaggaaatgcatgcattgtgagataaccaagacaccacagtggagggcagggccaatgggaccaaaaacactatgcaatgcttgtggtgttcgttacaagtccggccggctcttccccgagtaccggcctgctgcaagtccaactttttgcccatctgtgcactccaattctcataagaaggtcctggaaatgagatgcaggggcattgacaaatccggttttgcaatcaattcagctgcctcacccgaactcattccaaacactaacagcagcctgcccctggagtacatgtgatgtgaaggagtgatcctttgttggaaatttctctttcattgctgccctctagagtcatgtcttatgttatttcttattgatatttcatttctttggttcattggtttttgtacagggtttgactgggggaataggagcaatagatgatgatgatcatattttagcagttaggggaagattgtaatgagaagtgagttaaaaaagggtagacatatgcaggtcaaaaagggtagggtcttaggtctagtaattgtaggtcccttaaggtcattaggagtcggtgtctcggttgttttttttttatttttcttggaattcttttcatttttttccctttttatatatatccctatttgtgggaattctttttgcagttcattttgtagcaaaaatttcgagttgagtaaaagagttattaatttgt

SEQ ID NO: 13266 - DNA, 999 bp, Glycine max
gatcaaggctcctaagcaggcctctggggagcacaagaagaaaaagaagatcaaagtgactttcccatcaggtcaagagcggaatgcaccatcacaggcaattaggaaatgcttgcactgtgagataaccaagacaccacagtggagggcagggccaatggggccgaaaacactctgcaatgcttgtggcgtgcgctacaagtcaggccggcttttccccgaatatcgccctgcagcgagtccaacgttttgtgcggccatgcactccaactcccataagaaggtccttgaaatgaggaacaagacaggcaccaaatctggctttgcaactgtttctgctgcctcaccagaactcattccaaacactaacagcagccttacccttgaatatatgtgaaagggggaaaggaaggattctagttggagaattctctaattctctttcaagtcttctcttgagtcatgtcttatacaaggttttgaattgcattctacaaactgcaatgttaaaggttttagaggtgtctgcaactgcgttgtggttgcggttgtgactgcatcagccatatttgtccacaattttgatggcaaccgcaagttaaaaccttagtctttgtgttatttcttgtctgtcatttatttttctcattggatttttgtacagggctggaatggggggataggagcaaaatagaacatgatcatattgtagctatatttagaactgaagaacaagggatagagatatgcaagtcaaagagggtagagtcaccagagtgttagccattttaggtctagtaattgtagcagtactcaggaggagtctttgttacttttcttattctcatcatttttcatttttttttctttaatttctgtttataaatatccctccctgtagcaaattctttttgctgttcattgtagcaaaacttatgagttgatcaggaaaggaacttttggaatttgccttcttccttttaatattttgtcttgtgc

SEQ ID NO: 13267 - DNA, 1025 bp, Glycine max
cccacgcgtccgaaggctttttccttcctctcttcccttttcttttttgccctgctttgtggggtttccactctcaaatgctcttcacccttctctctctaatctgcttttttattcttcttcttcttcctctctcagatcctaagggctttcatctgctgctgcaactcagattctcttgcttctggacttattatcttctgcgttcatgcctgctcttgtcaattacagtggtgatgatgagctgtaccctgggggttctttttgcccaaatccagtggagttgggtcgcttgtacactactattggctccaatttggatgtgtactaccctcccactaagagaccacgctctatctttgaagccattgagcgtgagcaatattatcaagagcctggtattgaggttcttccagatgaatgcctctttgagatattcagacgccttcctagtggcaaagagcgaagctcatgtgcctgtgtatctaaacgctggcttatgcttatgagcactatctgcaaagatgagattgagagggctacctctgttgatgaaactgtttcttctgatgagaatcaagatattgaagatgatggataccttacaaggtgtctggatgggaagaaagccactgatgtgaggcttgctgcaattgcagttgggactagtagccgtggcggtctagggaagcttttgatcagaggaagcaactctgagcgtggtgtcacaaaccttggcctctctgcagttgctcatggttgcccttctctcagatcactttctttatggaatgtgtctaccattggggatgagggtgtgtctcagatagcaaaaggatgtcatatattggagaagcttgacttgtgtcattgttcctcaatcagcaacaagggtttgattgcaatagctgaaggttgccccaacttgaccaccttaactattgaatcattggcaaatattggaaatgaaggtttgcaagctactgcaaggctatgccccaagctgcagtccatctcaatcaagg

SEQ ID NO: 13268 - DNA, 525 bp, Glycine max
cgtaatctcggcattcggctcgagcttccccccagcccacactcccccattatccctccgccgccatgtccccgtcctccgaacaccacggcggaaaccatcgctttcccggggaagaaatcaacggcttcggcaatggccaagcggaaatgtccgctccttccacggcctcctcgtcgccggtgcgctgcatcgtcgactcaattccgtcgaaggagcgggagaagctccggagaatcctcgtcgcctcggcgaagggtttctcaatcggagccggcctcaagggaggcctcgctctcttcgcgatcttggcgcgattgacgcgcaaaaagccgccaaggaagggaattgtggtttcgaacggcgaacgattgtagcggctctgaaggaaacgctgagatacggtttgtttctcggaaccttcgccggaacgttcgtgtccaccgacgaggttatcggtgctctcgcaggtcatcgcaggacagcaaagtggagggctctggttgccggggcggttgcagggtt

SEQ ID NO: 13269 - DNA, 481 bp, Glycine max
caacttccataagaagaaactaaattatacaataatcgaaatccctcatcactgctaggaccgaaccaagacggcgtgtcgtgcagtgcctgtctccgagaccaacgaagcgcagcacccgttgcatctctctcttaatcctctttctctttctttgaaagcaacaaccaaagaagaaactaaattatacaatgatcgaaatccctctacacagaaccaaaaccctcattacatccgatcgatcaattttctccattttgcgaccaatttcccctctttccatcggattaaattcggaagaagaaaagcggaacccgcgaatcgatggatctccggttcgaggcgaggattggagggggcgtggaggtggggcccgtgatgggattgaaatcggttggattgattggaagaagaagcactttcgcagtggtggtggtggtgatgagaagaagaaaagaaggaggggcaataatggaagtcg

SEQ ID NO: 13270 - DNA, 399 bp, Glycine max
gttcttcatcactgcttggaccgaaccaagacggagtatcgtgccggacctgtctccgagaccagcgaaacgcagcacccattgcatctctctcttctttctttcgaagcaacgaagaaactaaattataatcatcgagttccctttcgacagaaccaaaaccctcacttccgatcgatcaattttctcccttttccgaccaatttcccctcttttccatcggattcaattcggaagaagaaaaggggaacccgcgaatcgatggatctcgggttcggtgtgaggagtggaggctgggggagggttgggcccgtgatgggattgaaatccgctggattgattgaaggaagcactttcgcggtggtggtgatgagaagaagaactgaaggggcaataatg

SEQ ID NO: 13271 - DNA, 624 bp, Glycine max
agccttcggccattaccggcattaagaatggcttggtttattccggccatttggaaaggacccaggcaagggttaccatccgacgccaagctgcaaagcttcgttccattttacaggcgccaaagctcaggatatcccaggaggagatggtgactatacccttgattggttctacttatgacagctatgcggcaacatggagtgataaatacaaggacaatgataaaaaaattagtggatcagtcacgaatcagcttccatcatctaaagattaccttggggactttcttgtatggaaacctcctgtcgggttagggaaaaatcgagctttctgggttggcctaacaatatggttgggattagttggagctgccctctttattcaaagataaactacacttaaaacacggagtttgagttctccaatttgtgatgtataccttctaatttgttgttatagtttttctttttagtttatatgatgtgaagtccatgttgtaacattattatagaatgtatggaatagatttgtaaatttattgtgtgtatcaaatagatgaagatgttatattatcctaaaaaaaaaaaaaaagggcggcctccgagtatgtagatccgggaatt

SEQ ID NO: 13272 - DNA, 678 bp, Glycine max
cttgtttattttctcaagctctttcgtgttgggatttttcttcccattttactaataaataaataaaatccgatgatggccggtcatttttccctcattttctcgagaaaataaattgccaatctttacactgagattctcttctcaaaatttcttcccactttaattttttccccttctcattgtttgtttccactgatttctccatatccccgtcgtggagaacgctttgacctttcttagatttgttcttccaatccaaagtttttatctttttttcagatttttaagttggagcatggtttttagtcaactgagtctcttccaaatctttaaattgttctaaatcttttctgggttgaaaatttttgcttttttgtgtctgtgtctttttgtgtgtggttgttggtggatatggattctaaggatattaatggttgcctcatggataaacataaacctgtggtgacatcttctttggtttgtgaaaaggttgaagatcatgtcaacggagaagatgatagtgattccaattctttgttgcctcctcggagaggtggcatgtccagaaactgtgaaaagactcgccggaaagtgcagtggaatgataggaatggaaacaagcttgctgaggtgttggaatatgagccaagtgatgtcagtgattcagaagatgag

SEQ ID NO: 13273 - DNA, 1071 bp, Glycine max
ttgccatcttcttcaatctcatgagccaaaaccttttccttgaagctactttgccttgaggaagttctcattctggttgatgtttatgtgttgagaattgcagaattttgacctgacaagtgaactgccagagcaaacgacaaggtatagtactcaggacatgggctgcttcgtgtccactccaaaggattctggtggaaatagaaggaggccagggagtattggggaggtttctgtgtatgttcctggtctaagaattcctaaacctgttgattgtgcacagtcacttggtgattacttgtccaaaaatatagtggaacgcctgtctgctctaagaactcgtatagttgtaatggctggccaagaaggtcctacaattacaagaacaaaaaggaaaagtgccacccaacatggaggttcaacactggctgatcttcagcaggctcttgaagactacttgcttgtacttttgggattagttgaaaatggaagccatttacaatacaaagtacaatttgcttgggtgaatcaagaggatgaagcagaggaaacaaccatgtctaatgcttggtatgaagtgttgtcggttttgcacttgatggcaatgctattgctgtcacaggctaatttattacttcttcccagaacatccactgatagtcatcagccaaaagtatcagaagaaagcagacgagcttctgttgatatcttcttaaaggcagctgggtatcttgactgtgctgtaaggcatgttcttccacagttgcctggcgaactcaggagaaatttaccagtagatcttgcagaaggagttcttcgagcactctgtctacaagcattgggacagggtgtagatattcaacttggaatggcaattgatagtaccaaagccactcttgcagtgaagcgtagacttgcatgtgagatggtgaaatattggcaacaggctcaagataatattatgaaccttccattagaaaatggatggggtgaaagccttggccttttgggaaatggaagtatattgaaacgaaagctgcagcatattattatcatggattgagtcttgat

SEQ ID NO: 13274 - DNA, 589 bp, Glycine max
cgtctcgtgggctgttcgtgggcggacgcgtggactttgttggctgtgtcgtacacacacacatatcttattcttatgatgtatgaataaaaacaaccaatatcccaatgttccacaataataattaaaaatataatttgtaattttgttctcaaagaaagaagactctgtccctgtgtctctgtatctgtctttgtctctgttcgtctcgctgaaggaatcgcttaggatcacattctttttcaagtttagtttctgcttctggccacctctcaagttctctgcttttgtttttagggctcctttggttctgaattggattggattgcaattgggtgcctcaccctgttttgctcaattgctgccactctacctgttcatagaattgcagaattttgacctgacaagtgaactgccagagcaaacgacaaggtgtagtactcaggacatgggctgcttcgtgtccactccaaaggattctggtggaaatcgaaggaggccagggagtatcgccgaggtttctgtgtatgttcccagtctaagaattcctaaacctgttgattttgcacagacacttggtgattacttg

SEQ ID NO: 13275 - DNA, 534 bp, Glycine max
cagttttcacggaaggttctctctatctgtctctgttgctctctttgaagcaaaagttattgagtcccattcctttgaaattttggttgtgcgatcttcatcttcaccttcagggtggttgtgcttctgggaacctttcaaaatctctgctttcttggattttgagttgaattgaattgcactcttgcgctttccattaacttcctcagcttcttcaatttgccaccactgtgctgttaatgagaattccagaacttttgacttgaccagtcaacggccagggcaaaggacaagcattcagcagatacagtgagcctttagatatgggctgcgtggtgtcagctccgaaggactctggtggaaatagaaggaggccagggagtattggtgaactttcagtatatgttcctggtttgaggattcctaagcctgttgattttgctcaatcacttggcgattatttgtccaagaatatagtggaacacctgtctgctcttagaatgcgcatagttataatggctggtcaagaaggtc

SEQ ID NO: 13276 - DNA, 804 bp, Glycine max
gtcaagaaataatgacggggtcgtctcattctgactgatttgagtgtgggcgttggtgcgcacgctaatgttgggagttatcggagctggaacgtggttgcgatattcaaaggcccttcttcaaccatggaaggtagggttctcctctttgtccgctgtcgacggccggaaacaccaccttctggatttgcaggagatcgagacggttctcaccgacgttaaagctgacaacgttaaggttataccagttcccaagcactgcgattgggctgatttcatggtactcgccactggcaggtccacctggcacgtcaagaacatcgcccaagccctaatttacaaggctaagcagaaacagagaggagttgaacgaatgatgctaccaagtgtggaaggtcaagcaggaggaaagtggatcgtcattgactctggtaaagtgatagttcatgcactcgatgaaaaggctagagcttactacaatttggagggtctttggaccccagggacaattcaaaatgaacgtgaagaggatttacaaaaagctttggtgaaggttcgtcggaaaaacaattcaaagaaacctgcacaaaagaatgcttaattggtgttctatgctagagcctagaggggctaaagagacctgcacaaaagaatgcttaatttgtgtttctatgcaagagggctacaaataccatttaaaactatggtttctgactctgcattagatgtagttttacgtgttctgaatttcaatttttgacaggttatcttgctgcaatgtcaaagttttacgggattggtcat

SEQ ID NO: 13277 - DNA, 482 bp, Glycine max
agcccacgcggttcgaaataaagcagtactagaggcaacctagctgtggttagttaaaaaggggtgagctctgattagtgcgtgagctattggtgcgcacgctaatgttgggagttatcacgagctcgaacgtggttgcgatattcagagcccctgcttcaaccatggaaggtagggttctcctctttgtccgccgtcgacggccggaaacaccaccttctggatctgcaggagatcgagacggttctcaccgacgttaaagctgacgacgttaaggtgataccagttcccaagcactgcgattgggctgatttcatggtactcgccactggcaggtccacctggcacgtcaagaacatcgcccaagccctaatttacaagggcttagcagaaacagagaggagttgaacgaatgatgctaccaaagtggggttttggggggaaaaaaaagggggggtttccaaaaaaggcccccagggggg

SEQ ID NO: 13278 - DNA, 387 bp, Glycine max
ctttggagttcctattgcatagaaactccaattaagcattcttttgtgcaggtttctttggagtttctatgcaataggggctaaagatacctgcacaaaagaatgcttaattggtgtttctatgcaagagggctgcaaataaccttttaaaactgtggtttctgactctgcattagatgtaattttacttgttctgaatacaaatttttacaggttgtcttgctgcaatgccaaagttagaaaagaggtagagctgaagaagttttcatgttgtcctacaatcgtttttttactgaattggtcgtaaaattgatgaagagttaatttacggtttgtaagtttaattgtagttgcattggtaataataaaatatatacttttaatatt

SEQ ID NO: 13279 - DNA, 914 bp, Glycine max
  unsure (1)..(914): unsure at all n locations
cccacttcgtccgcccacgcgtccgtctcttcttcccccaacaaactaaaccaaaccaaaccataccattaagaaacaacacatctatctcagtccccaaaccaagaaaccctaaattaaattcatgtgctcctccaggtctaccagtgctgcaccaacaagaccttgttacttggaacaaggccacggcttggcttccttaaaacacatggatgcgtgtcataatcgtgccaacaactttgtctctaggtccatgaccatgggttacggcacttcctaccacagaactagtttaaggaacaacaacaacaacaacaacaacaacgtttctgtttcttcaccaagatctgcgagattctacgacgccagattcgaagatcaacaccacccccacttcctctccgcttgtttcctctgcaaaaaatctctcggggacaatagagacatcttcatgtatagaggggacacaccgttttgtagcgaagagtgcaggcaagagcagattgagatagacgaagccaaagagaagaataggaacctttcttcatcgatgaaggctttgaggaacaaggagcagagaaataataataataaatccacgtcgccaaacaaggcgcaacaagattactcgttccgtacgggggcagttgcggcggcgtagggtacaagtacaacgtaggattcctcgagatctctcgaggaaccaacaaatgaacgaacggaactgagggcagtgttcccggaaaaggaaagaaaacatttttagaaaagaagaaaaaaaaagtgtgactgaaaaggaaagtaaacaaagggaagttaagttgcgagctttggtttacttctcttctttngtttctttctttctttccacgaacaaagggtctcaaagagaaaggggatttttgtgagctgtg

SEQ ID NO: 13280 - DNA, 357 bp, Glycine max
cccacgcgtccgcttgccccaaacaaactaaactaaactaaaccattaacaaacacacctcagtaagaaaccctaattataaattcatgtgctcctccggttctaccagcagtgcaccaagaccttcctacttggaacaagcccacggcttggcttccttaaaagacatggataggtgtcataaccgtgccaacaactttgtctcaaggtccatgaccatgggttacgccacctcctacaacagaaccagtttaaggaacaacaacaacgtttcggtttcttcaccaagatctgggagattctacgacgccagattccaaaatcaacaacacccccacttcctctccgctttgtttc

SEQ ID NO: 13281 - DNA, 608 bp, Glycine max
cagttttccaagggtcagttgggagtcaaatttaagccattttcaaagtatcctccttgttacaaggacatgagtttctggatcagtgaatcattcaccgaaaacaatctgtgtgaagttgttagaggaatagccggggatcttgtcgaggaggtgcaattaatagacaacttcaccaacaagaaaggaatgaccagccactgctataggattgcatataggtctatggaacgttcactcactgatgaggaaataaacgatctgcagtggaaagtaagagaacaggtgcagagcaaattgaatgttgtcttaagatgagctataaatgttgaaaatttacagctttgctgtgttcaatctcatttttgttaatgtatagatgttttgcctccctttagcgattgaacagcgctatagacagatgtattatttaatttcacatagtgaatataccctacaatacataacgagccatggctagtccaacaggattatctgtattatctactggcctgttttggggaaaaaaatattttattgtaaaatttctggaccccgacacacgaaatggtatgttctccaacaataaatcttttgtttgtgttttc

SEQ ID NO: 13282 - DNA, 699 bp, Glycine max
ggtttctcttcctccttcattccctcccttctcttttcttgcactattttcattttacgaaggagccttcttggtgttttgatgtcgattggaattatatcatagaaaggaggaggcttgagggaaaagggtggaaaaaaagtggttaaaagggacagcaacttattggatactagaggataagaagactattgctacaaggcaaagtaaaccaatggaggaaatatcttctagtgttgcagtaccttttacacttggtgttggaaatttgattcaaaaggagtctgcagtgaccactcacatggagataactgggctgaagcttatggcaaatacagcagctgctgctttgatgttaaatccggcagtggagtgtttaaaggagaatcaagttggagctgctcttgtttcagaaatggttattgaatgtgagagtaattgggtcttgaatgaaggccttaaccaggcaagaaaggaagatgaattgatgttagcagtggattttcagtctctgcatagttcaagctctcaatctgtggctaatggcaaaagtgatccttgtagggaggaagctgcggcgtggaagagtagcttttctgaaatagattcaccaatcatcatcaacgcggatgatgatgttgatggtaagtccggaataagcgagctgtgtccatcaatgaagccgccagtggaggaaac

SEQ ID NO: 13283 - DNA, 442 bp, Glycine max
aaattcatgaacgagaagtactgtgttcgtactgcatatagtttgttgaggtttctgttcctccttcattcccttcctacactcttcatgcactattttcattttgctaagggatcgatcataaggaggaagaaatacaaggttttgggacctcttctcttggcttataaaaagtccaaaacaggagccttcttggtgttttagaaaggaggaggcttgggggaaaagggtggagaaaaaagtggttaaagggacagcaacttattggatactggaggataagaagactattgctacaaggcaaagtaaaccaatggaggaaatatcttctagtgttgcagtaccttttacacttggtgttggaaatttgattcaaaaggagtccgcggtgacgactcacatggagataactgggctgaagctcatggcaaatacagcagcg

SEQ ID NO: 13284 - DNA, 534 bp, Glycine max
tgaaggcacggagtgggtatgagttgacatgaccaaaattatttgcctttggtttgctatgatgatgattattcattttgaggggtgggtggtgaaggcttcttgtagttgacacatgaaaggaaacacaaaccagggaaaggaaatttcagtggccgggatcgatcataaggaggaagaaatacaaggttttgggacctcttctcttggcttataaaaagtccaaaacaggagccttcttggtgttttagaaaggaggaggcttgggggaaaagggtggagaaaaaagtggttaaagggacagcaacttattggatactggaggataagaagactattgctacaaggcaaagtaaaccaatgggggaaatatcttctagtgttgcagtaccttttacacttggtgttggaaatttgattcaaaaggagtccgcggtgacgactcacatggagataactgggctgaagctcatggcaaatacagcagcggctggtttaatgttaaatcctgcaatggagtgtttaaaggagaat

SEQ ID NO: 13285 - DNA, 405 bp, Glycine max
tctccttcattccctcccttcacttttcatgcactattttcattttacgaaggaggaagaaatacaaggtttttgggacctcttctcttggcttataaaaagtccaaaacaggagccttcttggtgttttgatgtcgattggaattatatcatagaaaggaggaggcttgagggaaaagggcggaaaaaaagtggttaaaagggacagcaacttattggatactagaggataagaagactattgctacaaggcaaagcaaaccaatggaggaaatatcttctagtgttgcagtaccttttacacttggtgttggaaatttgattcaaaaggagtctgcagcgaccactcacatggagataactgggctgaagcttatggcaaatacagcagctgctgctttgatg

SEQ ID NO: 13286 - DNA, 650 bp, Glycine max
  unsure (1)..(650): unsure at all n locations
gtggtgaaggcttcttgtagttgacacatgaaaggaacacaaagaggtaaaaaaaacccagggaattgaaaggaaatttcagtggccggtgtgacttgcctcagatctaggaaacctctcttatttcctttgctttttttttttttttttcattttcaatgaccccatttcccccttgactccgttttagaaagggataaggcagttaccttgtcaattatttggtggtgcttagtttcttgaataatctgttgtctggtttttccggggatcgatcataaggaggaagaaatacaaggttttgggacctcttctcttggcttataaaaagtccaaaacaggagccttcttggtgttttgatgtcgattggaattatatcatagaaaggaggaggcttgagggaaaagggtggaaaaaaagtggttaaaagggacagcaacttattggatactagaggataagaagactattgctacaaggcaaagtaaaccaatggaggaaatatcttctagtgttgcagtaccttttcactntggtgttggaaatttgattcaaaggagtctgcagtgaccactcaatggagataactgggctgaagcttatggcaaatacagcagctgctgttttgatgttaaatcggcagtggagt

SEQ ID NO: 13287 - DNA, 383 bp, Glycine max
tcaaattttcacacactgatccccctaaagcaccgctacatcatattctctctctcaccctgttcttctttcaagtttcaatggatcgaacccaaatccttctcgttggattaccaatcttcctcttcttctcagacattctcaacctcttctctcctcaaccctctcccaaaccaacccatcatcatctccctcccatccaccccaaaccgcaccctcaaccgcaccttcaacaacccctcgagttccccacgcagaaacaaagtggtattggccttattggaattggcaacaccgcgagcattgacttctgcacttcctgctcttacaagggaaatgcagtaacagttaaaaacatgctggaatctgaatttcctgggatt

SEQ ID NO: 13288 - DNA, 1223 bp, Glycine max
gtggaatggaattactctgaatacaattttgactagaataagtgcagcacagagagaagtgcgaatcagagagagaaagagaggcatggctgctgcaggtccagaaaacgtccctcctttcatcgccgctcagcttagccacctcctctcccacttcggtcttacagtcaaggttgaacaaatgtggtcgagtgacaaatacaactccacccccctcgatcgcttcaccctcctcatcccctactgcttagacttcatcaaatgggatgttatatacgacgcggaatctccgaacaccgcccccgacgttatctttagccccgaagacgacgatttccacccctttcacatgtttccttcctcctcggaacccgctaataactgtttgtctgattggaactacaaagaccccacgcgtctcttaaccctaattcagtacttgagggatcaatatgtgctttatcagaggaagcgcgtcggagaagttgacgacgaccggttgacattcgaaatcagtactatcttgtccagggagggaatagaaatgcatatgagttctggtgctgagaagtcagaggaggttaggtttgctgtgcccctactggacatgaatataaacaagatggtggcttgctgtccctggagatattcccagaggatatacttacaggttgtatatcctgttggaagaaaatatatgtcagtgccttcagctcctcgcctgaagttagtatcttctcctgagctgaaagctgtattttccattgatgatgtcaagctacctccttggttggacgggatgtgcttggcagaatatcttccaaatctagaagaatatcttgggaaacaggtcttagaggctgtttcattaattgaagttagaaggcacttcattgaagcattatccagtccgttaggaaggccagttgaagctgatgctgtcttttgcaggaaggcaacttttcttgctgcatctggtgttttctcattcctggtacacctcctaattccaactcaatttccaaagcaacagccggctattatgcttcaaagttcacagcattttaattcgcaaatggcacctatgaagtcacgtgttatgtctgattatccatggagtccgagatgggaaccatcaatgatggctgagcgtatttgtgattttctggcagatgaggccttgaacttcaagagacaatgcagtgagggccaagttcagtagt

SEQ ID NO: 13289 - DNA, 914 bp, Glycine max
cacgcgttcggctcgacaccaacttctccatcgtcttcgttggctcattcgattccttagcttcacatctccatggcgctgcaccggttactgaagaggaaaggaggcgtcgatgaacttaacgacgatttccctctcgcttctccggcaaccaagattcgccgtctcgacgctgagttgccgccaattttggaagaggacgaaccgttacctaacgaggagagagctctcgttctcttcaagcctctcgtccattccccttcctctttctctctcactctcgattctgaccttatgaaaggaattaggaacaatcaatatctgtggtccaaacaatgtgagcgcgtgacagagttagaatcacgtgaggaggaaaatgatgatgaattggctcttgtgccttgggtaccttcaccttcttaccagttctccgctgttgatgattctctcaacacaaatgtcgagttgatggaagctgatgaaatgggagaaggagaaggtgtgggatccatgatgatggatattgaacaagaagatgacactgacactgacgctaaaacttcaacatcaagcattcactacccaacgacacacggtggaataacagaggggttccagcaacactgcttgttaccaaagcttcctcacaacacctcaactcccattacatggacccgctgaaatttgttttgttttttattttgatagtatataccactattttctttgctgttaagcaaggttttctcctatttgggataaaggggtactagactagaacctagtggaccaaactagtatttagcttgcttttgcggtatgggaatctctccttggaagaggccatccaagtgcaacgaagaaaagaaattaatgtatataatgtcttgttgtcgccatctttgaattgctgc

SEQ ID NO: 13290 - DNA, 281 bp, Glycine max
ctcattcgattccttagcttcacatctccatggcgctgcaccggttactgaagaggaaaggaggcgtcgatgaacttaacgacgatttccctctcgcttctccggcaaccaagattcgccgtctcgttagtacttcctctctctattcttcgccatcaacaaccaaccaaacttgtttgtcattatttactaatcgattccgtttgttaccgtttcaggacgctgagttgccgccaattgtggaagaggacaaaccattactgttacctaacgaggagaga

SEQ ID NO: 13291 - DNA, 644 bp, Glycine max
cggacccgtggtcggacgcgtggggctaaagatacctctaaacattcgcgcgcaacgccgttcctgctccatggatgatggcacaatggaacttgctggacactctagagcaagtgaaacatcagcaatatccaagctcaaggtgagagttgaacctgaagcatgtgggaaagggcttgtgccatatcaaatatgcatatctgttgtgacagctgatgatcgagaagagcaatgtatccatctttccttgtagcttataccccactggatttttccttcaaaaagtgttccctttgtcatgatgagctgtaatggttgttttggttgctgctggatgtgagttggtatgatataggaaggaaaaaggggtggctgaaaattttgatatttccgttgaattgcactgcactgcacattctccagctgttcaaatccgtaaacttgccttttctatttttttgacttccaagtttcaacacattctccgcgggtccaacccgtgtctgtgcgcggcacttaggagctgtgtccgtgcttcctagtttaactgtgaataactgtgaattatatctagtgccttttttttaaaaaaaaaaaaaactttttatgctccctaagagtatgcaaagtgtaagtcacgtact

SEQ ID NO: 13292 - DNA, 420 bp, Glycine max
caatataaaaaaaaaacatgtctacatcatgatgtaaaaactatcttttcatatatgccaaataaagacatggactggtgtgtaaatatgattttacaggtgtatcacttccagtcagattgttcctcagtccctatgagctgaccccaacacatcgtaacattaataacaaattcagtgtgaagtactttttaaatcttgcgttggttgatgaagaggacaggcgatatttcaagcagcaggaaatcacactgtataggctgcaggaagaaacttcatgattacttatcattcggcgagtgagtattattatgtgtgctcacatataacagaaacattgcgatcgacattgaagacctcttaaatcagggaatattctcgtgaatcatgttctctaaagtgtaaaatggcttggtatag

SEQ ID NO: 13293 - DNA, 715 bp, Glycine max
atttgaattttctactgttgaaatgccatatgagacatataatggggtgaatgtgaggcttaggtatgtattgaaagtgaccattaaccgtggctatgctgggagcatagtagaataccaggattttgtggttcgcaactattctccacctccacaaattaacaatagcatcaagatggaagttggaattgaagattgtctgcacatcgaatttgaatacaacaaaagcaagtatcatctgaaagatgtcatcattggcaagatatacttcttacttgtcagaatcaagataaaaaacatggatcttgagattaggcgtcgagaatccacaggatcagggaccaacacccatgttgagacagaaacattggctaaatttgagttgatggatggtgctcctgttagaggtgaatcgattccaatcagactggttcctcggtccctatgagctgaccccaacacatcgtaacattaataacaaattcagtgtgaagtactttttaaatcttgtgttggttgatgaagaggacaggcgatatttcaagcagcaggaaatcacaatgtataagctgcaagaagaaacttcatgattacttatcattcggggagtgagtattaggtttggtaacaaataaaaaagattgtgatggacattcttaaaatggcttagtgttctagcttgctttcatcactttcggtcatgtacatcgacaga

SEQ ID NO: 13294 - DNA, 532 bp, Glycine max
acttgtccgccttcgcgtccgcactaatgtcacccgattcacccaagtaacctgtcatttgttcttcagcaacccgaatccagaaaagacaaggacactgctggcgcatgttagcaccatagctgacctgccacgaccaatacgtgttatcgtgcgccgcctctctctctctctcgcgcgttctctcttccatgaagaaccatttcttccatgggaaccaaatcgctgaaacggagacctcgtgagtcgcagaaccctcccatggccgccgtggcccctccgcggcgcaagcctcgatcatacgccaaggcctccgtagttctctccgttcttctcgttgtctccgtcatcgctctcttggtcctttcgtcgaacaagttgcgtgcgttccaacgcgggggttcctatgagacgatcactgtcgtcaacgttttccctcacgaccctctagccttcccctactgcctcgattatgattgacttggcacattatcatagtatactgatctgtattcgatttctaccacttagt

SEQ ID NO: 13295 - DNA, 587 bp, Glycine max
ctaagttgcgtggatcgaaccaaaagacatagcagtagaattgagatgctgcagagttcaagatcacgaaaagcggcattgagagtcagagttccttcgcggaagctcatgattctctctctcgccattttcgccattctccctcccattttcttccacttccgcctccgacgcctccaacagctgcaactcacaaagtgccgttggctcaacgatcctcctctagtctgcgcccacggtggcgattcctccaaggcttctccaaacactatggcgtcgtatttccacgctcttcagtctcgcgtcgactgcattgagatcgacgtttctcgttcttctgacggagttctctttgctctccatgacaggcagatttgcagcgcttaaatggaaacactagttctaaagttggttacttgaactcagaagagattagagagcttagtgcttcacgtcagtctacctccaagtttactgatcaaagtatacttacaatccaagatgctctgatgttgactggcaaattcagtacgccagatagttctagatgttaaggttgggcccccattttatgagaaagagcttgc

SEQ ID NO: 13296 - DNA, 696 bp, Glycine max
  unsure (1)..(696): unsure at all n locations
gttaggctttacattattgntgcagtgacagatgatacagcatttgctcctcttactaaaaaggaaatcagtgaaatagcatggcacggcttcgatgaacttcaacagcaaagtgatgaagtgatatcgcgtagcatcaccggccttaagctttatatggtggccccttttctagcatcattgaaatcatggatttcaacacaccaacctgctatggctccaaggcccgatttgcctcttaaaggaatttgcgtgtggaaagcaaaacccggttctattggaagtagctccacagtaatggatatccagccaacaaaacctgaacctgattctcacacccctgacctggggcctggcaagagctttaggaatttcagatttgatactgcctcgattttacaagcaatggaaacttccttttcttcttgaaagtccggcaaccttcctgtaaagtttcctgtaacttaatcgatttcccatatttcatccgtacgccaaagttggtggtattcactctccacgctaattaggttgttgctgtacatcatcttcctcaagttgtctgattgattgagtatgtacattgtgtacaggaagtatttgcacctaaatagttttctctgttattttggtattatctgtaaaactagagtaaaggttcaatgtaaaagttacgctgctccctacagaaaagct

SEQ ID NO: 13297 - DNA, 316 bp, Glycine max
aaactctcaaccgtcactctctctctctcgaaatcttctctctttctctctcatcaaacaacctcttctccggcggccatacctccgcgcgctgcctcgcggttctcccccgaatattctgttgaggtcttgaattcactgataaaggaaagttgatattttcagtaaatctttgctgtactaaaagttttggaagtttttgcaatgggtgcaactgaagatcttgggaacagcacacagggtgcagcagaatgtcaggaaaaccgcaccacaggtgcttcagaaaatccaataaaggacaacaccagtagtactt

SEQ ID NO: 13298 - DNA, 460 bp, Glycine max
aattttagggttttgctttcttgtggtttgggggaataactgcataattgcaagagtcctctttctttgtatttctacagaggatttcaaaggtggaggttgagattgattactctgttactgtcgaaacagtaggaaatactgctatggggtgaggtcagtagcatagctgatgacatcagagaaggtggaagttctgttgaaccaaatgacaaccaagatcaacatgataacgggactcaagattcctctggagggatcactatcccatctgcaattcccacagtatcggttgtttcagttgaagagccctatgtgggtcaggagtttgggtcagaagcagcagcacatgcattttataatgcttatgccacagatgttggattcattgtacgtgtgagtaaactctcgcggtcaaagcgtgatggaactgctattggacgcactcttgtttgcaaca

SEQ ID NO: 13299 - DNA, 547 bp, Glycine max
cacgaaacagaggatagaaaaataatcatcgtcatcacacaccgtttccaccacgatctaattttcagacatgtggaaacttaatgaaatttggaatgcttgttgcagtagataaagatgatatgagtcatgattgctgtgttgcacccatcttccctccatcatagaaattgcgaagatcttatttttgagaccatataattcagtaactcatgtttattacgtgtcactaatgcgatggaatcaatgtatgcaatagattatctgcttcccgggcctattgtggaggttgagattgatggctctgttactgtcgctacagtaggaaatactgctatgggtgaggtcagtagcatagcggatgacaacagagaaggtggaagttctgttgaaccaaatgacaaccaagatcaacatgataacgggactcaagattcctactggagggatcactatcccatctgcaattcccacagtatcggttgtttcagttgaagagccctatgtgggtcaggagtttgggtcagaagcagcagcacatgcattt

SEQ ID NO: 13300 - DNA, 331 bp, Glycine max
gtgtgtgttttgattgcatatgatcccgctccctggtgcctccattcggtttgcaaagggaagctgcggaacgtaggtgtttgtaggttttaggactaaatcaagttgaaccaatcacaccttgttattagtggcttcctaaccgtgggattcgcacagtatgttatttcctctaacataggattactggcgtaaattcggctggggcgttgcagagtggaggctcattgttattattatttttttctttggtcctacctttatttgtgtagtattttttttaatatatacagatagtgaactagtcgttatagatttttttttttcagct

SEQ ID NO: 13301 - DNA, 529 bp, Glycine max
caagaggcgacccacttcgctgcacgccaaacattgcactgcgcgaaaagcgtttaataaaggtaactaacttttgtttggagtctcagtctcagagtatggacactcagaaagggccgtcttcatcggctgcagctgttacttcatgtcgaaagaagaagaacgaagaagccacttttttggaggacttgaaggatcacattgacgagtttattaatgcttctatggatgaacataagacttgcttcaagaaaacagttcagaagatgttcggaatgtccaaggctgttgcagagagggacaccaatgctgccaaagaagttgagagttctctgcctcttcagacaactttgcaagactagtatcatgcttgctctcaagaaaaataatgtttgttttctagaagctcttttggaggatgttgataaaaataagtgagtgattaagttggttggtcttgatccatgggactaggttgttgttgaatgtgtgatttgcttacatttcttaatgctacacaaccctaaga

SEQ ID NO: 13302 - DNA, 1615 bp, Glycine max
ttgcaaattaaaacggccaacagctatggatgaattaatttctttgatgagtttcctttgtattatctttttcatctggacttgatcacgaaacataaggattgaattgtgaacctttgttttctgcagtgtaatgtttggaattgttttgtgtaaggtcttgcgttgcattgagccccgtgcatgatttggcgatgcctctctgggtttttgaattcttatattttcttttcgtttttatcttttgatgtttattatgagcatttaggattttagattttattctccatgacttccccttgggtcttactgggcagataagcaaatggatttgttcagcaggctgtggaaggcagtggctggaaattattgagggacttcctgtacagtcttaggttttattaccctcacattcgttattttcttatgtgtctgctctgcgtttgatggtgtacggtaacctggtagtgtcagagttattgtgtgtgattctaacaggcactataagagtattgggaggcactggagctttttgtggacaatttgtttgcttcatttgggtttttggagaactctgcgacgatgttcagcaggctgtggaaggcagtggccggagattactgatggacttcctgtgaagccttacgttttattaccctcacattaattattttcttatgtgtttgttctgcatttattggtgtacggtcacctggtagtgtctgttattgtgtgagatcctaacaggaactataagtattgggaggcactggagtttttgcggacaatttgtttgtttcatttgggtttggagaactctgatttcacaatttttttttaccaatttttaatatgaaagatatttctaggtgtttaactgtttgtgttcattcttatgcagcatgccaagtcctgatatgagatttctgttgccgattgttgaagaataaatcataaaattagaacagataacagctctggatgaattaatgtcattgatgagtttcttctttctgtattatttatttctctggatttgatcacgaaacattgaattgaattgtgagcctgttttctctgcagcatagtgttttgaataattttgtgtagtgcccttcatctcatcgagcctcatgcgtaatttggtgatgtttctcactgtttttgaattcttggattttctttttgtttctatcattctttgtttatagttatgagccattagtttttcaattttattctccttcatttccaattggggccttacagggaagattgacaatggatgttggtaggatgtggaagcagtggagattattgacgtactcactgtgaagccttaggttttattatccttacgttatctttgttttcttaattgttgtttctaacaggaaccataaagagagagtaatagggagccaagggaatttgtatattactttgtttcttctacaggaggaatatgggtagcgttaatttcttcatagatgaacaccaagtttcctggaactgacctacccaattatatcagcaagaattgaggaacatttgatatatcatctcacatgagtttgttttcttgtttcttagatgaaggttgctggtttgtctt

SEQ ID NO: 13303 - DNA, 1254 bp, Glycine max
tgatgtgtgaattttgatatttgcttcaatattctatttaatgagttctaagctttcatctctttattttatggcagtttgttcactgtattgtgtgggcgaaggacctactttttgctaagttatttggggacaagaatcaggacaatgatttaaatgttcgatcaagtgatgctgccagctcatccaaaaatgtagaggatgtatttgaacgtaggaaagatgaagacattgatcaatatggaaggaaaatttttgatcatgtttttgggtataacattgaattagctttgtctaatgaagagacatggaaaaatcgtaataggccaaaacctatatacagcaaggatatcctgtccgatgaaccggctcaacaaaatggaaatttggagaaaaaatatgaatctgatgaattatcagtttccgccatggcatccttgggcatgaagaacccacaggatatttggagtctcaaagaaaattctagaatatttcttgaagcatttagacttttttttacaaaaagggaaaaggagattggcaatctaagctttgataaagatgatcagttggctgtagaatttgttactgcagctgcaaacataagggctgcttcatttggcatccctctccaaaacctttttgaagctaaaggtattgctggtaatattgtgcatgctgttgcgactacaaatgctgtgattgctgggttgattgtcattgaagcaatcaaagtgctgaacaatgacattaaaaattatagaatgacatattgtctggagcatcctgcaagaaacatgctgcttatgccagtggagccatttgaacctaacaaatcttgttatgtttgttctgagacacctttatcccttgaaataaacaccaatcgttcaaagttgaaagacttggtcgaaaaaattgtcaaggcaaagcttgggatgaaccttcctcttattatgtgtgcttcaaacctgctttatgaagctggtgatgttgaggatgacatggttgctatttatgaggccaaccttgaaaaggctctggctgagcttccttccccagtaactggtggcacaatgcttacggtagaggatatgcagcaggaattcgtttgcaatattaacatcaagcacagagaggagtttgatgaagagaaagaacctgatgggatggttctctcaggatggactcaaccagtgtcagcagcagaaaacaaagacaaatctgttggaaatggtgcaagcacctctgatg

SEQ ID NO: 13304 - DNA, 429 bp, Glycine max
  unsure (1)..(429): unsure at all n locations
tccccctctccattcaattttctttctcttgctatctgaaaataaataaatgattattgtgctattcataaattgactgcagtttaatattattcttatatagtgccggatattgtcgcgcgttttcaaaacttaggttattgttttcatgcataaactcactttctgatatacataattctgttcagtgagccttttgaaattctacactcgctcttccttaccatggactgtgcgcagaactagcatccaaaatactttggtatttgttcccatgagttttacccgctcaacaattngtactgtagaacatcatttgtactttttggcgtgtattaccaaatacagaanaagaagatcgcatccaatcaactggttaattttggtttccatttcacctccttccacttatgattttggtgatatgtt

SEQ ID NO: 13305 - DNA, 427 bp, Glycine max
gcctaaatgtgttgaagtgtcttgttgatatggataatgttgggattccactaccgcgggctgatcttgagcggcttgcgtgggcttgtacccgtgaagatcactacattgttgtgaaagagctgtacacccggataagaggaaggtatgataagatcagcttgtctgtctgcaaccatgcaatccggttgatgggaaaagcaaagaaatggtgggcagctttggagatatatgaagatttattggacaaagggccaaaaccaaataacttgtcatatgaactgattgtctctcacttcaatgctcttctcagtgcagccaacaggaaaggaatctggagatggcgtgttaagtagttgaacaagatggatgataaaggcctactacctggatgtatggaatggaatgcagttcttgtggcctgttc

SEQ ID NO: 13306 - DNA, 618 bp, Glycine max
gctgttggtgacgacggcaatgacagtgatgaagaggctaagaggagtaagatgcgtgagctgggccacactggcactcctggtaggggaagaggccgaggtagaggaagaggccgtggccgaggggctcgaactattgaaagagatatctgtcatcagcaggttgaatccgagccttgcacctctattctgcaaagtagcaatgatattcctaacactagtgtgccaatagataatggtccacaatccaaggagttaccaaaggagaactttgtgatttctgaggaaagtactcaatctttccgcaacattgatctgaatgctaacttaaatgaaaacgaagacaaaaatgctggcacagctgttccggcttcattgcctgagcccacttccatggacactgccatggagattaaacatgaagaaattccaggctggtccctatctgatgtggacaagatgggcattgacactatgcagcttgcaaacctaggtagtcgactagaagtggacgaagaagattatgacgaggaagggtaaatatcatacactttgggggattaactctgctggaagctcatggtaacagtagcagagtaagtacgtactagtgctatt

SEQ ID NO: 13307 - DNA, 519 bp, Glycine max
atttgtccagatattgtaagggaaattttgagtacttggcctgaggtttgcacgttatgcgactcctctaacactagtcccctatattttgctgctattggagatcatttggatgtagtgaatgcaatattggatgttgatgtgagttcaatgatgatagtaaggaaaaatggcaaaactgcattgcacaatgctgctaggtatggcatccttcgcattgtaaaagcactgattgcccgggatcccggaatagtctgcatcaaagatagaaagggtcaaactgcactgcatatggctgtgaaaggacaaagtacttcagtggtggatgagatattacaagctgatcttaccatattgaatgaacgagataagaagggtaacacagctcttcacatggctaccaggaaatgccgtcctcaggtagtaagcattttgttaacctacacagctctgaatgtcaatgccatcaataatcagaaggaaacagccttggattttggcagataactacgatatgga

SEQ ID NO: 13308 - DNA, 423 bp, Glycine max
  unsure (1)..(423): unsure at all n locations
accagcgtccggccagcgttcgaccagcgtcctgtccagctaaggaatcattcagaagccaaggtgattaagtactagagagatcatatttcggagtagtaaaagttaatcataagcatgggatctttcaagggtcatgctttgccagggactttgtgtcctctagttggggtggggcacgtatggcgctctgcggagagatatgttcgcaatccaatggcgtatcatgtctagcgcttggagtcctgtgccagggtttgatgggaggctgaagctcctagtagctatatgcgatcgcaattcgtgctctcgttgacatgtgcatcgagctactgtattcaccatacctcacgatttttgtcgatggagtccttaacccncgttaacatgaatgactttgaacactctggaatgctacttatg

SEQ ID NO: 13309 - DNA, 806 bp, Glycine max
caatcatgaacttatgtgggactatggtatgtgtgttgataccaacagaggggctgcagtaagggacttaattgcgaaagctctgaagggagcccttgcgcctgcacagcaagagcaagtcctggtggagctggcaaatgatccaaaacttgtatatcactgtggactgacaccaagaaagttgccagacctggtggaaaacaatccccttattgcagttgacgttctcactaagttgataaattctccagaaatagcagaatactttacagtacttgtcaatatggacatgagtctacattcaatggaagttgtgaacaggctgacaacagctgttgaactaccatctcaattcattcacatgtacataactaattgtatagcatcttgtgtgggcatcaaggataaatacatgcagaacaggcttgtgagacttgtctgtgtttttctgcaaagcctcattcggaacaatattattaatgttaaagatctcttcattgaagttcaagcgttttgcatcgagttttcacgtattagagaggcagctgcgttatttaggctgctcaagtcattggaatgattgttgttttagtctgtcaattttctcctctttgctgtcctatttcaagactttctgtagatatgtatctacctagagctaggtagcgttatgtactcattttctaattgtggccaataaatcaagattatagcatgtcatttgcatttaattgtaccgggttatattatgaaatgttcaaaaatgtgagaatagagaatttagaatgtaattgaattccccccct

SEQ ID NO: 13310 - DNA, 505 bp, Glycine max
cccacgcgtccgaggaaatggaaaagaagaagagaaggtcctctctagctcctcttttatcgcgatcgtatttgttttgtttttctctctctgtcaaacagtttccctctccgagtcccagtttttctcggtgtgcccaaacacgccctttgtctgaagctcctttcagctgagatctaccctctctttctctcatggcttttgcttttgcactgaacaagaactgttaaaactactgcaaatgaaagcatttggagaggttaaagccagtgctgtatccaactctattttctattctgataagcgcatctcaacccaaaagcctcatgatgaacaacttgaccattgagactgaggatccttttgcaagcttgcttgagcttgcagctaataacgatgttgaaggtttcaagcgaatgattgacagggatccttcctgtgtagatgaggtaggactatggtacagtcgtcaaaagggatctaggcggatggtcaatgagctcag

SEQ ID NO: 13311 - DNA, 593 bp, Glycine max
  unsure (1)..(593): unsure at all n locations
tctcagaaactacagatgctatgacagcactaggtatcaccatggaagtattatttgtaagtggtaaagatgcatctgcagatgatggccacaagacagactcgacagcgaaaaaacaaccagcaacggcagcattgaaaccggcagagaggccagcagcagatccagcagcgagaagggaaagcattctgccggaactctttccattgtcaaagaaaggacggaggcctttggcaatggaagtaccaatgtcgacactgggaccctctggacccaaggaattgccggtgcctagagtaacagaagctgccatggcctttaagaaagggcgggaagcagacttgaggttggcaagatggagtttggaggaaaggatcttcttcttggacagcagagtcaaaacgttaacgaaggaggtttatagcagagacgcaataacacctccaaaagtcggaactagtactacttgtgcccatattgtctcaataggcgcttctctcagccatgaagcgccttgattaggaatcccatcccagaacaaatcataaatttcatggaccttatttattacatgtcanaaaaaaagannnaag

SEQ ID NO: 13312 - DNA, 594 bp, Glycine max
gcgaaaaaccttgagcggagttgaagctatgggaagcagattgggaagaagagtggtgcagttcgcgaacctccccataaagcttctgatgccgaacagcttcaccaacatccacgaaatcgctctcaagaccattccttcggccacgaagatcgagatcaagcgcgtccttcaatccctctacggcttcgatgtcgataaggtccgaacgctcaacatggagggcaagaagaagaagcgtggtggcttgttgattgcaaaacccgactacaaaaaagcctacgtcaccctcaaaacccctctctccatttccccggatctctacccgatccgaatcatcgatgaggacaagaagaggatcaataagcaagccaagtccagcctcgttcaggaccacgaggcccacaccgaggcccaccaccactggctccatgaccgcaaggaggcccaaccacccttcaggcctcaaaagcatggccgtttgggccggcccgagggcgcttccaatgctaagtttccctggtctagcatgaggtctgctagtggctctactaggtagtggctgctattaactcatttgaggataatagaaaa

SEQ ID NO: 13313 - DNA, 555 bp, Glycine max
gtctctgttagaagatagaagaagaaatatcttgttgcgtgttgcgatatcataacatcgatggcctccatcatccaaatctcacaatgtcgtcaactcttctcccagtgacagcaactcccattttcactctcaccaaaaccctccctctccccaaaccctacctactctcctataaattcaaattcaacaccctcgtccgccgctgctccctctccgaccacgaggagcagcgctggctccgcgaagagcagcgctggctccgcgacgaacaccgctggctccgtgaggagcagcgctgggctcgcgagcgcgaccaactcctccgcgagatcgccgacctcaagctccaaatccaggcgctggagcgtcgcctcttgacgcgcgatttgtcctctccggcttccatctccgacgccgtcgccaatgtcacgttgctcttgcaggtgctcaaggacaagaatctggttctcgagagcggttcgagcctgcggaacacggaggaggtgaagcaattggaagatgtcgtcgaacatgtgaaggacgctgtggtgg

SEQ ID NO: 13314 - DNA, 428 bp, Glycine max
cgagcacggaccatgcacgcgcacgtacgctcgcaatgcgtctggagcgagatgctactcaactgttcgcaacctaccgttttcaaatttgaggtcaaacacgttcaatcgtcgccctttgggattaattcccatatcgtttccacggcagcttcttctagcagataggaattaggttgaagtcaggacaaatatggccgatttggagaatttgcttttggaggctgcggggagaactggtacagctggtagaaatcgtcattctcttccaccttcaaggagacgacatgatggcgcctattcagatggtgggagtgattctagggatgacgattcagatgacgaactcaattatgcaagcagaaagccctctggatcacaagttcctctgaagaaaagactagatccaacagaaagagatgatgatt

SEQ ID NO: 13315 - DNA, 723 bp, Glycine max
catttatactttagttgttcagtacttctctattttctgtgcttccacgctctatcttcaaacgcgttcaatcgtcgtctttgtcattaattcccatattgtttccacggcagctttttctagcagtcgatggaactatgaaagatggggtggatttgattccaatatcaagccgcaatgcaaagcctccaggtgttgaattgtgggcagttcttgatgtccctgtacattaggttggcgcttcttggaaaaatttaagccattcactatcaggtctcttttgtgcttcaatcaacttcatggagtcttctaccacttattctactcctgaattggcatttcaatcagctttgggcagtttaagatatggtacactgccacgtgaaatcgataaagtgtgggtgcctctaccagatgaaattctataatcatttagcaaaattttggtatacaagattggccctgtccctgaaatcggaaagtgtggttgcctctatgagatgaaattctatattcatcatctgcaaaatttcgatatgcaagaatgatcctgtccctggaatcgaaaaaatgtgattacctctatgagatgaaattctatattcatcatctgcaaaatttcgatatgcaagaatgatcctgtccctaaaatcgaaaaaatgtgattgtctctatgagatgaaattctatattcatcatctgcaaaattttagtataaaagaa

SEQ ID NO: 13316 - DNA, 291 bp, Glycine max
tcgagacgttttcaaatttgaagtcaaacacgttcaactgtcgtctttgtaattcattcccatatcgtcaaaggtggggaaatttgcttccacggcagcttcttcagcagataggatttaggttgaagccaatacaaatatggccgatttggagaatttgctattggaggctgcggggagaactggtacagctgggagaaatcgccattctcttccatcttcaaggagaagacatgatggcgcctattcagatggtgggagtgattctagggatgaggattcagatgacga

SEQ ID NO: 13317 - DNA, 682 bp, Glycine max
gaactcttgccattgcttgacattgttgcaaacaaagttaaagcaattcgacgtttaagagaactccttacaacgaaacttccaatgggaacttttcctgttaaggttgccatccctgtggttcccaccatcagagtattggttacttttacaaagtttgaagaactagagccagtagacgaatttgcaacaccaccatcaagcccatctgcagctgagcaagagagccctgcagtgcctcacttctcggcatcgtcttggtttcaatggataaaggctccttatcgctctagtacatctgctccaggatccagcagtaggatagaaaatattgaagacccttttgcaattccatctgactatacttgggttactgctgaagcaaagaaaaagaagatgcaagagaagaacaagtcaaagaaaggaaaaagtcataactgactagcccacttcataagagtgagtgagtggtcctccaaggagttgtgcgttgacaatttggggcttgtggcataaggaaaagacacattgtgattcttgcaatagttgctggagttttcaactttacaccaaagaatttgttgattgtgtttcaatacatgtgcagaaaccattaactcaggatagttgcaatcacagcgagcaacttttatattcatgattgcagtttaaattcaccttt

SEQ ID NO: 13318 - DNA, 429 bp, Glycine max
cccacgcgtccgcccacgcgtccgaaaaaaaaaaggatggtgaggagaagcatatcaaagtccctgttggaatgtctatgttagaagctgctcatgaaaatgacattgaactagaaggagaagtcaaaagaagaaatttcaagtgctttgaaggagaattgatgcagaaactacaagaaaaagccttgaaaaaaagttggagatttggacagctcgcttagcgcacaagatcggcccaacgcggttgcttgcttagcggtcagctcacacttagcgcgaagaaggctgacgagaaagtccaaggttgtgcttagcacaaactccgcattatgcgcatgattacattgtcactcccgctaagcccaagaatgcgcacttagtgcgaagtcagtgtagaaagtaaattaccttaggtctatgagtaggaag

SEQ ID NO: 13319 - DNA, 393 bp, Glycine max
gtcagaatcagagtcacatccacaaccaactattgaacaacagcaacaatctctacaacaagccaacatcaatagcaagaggaagaccatggaacagggcctttcacctgagactgacagaacaagaccaagatacagtggcatagccactgtggtatgatcataaaaatcattggcaaaaattttcttgaatttcaaaaaatgtaattctcatagaacttttttctctttcttttaaaaacaaattaactcaagtgttggttaatataggctctataggagtgtaatagagttgtttcctgtacacattttcctggaaatatttccttccaattttgcttccccccaatataatgaaaaggaaaaaaaatattgaattgagtaagaaatatc

SEQ ID NO: 13320 - DNA, 507 bp, Glycine max
gagaggtcttataggaagcttccaccttcccataaggctttgttatcccactattctcgaaagtttcaaagattacgctggtgtatctcaatgaatacacatttcatattcggcatgcttcaagcatttgaacctccacttgacatgagccaggacgtagattttagtgaagatccacatcctgaatcgacccaaaaagatcatttagtttctgaagggattagtgcttgttcatgtgagtcagtccctgtgagaataacatgttctgtatctgatcaacatcgttgtgtggaaggtggcaatcatacttgcatatcacaagcacaaatgcattccaatgaggaggtggacattgagagttgccaccagtcaaatactgggagccattctccaagcatgatacatcctaaagaaactagtgaatactggtgaagtcctattgctgattccaatggcaatgtaccggtcacgtcatcacaacaacaatggttggatccatctttaaaa

SEQ ID NO: 13321 - DNA, 409 bp, Glycine max
cagccctttcgttttgcttcacacaacagccggcgatcgccttcggatctctgagaaaaggaattcaaaaagagggtgtgagagacctttcactatggcagacattggtgattcttcccccaaagggaaaaatgtattggaatctcttccaaaaattgagcaattaactcaaggtgttgctgatgttaacatagagtcaggacaagatgatggtgaatgggtggtatatgcaaagaagtccaagaatagagcccgaagcacaactgttaaaccatggagtcctccggttcataattctagacccactggaaatacaaagatggctcacaagccagttactcggaatgatggaagagttggaagggcttctgggagtggaaatccttggcagtcccaaaatgctaacttc

SEQ ID NO: 13322 - DNA, 703 bp, Glycine max
gaataaattttcgttactctcaaacaaaacaaaacgcgatcatttctccgccgtagcagtggaacaaactccaccgactccgttatggacaactccggaaatcctcaagatgtggttgtgccacctgttgaaggtgttgcaggaggtggtacggcttatgggtggaatgatggtggcacacatggcttgaatgtcaagggaccaattgaccccacagaaattccaactaaggatttagtgcatgtatggtgcatgccaaacacagcaaatgttggacctcaagatatgcccagacatttggagcctataaacctgctggctgctagaaatgagagggagagtgtgcaaatagctatccgaccaaaggtttcatggggtggttctagtgttgcagggactgtgcagattcagtgtagtgacctatgttccacatctggagacatactgattgttgggcaatcactgctgttgcggcgggttggtgcccattttaggtgtacctgatgctcttgactcccgttgatcttccagtcagtcaaataaacctatttcctggggagactaccgctctttggatatccattgactgttccaagttctcaacctccagggcaatatgaaggagagattgtcattactgctataaaagcagatgcagaatctcctgttcaaattttaagcaaggttgagaaacatcagttgt

SEQ ID NO: 13323 - DNA, 408 bp, Glycine max
cttgctcataaaaattttggtattttattaatggttttatacttgttttgaattccatgagcaatagtatgcaatataatagtaggtcttacgcaaatggcaatggatcctgacatatttgcacacgtaagaacaatataagattatggcgagtacctgttttgattgtgttgattggttaatgattcatgcgttaggactttgagaactatctcccctgaaaatggaactcaccaaagtggatgttctagttgaagccattagggttggatttagaaagctcgtacgaaacacaaaggagatgagaacagacttcttcagtgtcaatgtatcaaatcctatcaaaactttgagactagtcagcacagaatctacatgttaattcaacaagaggcccataacaatcaa

SEQ ID NO: 13324 - DNA, 487 bp, Glycine max
ggccgcccttttttttttttttttttttttttttttttacactttacaacatcatcttttattcagatagtaacactaacacagcttttctacatacaaagaacctttataaaaaatactagaaaaagaaaagtataatagaaatctatttaattgtttttctttttaattttaaccgacatcagattacggtgttggtctaccacggtaggcttgcttgcaaacagagctaggtttctgcgcgggggagcacagctgcgacgaccctgggcacgcctgcaggcaattgtcccccaggctgccggaaaccgctgttccggccgccaccagccccgccggcggctgtccgacgaaaaagttcccgtcgaaggaacagcctcttcatggacttgatctgcccgtactccagcgggatcgcgccacgcagcgcgttgtaccgaatcgacaggaaagacagcgcgggatacgcgccgagattcgcgggcgc

SEQ ID NO: 13325 - DNA, 1388 bp, Glycine max
actcatcaatgccagctcgcaagtattgctcaaatacttgcagaatcttttctaaagggtgtgttggctgcacatcgtggaggatatatggattcacagaaggaggaagggcctgctccattgctgtggagattttcggacttcttgaagtgggcagagctttgtccctctgaaccagaaattggacatgctttaatgcgtttggtgattactggacaagaaataccacatgcgtgtgaggttgagcttcttattctgtctcaccacttctacaaatcatcttcttgccttgatggagttgatgttcttgtggcccttgctgcaactagggttgatgcttatgtcttggagggtgattttccatgtttggctcgcttgataactggagttggaaatttttatgctctcaatttcattcttggcattcttatagaaaacggtcagttggatcttcttcttcagaagtattctgctgctgcagacacaaacactggcactgctgaggctgtcagaggatttcgaatggctgttcttacatccttgaagcatttcaaccctaatgaaaaggatgcatttgccatggtctacaatcattttgatatgaaacatgagacggcagctcttttagagtcacgtgcagagcagtcatgtgagcagtggtttcaccgctacaacaaagaccagaatgaagacttgttggattccatgcgctacttcattgaagctgctgaagttcactcttcaatcgatgctggcaacaaaacacgtaaggattgtgctcaggcttcccttctgtcccttcaaatacgaatgccagacttccaatggctttataggtcagaaaccaatgctagacgagcgttagttgagcagtctcgatttcaagaagctctgattgtagctgaagcttataacctgaaccagccaagtgagtgggctttagtactctggaatcagatgcttaaacctgaagtaatggaggagtttgtggctgaatttgtggcagttttacctcttcagccttcaatgctgattgatttagctaggttctatagagctgaagttgccgccagaggggaccaatcccatttctctgtctggctcacagggggaggattgccagctgaatgggctaaatatttaggaagatcattcaggtgcttactgaagcgaacaagggatttgaagttgcggatgcagttggctacagtggcaactggatttggggatgtcattgatgcatgtacagaagaaatggataaggtcgctgacaatgcagcaccactagttctgaggaagggtcatggtggagcttacctccctttaatgtgaaagtttctactgtagatcatcataatgattggataatcacgatggacaggaagttg

SEQ ID NO: 13326 - DNA, 389 bp, Glycine max
acgcgcgtcgcaggtgtgtgactggtgggacttggaatagaacgccaaataggaatagtgagggaaatctcaactcaacgcatctgccttctgcctcgcttgccagatctcttctctctgatggggggttcggtggtggaggacaaccacgacctcgaccacgacctcgacctcgacgatactcccttagcatctgcctcttctaaatcccaccagcaattccatagcttcgatttcgaggatacaagtgttctagatttgcggcgctcatccatctttaacataacacgtatgagcaggagtatttattttgtcttaattaacgcctagatcagcctcttgcttccctgtggtccattcgccattctcctacattacgtaactggaca

SEQ ID NO: 13327 - DNA, 501 bp, Glycine max
agatcactaatgagctcaaccagttttgtcagatttctgagaccaatgtgtataagggggtccagaacaggcgggctcgctccaaaagaaagcagcagaatgtggcgcctagtgctaatgctgaatcagaagtggagactgaggttgattctaaggataagaagacaaagccggacgaatttcaggcccctcctagcgtttctgctgggcctgctgataatttaggcttccagaaccatgatagtttgcagtacttgaatccagaatccaacaaaccagattctgtcttcccgtctgatgggaccagacattttcatcatgtgcctgcttttgatgggctgctatcaaactcaaggagcaactatcttactggaaaactggaaacacctgagaactacgaattataccagccagcaggtgactacaacattgcaggtcgacctccaattttattctgatgactgtgattagctgtaaagaattgctggtgtggttttgggc

SEQ ID NO: 13328 - DNA, 416 bp, Glycine max
ctctatccattcgcatgatcaaacaaaactttctctctctatctcaatctccttctctcgcaagcaccgctcccacacactgcacaacgttaaccgatctataacccatctctgtctacctctattcgatccaaattcggcttacacaaacgtgtaacatttcattcctgcgagactttcctacaccgatgcacactgatatgtcacgaatcctgggtgtctgcgatacgtagtcaccctttgcatgtgcttattcattctatctctgatgatcatatatgccactcatcggaaacttctctatcgagggatcgtgttctagcgtaccctgaattccctgagttgcttctccagaggacttcgtcttttacctggaacgatacactggatgcgtattcgccacgtatacttgttga

SEQ ID NO: 13329 - DNA, 1025 bp, Glycine max
gtggttgtggatggtggacgagggtgaagaagtggtggtggtggattgaaaaaggagggaagttgagaggttatgattgatggtgaattcgaggaatcattgatcattattgtgttgtggataagtgctattttggtgtgtttggtgatggggatgaggaatgatgcacagaagcaggggattcgtggtgctggtgctggtggtggcagaaccaacggcttcattccaagttctttccgtgctctctctagctacctcagaattgtttcctctggtgcttccactgttgcacgttctgctgcatcggttgcatcatccattgtggagagggatgatgaccctgaccatgatcaggttatctgggctgggtttgacaagttagagagtgagggtgaagttattcaacaagtacttcttctaggttatcgatctggattccaggtttggcatgtcgatgaatcaaacaatgttcgagacctggtttccagacttgatggtcctgtttcgtttatgcaaatggtacctaatccaattgcgtctaagaaatccgaagacaagtatgcaaacagccgccagctgttggtagtttgtactgatgggttctttgctggaagtaacaatggtcaggatgggtcgaccaccccttacaatggaagcactacaaactcccatgaccaaataaatggaagctatctgccaactaccgttcggctttattctatgaaatcccaatcttacgttcatgtactgaagtttagatcagttgtttattctgagaggtgcagttctcgggtagttgcggtttctcagtccactcagatacactgttttgatgctaccacattagaaagggaatatactttacttaccaatcctatagtaatgagttgccctggttctggaggcataggatatggaccacttgcggtgggaccaagatggcttgcatatagtggaagtccaattgcaatctccaactcaggacatgtgtgtccacaacagttgacaccttccgcaaggtttcc

SEQ ID NO: 13330 - DNA, 480 bp, Glycine max
acccttacttaaaccaggaattcggtccgttgcatttgcagagcacagggaaagcaaaatatctgatctttctccctcccttgcactgagtaggcaatggcggaggaagcacagtactcatcgggacccgattccgcgcccctcaagcgcaagtacgaagaccaaccctccggcatcgagcttgccaagcagcgtgctcaggaagtcgccgcacgcctcctcaacgccgctcctcctccgccactcgacgccaagcgtcccaaacccgacaccggcttcgattctctcgatttgaagcctctgtattccgcatctcctcctcccgtctcctacggtcaccaaggttccagcaagaagattgatatccctaatggcagggttggtgtgattattggtaaaggcggagagactattaagtatctccagttgcagtctggtgccagaattcagattactcgtgatattgatgcggaccctaat

SEQ ID NO: 13331 - DNA, 993 bp, Glycine max
atgttgttataaattgcctcttaaaatgctcataatgtggatgatgatagaggacgaggaacttgtaacaaatgccctagagaccattgttaacttagctccacttctggatcttcgaatatttagttcttccaagccttcatttattaaaataacgtaagtgattgatctatcttgaatgttcttttttgcatgcaattattattctgttactgattgataagctggtgttacttacagagaaaaacgtgcagtgcaggccatcatggggatgttggaatctgcagtcaaagcctggcattgtgctgctgctgaattacttgggcgtttgatcattaatcctgacaatgaacctttcttgcttccattttttccacagatacacaaacgcttaattgatctcatcagcatgccagctctagatgctcaggcagctgctataggtgcactctataaccttgctgaagttaatatggactgcagattgaagattgctaacgagagatgggctattgatcggttgcttaaagtgataaagatgccacatccagttccagaagtttgccggaaatctgccatgatattggagagtcttgtgtctgagccgcaaaacagaagtttgctgctagcatatgagaatgcttttgcagagatagttttcactgatggaagatattccgatacatttgcgaggatattgtatgaactaacatctagaccaagtaacaaagtggcagcggctcgtggcatatggggtatgtaaacatcaaactgtgaaatgactttgattagtgatcagtgctatatatagttttgcgacttggatggcttttggacgacttttgaagattcaaaatgtacatgtctcctgtgtaggattgtactataccttaagcatattcaagctgtcatgtactccagttgtatgatgataacttcagaattattcctgtgtttaccccgatgtgaagattagaaacttcatttcctccc

SEQ ID NO: 13332 - DNA, 431 bp, Glycine max
agaaaagcagcaatgtgctgttgctgcttcaaatatcatcaggaacttctctttcatgccagataatgaagttataatggcccaacatcgccattgtttggaaacagccttccaatgcatagaagatcatcttgtagaggatgaggaacttgtaacaaatgctctagagacaattgttaacttagctccacttctggatcttcgaatatttagctcttccaaaccttcatttattaaaataacagaaaaacgtgcagttcaggccatcatggggatgttggaatctgcagtcaaagcatggcattgtgctgctgctgaattacttgggcgtttgatcattaatcctgacaatgaacctttcttgcttccattttttccacagatacacaaacgcttaattgatctcatcagcatgccagctctagatgctc

SEQ ID NO: 13333 - DNA, 569 bp, Glycine max
atggaaagattgaaaagtggatctcttgaacctctgtaaaggtaaagagaaaaaaattccttactatagtcagagacattattcccattgatgcagtggcatacaagcatgtcgtggtcataattttcaatacgggtgggtatagatgagaaatatgtataataatcaatcgaagctattatcgcctgcaaactatggaactgtgacgttgcagagcgtcggaggattagttgctgtccggttatcacacttgcaattatttcacctcatgatttgccctcttggccgttgtatattgtagtggagctgtgtctttgtaacatgaattatgtaggtgcgtcaattaaatgcaattttacaaaatcatttgttagtgatgctgagcagctgtgcttggtgttgtcacattagcttgtttcaggaaattttgacagtggtatttcaatttttatcatgcaaatctttataggacaccatgttcaatgtcctggaatttggtcttccatgatttggcttggcatattttcacttcagaaatcaatatattccctcaatactgtatctagttg

SEQ ID NO: 13334 - DNA, 512 bp, Glycine max
cggacgcgtgggaaaagcacacacactctctctctctctctctccgattcgcactgtccaatctgtgattttattctttccctctctcccgttctattcgcttactgcactatatgcttcctagaaagagagtgagggaaggaggagtggttgtagaagtagacagtgacgctaccaccaccaacaccaatagtgctgcggcgtcgtttcccaagaaggctcggatcgggagctttgctgcctgctcgggtgccggtgctgcggattcgccggtgaacgtcagcggccagggattcagtagcggcggcggcggcgacaacagcctcgggaactcggtcggaggaatggctttggggaattcgcacccggcggagatcgacgaagatctgcacagtcggcagctcgccgtgtatggccgggagaccatgcggaggctctttgcgtccagcgtcctcgtttcggggatgcagggtcttggtgttgagattgcgaaaaatctcattcttgctggg

SEQ ID NO: 13335 - DNA, 520 bp, Glycine max
taaaaaaaaaaacactgtaatttgtaacagaaggtggcgtctaccagctacactcgctactcaatcgttctttgctttcttgtccaacaatgtcaaacactgaagaagaagaagaagcaactccttcgaaccctaacaatcacagtcaacactccaccaacaacgatgtggaacctcgtgacgacgaagacatcgaagaagacgacgacgacgtcgttcaggaaccgaatcgcggaattccccaatccgcagcgtccaagttgcgggagcagcgtttcaaggtggaaagcctatcgcggcgcttgtcgtcggagctggttccgatccgagtccacgacgttgtcataaacggcaacacgaagacgaaggattgggtgattgaagcggagctgaaaggcatcgagaacgccaccagcatgcaggagcttatgcaagcctcgcaaatcgccgttgccaggcttcagggcctcgaaatcttcgattcctgcaaggttcgcctcgaggctggaccccgagagct

SEQ ID NO: 13336 - DNA, 429 bp, Glycine max
aagaattttaatttataagaattttctgccgctccaaaattccttccagcttcgttccaccgtgtatgttcgttgctgtttgctcgatcccctccaacgtgtccctccacccaggcagggtttctatttcacttttccttccaccgatactaccaaagaacaaggagatcgcaatcgcaattcttaattctcacacgcactttcgccaaatcgaagtacattattgattccttccgtgatgagagagcccagagatggagccaataacaagccctctaaagccgccgccgccgccgccgcatcaccgcctcagtccttccctctcattctcgacgtcgacgatttcaagggagacttctcgttcgacgcgttgttcgggaacctcgtcaacgagcttcttccgacgttcaaattggaggaatctgaatc

SEQ ID NO: 13337 - DNA, 507 bp, Glycine max
tgggggtagatctccttatacataccaagatcttcgagaaatggtggctgcgtacatgagaaatcatacatctgatttccttccatttttcctgtcagagaatttgattgaagatgattccgacgaatcacctgcccagaagtttgaaaattattgtaaagaagtggagtccacgagctacatgggggggacaactagagcttggtgccttgactcactgcttgaagaagcatattatgatattttcagggtccttcccagatgtggagatgggcaaagagtataaatctgatggtggcactggcttgtctaattcgagtatcatgctttcttatcacaagcatgcttttgggctaagagagcattataattctgtggttccaacatgatcaaattgggcatatatatcatcatagggatccttgcctatcatgttgccttctatcatttttaattacagtcaaggatttggctttaagtctcttaaaaccgtaatttgtgaatttg

SEQ ID NO: 13338 - DNA, 1147 bp, Glycine max
ctcacggcaatgtgatagaaacaaggcatgaaggaattggtgctcccaagattgaaaagcccttgcaaaggcacggaggcaggcttgagcacaatgagacttattgtggttcctgttatggtgctgaagagtcagatgatgattgttgtaattcctgtgaggatgttcgtgaagcataccgtaagaaaggttgggcactttcaaatcctgatttaattgaccagtgcaaaagagaaggattcttacaaagaatcaaggatgaagaaggtgaaggatgcaatgtgtatggtttcttggaagtaaataaggttgcagggaactttcattttgctcctgggaaaagctttcagcaatctggtgtacatgtacatgacctactggcttttcaaaaggattcttttaatttaagtcaccacatcaacagattagctttcggagagtatttccctggtgttgttaatcctcttgacaacgtgcattggacacaagaaacaccaagtggtatgtatcagtattttattaaggttgtgcctacagtatacactgacgtgagtgggcatactatccagtcaaaccagttctctgtgacagaacacttcaggactggagacgtgggtcgtctgcagtcccttcccggggttttctttttctatgacctctctccaattaaggttacttttacagaagaaaatgtctcattcttacattttcttactaatgtttgtgccatagttggaggtattttcaccgtttctggaatactagattcattcatctatcacggtcaaagggctatcaagaagaagatggagcttggtaaatttaactgatgggatttgagtaatttcgagggaatggctctccagagacaaatctattcaaggttaactactgattaaaattccccttggggttctgagttcttcggtttcaacaaaaggattttgcccttagaccaaggttgaaatgctaagatatcatgtgcaacaaatgccactttgccttgattcatatcttttctgacagctctgatgttgtgaatgttacctgctttatggaaagtagaggggctttcccttgctgaagcatcaaaagggaggaatccattagggaaatataacttcaatgataatctaaaatgagatat

SEQ ID NO: 13339 - DNA, 426 bp, Glycine max
gcaaaagaaaattaacatatgtgaagttgcataaattcaagcttctcgaacgtttactgtagcctagacatgcttctctgtgttcttacctgtgaagattccaattcagtttttttaccttcaatttttccgccattttgctctttgttcagttgttgtttttccttctgaggcttatttgtgtggcttaccagattctggctcattttgcatgtgctatttaccttcaaagttgtatgttgagtgaattcttttctgggttttctctgttgcttcatctttttgttcttttgcgttccttaaattttgaaactttttgcactttcgatttccatatgcatctggcgcatcactattcactacatatttatggttctcttctttctagatcgtaatcgtatcgttatgatttattctttacatgca

SEQ ID NO: 13340 - DNA, 949 bp, Glycine max
agaaaatgccgtctagtaactgggggtacagacaaccatttaatactttgggatttaaggcccctgggatggacaggtaagttttatgagaaggtctgtgaaacatgtcatattactttgaataaaattgctatttttggcgacaatggaactataattcctggaggtgtaagagtaggtacccctgccatgacgtcaagaggatgtctggaagctcattttgagacaatggctgaatttctcattagagctgcacaaattgcaagcatactgcagagggagcatgggaaattgcagaagacaacattgaagggacttgagagccatagggacattgttgagctccgggcacgggttgaagcttttgcaactcagtttgccatgccgggttttgacatttgaacatgaagtggctggtgaattgccattattgattatttacatattcaacaatggtgggttgttgtccctgctttttacaaaagcacatattgtgcatatattttgtggagcttctctcctctctgcattgtatgcagctgtcaggttttcacatgttgcagagttgcaatctggtacaagacagtacgaaagtaggtacttccgtactgctgttgaggtttcttatggtgatcaagtatcttgttcctaccttggaggctgcaccatcccagctgaatgcatcaagtcaagccattataggtgttggaacagggattcttgatcaaccaacccgagtacagaattcttctggtgaatctgcagaaaataattactctgataaaggttagacactttgaattcttttagctgatgtttgatgctgaaagctatgctattaatcctattttttgctatatatttccccctttttgggatcatatctggtactcattttcgtcagtaccttgccgtgttaattattaaatatatatagttttgatgtggt

SEQ ID NO: 13341 - DNA, 692 bp, Glycine max
agtcacgcaagtacatactttccgtctcaattcaatttcccataaactttctttgaggttctatcgcttcgttaaattctcttttcttcttctgcccccttttccacttcaattaggtatatcgccgattcgattaccaatttgcttaaactcaatcaagcttcgcagcgtcaatcattctattagaggtgatcataatccattttcggattgctatatttaagtagttgtagtgtagtttgattggtaaatggcatcctccgatggtagagttacgtattcttcactatctaagctagaaaacgagaatacccattttggctacgatgatatgaatcatcatggtgaatctgtgtggtctgagcctatgcctggcaccccgtgtggccaattaggcccaacgttctctaacaaagagtcattgtatcagtttccctccgaggatgatgacttgtttgatggaggttatgaatcaggtgatgatgctcgtggtattgtaccctctaacaggccgcctgaggtgaacttgaagaatgtgctttctgggatctttgctattttgtctggacggaccaaggctccgagtgttactgcaaaccagcagctcccaagttcaaatgtgtcattttttgactctggaatcaatggggatgttttccttgactcttcggtgtacagccaagtgctccgcc

SEQ ID NO: 13342 - DNA, 547 bp, Glycine max
ctagtacatactttccgtctcaattcaatttcccataaactttctttgaggttctatcgcttcgttaaattctcttttcttcttctgcccccttttgcacttcaattaggtatatcgccgattcgattaccaatttgcttaaactcaatcaagctttgctgcgtcaatcattctattaaagtttcggattgctatatttaagtagatgtagtgtggtttgattgctaaatggcatcctccgatggtagagttacgtattcttcattatctaagctagaaaaggagaatacccattttggctacgatgatataaatcatcatggtgaatctgtgtggtctgagcttatgcctggtaccccgtgtggccaattagtcccaacgttgtctaacaaagagtcattgtatcagtttccctccgaggatgatgacttgtttgatggaggttatgaatcaggtgatgatgctcgtggtattgtaccctctaacacgccgtctgaggtgaacttgaagaatgtgctttctgggatctttgctattttgtctggac

SEQ ID NO: 13343 - DNA, 359 bp, Glycine max
agttacgcaagtacatactttccgtctcaattcaatttcccataaactttctttgaggttctatcgcttcgttaaattctcttgtcttcttctgcccccttttccacttcaattaggtatatcgccgattcgattaccaatttgcttaaactcaatcaagcttcgcagcgtcaatcattctattagaggtgatcataatccatgtaattctcgtacttcatccctagttatattttgtatcaaaaccctaattttacatccttcacgcgcttaatccttgtattttctttgcgcgattggtttttctgtttgcaattcgatgctcagttcatgtttttccaaaaattcttgttgtccct

SEQ ID NO: 13344 - DNA, 386 bp, Glycine max
ctttcatagcaagtaaaaacagtaataagaattaacatataagatagcttaaagttatttttacaaatcatgcaattgatttccccaattcgtcccaattgcatatccaaccgtccttggccattgacttctcttaaattagctggtaggttctcatcaaactctatcccccatctttcacttagttttccattcttacctggtcaattagaaattaaactgagagaaagtataatatcaggaagaatagtggtaagtaactaaactatgttagaaatccctaaaacatgtttggtcattagttgtttgaaaggatctaattatgctatagttcaattgttcatatgaggaagttttaccatacatcttatgcttttgagctttgc

SEQ ID NO: 13345 - DNA, 1112 bp, Glycine max
ttaacaatcaccagaggagtcaacacatgtggttaaaaaggattcaagtgaagttacatcctctttaccagaaaatactgatgtgaacatatctccaaagtcggtcatgagcaatggtgttgcatgtgttggagaagataatgttttagctgattccaagtccattaaaaaacaagaggatgctgattgttctaatcactctgaaggtttgaatatatctggtcatgaggtgcataatgatttggacactgaaaaagttgacactagtaaacaaaagccagagcaagctaccaagaggcggcgaaagaaatcaagctcttcaactaaatcagcaaaaccttccaagggtcatgttgctgctaacgagagggaaactgagaaaatgcttgaccttgaaagcaacagcaagaaagttcccagtccccctcacgaggaccattctgctgaagcagcaggacctccagagaatgacaatggcatcgatgctaagatttcatcaccaaaggcttgcaacggtgaatctgaagttgttgcttctccaccaagggagagcctctctgatgaaaatctttcgaagaaaattgggcgaacaaaaaagatagatggggatgctgagggtgtttcaaaggtgtctgaaggagctagtgattcagaagccaaacctgtcaggcgatccgtgaaaagggcacttggtcagaagtctgatgcgaaaaatactgatgtggtggattcagtaaagaaaggtagtgggacagcgaatgatgcagatgctaaagagcacctcagccaagaaattagcatgtaagcatgaaggatcgtgatggatcatcttcaagacaaatggaggacaagaaaaagggcaggtgggggaaggctaactctgaagcaattgtagtaaagtcatctgctatggatgtggacaaggaaatggtttcttctctgaggtctggtacaaagtcaactaaaaatgaaaattcagaggagactcccaagacaaatgtgaaaaggaaacgcagttcaggaaaagaaaatgaatctaatgcgaaggaatatggtcaaaaccttgttggtttacgggtcaaagtttggtggcctgatgatcgtgagtttta

SEQ ID NO: 13346 - DNA, 396 bp, Glycine max
acaagtttgaggctaatgttgtcatttcatggagggattactttttgagagttgtaccaactgcttgtggaactgcaatggatgttaacttgagcaatgtatctctagttttcatctctgtcacatttgctacaatgtgtaaatctgctgctccaatttttctccttctgtttgcttttgctttcaggttggagacaccaagtgttaaactatcaggcatcatcttaatcatctctgttggcatattattaacagttgcaaaagagacagagtttgacttctggggatttgtacttggtatgcttgctgctggtatgtctgggtttcgttggtgtatgactcagatccttttgcagaaagaagcctacggtctgaaaaatccacttgtcctgatga

SEQ ID NO: 13347 - DNA, 452 bp, Glycine max
gtcaatatcaaaaatgaattttagaaaagaaggaggctccacttgcagagccagggaggagcgaagggtatctgtggatgaatgacgatcatgccctcgttgttgctttgctcgttgtggaaaagaatataatgaattgcgcaaacaagtggatctgaattcacatgggactcagccacaacaagaaaactttgctttctcctctgctaagagtaagacccaagcacttgttactgcttctatagttattaagtcatagaaagagaaacacttcatcgcgaatcggagcatggcggagctccggcactcttcctcccttggcagccgagcctccaattctccgatgaagcgagacgccggcgccggcaccggcgattcctcccctctcattcccgacaaccacctcgccgacgggacgacgagcacgatcgaacactcgatccaagggaccg

SEQ ID NO: 13348 - DNA, 417 bp, Glycine max
agagtaatgaattgcgcaaacaagtggatctgaattcacattcacaacaacagaacgttgctttcccctctctgctattaggagagacagacaactcactccttcgccaatcggagcatggcggagctccggcactcttcctccctcggcagccgagcctccaattctccgatgaagcgcgacgccgtcgccgtcggtagcgattcctcccctctcattcccgacaaccacctcgcccacgacgacgacgagcacgatcgacactcgtccaaggaccgcgaccggcaactctgctccttcttcaccgacgaccctagggtttcgccttacaactccaggatctctatctttttcacattacttcttcttctcgttggtttagtttccctattcagaatctttcataatctcaatgcg

SEQ ID NO: 13349 - DNA, 1039 bp, Glycine max
ggcgcggaccgccgtgggcgtgggctgtttttgaatctcagttggtgccagctgtcacggagcttgtcgttgcagaattgatgtacttgcagtatatggatcctaaagagccaatctatatttacataaattccactgggactacgcgagatgatggtgaaacggtaggcatggagacagaaggttttgccatttatgatgcaatgatgcagttgaaaaatgagatacacacagtggcggttggatctgctataggtcaagcctgtttgctactttcagcagggtctccgggtaaacgctttatgatgccacatgctaaagccatgattcagcagcctcgtattccttcctctgggttgatgcctgcaagtgatgttcttattcgtgcaaaggaggtgataattaacagggacaatctggttaaactactggccaaacacacgggaaattcagaggaaacagttgctaatgtgatgaagagaccgtattatatggatgcaacaagggcaaaggaatttggggtcattgacagaattctttggcgtggtcaggaaaaggttatggcagatgttgcttctccagatgactgggacaagggtgctggtatcaaaattgtagatggattctagttcctcttttgtggatacgtttcttgtttcttgtcaatgtcacatgtttcggtaggatttgttttcatggtctacgggtccagaaatgttccacagctattcttcatagaacactgaccccgtagttacccaagtgcccaggagacagaggagttgatggacgttttactaagaatgtcccgaaaaaagaaaagaaaagaaaaagaaatagtgattgttcatccatgtaatcatatacagtgattggttctgactattagttagtcattggctgcctacccgaattttacacagggactgtgattggcgtttatcattacacaattaaatagagtacataatttgtaatctttttgtttctatatcattcgatcagagatgaaccaaaagaaacatctttgcaaaaaaaa

SEQ ID NO: 13350 - DNA, 620 bp, Glycine max
ggtatattaaatatttaactagagattagagaaacttggcagttgatatttggtggctcatctgtttctggttgaagtgtttgtgcagcatggccatggtaggcggaaccatgatggctgcgtatttgcgtgtatccatgcccacttccccacagtcccccaccactacgaggaggagatgcagaaatctgaaaacttcttgctccgttaacagacccaaaattccaatgccccctctcaaccctaaagacccctttctctccaagctcgcttccgtcgctgcttcttcccctgaaacgctcctcaacactcccaaaaactccgacacccttccttatctcgacatcttcgactcccccaaactcatggcaactcccgctcaagttgaaaggtctgtttcatacaacgaacaccggcccagaaggccgccacctgacctgccttcgctgcttctccatggtagaattgtttacattggcatgcctttcgtgccagctgtcacggagcttgtcgttgcagaattgatgtacttgcagtatatggatcctaaagagccaatctatatttacataaattccactgggactacgcgagatgatggtgaaacggtaggcatggag

SEQ ID NO: 13351 - DNA, 419 bp, Glycine max
atccgtctctggttgaaagccatgagcatgatggctgcgtatttgcgtgtacccacatccacgcccattactccgcaatctcccacagctacgaggaccaaatgcagaaatctgaaaacctcttgctccgttaatgccgccaaaattccaatgccccctctaaaccctaaagaccccttcctctccaagctcgcttccatcgctgcctcttcccccgacacgctcctcaacactcccaaaaactccgacacccctccttttctcgacatcttcgactcccccaaactcatggccactcccgctcaagttgaaagatctgcttcatacaacgaacaccgacccagaaggccaccgtctgacctgccttcgctgcttctccatggtagaattgtttacattggcatgcccttggtgccagc

SEQ ID NO: 13352 - DNA, 647 bp, Glycine max
ggagcactgagcaggtgcaccaaacaaaaacaacgacaacttcacacacagctgacgcgtaaactaagattcaacgtctgcgctctgcagccaccatacaatagatccttcattctttctctgcaacgatcaaacaacaaaaaacactgcacctcttcttctggatttggtgaagaagaagaagaagaagaagaagaagaaagtgtgatttgatgattatgaattgaagtgtgagaggtgaagagatgaacgtgagccatgcttcggttcacccagttgaagaagctccaactactgaaggtggtggtgaccaaaacgtcaacgctcctagggtgaggatgaaggatgttcaaggcatgcctggcactgccggtggcctttctctgcgtgtttctcagtttgttttcgctgctgctgcactctccatcatggcatccactagcgatttcccttctgtcactgctttttgttaccttgttgctgctgccggcttgcaggctttgcggagcttttcattggctattactgatgtgtatgcccttttagtaaggcgttctttgcagaactatcgaattgtcagtttgtttacagttggtgacggggtcacttctacccttacatttgcagcagcatgtgcatcagcaggc

SEQ ID NO: 13353 - DNA, 554 bp, Glycine max
ccaacgcgtccgcaactctacaccagctgacgcgtaaactaagattcaacgtctgcgctcttcaggcaccataccatagatccttcattctctgcaacgatcaaacccaaaaaacactgcacctcttcttctgggtacgccactttctcttctttttaatttttttttgttcttctttttcttcaacccctctattcgcaaaggaagcaacggaatcgattctgttcagttttcctcgttttgagtttaaattcacagtattttgaggaaacaaattaaagggtaatcgctcgcttaatccaccgagctcaattcccacatccccacaaaaaaaaatcaacaaaatcagatttggtgaagaagagagtgtgatttgatgattatgaattgaagtttgaggtggagacatgaacgtgagccatgcttcggttcatccagttgatgaagctccaacgactgaaggtggtggtgctgaccaaaacgtcaacgctcctagggtgaggatgaaggatatccaaggcatgcccggcactgccggtggcctgtctctgcgt

SEQ ID NO: 13354 - DNA, 292 bp, Glycine max
cgctcttctgccaccataccatagatccttcattctctgcaacgatcaaacccaaaaaacactgcacctcttcttctgggtttgatgggtgcgatcagatttggtgaagaagagagtgtgatttgatgattatgaattgaagtttgagggggagacatgaacgtgagccatgcttcggttcatccacgttgaagaagctccaacgactgaaggtggtggtgctgaccaaaacgtcaacgctcctagggtgaggatgaaggatatccaaggcatgcccggcactgccggtggc

SEQ ID NO: 13355 - DNA, 275 bp, Glycine max
gccgtaacctaggttccacgtctgcgctcttcagccaccataccatagatccttcattctctgcaacgatcaaacccaaaaaacactgcacctcttcttctggatttggtgaagaagagagtgtgatttgatgattatgaattgaagtttgaggtggagacatgaacgtgagccatgcttcggttcatccagttgaagaagctccaacgactgaaggtggtggtgctgaccaaaacgtcaacgctcctagggtgaggatgaaggatatccaaggc

SEQ ID NO: 13356 - DNA, 692 bp, Glycine max
tcgcgggtccgacaacgcgtccgacgagcagacgagagaaggggataagtaagctttcccaaaaacccaaacccaaaggtgttacgttcattttcatcattcagagttttcagaggagctctttttttttttttagttcagaaagcagaaagcacgcacttgcggaagtgaagttacggttttgcccttcttctggtggtgtcggagaggaacatgtccgtaggaacaacaacatcgatatcgacatggcgcgttgttttggtttaggttccgttctggttctggcggcgctcgcggcgtcgatggtggttctgccgctgatgctgccgccgctcccgccgccgccactagttcttctcttcttccccgtcgggatcatggcggcgctcatgttgctcgcgttctcgccatcagatcaaaacggcgtcgtttacgcgtcgacgtagcgaaggtggtgggaaaccggatcagccggtgccacattttggggtttcttgaaggttccgatgggattgcttcgtttcatgttttttttttttttaagttacggtgttaatatgaaaagggaattaattgtaaaagcagaaagtgaaaaaaaaaaacagaatagaaagggatgaaggattcattgtattgcggcatagacatggaaatttcgtttttgtttctttaattaattaattagttaaccc

SEQ ID NO: 13357 - DNA, 462 bp, Glycine max
ggggggctgagtgagcacacccaagaaggttctaattggggcgacaagaaatttggttcatgcgatgtatctggtgattccagtggaaatcagggtagtaatggttggggtcagaaaagcaattggaactctggatctaggagtgggaatgagaaccagaattctcactggagttctgggcgtaatgagcctggaaatcaagattccaacttggacaagaaaagcaattggaactctggaaacagtggaaacctggcttccgatccaaaaagtagcaattggaattctggatctggtaattccaatgaaaattccaactggggaaccaatgtcaataacaaatcttcatggggtactggaaatgaaaacaagaattccagctggagttctgggcatagtgatcctggaaatcaagatgccaatcagggcaagaaaagcaattggaactctgggaacagtggt

SEQ ID NO: 13358 - DNA, 715 bp, Glycine max
cacgggagtgccgttgctgcagcggttgagggagtggaacttcagcaaactactccaaatactttcattgaaacattgagagagcgcgtgttcaaaccttccctgtcatctatagtcgatgaaaatacaaaggttgctattgcattagcatcagatcctgtctacgtggctgcaaaaaagatgcgggagttgcatgtaaatgcagctgtgattgtgatggaaaacaagattcaggggatacttacttcaaaggacatccttatgcgcgtggtggctcaaaatctttcccccgagtcggctcttctggaaaaggtgatgactccaaatccagaatgtgcatctctagagacaacaattcttgatgcactgcatatgatgcataatgggaagttcttacatcttcccgtggtggacagagatggaaatgctattgcttgtttggatgttttgcagataactcatgctgcaatttctctggttgaaagtagtcctggagcatctaatgatgcggcaaacacagttatgcaaaaattttgggactcagcttttgctctagagccgccgcctgaagattttgacacccatagtgaagcctctggacggttgactttggatggggcagataccacaaagtctacatatcaatctgcaggttttggaaattcatttgcttttaaatttgatgatcacaatggccatgtgcatcgattctact

SEQ ID NO: 13359 - DNA, 502 bp, Glycine max
gcggcagaacattctttgtttcgctctcgcttttcaggtccaacaacgccgaagaagaagaagattgtgtctccgattattatttgaagatttctgaaacaccagagtgtttctgatcatcgtcgtcgctgatctctgtttcctccgttactgtttctgattgcagaggcgaaaaggttttccgcatcaaaatcgaattttgtttgctccatcatcaccatgggtagaatcacgaaactgggttttcttcttctacccagataagtaaaagggttttcttctttctcatttattccgacaagtgcacaaataacaacatcatcatcgtatcaatcatcggacaagtgcacagacaaacaacatttgtgtctgattagcagaaaaaggggtaaagggttgttccgtgtttgtttgatgaattatgttcaaacagatattcagtaaactccctcggaagtcatcgaaaggttccgaacacggtggaagtgggagaacacatcat

SEQ ID NO: 13360 - DNA, 468 bp, Glycine max
ctgcagaacattcttcgtctcgctctcgcttttcaagcccaacaacggcgaagaagaagaagaagattgtgtctccgattaatatttgaattccgaagaattctgaaacactctgttttctgatcatcgttgacgctgatctctgtttcctccatcactgtttctgatcgcagaggtgaaaaggttttcggcatcaaaatcgaattttgtttgctccatcatcacaatgggtagaatcacgaaactgggttttcttcttctacccagataagtaaaagggtatcttctttctcatttattccgacaagtgcacaaacaacaacaacatcgtatcaatcatcggacaagtgcacaagacaacaacatttgtgtctgattagaagaaaaggggtaaagggttgttccgtgtttgtttgatgaattatgttcaaacagatattcagtaaactccctcgaaagtcatcgaaa

SEQ ID NO: 13361 - DNA, 695 bp, Glycine max
caaacccctaatccctaatcaatcgcaagttcgaatccctaatttcaacctgttcttcctcaacgtgcgtcgtgagcgagttaaggttaagggaaagacaaagcgattatggacggttcacgacggctactaggacagtctgtaggggttttcaatgaagggatttgtttagttttatctcgctggtcggctcttcgatcggctgttgagaatgaatggggcggccgtgagtcccgccttaaagccgatcaacttgccggtgacattcttacctggttcactcaatccaaagagccactttatattgatgacttagaagacatactggatcaaggtatgctttctctcaatgtagaggtcgaggatggcagcgttgaagaggtagctgaaaaactaatggttatgcatgaagaattcttagaaggtaattttagttcttttgaagatctcaggaaagccaatcttgagcaagctactcttcctcatgtaacacagattgtcaacgaagacgattcagatgaagatggtgatcatgatgaaaaaatgattgcggatgataattcttcaaacatgaatcccgagatttcaacatctgattcaaacatgaattcagtgaacaggccagtaaatgagcctctaccaaaggtttcaggcaaagcagatgatggatgggttgtagtttcaaacaaaagaaa

SEQ ID NO: 13362 - DNA, 374 bp, Glycine max
ctttgttctccgctaggttcgtcattcacttgcattgcacgccgccacctctgcggcttcgctgtagtcaatgaaccagaggtccctctgtaaaaagggtttattgtgttttggtgacacattgaagctgagatagaaagagggatggagggttcgcgacggctacggggacattctataggagttttcagtgaagggattggtttagttttatttcgctggtcgactcttctaacggctgttgagaatgaatggggtggccacgagtcccgtgtcaaagccgatcaacttgccagtgacattctttcctggttcactcaatccaaagagccactttatattgatgacttagaagacatactggatcaaggtat

SEQ ID NO: 13363 - DNA, 1102 bp, Glycine max
cgccgtacaaatcgtataacaggctgaggagtttcagctcccacccggatctccggcaagagtcgcagtggctcgccgccgatgaacggtggcgattctatgacgatacgcacgttaacggttaccgtggatttgacttggaggaacaccggcagcatagaacggaggccggagaagaagagagcgttgagaacatagaagtggttgcgaaggaggttccaccaccgccagctccggcggagaggaggagtgggggaaataagaataagagaacaagtgcaactaaagagttgttgacatcttcgaagggaaaagaagaagaaacaaagacaaggaaacgttgaaagtgttaagagcattccttcacaaccttcctcagtttttcataatatgttttcttctaaggaaagcaagctcaagaaagttaactctgcttcatcgtcgcatgtttcattttccaaaacccaaccggttcgtggggatgtggtggctacttccagtagatcaaacaagagagaggatttctatgcttcagaagaaaatgtggttgttactggcaacgactcacctttgatctcgatacctccaccgccgccaccaccgccgttcaaaatgccggcatggaagttccgggtgcagggtgactttgttagaatagatggcattagtagctggagtagtgatttggaagatgaaattgtggaatcaccgagcagtgaagatgggtggagcacctgaaatcttattgttctatcctagtcctgatgttgataccaaagctgatacttttattgaaagggtcagagctggtttaagggaggagaagaagggaattcgtacgtccaatctacgcccttcaccaaagccagaagctggacggaccaagtagaatttaaggtgcaaaattgataaattaattctttgttttgtttgtttttgtattattttgagacttgttctgaatgaagtaaattcttttcctctcaagttatacatttgagtccagagtcatacagaggaatagaaggattagttttccttttgcaaaattaatgtttgcgcataaatagccacatctctcgttttttgttttctaatgtat

SEQ ID NO: 13364 - DNA, 505 bp, Glycine max
  unsure (1)..(505): unsure at all n locations
attaggttaagtatgtgtctcagcccatagaggatgaaaccctatgcattgaaactactctctctcaccccctttcattgcaacagtggaactcaacttctcagtttctttaaataattgatatctggaactgtacgagcagaggacatggcaaatctgccaaaagaaaaccagcaagtaacaagttccacaccatccatccagaaaagtgaggaggatcaagcagccagcactgctatgggctttaaagattcattggaaaaacaatatctaaaagtcacagagcatgctgaaacatacccttatgtttgggcttcttatattgttgtatatggtggctttgctctctggactacctatagatggagaaagcttcgcaagacagaggacagagtaaaaactctccaagaaagactacgtaagcacgttgaagctgaagaatcttctagttctaccanagtggttgaaaagggttctacatcttctgataccaaagctattggaa

SEQ ID NO: 13365 - DNA, 398 bp, Glycine max
aaacaaaaccccttgcgtcctcgccgcacagttacactccgcagcacactgcaatcgccaccacggaccaagctagttccgccgtcgacgtcgtcggccaccgtcacgtctcgccgtcagtttctttaaataattgatatctggaactgtacaagcagaggacatggcaaatcagtctaaagaaaaccagcaagcaacaagttccacaccacctatccagaaaagtgcggaagatcaagcagccagcaccactatgggctttaaagattcattggaaaaacaatatcgaaaagtcaaagagcatgcagaaacatacccttatgtttgggcttcctatattgttgtatatggtggctttgcactctggactacttatagatggagaaagcttcgcaaga

SEQ ID NO: 13366 - DNA, 859 bp, Glycine max
cccacgcgtccgctttttcttaatagttgctttggcagggaaagacgatcgaaggcagaagcttggaataaagccaacaaacgacgtcgtgtggtttcgaataccttgtgcgttttgaatctctgcgagaattgagatggcgaacgagaacgaacccgcgaagctgctgttgccataccttcaacgcgccgatgaattgcaaaagcatgaaccactcgtcgcttattactgtcgattatatgcaatggaacgggggttgaagattccgcaaagtgagcgcacgaagaccactaatgctcttctggtttcgctcatgaagcagcttgaaaaggataaaaagtcaatccagttggggcctgaagacaatttatatctcgagggatttgctttgaatgtgtttggaaaagcagacaagcaagatcgtgctggaagagcagatttgactacagcaaaaacattttatgctgccagtatcttttttgagattcttaatcaatttggagcagttcagcctgatctggagcagaaacaaaaatatgctgtgtggaaagcagctgaaataagaaaagctttgaaagaaggaaggaagcccacagctggcccccctgatggtgatgaggatctgtcagttcctttgagttcttcaagtgatagatatgaccttgggactactgaaaatactgtttccagtcctggaccagaatctgattcatcacgaagttatcataaccctgctaactaccagaatctgccaagcattcatcctgctgctcctaaatttcatgatactgttaacgaccaacattctgctaatattccatcatctatgccatttcatgatagagtagataataacaag

SEQ ID NO: 13367 - DNA, 397 bp, Glycine max
cccacgcatacgaattgataaacaacactaaaaaggcatgggagtgggggtggcagtgcctcctcctccaccttcttcttccatggactttaactctgatagcaactgttcctctccttacatcactgcaccttctagcccccaacgctttggcatctccttcttcagtgctcccactagccccactcgcagacactcctctgcttccactcccaacaccaccgaagacgagtttgaattcgacttcagtggtcaactccagagaccttccctttcccacgaagaactgttccttggcggcaagattacacctctcaaacccctttccccttcgtccaattaaacaagagagaaatcggttatcgaacaatcatcatcacctattatcatcaccacc

SEQ ID NO: 13368 - DNA, 770 bp, Glycine max
ctgacatggatattacatttcaagcgttagaagagactgacattgggaggcatgtgaatcggttgcggaagcattcgtctaatgatgttaagagattggtcaagttactcgtcaggaagtggaaggaaattgtagatgaatgggtgaagttgaaggccccgggagaaccgggtactgctgtcatggctgatgaggactcgctcagcagagaatcctacaaaatgggcatcgtcagattcctgattttgcatactcaccaaatccacactatgggagttttgggtcagagcgcaacaatattgaagcagaacgaaaaccaaaagcaattcctcgcaaagaagctccttcaaaaccatcgccatcagtcactactcctgctcctcctactcaaaacagacagagagaaagcaattttgacccggatagatttgcttcagccagaaaacggcttcaagagaactacaaagatgctgcaaatgccaaaaagcaaagaacgattcaagtgatggatctccatgagttaccaaaacccaagaatgccttccttggaaaaaacaaaggcggcactggtcagggaaggcactggtgagtggtgacccgtaatgttcgtgccaaagttccttgtaaaaaggcttttttgtgggtgggtgatgccgcatagtcctaaaaacccgcttgatccctttacaattttactccccaacataaaaatccgtatggttttatgtttacttatttaatactatcaacaaccccctccttcccccccc

SEQ ID NO: 13369 - DNA, 428 bp, Glycine max
gaaagaaatgccttgcgaagagaaaaagaaattctgaaacaagctaagcagagtgattatattaggacattgatgaatgatatggaggaaagacctgaagagataagagattttgagggagctagcagagaagttgatagatatattgccaagatggacgaacgtgctcggcaagaggaggagctgttcacgcgcgttcctcttacgaaacaggagaggaaacgagaaaagtacttgaagaaatcaagaaatgggttgcaaggtctaacagaaagtttctatgatgaaatcaaaacattaccctttggtgataaaactggagagcaagtaatgggctctagtaatggtggtagaacaaacaatagactgaagaagcgaaagaggaaacattaaaggaagaaaaatttgggttttgagctaaaagggcg

SEQ ID NO: 13370 - DNA, 487 bp, Glycine max
ctcaacggacttctcgaggtctcattttctctctcttttagatctctctctactatacatctccttcgcttcaccattttccatttccatttctccctccctccaaaaatgcattcctcgctctctctctcgttctccgccacctcctcctccgccgccaccgtttccagatcacgccactcattccactctcccgccgccgccacgcctctcaatctccgcttctgcggcttgaggcgcgaggcatttgcttcaggtctcgctgcttctcgcaaccgccaccactcccacctccctcgccggcctcgctccgccgcagtctctgccgcgctttctagcaatggcatccctcccaaatcgttcgactacgatttgctgataatcggcgccggcgttggcggccacggcgccgcgcttcatgccgttgagaagggtttgaaaacagccattgtggaaggagatgtggtgggagggacatgtgtgaaca

SEQ ID NO: 13371 - DNA, 525 bp, Glycine max
  unsure (1)..(525): unsure at all n locations
tgtttcataggctttgattcaatccattgccaggtcctttgagaagagatgcagcattttccttcaatccattgccaggtcctttgattcaatccattggcagttcctgatttcagaatttttgctggccggggatactgccttgtccgttgggtgagtgtagattattcaattactaattggggctgataatattcagtcattttgtaagggattcatgaagacatctttatatagaattgcaggatggaagactcattctgagtattgatgactccttaggagtgacctcctaacctcgggtggtttgtgcagaaaacccgtgtggtttgatattttgtatttttttcccctcaccaatcaatatttaggaatattgctgtaccatgagcgcacttaatatatatggtttcatgaactagtgtgttaacaccatgtgttcatttcctccccatagagagaggataaaaaaaaaaaaaaaaaaaaaaaaaancgagcgcccgctctagaggatcctaacttacg

SEQ ID NO: 13372 - DNA, 521 bp, Glycine max
ttttaacttgtttcacaggctttgattcaatccattgccaggtcctttaagaagagatgcagcgtttttctccaacattagtttcccccctcttcccaatattttaagttgggactggtttggcagttcctgatttcagaattttcgctggccggggatactgccttgtccgttgggtgagtgtagattattcaattactaattggggctgataatatttgtaagggattcatgaaggcatctttatatagaatcgcaggatggaagactcgttcctgagtattgatgactccttaggtgacacctccttaacctcgggcggtttgtgcagaaaacccttgtggtttgatattttgtattttttccctcaccaattaatttttagggatattgatgtacaatgagcgcacttaatatatggtttcgtgaactggtgtgctaaaaaaaaaaaagaaagcaaggacaaaaaaagatagaatatttggaataaaagcattaatgggaagaataagaagaagttg

SEQ ID NO: 13373 - DNA, 626 bp, Glycine max
aggagcaagctgccacttggaatcagttgttatgcggtcatattatgtcgagtgtgtgtgctttgtggtccaagagctacaatctaccccaataatgcaattggcaaagtctaaaatcatggaattgatggctattcttaaggatgtagaatctgctcagcttcgcgtggcctggttgcggaacatagttgatgaaattgctgaaaacattgaactcattgatgagcactgcatggcggagatggcaaaggctaactctgatcgtgaaatggaaacattgaacaaagagctggaatcaaatctggaaagtttggctcagaaagaacaagaggtaactgatatcaaaacaagaattgaagagatcagagagcatttaagcgagcttgagctgaagtcttctgatttggccaagaacatcttgtcaatcaagtccaaggttgataatttagacagcaaatccttgctagatgaactagtttaatgaaattgtttttgtctttgaatttcgtcctcacaattatggtaatgcttaaattgtagaatatggtgctgaataaacgcatgagctatatttttaagctagccaatggtatgaatacatattgcacatgcacatttttaagttt

SEQ ID NO: 13374 - DNA, 623 bp, Glycine max
acgcgtacgcccacgcgtccgctttctccaagttgatgacgttactttactggttgaccgtcagaatgatatgcgcttgggcattgacgatatgtcttatgaggagcttcttgcattaggggagcggattggcaaagtaaacacaggtttgtcagaggaaatgattacaagtcaaatgaagacaaaaacttatttattactacctactaatgctattaacttggaggaggcagcttctgaggaacaggaaaatgattcttgcataatatgccaggatgaatataaaagccaagaaaagattggtattcttcaatgcgggcacgaatatcacgcagactgttcaaagaaatggttacttgtgaaaaatgtctgccccgtatgcaaatcagaagcattgactcctggagagaagtgtgtataaaaaacaatgagatttacatgtctctttgttcctacatgcacacttctaagctactacatttttctaacgaattcatattttgttgtgtatatgaacactcgtacatatagacagtcgcattgtccaactcatttatttgttggcatcaaaacattgtatgtaccaagttgtacagacttctgttgatatattaacattaggc

SEQ ID NO: 13375 - DNA, 413 bp, Glycine max
cccacgcgtccgcaagggacccctagtgcccccgctgaaacagaagagacaaagcaggcatcacctgttggtagtacttcaacaaccataaatttatcagagcgagcacgggaaagggctcaaatgagacaggctgggttggtttcttctacccttagaggtcgtggaagaggcggtgctccccgtggtcgagttggtcgaggtaggggagtagtacgccgaccacctccaccacctggcagtgatcaatgaacaacaaattcaccgtctgtgatttttgacttggggttgtaaacttctccctttgtctgaacgatggcagtgtagaccagttagtaggcgcaaattggcgaccagttttcgtccatgtaaatacaattttgcttttcactcaatactcccctgacctatat

SEQ ID NO: 13376 - DNA, 544 bp, Glycine max
  unsure (1)..(544): unsure at all n locations
ttggtaagtaatgacacgcagacacagtctggatttctccagacgcaaaccctaggaaagaagaaggaattggatgcatgcaaatccaatcacagtatcgaacatggcaaatcttccggtggaagttgtcaccgaaatcctgtcccgtctaccggtgaagtcggttatccggctgcggtccacctgcaagtggtggcggtccatcatcgacagcaggcacttcatcctcttccacctcaacaaatcccacaccagtctcattctccggcaccgctcccagctctactccttggacctcaaatccctcctcgaccccaaccccttggaacttagccaccccctgatgtgctacagcaacagcatcaaggtcctcggctcctccaatggcctcctctgcatctccaatgtcgncgacgacatcgccctctggaaccctttcctccgcaagcaccgtttctcccctccgaccgcttcaccgccccgatccttcctcttcgcggccggtctacggttcggccaccacccccctccatgactacagctc

SEQ ID NO: 13377 - DNA, 398 bp, Glycine max
cgagttgcagttggtaatactcacaatctggatttctccggaagcaaaccctagcagaaaaaaaaaacgaaatcaatgggaatctgcaggaggaagtgggaggaatagaatcaatcagaaatcgaatcacagtagtgatgatggcaaaccttccggtggaagtagtgaccgaaatcctgtcccgtctaccggtgaagtcggtgatccggctgcggtctacctgcaagtggtggcggtccatcatcgacagcaggcacttcgtcctcttccacctcaacaaatcccactccagcctcattctccgccaccgctcccacctctactccttggacctcaaatctccggaacagaatcccgtggaactgagccaccccctgatgtgctacagcaacagcatc

SEQ ID NO: 13378 - DNA, 938 bp, Glycine max
  unsure (1)..(938): unsure at all n locations
acgcacgcgtccgttttgattttctggatccgtgtttttgagatgagtgtatgaatttaccgattgtttttcagatgaggttatcgttgaggcatgctttggtgtttgtgttaatcggggcgttgtggaacttgcaaagggcagagggtatccgatttgtgatagacagagacgagtgtttctcccatgatgtgaagtacgagggtgacactgttcatgtctctttcgttgttattaaggctgattctccctggcattacggcgacgaaggtgtcgatctcgtggtaaagggaccttctggcgagcaaattcaagaatttcgggacaagaccagtgagaagtttgactttgtggctcacaaatccggggtccataaattctgcttcaccaacaagtctccttatcatgaaactgtcgattttgatgtacatgttggtcacttctcttactttgagcaacatgcaaaagatgagcatttcacccctttgctggagcagattgggaagttggaggaagctctatacaacattcagtttgaacagcattggttagaggctcagactgaccgccaagcaatagtgaacgatgcaatgagcagaagagcagtacacaaggcaatttttgaatcagcagcactgattggggctagtgcgctgcaagtctaccttctgcagcgattgtttgaacgaaagttgggtacctcgagagtttagagctacgaaaggttctgcgaatctgtaacagtacaaatgagaatgttattttaaacttttttccgttgtcatcacatggatatttatataactagttgttcaatcctactcataatacatgtggaaatatgttatttaatgttgattatagttgatttctttttccggtaaactaaaatatgncaggccaaatctaaactccccccataaaaaaaaaaaaagnaa

SEQ ID NO: 13379 - DNA, 500 bp, Glycine max
actgcctgtgccgtgtggtgttgtgtttttttttttgtttcatctccatctttttcttcaaatttcccagaagagaaactcacaaagatgaggttatcattgaggcatgctttggtgtttgcgttaattggggcgttgtggaacttgcagagggcagagggtatccgatttgtgatagacagagacgagtgtttctcccatgacgtaaagtacgagggtgacactgttcatgtctctttcgttgttattaaggctgattctccctggcattacggcgacgaaggtgtcgatctcgtggtaaagggaccttctggcgagcaaattcaagattttcgggacaagaccagtgagaagtttgactttgtggctcacaaattcggggtccataaattctgcttcaccaacaagtctccttatcatgaaactgtcgattttgatgtacatgttggtcacttctcttactttgagcaacatgcaaaagatgagcatttcaccccctt

SEQ ID NO: 13380 - DNA, 684 bp, Glycine max
  unsure (1)..(684): unsure at all n locations
tagatgagcttggtgaaatatctagatactataaaaggatccatcatacaaaacattttgatgatagagaggctgattgcagattcagctacaatatgtcaaggaatgccagccaacattgctgtgcatcaagtcttgcaaatattggatttaattttgatgttgcgggtgattgtggtgaaatattcaacagactagttgacaggcctgatttcggtgatatacattcttcaaaaaggtcagatattttaaacgaggagcctgactggctgttgtccaagtcatgtattaaaagctgcaagagacctaacaagaacaaaggcaaaagggatcgatttagaaattcaactttggaggagaatcttgaaagatctagaagaaagctttccgctcctncttttcatagaagcaaaaagaggtttttctctttagatcatccttcagagatgatagccaaaagacagattggccgagtgtccaaccctgctttcaatcatcaagaagctagtaattttaaatatccgcaacagtctcctgttgctcttcaccagagcactgaagatttcttattgcaagaattcaaaattaatgtgaaacaaactacagaggttctgggagatatgcaggataatgacattgcagatattgatgaatttgaaagtttcaacattcaaaagagtgctc

SEQ ID NO: 13381 - DNA, 234 bp, Glycine max
gtactgctctattagttcatactaagttctgaaaatgagttccaagggtttgctcgatggacgtatgctcttggccactatacttacgatctacctctgacgttgcacccgatcatgcatactacaattttgacagcatttatggcaagcctactgcacattgtgtagatgaaagcaagtcttggcctggcagctatggtatctgctatagtggtgattatagacgtaatcgtg

SEQ ID NO: 13382 - DNA, 670 bp, Glycine max
cccacgcgtccgcccacgcgtccggcgggtatgagcttaacctatcctcctctaaccggaatatatcatccatcggttcaaaatatgggaaatccataaagcgaggcattatatcattcctcaacgttgatgacagcagattcacccgcgccgatgaaattgaattcgccccatatttttcaaagcacaagtggggtttgttccgccgaaaaaccaagcttctttgtcgcaagtgttgcaaccatattggatatgcctacaacgatcgcacttcatcattttttcccttcgtatcaaacagaacagaaccatcaccacccaccgaagcatcaaattcaagtccaatgaaatacgatattcgcattcgtgctttacaaccttcatcttctcaagaacatggaatccctgtgttggcttaaaatttcaaatacgcggtaaaaaattgttatccctaactacagggagggggggatttcttttttttttttttttttaatagatttgaagttctgttttggcaagggtgttgtgttcccctttccctgtgtctcaagtgtgattaatatacccttgtatactaaaagtagtagctgtggaatttttggaatgttaagttaaattttgcaaaccaacgaagatagaaagaccatttatggtggtgctacttcgt

SEQ ID NO: 13383 - DNA, 396 bp, Glycine max
gcctacagcagatcctttgcctaatcacaattatcaccatcttcccaactctactccaacaagatgggcacatcgatctccagcacaccctctgttgagacagatttctgatagtcgaatcatgggtctgaaatcgccagacaactcaatttctgaaggtaggccatcatttgtactctcaacttgcagcaatgaaatggcagctggatccatatgcggatcatctgatggctggtcaatgcgcaccttttctgagctggttgcatcatcacaaagggaaaggtggtcctttgatagtgagtgttttggatctggtcgtcacaagataagtggatccagtagcaggttctcgtattctccctccatggaactacatcttgtggggcttgctcaaag

SEQ ID NO: 13384 - DNA, 1020 bp, Glycine max
gcgacaaggaatgggtgttaaggcaggtgtctttcagcagcatcttacatcaggtcaacactcaacatattcccatcagcagctgaaacaagggagtgcatttcctgtttcttcaccccaactccttcaggctgcctctactcagattcagcaacactcatctccccaggttgaccaacaaaatcatctcccatctaaaacaaaagtcacaactcctctgcaatcttctaattcaccctttgtgggacctaccccttcacctcccttggctccatctcctatgccaggagaatctgagaagcctattccttgtgtttcatcaatatcaaatgctgcaaatattggacatcaacaaacagggggtgcaatagcaccagctcaatcccttgccattgggactcctgggatatcagcctctcctttattggcagaattcagtgctcctgatggtgcgcatggtaatgctttagctgccacttctgggaagtcaactgttacagagcagcctcttgaacgcctaattaatgcggtgaaatcaatgtcaagtaaagcattaagtgctgcagtcatggatattggttcagttgtcagcatgaatgatagaattgcaggatcagctccaggtaatggatccagagcggctgttggtgaggatttggtttccatgactaattgtcgtctacaggctagaaatttcattactcaagatggttccaatggaattaagaggatgaaacgttacaccagtgctatacccttgaatgttgtaccatctgctggtagcatgaatgatagtatcaagcagttaactgcttcagagacttctgatctggagtcaactgcaacatccagtgtcaagaaaccaaagattgaggttaatcatgcccttttggaagaaataagggagattaaccaccaacttattgacacggtagtagacataagcaatgaagatgttgatccaacagctgctgttgctgctgctgaaggggcagaagggatcattgtcaaatgctcttt

SEQ ID NO: 13385 - DNA, 694 bp, Glycine max
tgtcgaagaacaacagcaacagatgactctccagagtcttcgtacaatggtggatgctgagagatcctatcatcagcatgtccttgttattctagagaaactatatactgagataattgaagagagacaaccaaaagaggctacatcatttccactgccaaaagatggatataatcaacctgcagatgagaatgctaattcaaatggcatcgattataaacacaacagtcaaacaggcacatacttttttgcaaaggtcatacatccatttgatgctcaagctgagggggagttaagcctatcagttggggattttgttgtagttcgtcaggttggccccaatggatggtctgaaggagaatgcaaaggcaatgctggatggtttccctctgcttatgtacagagacaggacatgataccagccagcaagataacagaataacttcacaggataccaacattggtcttttgattaggtgaggcaaaaattgtatattataatcacggaatagatgcagcatttgaaaagccatagcatgtgcttgccattatttttgggtggttctatcatctcatctgtgcaatatgttgtatatgcgagtcataattgaaataggaaatagcactggcagtttgaatatgtaattgatatgtttattattggcatttgctttggccctttggtcaggaactt

SEQ ID NO: 13386 - DNA, 404 bp, Glycine max
cccacgcgtccgcccacgcgtccacccaatcattctatggccagtggtgagaaaggaagcattggttcctgtccggaagcttgcagtatgccccgccttacttcccgctcgtcaccttacgtgttaccctctctatcggcaactcctttagaccatttccctgattcttcatcttggaacatagacaaactttccttcttccttcgacagacaactaactcggcgcaatggatgaccgaatcgacgaggacgagaaggacaaggaggaggaggagtccttggccggcttgacctctcttccacctcaccgcaaagcccattcctacagccagcagctgcgaggcacctgcacacacaaacgccaccatcaagtccggaagcacagtctggacgacagccgtata

SEQ ID NO: 13387 - DNA, 658 bp, Glycine max
gaatttgtctattcatttgaaggaactgaaagacaaagctgaggctgagtgtgttaatgcccatgacagaagaggacatgaaggaccaccggttgctatgcaggagtccttgagaattgcatttatcaaggaacaatatgaatcaaagttacaagaactaagacaacagctgtctttgtcaaaaaagcatagtgaggaaatgctgtggaaactacaagatgcagttgatgaaactgagaaaagaaaaaagtctgaagcttctcaaataaaaattagatgaagagttggggatgaagatcttggaattggaggctgagttacaggctgtactttctgataaacgcaatttgttaaatgcttatgacctgctaaaggctgaaaaggagtgttcagtgataagccttgaatgttgtaaacaagaaaagcaagagcttgaagcttctcttgtaaaatgcaatgaggagaagtccaaaatcgaagtagagcttaccttggcgaaggaattggttgagacttcgggatctcatgtgaattctctgaatgagggcaatggtacattctcttcattgaatcctcaagaaaattctactcatgctgcttgcagtcatgagccagagagtgcaagcatcaatatgcaatccaaggatcctcttgcatt

SEQ ID NO: 13388 - DNA, 381 bp, Glycine max
cccacgcgtccgcccacgcgtccggaaataaccatgcgcagattaggatttgttcttcgtccaatttttggtagttggtgtgctctttagtttttatgtaatcaccgtctatgtgtttgtcatttccatgttttatacctttgtgagatgagatggatacagaaacaggaaaacgaacttcgctcacacttgctttcgatggtctgctcattctgaacttaattgtgatgccacagtagattttcctcacctgatattgttgtgccttccatcaggtattgactattggcacatatgttgaacagtatgcacggaaaatttaggtgtaccttttttttaagcgcaatatcaagcagagctgttgtaaaaaaaaataattat

SEQ ID NO: 13389 - DNA, 472 bp, Glycine max
agtggcacatggtctctttgaaagagtgggttgggtctctgatgcatacagatatggttgcaagtggggtgctgcgtgaaaatggtgaatggtcattctcatcagagccttttgaaaagaatgtgcatggaccattatatgaaggtgcacgatggggacctgcaaatttctctgctgatctcattgcagctcaagcagtttcatcactgcagattgctgaggaggcagatgaagataggattctctttcaagttcttgattaagggcatgctgaggtgatagaagaataactgtttgtggtggtgactggatgaagtcttttgctattcttatcgaagatttatatgcgtgtatatatatgataattataattatgagtcttgtccatgtcaaacactttctgctccagttgtgattgaacgtgtaacatagtgtgaccatgttttattaaaaaaacatgaacacactatga

SEQ ID NO: 13390 - DNA, 587 bp, Glycine max
tccatgtttggtccaaagcaaaccaccctcgattttctcgggttggggatggctgctgggggcacccctggtggaggcttatcggcactcatcacctccattggtggtggtctggatgttactactgcggcggcatcctttgctagtggagaattccctggcaaagatattggaaggaggagcacttgatattttgggtgcaaggactatattgttcggggcgataagttctggttgtacagtgttatgtggtccttgcacattgtgaagttgcagttcaattgggggagaattagtaaggagagatagcatgctcctattgagcagtgctacaggcaattctgaacgggtcgttttggattatcctatgcctctaatgtgggcggaaaagaatgtatattttttattatatcaaagaagaggcccagagagccttctttccatgagtaatggcacgagttacaatattatgtttactctggaccactggataaggtgttgagcagaacgttgacattgatgttggcttggttccactggatgcaccgacaatggtgaatttgaatacctgcattagagatcttgtg

SEQ ID NO: 13391 - DNA, 427 bp, Glycine max
acaaaatcagatgaagagtaagcaaaaggatttagagctggaggcaaatgcattaatttccgtgggaggaaaagtttccgttgatatattaccgtatgatgaagctgctaagctttgcggtgggtgtcttcctgattatgttcccaaggtcagtctataaaagatataaccttacagcttactgcaaataatttcctttgtgttctttatactgaactagttgctggctttgctatcaccataatgcctgtgacattgttatcttacaaggtgccttccagtgcttgtacaatactctctctcattttatatgtggatgtatacatagacttctgttagactttctgtcaaaggtccactggcaacattaccgtacttcattctgtatcccatagtgtaccatccggaatattcgagcttacacagt

SEQ ID NO: 13392 - DNA, 588 bp, Glycine max
cgcaaggacacctgccaccacaagctctccgctgcccaccgcccgccgcctctgccttggcgtgttcagccgccatcgccgtccctgcccactgcttctgctggaaagcagcatctaagctctccaccgcccttagtcttgttctttcttgaaaataattctggtgctatggactttgacgacttacaagaagcgccgataaaggccacgtctcgagtctccaagttcgcgccaaaatcatcaaagctcaaacctaaaccaaaatcagaacctgccccccccaaacctgaaccccaaccacccatctccaaaccagagcctcaggaattcgttgcagcaactgtcaaaaagaatgaagatgatggcgtcgaaacagtgccaccaactcatacgaaacccgaactcgacgccactgtcaaaatggaggaggccgaagacgaaccagaatcagttcgagacgatcccatagacgaagatatccctgaagaagacacagttgtgcgcgaaattgatgtcttcttctctccttctgtcgatgcccagactcagctatacgtctttcagtatcccttgagaccttcttggcga

SEQ ID NO: 13393 - DNA, 417 bp, Glycine max
cgggaaacctcacacacatcacaaccttcaaaacaatactatccccacaaacaatgctggcgaaagatctaaagactaaaactaacataattattataaaagtcgtaggtcactgacagtgagtgcagggacaagtgtgattgctccgaaaccgaaaccacgaagcagtcgcaaacatgaccgaaaagaagcggaaggagagggacgaaggtaaccgccgaagactgaagccgaagaagaagtcaaacactcaatggaagaagactggccctcgtttgccctcatctctgcaaaaacatattgaccgtttaaaccctaccacttccttcgacagcgccgattccgatgacgacaatgacgtttacgagtacgaggaagaacgggccgaagaggagtccaagaaaaacaagcgttacg

SEQ ID NO: 13394 - DNA, 906 bp, Glycine max
tttcccatccccttactcctccaaactttcccggttccatttcgccggaataatcgttccttctcatgcttccgaaatcagttccctcagcggtaccccaacccaaaacacttgcttccaaaatcaccctaacttcttccctcacctccctcctccaaccccaaaaccctcgcacatggatcctcttcaccgtcctcttcatccagatcctcctcctctgcaacctccatagcttcccttcctcaattccccctcccctctctcccatccccgccgccaccgacaccgacaccgacaccgacaccatcaccaccaccgtacaccactccacccgcaccctcgaccaatgcggctccggcaaggtcttcgtctacgacctcccccaaaccttcaacaacgaaatcctcctccattgcgacaacctcaacccctggagctcccgctgcgacgccctctccaacgacgccttcggccgaagcgccgctgcgctcgccggaatcgtcccggaggatctcctcccggcgtggcactggactgaccagttcgtaaccgaaatcatattccacaacagattaataaaccacaagtgtagggttatggaacctgaatccgctacggcgttctacatgccgttctacgctggactcgcggtggggaagtacctctggttcaactccaccgcagaggaacgcgatcgccactgcgacatgatgctgcaatggattcaggaccaaccgttttttaaaagatcaaacggttgggatcattttattagcatgggccgcatcacgtgggattttcgccgctccaaggacaaggattggggttctagctgcctctacaagccagggataagaaacgtcacgcgccttctcatcgagcgtaacccttgggactattttgacg

SEQ ID NO: 13395 - DNA, 473 bp, Glycine max
gcttgattaccgatcagctgacattttggtcaacatcaactctcaggaacgcagttggggggtttgggttacggatgagaaggaacctattaatgttgaggaattgagtggaattgatgatgagaattacttggtcatcagtgaggaacatgtggttgatggtgttgccaactttatggccagatgcattttgtcaaacccgaaagctctgaatttttctccagaggaactgcagaaagcgctatcaaaagcattgcgtggtacaaccaaactggaaaagattttggatatttgggaagctggaaagttgttttattgtctgtctacctggggacttgctttggcagggctttaccaaagtcgtgcaattttgagagttgctgcaaagggtgttcattcaggaagtaaacttgctctcaaggctctctaaagattgctgttccatgaccatggcaaaatgcaaatgtataatg

SEQ ID NO: 13396 - DNA, 562 bp, Glycine max
  unsure (1)..(562): unsure at all n locations
tccacgattagtgagagcaaagctttttatgtttttcggatttgcattgagatattaccatataatatcgcggaaaaggaaaaaatggaggcacccattatgttaccccttgaaaggacttcgtcaattgaaagagagcccaggactcttaatatcaaccaaatccaatccgctaggggtttaatgtttggtggatttaattaatttacaggagttagcaatatatatattgaacacaaagaccatagaagaagcgtccagaattttcacggaggggttgcagccagtggttagtgctgcttgctgcatgagatccggcacaacaatggacatggatttgggtgaagaacttgaagtgttgaactccaaagacgcaacatcacaagtagccccagcagcagcattcagagacatagcatctgcacctttctagaacaatttgaacaactcaattgacttgagttcttcatgatgttgtgcaataattgtagaatatactccacttattagttagtttgtacatatcgtttgccatacacgttgaaattntgggttcttaagt

SEQ ID NO: 13397 - DNA, 453 bp, Glycine max
gtccgatttccggtcgaccacgcgtccgcctactactccacgattagtgagagcaaagctttttatgtttttcggatttgcattgagatattaccatataatatcgcggaaaaggaaaaaatggaggcacccattatgttaccccttgaaaggacttcgtcaattgaaagagagcccaggactcttaatatcaaccaaatccaatccgctagggagttagcaatatatatattgaacacaaagaccatagaagaagcgtccagaattttcacggaggggttgcagccagtggttagtgctgcttgctgcatgagatccggcacaacaatggacatggatttgggtgaagaacttgaagtgttgaactccaaagacgcaacaacacaagtagccccagcagcagcattcagagacatagcatctgcacctttctagaacaatttgaacaactca

SEQ ID NO: 13398 - DNA, 415 bp, Glycine max
ggaagagaatgtgatgaaaaaggattggtatattgaacatgtaggcaagtgtctcatcgggaactttatcaacatatatgcctcatttcacaatacagcccccttcaaaccaaaacaacaattgcagcagtgtgcctgtgaagtcaatggagaagatggttggtatgaaaaggccaacaccataccctttctccccggattttcctcatgtccctgctttcaattgtatatcgtccccctttgctgaagtaggaactaatgcaaaaactccgtgcggtaatggaagcggatttaactttggcaattcaacttccagagaagtatcatcatcctgtttagcttccaactctgagccaaagtcaaagaaaagaagagaagataatgagaatttcaatggagattttctcacgttggc

SEQ ID NO: 13399 - DNA, 520 bp, Glycine max
cgcacgataggaggcactacgctgtcgtttgcggtgttagaagacctagtcgggcgtgatggcgaagaagcgatcagccccgagtggcggtcgtcgggaaaaccgagccgaatcatcttcccgacggctcaactcagcttccggtcgcagaaaactcgttgcgttcttcatcgtatcgtccatcatcgctatcgtcacttatcgttatcgcttcagacaatcttctccttcgcaaggccttgtcacaactcatgctaattgccaacatatactcgccgaaaattcaaaagtatcaggaaattcgtctcagcgccattatacttatcctgtgcttggctacattactccctggaattctcgaggttatgaattggcaaaaaggttcaactctaagttcacacatttatcacccatttggtatgatctaaagagccaacagactagcttagttctagaggggagacataatgctgacagaggatggatctcagagcttaaaaaggcaggagaagctttgatt

SEQ ID NO: 13400 - DNA, 570 bp, Glycine max
cccacgcgtccgcccacgcgtccgccactctctcacacactccacacaagacacaaccgtggaggagccaacgttgttgttccccgacaccgacctcgatctcagcttcaccagcaccaccactgaccgcaccaccaccaccaccaccaccagtgcaagaacaagcctcgcccgcactagcagcctcaccctcagcttcaacgaccgtttgtccacattctccgcctcggaaaccaccaccgcctcccttatcagccgccgtccccaccggagcggcgatcccaactggtccgccattcaggccgccgtcaacctctcctccgacggccgcctccacctgcgccaccttaagctcctccgccacctcggctccggcaacctcggccgcgtcttcctctgccgcctccgtgactacgacggcgcccacttcgccctcaaagtcgtcgacaaagacctcctcaccccgaagaaactctcccacgcgcagaccgaagcggagatcctacacgcgctggaccacccctttcttcccactctctacgcgcgtatcgacgttttgcattacacgtg

SEQ ID NO: 13401 - DNA, 1321 bp, Glycine max
ctatcgacatgccacgccgtaccgtaaagctgcggatttcggctcgagtggaagcccaattccttcccccactcactctcctaacgggttgaaccaaaatattgttccttcttttcacatcaattcagaatccccaaaggagagtggttcaacttctgctccagctagtactgcatcagtttctgctggtcaacagccggtcaacatttctgttggcaaggaagtggttgtcaatggcgagaatggatataaggaaggcaatggcaagcagagctctagtcatgacgattgtgatttgcaagaatgtttggagcataatctccctgatagcccttttgcttccccaacaaaagctgatgatggagacttcctggttgccttctccaatggacctaatgaggccattgatgcagatgcctcagctgcatctgccaactccaaatttggcactagcacattacttcctgcagcatctgctcttgacatgggaactttcaaatcctttaattgccaaataccaaggttctcttctggtcatggaactattggtatgttcgctggcaccggtggaccgattggcatttagtttcctgatgttcaggaagtgaaagatgactaaacaatgctggacagatttgtagagaatcaccaccaccaccaccatgacggccatcaccatcaccatcaatcaccaatactatactacttactaccatacaaaatgcatacgtaaaaagcagttcagtaaaggaagtggggcaggcattcgcccttcttttgttagcattattattgttgtaccattttccttcttctcatatctgtagtagctgaatgaaccacaggttaaaataacacacaaagaatcatccgagtcaatgtgtagtaggaactccatggcactgtaatttcttctcattacccttggatgtagtagtttagattgttagtcctatgttgttacaggtataatttcaagtctttgtacagctggagcattacccagagagaaagcatgcatagatgaagtggtaaaaccgtaaatgcggagttgtataactacaaggctgattgagatccccccatgatgggtaacttgagtttggaggccagaagtgaggaggggagtgtataattgtcaatcttagctggattaaagttcaaagtggagatatttagcttggatctttatgttttcatcagttaagtttgtacttctacttagttgttatacacagttatcaacccagacagaaaagagaaacaataattagaaacaagaatcaaaagtgagtttttagactaaaaaaaaaaaaaaaaa

SEQ ID NO: 13402 - DNA, 565 bp, Glycine max
gttggtttgggtaagttttgtgagcgtgagatcttggttaactagttttcgtggtccccagtgacatttttactaagtttaactccgtaactgatgtcgtgtgggtcaggtaaggtaaggaacgagaatttgttcctctttgaatgggtagggagacctacccttttgattaacaactacaattacatgcatgtctcaccatctgatgaggtggttacatggaatctatatatagacatagattataaaatccgattctcactttgatattaggtgggggccaggcggggaggttggtgttcttggaatgcaaatttagagagaggagttaacttatagaaaaatgaactgtattgattcttatattatcaatatataattatatagtattacctaaattatgtaataactcaataataataataatagttttaaattttatataatttaaaaacatatattgcattaattttttatatgtatttaaacaaagtgtgaagcataaaataattgtttcaacaacaacaaaaaacattacacaattttgagttaatctaaaatttta

SEQ ID NO: 13403 - DNA, 634 bp, Glycine max
gcaatgcaggatatgcccctccaagcaatacaggcgggtaccctcctagcaatgcaggatatgcccctccaagcaatgcaggcgggtaccctccgagcaatgcaggctatgcccctccgagcaatgcaggctatgcccctccaaatacagctggatattcttctccgaacgccgcaggaggttaccctcctaatgcaggtggtggctatggtcctggtggtggtgtgcctcagaataactacgcagggaacatgggagggccaccatcaaaccagaacatgggagggtttcaacaaaattcaggatggtcgaacaatgctcccagtagagatgtgccaagcagggatatgggaggaccacctggtgggaacccatattctgggtgagatcactgcagatttttctagccaatgtagataacgaagaattgtgcccaagaaagcagagtttatgctatgtttctcaaggaattagaatttattagtcttacgtgttactcctattttctaatgaacctgcatgttgtgcatccgaagttcaatttttttaatgctagatacgatcattttgtattgtttgtgaaaaaaaaaaaagaagaagaaaaaaaaaaagaacaaacatgcttactatgaat

SEQ ID NO: 13404 - DNA, 528 bp, Glycine max
  unsure (1)..(528): unsure at all n locations
cggacgcgtggtttgaatattctaattcaactatttgtcactatcttatctgaggaacagtttgcatgttattgtgtgctgctgttttgatatcctgtaattgttgtctcttaaatggaacttatgaagcattttgtctaactgccagtgcctttttcatcattgaagtatttatctaatgcaggaattgagatgaaaatgaattcttttgcagataccaggaacagcatagcagtataagctgcaattttggttttggatgctaataacttattaacacccatcattaagaatatcaaaataatttagttttatatttgttatttttctgtaagaaagcttcagaatttgtgttttttgttttttgcagatcctttgtatattcgttgaaattcctctttttgattgtaggaaatctgntgngttttctttagtattcttattctcttcaatgacatgtggcagtcccaattttttttgatgttgattttgataacttcaggattgtaatgcccatcctttttttat

SEQ ID NO: 13405 - DNA, 950 bp, Glycine max
agaataatcccttgtagtactggataactaccatcaacctcgtattccgatcgtgctacagtctgctgtgtctcatattctcagcgatctgagttcacctgcgagcaaaacggcttgtctcttattagagcaatccacgttcgctcctcgcatgttgatgtcgttttcgcacccgatctcctttaaacgactcctgggactccccaaacacgcgtggtgaaaagcctcctccctgaaaaaaaattccgaaagaaagagacacccctaaagatctggtctcggcttctcacctttccttcaaaaatctcatgtatttcactccaatcgctgttctcttaacttttccctctctagctctttctcagaaaatcgacaaattcagattcaaactcaagttttgaggctgattcagattctgggcgtgtggaattcataaagtcaggttcaagataaagttttagctcaattcatattctgggtgtgtgaaattggggagaaaagaattcaaatttgggggtgcaaagtggtttaatttgattaggtgtgtgttagttaacatgggtgctagtttttccattctgggtatatgcaattgaaaaattcaggttccatatctagttttgagttcaattcatattctgggggtgtgtgttaagtgttaacatgggtgctagtttttcctcttgtgtttgtgatggggatggtacccctttgagaccaaggcttggggacatacccgagagctgtgtggcattggtgttgatgtatttggacccaccggatatttgcaagcttgcacgattgaacagggcgtttcgcgatgcttcggcggcggatttcatttgggaatcgaagttgccttcgaactataagttcattgtggagaaagctttgaaggatgtttctgtggaagaattggggaagagggatatttatgctagactctgcag

SEQ ID NO: 13406 - DNA, 765 bp, Glycine max
ctcttttctttttcattctcagttcacctgcaagcaaaacgccatgtcgcttattatagcagtccacgcccactcctcacatgtcgtttccgcacccgatctcctttaaacgacacctaagactccccaaacacgcgtggtgaaaagcctccaccctgaaaaaaaattccgaaagaaagagacacccctaaagatctgaaaatcgacaaattcagattcaaactcaagttttgaggctgattcagattctgggcgtgtggaattcataaagtcaggttcaagataaagttttagctcaattcatattctgggtgtgtgaaattggggagaaaagaattcaaatttgggggtgcaaagtggtttaatttgattaggtgtgtgttaatatgggtgctagtttttcgattctggtgtgtggaattgaaaagttcaggttccatatcaagttttgagttcagttcatattctggggtgtggaatttagggaaaggaattcaactttggggggtgcaaaggtttactttggtttggtgtgtgttaagtgtcaacatgggtgctagtttttcctcttgtgtttgtgatggtgatgctaccccttcgaggccaaggcttggggacatacccgagagttgtgtggcattggtgttgatgtatttggacccaccggatatttgcaagcttgcacgattgaacagggcgtttcgcgatgcttcgatggcggatttcatttgggaatcgaagttgccttcgaattataagttcatt

SEQ ID NO: 13407 - DNA, 589 bp, Glycine max
gccttccacacattcaattatctggatgatgattgtgatgatgatgaacctcatcatcatttccgctcgttctcttctagttcatcgttccaagaatcaatgtcagatttagtcggcaaagctgaggaaatatcaagtggatattattggctccatgatgatttgcatgatgataccagttcacgatgctcttcacaagggacatattccaacttgaattactattctgtggatgatcatcatcaagagtacaacgtgccatctttgagaaaagataaacttcccatcacaaagagtcacaacaagggcaaaaaggtttcctcaggcgaagacttgagcaatttcaaccaatataaactcatggtaggatcacaggttcctctcactagtaaaagcaagatgatgatgaacaatcatcatagattaacaaggaacaggtcattgattgatataaggagccaactattgcaccgttcactggttgaagaggtgaacaaaagaaggttattcaagacagttggtgctgtggagaatattggatttcaggcaccttgtgatgtttccacaaaaaggtcacagcatgtatgtg

SEQ ID NO: 13408 - DNA, 747 bp, Glycine max
ctttcttcattctcctcggagccagccctgttcgttatttttcttttttttttgtttcgtttcgttcggaacgctgaggctgtgtcgttgttttagtgggtggatgggaacgacgtcgtgtgagaagaagagcgtcgtgtacgtgagctgggacgaggtgttcgtgtcgaacgacaaggggaggagggaggttcattacttgcttaaacgaagaggcggtggctcggatctggccgttttgggaaaagagaagagcctcctcagacacatgtcgtatcgctacgccattcgaaacgccgcgttgtttaagccttacttgaagctcaggtcgcgcagagaggttgttgattggctggattcaattgtttcagattcgtcttctggggatgcggctatggtgggaaaacatggttatgaacctgaaattggagccttgaaggacaatcaattgcagaggatgcgcaattgtacaaaagaattctcatggatagggttgccatgggcgtgtaagaaaagaagaaagcactatcaggcatataagagaaatggttttcagatatccgtgcatgattttatatttgttctggcagaagaggacaagcgtctagttgcctacttggaagacctttatgaggattccaaaggcaataagatgcttgtggtgcgctggtttcacaaaattgatgccgctggtattgctttgcctcacagttttagtgacagagaggttttcttttctctttatct

SEQ ID NO: 13409 - DNA, 443 bp, Glycine max
ttccacgcgtccgcccacgcgtccgcttcattctcctcggagctttgctcgttattcttctttttcttttctttttttcgtttcgttcggaaaacgcgtaggctgtgccgtcgtttttagtgggtggatgggaacgacgtcgtgtgagtacgtgagctgggaggaggtgtttatgtcgaacgacaaggggaggagggaggttcattacttgcttaaacgacgaggcggtggctcggatctggccgttttgggaaaagagaagagcctcaaacacatgtcgtatcgctacgccattcgaaacacgtcgtcgtttcggccttactttaagctcaggtcgcgcagagaggttgttaattggttggattcaattgtttcagattcgtcttctggggatgcggctatggtgggaaaacatggttatgaacctgaaattggagccttga

SEQ ID NO: 13410 - DNA, 433 bp, Glycine max
ctgttcgttatttttctttttttttttgtttcgtttcgttcggaacgctgaggctgtgtcgttgttttagtgggtggatgggaacgacgtcgtgtgagaagaagagcgtcgtgtacgtgagctgggacgaggtgttcgtgtcgaacgacaaggggaggagggaggttcattacttgcttaaacgaagaggcggtggctcggatctggccgttttgggaaaagagaagagcctcctcagacacatgtcgtatcgctacgccattcgaaacgccgcgttgtttaagccttacttgaagctcaggtcgcgcagagaggttgttgattggctggattcaattgtttcagggcgagatttccgctggctggatctgaaattgaatgattcgtcttcaggggatgcggttatggtgggaaaacatggttatgaacctga

SEQ ID NO: 13411 - DNA, 963 bp, Glycine max
  unsure (1)..(963): unsure at all n locations
ctcgagccgattcggctcgaggtcaaatcggtttggcgctgggttattcggatgtgtctctctttgtatccttgactagtatttggggcttcttcggtcggatcgtctcgggttcggtttcggagcactttatcaagaaagctgcaactcctagaccactttggaatgcagcctctcaaattctgatggcggtgggatacatactcctggcaatggctatgccaggttccctttacatagggtccgttgtggttggcatatgctacggggtgaggcttgccattactgtgccaactgcctcggagttattcggcctcaaatattatggtcttatatacaacattctcattcttaaccttccccttggctctttcctcttttctggtcttcttgctggcattctgtatgatatggaggcgactaccaccgtaggaggaggcaacacttgtattggagctcattgctacagactagtattcatcatcatggctgtagcttgtgttgttggcttcttcttagacattttattgtcattcagaactaagaaggtttacaacaagatctcctccagcaaaaactccaacaaaaactctctgaattcaagtaggcgatgatccaaaatggcccatataaagagggtatgacacttgcgttgaccagcattttgcacaatggtatcctaatttccattggtatggtatggttatcactaacctttttccttttggtaataaaggctggctaatttgtttgtacatccattttgagtgctctgtagcaatagttgtcaaaatgttatagtagcaattatgttgaagaaaatgttgtcaaagattttccatggatggaaatattttgcaatttcttctgtgttgatttattgttctgctattttagccaggtgtcaaaagtattgcatagactntactncaaattcatcgcanataattacttggttttatt

SEQ ID NO: 13412 - DNA, 727 bp, Glycine max
ggaaaaatcagttgtgcagagcaaggcaattaaaaaggaaaaaggaaaataaatctaaatataaaaaaaaaagaagccaagcttcgctcatgtatgtcaactgaaaccctctttgcgggcaaatcaaaaccctattggaattctccattcacacgttgaagcttttgacgtcatggctacaccattggtggcagggattgcagtggcggctgcggcttatgctggtagatatggtatccaggcttggcaagcattcaaggctaggccaccgagtatgcgaaaattttatgaaggtggtttcccggctaccatgactaggagggaagcagctcttatactgggtgttagggaacgcactccaacagataagattaaagaagcacataggagggtgatggttgcaaaccatccagatgcaggtggcagccattaccttgcatccaaaattaatgaggcaaaagatatgttaattggaaagaccaaaggtggtgggtcagcattttgaagcctgctcaagcctttctttccatcattttgacagtgcagaccggggtcctcattagatgtcaattattaattttttggtcatcgcctaattaattcttgtagtcccattgtgagaaagttgaacatgggtatgcttgtatcaggatgataaagctccattgtaacttggcatgtgctatagaagttacgattgctatcaataaaattgatttttcctccc

SEQ ID NO: 13413 - DNA, 482 bp, Glycine max
cccacgcgtccgcaattttcttcgcctctactttaggatcgaaaaaagctgatttttttgggtctttagtccctttgtctctatgtccacctttttgtattttcgctatcgttttgcccaatttttttgtatacaaatttgataagttgtttattgtactgggttaattagtttttgcagtctacaaattttgtttggggctctgggattggagagcttttgggtgtagggttttatgttgctgtatagaaaacagaatatggatttgtattcttattgtattgataagagggtaggggtctaggggataagggttttttttatcatttatttttaagtttgttgattttgatattgtctttggtttgtggaactgaaattggaaattggaacaggctacaccattggtggcagggattgcagtggcggctgcggcttatgctggtagatattggtatccaggcttggcaagcattcaaagc

SEQ ID NO: 13414 - DNA, 329 bp, Glycine max
ccagtccaagcatgcggacactgtctcctgcagctcagaagtttgtgaggaatgcgtttgccaagtcctcctcttctgttgatgaaacacttcgggcaagttaccgcggttctactcctgctttggctactcctacaagtgttagtagaagtgtgtcaaggtttgctcgtgatgggagcttggcttccaggtctccatctgttagagagggctccaatcctcccttgtgatatgttgtaacatattttgaaacaatgataaagtgactatgttgtaattcttcaattgcatttacttgctctaaataaaataaacgattaatagcaaaa

SEQ ID NO: 13415 - DNA, 407 bp, Glycine max
ctcaactcccaactctcacaccccctttgtcctttttaccccctgcattcttctgtcaaaacccttgatttcaaatctggggttttgttttcttagtcagttcagacacggttctgggaactgccagcttgcaagtctgagctttatggctggaatccaagcttctgatgctcccacattgtttttaatagccacatcatctcccagcgagctttctcatgggttcctcaatggtgacagtcttgagttcctttctactgggtaggggtaggggtatttgatccttatatcctagatgtgatctagcagattcatgtagttcatcaaggccctcgcgtaatcctgtttgcgagtcacactctgccaatgctgtaagcttgtgactgatatatatagagcttctgtgc

SEQ ID NO: 13416 - DNA, 317 bp, Glycine max
gttttgttttctaagtcagttcagacatggttctgggaactgccagcttgcaagtctgagttttatgtctggaatccaagcttctgatgctcccacattttttttaatagccacaacatttcccagtgagctttctcatgggttttcaatggtgacactgtcttgagttcctttctaccgggtaggggtagggctatttgatctctatcacattacttctagagggggtatcttagattcatctagttgatcaaagcccttgcaacaccctttttccaggactacatttgccaagtatttgagcttgttagctactg

SEQ ID NO: 13417 - DNA, 644 bp, Glycine max
gaaggaccttgtccctttaatttcagcagttatattgaatgatagctcggtattgaatgggaccgcataaaaatatgcttatagacttctacaaactcatgcaaccttgtagaattgaatatgtattttgactttgtggtattaattggtgttgaagtcctctagtcaacatagaatcagaactgaggaattccttatttaaagaactcaattatgaacttattgtgaaacctccaggggttgcttgtcattcttttattgctgcttttaggtttctgaagagctcttggaaggcaaggagttggagttttacaaatgggaaggagatgtacctgacttgttgaaagatgttcgtgataagctcaacatgctttcagagcattggtctcgagatgaaaagaatagatgtttaaaagaaactacaaaggcattccggtatatgggacaaattgttcgtctaattgtctcataaatagacatttgttcttttttttttgttaacaacactgccgtctttgatggtaagctttctaatatttccttttcttcctatagcttctctaatttgtggcttttaattgatggaggggtatccctaactttgtaaagttcgatccattcttgagagaatatttgtttgattt

SEQ ID NO: 13418 - DNA, 605 bp, Glycine max
  unsure (1)..(605): unsure at all n locations
gcagcctcatccattttcctaaatggctcaaagacatcaattaaaaaaccccccatgtggggatcaaccaaagtcggtccaactcatttctttggatatgtgtgtgtgatagaccatcctgatcgaccacatattaatctcgtactcaaagtcctaatgccaaacaacacccgactaatgacttcatgtcgcctcgctggcataactcatgttgtctttaagctctttcatcttcatgaacgtcgtccacacaacatcctcgtgaatgtcatgggcaattactacctcggatgctgcgatgctgccttctcctataagaggataggccacgaatgtatgtagatggaagacacatcctattcaccatactcacccaaaacaagcactgtatctctttttagatactctacccaccattgaaaaaggaggtcggaaggttggatatagactactcgcagacctagacttaacaaaatctgatgataacattatctattagaataattgttacatttgagtgaatgagagaaaaagtgtttgaaaaataaatttataaactaacgggccgttcggttttttttnnngggaaaaaaaagggttatgga

SEQ ID NO: 13419 - DNA, 410 bp, Glycine max
tccgggtcggaccaacccttccgccaacgcgtccgcccacgcgtccgcaccctcgccctccacaaggccctcatgttcttcaatggccaacgatcggggaagttaccgaagtggtggacgaagacggcaaagtcgttggcgaagaatgcaacgtttccatttattcgactaattacccattttagaaaatttcctcggtggataattttgtggaatgattagtgaattttttaatcttgcttttatgtttggtgaagtaggttaagtatacaatttcatgaatataaatgacggttatgtgaactgaacacactcatatacttgagtgtactccatgtaataactagtatatatatatctaaaagaaaatatatatttagttattttaatatattaaatgattaatacat

SEQ ID NO: 13420 - DNA, 448 bp, Glycine max
ccgggtcgacacacgtccgcccgcgcgtccgatgagtcggtcgagtatagcaacatgggattttgcatatgagaggtaacaggttcgaattcccactcatatgcttggggagaaaggtcaaatcacatgtttaaatttctattcattgtccttactttcttggatccctgtttgtgaagaagcatcagggtcttcctttctttatttctttcgctgatcgaataaaatttccccatttgaaaccccacaagagtgcaattgacaaatagccacacagaaagatagggttttgagatattgcgaacgatgttgagactgttggatgcacactgtcaccttcaggacccgagaatcttaagcaaggcaccccatctcatcaaaaccgcgcaagacaccggcgtcgcgtacttcgccgttaacggagtttccgaacaagactggcactccg

SEQ ID NO: 13421 - DNA, 466 bp, Glycine max
cccacgcgtccgcaagtttactgttatttgatactcatttttattgatttgttttccaatggaaaataaagtcatgtttttattgtggtatcaactatcaaggcaagttactagtgtgtactctgtactctttaatactttcgattgtgccatgtttttagaagtcatatagttgttacttgctacttgtcaattacctgtttggatataattttttccataacatatagggcttcattattctaattcgtacaacctattaaatgttatgtgccacattttcttattttaagttcttaaattttaacctattatgtgtgcatatacaatcttgtgctttgcagtcaatttccattcgagattttgatcatcatgccacccgcattgttgggaagtatgaggttggtatcacctaagatttttaatattctattttcttggcttatctcttggttttgattcatgt

SEQ ID NO: 13422 - DNA, 605 bp, Glycine max
gatgtgacgggttttcctttgaagttttaactcgtctcgagttgtgcacatatatataaatacaacacaagctctcctggttccaacaatttatttctttgctccgggaaatggagaaggagaaagagaaagaatctaagctgaagaacaagatcttcaaaatactgccaaaagcagcggctgcagcagtgagcatgacattccaaaaccctcccttcagcccaggcagggatcacaagttcaaacaccatggcggcaaagggttcttctctggccctatgattcccgttgaagccagaagaaaatcaaaggatggttgtgttgaaactcaagaacccacttcccccaaaatctcctgcatgggacagatcaagcacaagaagaagaaaaaccaaatcaaaaaagcggcaaagaccatgtccatgcctacagaagaaaagaaacaagcttccaagtttcagaggatgatgtcgttccactcggggaaaccaaaacgacccgcggcgaggaaacagcaatctgatgcggacttggagagtgagagatcacctgcaccgccgttgggtcacatgaggcgatttgcaagtgggcgtgaaacattttcg

SEQ ID NO: 13423 - DNA, 654 bp, Glycine max
ccaatataactctttcttgtaactaaagccaaacgcgatattctcaacgcttcattgaattgattcgatattatcccaatttcacaaaccccaacctcgctttctctgtcatccaattcacaccgccatggatcccaaccccggaaccttccctctcctctcctacatcatgtcgcgcctcccttccctcactcccagacccgccgccccggcaccctccgattccgaccaattcgacatcgaacagccaccggagattgtgggccaaatgccgcacctggcggacccggagctggtggcctctatgggccgggccgtggcacaggtgacgcaggcccgctcggtcctcaccctcatcggggagcgacccacgcacgaggaggtcgacaatgcccgggcaaagttggccgacgtcgaggcccagctctcccgagaactggaagagatcgtgctgcaggcccggcccgcggagatcgagatccaggggtggcgggcccagcaggccgagagggagagggagtgcatggagcgggccgagacggagaggcgggtgtggagatcggtgctgcagctggacgagatgcacgaggcttacgagaagcttctgaaagacgcgggagagcgggtggtgaagatgtacgagtcccaagaaga

SEQ ID NO: 13424 - DNA, 454 bp, Glycine max
atggcttccaacgatgatgagtccgttctcgatccctgggccttcattttggagttgtctcacatatctccatcccaagaacaaatcttggccactgctccatttgtcggagcagtacaggacaccgccacctccgcctcccatgacatcgacatgctgccgttgccggactccgtccccgaagacgtattccacacgccaccggaggagtcctcgcttccctcctcctcctccgacaaccattgcgtcgttaattacgccgtcgtcgacgtggatgatgtgaatgctgggaccgatttggtgaaggattctgagttagggttttcggatgttcacatggaagaggttaacggagaggacatgggaaatttggaaacccttgttggggatgtgagcattaaggtgtctgaatctgctgaagtaagcaagtcaagtgatgtggctgcggaatccc

SEQ ID NO: 13425 - DNA, 466 bp, Glycine max
atttattatctaggttcttaaattcattttatttgaaaactagagttgatgaaaatatataatactacatagcctatgaaaatataatattacatagcctgtgaaaattttaaaaatcaacttgtttttgttacatagcctgtgaaaatatgatattacatagcttgtgaaacttcttattgactatgtcccaacttgtcatttcaattgttgatttgtaactgctatttattatgttctttttctccagtttgctttgatgcaagtgtgaatgtgaagacatttataagactaatacttgataagttgtaaatctgggggtttgttggcatttcattagtgattcagtgagtctatgcatgactatgattttatcctttgcaacctaaagcattatcagtccagaaagtgtggctgaatttaatttcatgataacttctcttatattggaacctttttggtttta

SEQ ID NO: 13426 - DNA, 704 bp, Glycine max
ttctttctctataactaaaaatcaaaacccttttcattgcaacaataacaaatcatcaaacccctctctctctctctctcgttttaaaccattttcctctgcccatggcggctgtcccagcatcgcggaccgatccaccaccggcaatggtgcagccgccgctgctcgtctctgaccccttcgccaaggacgccattctcgcctggttccacggcgagttcgccgccgccaacgccatcatcgacgccctctgcggccacctcgcgcatctcgccgccgcatcctcagactacgacgccgctttcgccgccatccaccgccgccgcctcaactggatccccgtcatccagatgcagaagtatcattccatcgccgacgtcactctcgagctccgcagagtcgccgagaagaaaagcgagcacgaagcagcgaaaaaaagcgagagcagcttcgaagaggaagggaaattggagaaggaaacggcggaaaacggcggaaacgacggtgatgacgatgccgcgccggagtatgattcgccggacagtgaaattaccgattcaggatctcaggaaatgcaacccagtgtgatgaacaacaacatatgttctaatcatgaagaatgcgaaggacgttcttcacagataaagctgacaaaaggtttcacagcaaaggagtccgtgaaggggcatatggtgaatgttgtg

SEQ ID NO: 13427 - DNA, 1234 bp, Glycine max
agccattgagaggatatgttcttgtggcccgtgaaactagtttcgatgcctccgtgttagaatctcctgctctggaaaagccacttaactactcgttaatatggagcctggattcacatgatgagtgtgtttacttttggttgccaaaccctccaacaggttataaagccatgggcatagtagttactagcagtcctaaggaacctgaagttgaagaagttagatgcgtgcgagatgatctcacagaaacttgtgagacttctgatctgttactgactgtaaagtcaaaatatgcaaaagattcatttcaggtttggaacacacaaccctgtgatagaggtatgttagctagaggtgtagctgttggggcattcttctgtggcagtacctattttgattctgaacaagtggtggatatcatgtgcttgaagaatcttgattcttccttgcatgcgatgccaaatcagaaccagattcatgcacttattcagcattatggtcccactgtatactttcatcctgatgagaagtacttgccatcatcagtgcaatggttttttaagaatggagcagttttgcatgcagcaggcaataagaaaggtatagctatagattatcagggctcaaatttacctagtggtggaacaaatgatggtgccttttggattgatttgcctactgatgctgatgcaagaaacaatctaaagaagggaaacatagagagtgctgaactctatgttcatgtaaaaccagcattgggaggagcctatactgatattgtgatgtgggttttttgccccttcaatggacctgccacccttaaagtggcattgatgaacattgagatgaacaagataggagaacacataggtgactgggagcacttcacccttaggataagcaacttcactggagagctatggtctgtttacttctctcagcatagtggaggtggatgggtacatgcatttgatctggagtttattaaggggaataagccaattgtttattcatcaaaagatggccatgctagcttccctcatcccgggacgtaccttcagggatcatccaaactaggaattggagtacgcaatgatgcagctcaaagcaaatttattgtggattcgagtgtcaaatatcagattgttgcggccgagtatcttggtgaaggagtcattacagaaccatgttggttgcagtatatgagagagtggggtcctaccgttgtatatga

SEQ ID NO: 13428 - DNA, 696 bp, Glycine max
agggacgatgtatgtgacatatttgtaactgatcaaatgaagatagattatcggttaaatagatggtttgaaaaaccttattctacgccacccttttggattagcataacagagacatccatcctcagtcattcgcaatggcccgacgactccttccactcacctccctccgccacctctccatcgccgcctcgcgtcgcctcctctcctctgcactccccgtcgctccccgcccctatccgcccctcaccgcccgcttcgccgtcgtccggtgcctctgcaaccgccccggagactcggcgtactcgcccctgaacacgggaaagcccacctccatcttgtcgtcgatcacggagcgccctccgacggacatggcgcccctgttcccgggctgcgactaccatcactggctcgtcgtcatccacaagcccggcggcgaaggcgctaccaagcaacagatgatagattgctacgttcaaaccctcgccaaggttcttggcagtgaagaggaagctaagaaaaagatttacaatgtttcctgtgagaggtacttcgcatttggatgtgacattgatgaggagacatcgaataagctggaaggtttgcctggagttttgtttgttctcccagattcatatgtagatcctgaacacaaagactatggaggtgaattatttgtgaatggagagattgtgc

SEQ ID NO: 13429 - DNA, 797 bp, Glycine max
ttgatcagtctggcgaagcagcctcggtggccttgaatccaagagctgctgcctttgcaaagcggagccagagcttcattgagcgtagcgcggtgaaccatcattctgagattccttctccaaatccctctaccttctctaactggggctcacctggtggaaaattagattgggccataaatggagaagagctgaataagctgaggaaatctgcttcctttggatttcgaagcagcagtagtcctctaacaaaggcttcaaacaaaatgtcagcaaatgttgatgatgagccagatgtgtcttgggttaactcacttgtgaaggatgctccacccgaaatcccgtgaatctggtgaatacagtgtggaagatcagcgaaagctactgcaatgccacaatggaacagatgcgattccagcatggttggagcaattgtacttggaccaggagcaaatggtggcatgattgcaatttcgtggcttgcggtagcaactccttttgcaactcaacagtttatttatttgatgaattttttgaattttatagaatttagttagatgacaattcgcaaaagggatcttaaaatagcctaccaaggctataggatgtagaagttgggcaggaagcaagttttctgcttcagtaactcattgattccatttttttttcctgatctattttctttcttatatgttatattgagttgtaagtaggaactttccattgactgaattacaccattgtagtggggatatagtattcaatataatgagactggagatgtaataattttattt

SEQ ID NO: 13430 - DNA, 482 bp, Glycine max
gagattttgcttcttgccataacgtttgttacgcgacgacgacgtatccattgagatctcgacggtggctttccatccgcctccttccaatctcctcctcctcctcctccgcatcagacgacggcgtttcgagatctgacatctctctctcgtaacagaatactggacagatatggaagtcaacaattggcataaggagcttaaatatgatgagtgggtaccaatcactgtatctggtgcacgtccagctgctcgctacaagcatgctgcagcagtagttgatgaaaaattatacattgctggtgggagtcgtaatggtcgacacttatctgatgttcaggtttttgatttaagaagtttgacatggtcttctctgaaactaagagcaaatgtcagaaaggatgatgacgatagttcacaggagattcttccagccacatctggtcacaatatgattagatggggtgagaaactgcttcttc

SEQ ID NO: 13431 - DNA, 516 bp, Glycine max
agagcttcttgccataacgtttgttacgcgacgacgacgtatccattgagatctcgacggtggctttccatccgcctccttccaatctcctcctcctcctcctccgcatcagacgacggcgtttcgagatctgacatctctctctcgtaacagttaatcctgaagtgacaatttaaaataaaaggtgatttgaaacagttctttccttgtctaaaagagtactggacagatatggaagtcaacaattggcataaggagcttaaatatgatgagtgggtaccaatcactgtatctggtgcacgtccagctgctcgctacaagcatgctgcagcagtagttgatgaaaaattatacattgctggcgggagtcgtaatggtcgacacttatctgatgttcaggtttttgatttaagaagtttgacatggtcttctctgaaactaaaagcaaatgtcagaaaggatgatgacgatagttcacaggagattcttccagccacatctggtcacaatatgatt

SEQ ID NO: 13432 - DNA, 373 bp, Glycine max
gattagtgtaagttccaaattacgacagcgagatagagtttcttacggacgacgacgtatccattgagatctcgacggtggctttcgatccgccaccgtccgatctcctcctccgtaactgacgacggtgtttcgatatcttacatctctctctagccacagttcttcctggtctaaaggagtagtggagagatatggaagtcaacaattggcataaggagcttacatatgatgagtgggtaccgatcactgtatctggtgcacgtccagctgctcgctacaagcatgctacagcagtagttgatgaaaaattatacattgctggtgggagtcgtaatggtcgatacttatctgatgttcaggtttttgattt

SEQ ID NO: 13433 - DNA, 239 bp, Glycine max
tgcgagatagagtttcttacggacgacgacgtatccattgagctctcgacggtggctttcgatccgccaccgtccgatctcctcctccgtaactgacgacggtgtttcgatatcttacatctctctctagccacaggtgatttgaaacagttcttcctgcgtctaaaggagtagtggagagatatggaagtcaatgattggcattaggagcttacatatgatgagtggggtaccgatca

SEQ ID NO: 13434 - DNA, 989 bp, Glycine max
  unsure (1)..(989): unsure at all n locations
tttgtattggagtgctacctggccaaaggaggtcgaacaattggcaaggaagttcctttataacccatacaaagtaattataggctcttctgatttaaaagctaaccatgcaatacggcaatatgttgacattgtttcggaaaagcagaaatatgataaattggtaaagttgctagaggacatcatggatggcagccgaatactgatatttatggataccaaaaaaggatgtgatcaaatcactaggcaactccgcatggatggatggcctgcactctcaattcatggagataaaagtcaagcagaaagagattgggtgctctcagaatttaaatcaggcaaaagtcctattatgacggcaacagatgttgcagcccgtggtctagatgtgaaggatgtgaaatatgtaataaattatgacttcccggggtcacttgaggattatgttcatcgcattgggcggacagggagggctggtgcaaaaggaactgcgtacacatacttcacagctgctaatgccagatttgctaaggaacttatagccatactcgaggaagctggacagaaagtgagtcctgaattagcagcaatggggcgtggtgcaccacctccaccttcaggtccccgaggtttccaagaccgcgggaggggttatggcagttctcgtccatggagctgatgggacggtgcagacacaccaacttgattgacggaggaaactcccaagaattatgccgtttgtgttattattgacgttatattatcttgataattagtgtaaacttgtaagtttagtaataggaattcagtattcttgttgttcaatttattttcctcaaatgtccatataaacatgtaccatcagacatttggtcataaatcatacgtagttcataccgcaacaatacattattggttatccttacggtttacgggttgttttgagatttgaacacctaaaaaaaaaaaaaaagggcgnccnnnnnnga

SEQ ID NO: 13435 - DNA, 454 bp, Glycine max
ctcgagccgtcctatctcaccatatcacgaaagcggcgacaacccgttccttgagaaaaccgaaaccctaatcacgactccgagaaccctaaattcgcccaatccaaagtcccaaacctctaaaatcaaaccatgaaaagcgtagaggtggcgaagacggtgctcgaggtcgccgacgtggcttggaccgccgttgaacacacccaccatctccgccaccgcagtcatcccgtccccgctgcccccgcagccgatgtctgcccatccgaccaagatttggagtctctgcgatccgaaaatcgacgtctcaggaacttactcgaccagaatctgaaattgctgcaaaacctctctgaggcgacttgcttcgataattgccctcccgatttgaatgaccggttagttgctaccatgaggtctgatgagtacttgactcggctcaagtaccttcaac

SEQ ID NO: 13436 - DNA, 549 bp, Glycine max
caaagttgtgattttgtgaactgggtatgctcaaagttgagattttgtgaactgcggatgctcaaagttgtgattttgtgaactgggtatgcggctgtgttgaacttgacttgatcctgttttagggtgtttcaccgtgttattttgatcaaattattgtttttgaaattgtgttgttgttgatttttggttgacttgtttgatactgtaattggatgtggctgaggaaaccggttttggggattgtttgtgtctatctgttttaatttagttatagattttgttctctctgtttcttcatgtagcatttggtgtttttttttttttttaatttggtttatgatgttttggccttaagaagttgcctttagaattaagctcaatatttctggacgaatctcttgcatgtccttgagatttgcttgcagatgcagatattagtattgtgtttcctaactttaaagtatctgataacttttagtgaattaacatgaagtaattgtcccttcaggggtgatgggaatctataagtttttcaaatccatttct

SEQ ID NO: 13437 - DNA, 1285 bp, Glycine max
ccctcgcctccgccccttccttatcttcccatgacactttgagagttcaagtttccttttctttcctacaaatccaaaataatagttttagtttacaaaatggctgtggaactcatggggttcccaaaactagacgaacaaaaggccattcaagaagccgcatcagaaggcctcaagggcatgaaacacctgatccgaaccctttccaaccaaccctctcacttaaacaccgaacttaccgacgttaccgtttcaaagttcaagaaacttatttcactcttaaatcgaaccggccacgcccggttcagacgcgccccggttcagtactcatctccacacgcacccgttcacaacactaacgcttccacctcatcaattcaactccctcctccgccgcaaaaccctaatattcccgcgctggcgcagtttcctactccggcgccggtggccgtgcaccacacgccggtgacgctcgatttcacgaagccgcacaacgcgcttctgagctccaacgccaaatccgtcgagctcgagttctcgaaggaaaccttcagcgtttcctctaactcctctttcatgtcctccgcgatcaccggcgacggcagcgtctccaatgggaagattttcctcgcgccaccggcgacctccgccggaaaacgtccggcgttcaagaagcggtgccacgaacaccgcgaacactccgacgatgtctccggcaacagcaagtgccactgcgttaagcgaaggaaaaatagggtgaagagcactgtgagagtgccggcgattagttcaaaagtcgccgatattccaccggacgagtactcctggaggaagtacggtcagaaaccgatcaagggttccccatacccaaggggttcctacaagtgcagcacgattagagggtgcccagcgaggaagcacgtggagcgcgcaccagacgatcctgcaatgctgatagtgacgtacgaggggggccccaggcacgcggttcaggctgcgatgcaggagaacgcagccggggtggtggggttggtgttcgagtcaacgtagagaatgagaaagaaggtccaatacaaaaataataataaatttggaagtggaggacttttttaaaaaatatatatatataatttttggaaagtgtagtgggaagaaccaagaagtaaggacaatggctgccttgtaaatttgttttatttttatctttattattattgttatattttagttgtcatagactcgtagagaggtcaaaaatggaatctcaagttgtttatttatttct

SEQ ID NO: 13438 - DNA, 514 bp, Glycine max
cttatcttcttatgacactttgagagttcaagttttctttttccccaaacccaaagattttaggttacagaaaatggcattggaactcatggggttcccaaaactagacgaacaaaaggccattcaagaggccgcatcagaaggcctcaaaggcatggagcacttgatccgaactctctcccaccaaccctctcacttaaacaccgaactcaccgatgttactgtttccaagtttaagaaactcatttcgctcctaaaccgaaccggccatgcccgattcagacgggccccggttcagtactcatctccacccgcacctgttcacaacgctaacacttccacctcatcaattcaactcccttctccgccgcaaaaccctaatattcccgcgccggcgcagtttccttctcctgcgccggtggccgttcaccacgcgccggtgacgctcgatttcacgaagccgcacaacgcgcttctgagctccaacgcgaaatctgttgagctcgagttctcg

SEQ ID NO: 13439 - DNA, 629 bp, Glycine max
cgcaaccgggagaacacgctattccgtttccaccttcccgttaactgtcagaaaccgagtgtgcgatcagcgatggcgaaattgaagataggagggacatgggcgggggttctggaagaggtggacctccaagcctggaccctcgccacgctccgcgaccacgtcgccgcccgatcgaacactccctccgactccatcaacctcatctgcgccggcaaaattctcaaagacgacaccgttccgccccaaaccctcgcccaactcggcgtcaaaagcaacgccaagatcctcgccactcgcgcctccactcctcaacaaggacactccttcctcgcccaggaagaacgctcctccagactcgcgcgtatcagggcggctgcgaatgcaatggcagaaaggcatgcggatggtgcgttgccggttgaagacttcaatattgaagttgaggatcagaatggacagaaagtgcgtttaggctctgagactgatcagagggcagtgatgatgggactgatgcttcacgcgaaggggaagcgacttatcagacaggggaattacaaagatgccctggaagtgcttagcatgggagaggaagcattctctctttgtgatccaaaagtcattgagct

SEQ ID NO: 13440 - DNA, 555 bp, Glycine max
gaggagatgaatttacttgttggagctgaccaaccaggaaatcaactggatgattatatttccgagttgaatactattttatcactaaaggctgcaggaatctttcaattgcagacacagttggctcaatttcagagacgcttaaatgagtataatgttgtcgtaacgtctggtaattgatggtgctaatgggcaaatgattggtgtgttgtggatgaggaattctccgttctcttaggtattgcttctatgatttcattgccgtggattgtttctcaattgtgaagaattttgatgttgacaagattattgtgggttttggagtgcagaagaaataggaatcaaacccaccatctttgttctacacttgattgattgcttagacgagtcactattgtgacttgaaatgaattgaacaacatatacaaatgtatctccacttgctcagttgacatactattgttacatgtggagagtacaatgtgaagtcacctgccttgatagattgtcgcttgcaaccgaaaatctttatatatattaatttgtttgtgcacc

SEQ ID NO: 13441 - DNA, 374 bp, Glycine max
cggacgcgtgggtatatttacaagttgaataccattttatcacataaggctgcgggagtctttcaattgcagtcacaggtggctcaatttcagagacgtttaaacgagtataatgttgtcgtaacttctggtaattgatggtggcaatgagcatgactgatgtgtcgtggatggtaggtattgcatgactgatgcgttgatgctttcaagattattcgtgggttctggagtgcagaagacatagcaatcatatccatctttgctctacactcaattcagcagattgcttatacaagccactgttgtgacttgaactgaattgaatcacatattcatatgcatgttcactcgctcatttgacatactattatcac

SEQ ID NO: 13442 - DNA, 566 bp, Glycine max
cagagctctgacagattggacactagtgctggtcagtctggtgctccttttaccatgattacacaggatgttttacagaatggtccccagtggattgagagttctcaaagggaatcgagcagaagcatgcactatgatcaaccctctgggcttaatgatgttcaaaatcatgacttgtacaggccagtacacagtagatccatgggcaatatgtcaaccgagttcccagcctgcacatctgggcgtcagaaccaagggtatttggtggatgagttcccacacattgatatcataaatgacctgcttgatgatgaacaaggtattgggaagacggccaaggcaagttcagcattccagtctctgaataatggaccacagttgctgaatcgacagttcacttttcctggggatctgggtgcagatgatgatttgggatcttcaaccagttcttgcaggtttgagcgatcacaaagttaccatcatgaccatagattccaaggagggtatgacttgtctggtgggcattatgattcactgagggattatattcaaccgatgagtagtgt

SEQ ID NO: 13443 - DNA, 679 bp, Glycine max
agacgacagaaagggacagatatatcacagaaaaggatgctagtgggtgctgtcagagttcaacattttctgagttcactcactttttctcgcttccaaccttccttttctctgcgagcattttccgctatggccgaagaatttgtgaagggcactgttcatcaaaacggcgtcgctgtcatcaccctcgatcgccccaaagctctcaacgccatgaacctagatatggatgtaaagtataaaagttatcttgatgaatgggaatctgacccaagggtcaaatgcgtactggttgatagcagctcgcctcgagccttttgcgctggtatggatatgaaaggggtagtaatcaaaaaccatctatcagatatgattgaggtcttcactgctgagtattctttgatatgcaaaatttctgattacaagaagccatatataagcttcatggatggaataactatgggttttggaattggtttatctggtcatggccgctatcgcaccctttcacagagaactgttcttgcgatgccagaaaatggaattggtttgttccctgatgtaggttttgctcatatagcggctcaaagtccaggggaaggatccgttggtgcttatcttggattgactggaaagaggatttctactccttcagatgcaatatatcttggccttggaa

SEQ ID NO: 13444 - DNA, 388 bp, Glycine max
tcgaccacgcgtacggggtgctgtcagagttcaacattttctgagttcactcactttttcgcgcttccaaccttccttttctctgcgagcattttccgctatggccgaagaatttgtgaagggctctgttcatcaaaacggcgtcgctgtcatcaccctcgatcgccccaaagctctcaacgccatgaacctagatatggatgtaaagtataaaagctatcttgatgaatgggaatctgacccaagggtcaaatgcgtactggttgatagcagctcgcctcgtgccttttgcgctggtatggatattcaaggggttgctgctgaaatacaataggacaaaaacactcctttagtgcagaaggtcttcactgctgagtattctttgata

SEQ ID NO: 13445 - DNA, 442 bp, Glycine max
tgaagaatttgaagcccaaggatgattctgatggcttgaaacatatttcattttcaagtcctgagcagattgttggtaattctgatgtcactggcatcaagcatgcgcatgatgaaaaagatgagaaaattgctgttgataaagaacatatttcttctatcttaaagattggttcagtcactattgcccccaaacaagttgaggctaagcaatccgtcagcaatggtaataaagaaccagttgatgttcttacagtaggctcaatgcaggtcaaagttaatgggtttccttcgtcttctggtttcttgaaaggtggcagtaccccatttgatgcaagagcattgcaaccgggaaaaggagatgctggcggtaaaaagggatcacaacgttaaattttgctttgctttgcatttgaggcacatttgattttagtcttcttttg

SEQ ID NO: 13446 - DNA, 477 bp, Glycine max
ggcacacgcgcgttctcattcaaggaaggagagcttgatagtctgcatgaacttcgatgacgtcatgtgaagaggctggtgatgcagctgatccagctgctgacataccaggcgagcctatagacatgacgactgacttgcagcctgtgctgagaatagctctgacttatggtggtgcttgcacgaggccttgaccaagggccacacgtgagtgcaaagcatgctgcacagctctctgctctagcataagactgagaccagcactactatgagaaactcgataaggcactgtgtgcagagctcagtgctaacctgattacagctccgagtgcaaagacccttgcaaaatgggctggatagtgcactattgattgcaaaagaaaagctaagagagatactgggagctcctctgtgggtgccaaggtatgaaatgaggaaaaatgaaaatgtaagttgatagtgttttacaacgcatta

SEQ ID NO: 13447 - DNA, 860 bp, Glycine max
cttgaatcacttgttcgatacctagacttgcatgaattatattatcagtatgtcaattctaagtttggagagccaattgagtattctgcataccttgatgttttctcagacacagataagattccccgcaaaatgaaaatgaccaggcagtaccgagaatatttggcgaatcttttggagtatctgttatactttttccagcggacagaacccctgcaagatcttgatcgaattttgtcaaaggtaacaactgaatttgaagaaagttgggctgttggaaaggtacagcgatgggaaaatgacaatcaggaaaatggacatgtacttgctgagcatgctcccattgatcttgattattatagtacaattgaagaattgatggaagtcggccctgaaaggttaaaggaggcactggctgcattggggcttaagactggtggtactgttcagcaacgcgcagagaggctcttcctcacaaagcacacacctcttgaaaagttggacaggaagcattttgctaagggtgcatgtggtgtagaaaagaatggggttgctgcagttccacaagaagatggaaattctaaagaaattgcattgatggaagccaaaatgacaaaactttgtcatttgttagaggagacaattgctcgaacaaaagacaatgttgtaaagaagcaagccctaacatatgaggaaatggaagcagaacgtgaggaggaagagacacaagaggactctgaaagcgaagatgaggagcagcagatatataatcccctaaaattaccaatgggatgggatgggaagcctataccttactggctgtataagctacatggtctgggtcaggattttaagtgtga

SEQ ID NO: 13448 - DNA, 580 bp, Glycine max
cttgtacatagaactggtttacagcctgaagagcaacaactcttctttggacgaaaagaaaaggacaatgaagataatttgcatgaggaaggcgtgagggacaagtcaaagcttttgcttttggaggatgcttctagtgaagagaggaaacgcgaggtaattagaaaacacaatgaaatgttaaaggcttctgaagctgttgctgaagtcagagcagaggtggataagctcgctgagagggtatctgtcttggaagtggctgtggatggagggaccagggtatctgacagagagtttttgatgtccacagagttgcttatgaggcaattgctgaagctggatagtattgaggctgaaggtgaagtaaagctgcagagaatagctgaggtgcgtcgagtgcagaactttgtagatacactagattctctgaagacaaagaactccaatccttttgccgccattggtaaagctgtctctgtagcaacgcaatgggagacctttgactctggaatgggaagcttgaatgcccctacctcaatgtcgtcttctagaaatgtaagtcaagattgggagcggcttg

SEQ ID NO: 13449 - DNA, 736 bp, Glycine max
cagtttaaactacatgccacccacttcagtgtttctaccttttcctttcatccctgagacgctcctgtggacactttcatttcgtcgcataacccttaaggctgccgcacacaccgggcacggcctccctccctcgcgagtctcaccgccatcgttaatcacggttgtcgtcggagctctcgtagttgctcctcacagtcccagattgtcaaaaattgtggcaaatcatggaaaatactgcgggccataacgatgatagcaagcaaaaagaagcgcctaagcttgcggcgttgttgaaagaaatgaaggaaggacttgatactgtaaggcgtaaaattcaatctttaactgccacggtgaaagaaggccaatatcctacagcagatggatttagttatcttgaagctaaaaatttgctgcttttgaattattgtcaatcccttgtttattatttattgcggaaggctaagggattatcaatagaagatcatcctgttgttcgaagtgttgtagagatacgattgtttttggaaaagattcggccaattgacaagaaacaacaataccagatccagaaactgatgcaagctagtgaaaatgcaatcagaagtgatattctaaacaaggagccagttgcatccaataagagcgaggacgcatcaaagtatcgtcccaatcctgacatgcttgttagcaaagtagacctaacctcgcaggctgacaatgagtattatca

SEQ ID NO: 13450 - DNA, 775 bp, Glycine max
tcgcccacgcgttcgcccacgcgtccgtccacgcgttcggtttcttttttccgagactttgaaggatcaacttttgtcttggcaaattgaaaccaatcagtttcaatgcaaaaattgcctgaatctggcactgatttggctcttcaggcaacctttaggcttgttgtcctaaaggaatcttcctcaaagttttcaacattggcagatgctaatggtaaatcagtgatgttagaaccatttgattttcctggaatgaatgtggttaaccaaggagcagacaaacctcttctcatcatagattcatcccatggcgggacatcttctgtttttcttgtagttccgggactggatggacgaaatgaaaccatatctttagaatcccagagctacaatggctgttatgtgtatagtggtatgagctctattgcaggagtgaagctcagttgcaaatctggttctgatgctagttttaaccaagcaacaagctttgttgctcaaaaaggattgagccaatacaatcctatcagttttgtggctaaaggggcaaacaggaattttcttttggagccactattctcattcagagatgagcattatactgtttatttcaacattcaaggttgatacaagtttttcttttccctttgaaataaacagtacaataagttttgtatataaaggttcaagcttattcaattacagaaagataattgatgaatatcttcctgtgttattaaatgatgagacaacacattctctaatacactcttttgat

SEQ ID NO: 13451 - DNA, 657 bp, Glycine max
gtcgacctacgcgtccgactagttctagatcgcgagcggccgtctgctgtttttcttttggtaccaggattggatggacgaaatgaaaccgtatctttagaatcccagagcaacaagggatgttatgtgtacagtggtatgagccctagtgcaggagtcaagctcagttgcaaatctgattctgatgctacttttaaccaagcagcaagctttgttgctctgcaaggattgagccaatacaatcctatcaggtttgtggctaaaggggcaaacaggaattttcttttgcagccattactctcattcagagacgagcattacacagtttatttcaatattcaagattgatatatattttcccctttaaaataaacagtataatatgcttcgtcttacaaagaaggttcaagtaatcgatattcaaatgtaaaagaatagttgatgaatatcttcaagtctttggtgctgtgttattaaatgatactcagtgataaccacaattagaaaattggaagtcagctgcagtaaggtgacctttctattcattttatagaaaagaaaagaacagagtggggagagaagtgatgatatatgtcactactcagtgtagctgttttcgttaattatatcagcattcagttgctatgtaataatagt

SEQ ID NO: 13452 - DNA, 752 bp, Glycine max
acggccacgcgtccggcggatcaaaatatcccttctgataaattgcagcagagagtgagtcttgatagtgatactacattgtcacaaggtcatgatactaaaaatgatctgtccaaaccagaggaagcaagtattctttctattgtagttaaaaatgaagaagggaaggattctgatgctattgcttgtgccttggaatcagatcaagaaggaagcacatgctctttaccacttgagaaacctttgcagaaccctgatactctttcgcatgagttgcctcgattgcagtccagtcaggaatttccctctataatacgcgaaaaggtatcaaaagatggctataactggcgaaaatatggtcagaaacatgttaaggggaatgaatttataaggagctattacaagtgcacacatccaaactgcctggcaaaaaagcaattgcagcagtcaaataatgggcatatcacagattccatttgtatcggtcagcataatcatcctagacctcaattgaactccacagtatcagttgagtgtgttctgcctgttgttgaacaagcaccacacaaatcctctttagccactgtggaagacaaagcatccgttgagcatggatgtatgcctcaacagatccagcctttacaatcctttccgcctgcaaaagtttccccagttaataagttgaatgcttcacatttatcattgactaaggcaaaaaccaggttcatgacaacgaggaacccgagtcaaag

SEQ ID NO: 13453 - DNA, 501 bp, Glycine max
attaaaagattataaacaagcagagaaattgtgcacaaaggtactggaccttgagagtactaatgtgaaggctctctatagaagggcccaggcatatatccagttggctgatttagacttggccgaatttgatattaagaaagcgcttgagattgaccctaacaacagggatgtcaagcttgagtacaagactttgaaggaaaagatgaaggagtacaacaaaaaagaggcacaattttatggaaatatgttcaacaaactgcacaagctagattctcttgacagtaataaaccagcgtcgaaggatgcccaaccgatgaatatcgacagcaaggcataaacatcatggaaattcagctaatttcgagggtctgttatttattattatttgtggacatttggaattatgatggattattcaatgtgtatggagataatttttctttccctattgcaaagaacgtggaaatcttgacgaaattaaatactaaatgtgtggcg

SEQ ID NO: 13454 - DNA, 512 bp, Glycine max
cgtaaatgcgctttcttttcttataacaatcatagctaactagtagttttcctgtttctaaaaattagacgttttggttatatatcgttttactattctgtatttaattttattagctgagttggggctagtgcatgtttgaatttatcgaatgtaatatattatgtgcctagtcgtaacagaattctgttaacatattaacttaaggaattatacaagagttgttacattcttcaaggttgagtttagtggaataaggttttccgtttgaattttgtctgtactgtgtttttaatagatacatcgtttaacatgcagaaaccagcgtcgaaggatgcccaaccgatgaatatcgacagcaaggcataaacatcatggaaattcagctaatttcgagggtctgttatttattattatttgtggacatttggaattatgatggattattcaatgtgtatggagataatccttctttccctattgcaaagaacgtggaaatcttgacgaaatta

SEQ ID NO: 13455 - DNA, 743 bp, Glycine max
tcgggatgggtttctgtgctgccacacgtggactccattttggtcacttttggtgacattgctcaggtgtggagcaatggcaagttaaagaaagtgagaggtagaccaatggctacagtgggagatgaaaatggttcgcgctgcataacaatgtcattgctgataactcttcctacagatagcagagtggctccactccttcccaaggtaacatgcaacaaggaccaaaaggaagaagaaattgaaggagaagaagaagaaaacaatgatggtggtgatgaagaactagagaagagggtgttcaactcttttgactttgaggactatgcttggagagtttaccatgaacgcatccttttcaaagatccattggataggtaccgtgttgtttgatcttctcagccatctatgttttgtgtgagagattcattaatttgtcatgctagtgttagtctagtaaggtttgaattttggatgagtgaaagtgaaagggaaaaatgagaggaccacaataatgagatgtatatcatatgctccatttatttattggattgattttgaagttagagaagtgtcacttagacacttattttttactttagctttcaatcaggaattcagagtttgtgtcagttactctagggactggggtccaactctgccatgccgatattgacgggacagtacagtggcttcaatcatatatctttccatgaagtatcattaaatattgaatatcgtaa

SEQ ID NO: 13456 - DNA, 426 bp, Glycine max
agtcagcagccacgcggaatactcgtactgtgtcccactctcacaagacaaccttgtctgatgtcttaacggatgcgaaggagaagctaccagcggataaggcggtgacgcgagaagatgcggagggactgattggagctgagcttaggagcaacctggacatgagaaccacccctggtggggtcgctgcatccatggctgcagcagccacacttaatcaaaacagacaagtgactgatgcgtgaagatctcaagtttccatgcatccagtggagttaagtgccataccctgtggctgctggggcatccatggcgatagtgtgtatgtttaaataaatcaagtcactctgagtttgactaataaaagtacaatagcttagtgtgtcaattttctgcttttgtactttgttttattgattatggtta

SEQ ID NO: 13457 - DNA, 268 bp, Glycine max
attaaacaccatgagccaggaaaagccagagagacctcaagcggagaaagaccccatcaaatacggcgacgagagaagatgcagaaggagtgattggagctgagcttaggaacaacttggacatgagaacaacccctggtggggtcgctgcatccatcaaaaagctatgtttcttaatatattaaataatactacctcttatttttattgctatcttataatataatcaagttttcgttatcttcctttgatctcttttgcttatttc

SEQ ID NO: 13458 - DNA, 732 bp, Glycine max
cctgcaatacaatatcatggccatatatgacactattgcaaaacaataaattgtgtttaatttttacaatgcaggcctgtgtgtttgagaggcttaagcaacgaataacaacattgcagaaggatataaaccatgatttcctacacctccgaatagtaaggtgtcatagtgaactaaagctagataaagccttgtccaatttcaccaatgattcgtggaaaaaagcttggcacttttactgtgagtttgggactaagggagttatgtttgactatcgtcgtcatggtggtaactgtctaagaggaagtagcctgctagatactgtttcgttccgctggaatgatttattgagagcagattctttaactttggaaaaggaagttagtcaacaggttaatgttgttacgtcaataaccccaccagttcaagcaccatacttgttgaaatgtgtgcctgatcgagtcactgatgattctggggctatgatatctgatgtgattctgaagatgaatagttatcgtccacaagaaggccgatggttgtctcgcacagttcttgatcatgcagggagagtgtgttttgttattagaattagggtaggaggaggattttggagaaagagggggtgaagctccttcagcttgtaaaatgggaagataggattatagagatacgcgaaggatcttggtcttatgttgccggttacattggtagagcccctgaaaaggtggt

SEQ ID NO: 13459 - DNA, 825 bp, Glycine max
gccctaactaacataacctctgtctccgaaaatgagtggtcacataacgaggaggaacagtgcccctcacaaacgccctccctcgttatccaagaagctccaaaacggaagccttagcgaacctcccagcaaggcttcttctccgccacctcaagagtttgatgggggagaaagaacagttaagaagcttcggttgtcgaaagccctcactatatctgaggtcacgacggtttctgaagcgtgccggagaatggccactcggcgtgtggatgctgttttgttgactgattcaaatgttttgctctctggaatcatgactgacaaggacattgctactagagttatagcggagggtttgcggcccgagcagacgatggtgtcaaaagtaatgactcggagtcctatatttgtgacatctgacatgctagctttagaagctcttcagaagatggtccaaggtaaattcaggcacctccctgttgtggaaaatggtgaagtcattgccatactggatatcaccagatgtctttatgatgccataactaggatggagaaggctgctgagcagggcagtgccattgctgctgcagttgaaggggtggaacgccaccgtggtagcaatgtatctgctagtgctttgatagaagcattgagggaacgcatgttcaagccttccctgtcaactctaatgggtgaaaatacaaaggttgctattgcatcacctgcggatcctgtctatgtagcagcaaggaagatgcgggacttgcgtgttaattcagctgttattgtgtccttgtcgggaaccaagattcagggtatactcac

SEQ ID NO: 13460 - DNA, 541 bp, Glycine max
  unsure (1)..(541): unsure at all n locations
gatatctgctaaaggcttcgtcagtgaggtgagaatttcagccctatctctccttcggggttcaacctccttaagcggtcagcgggcataattgaaaaaagaaaggcactctatgttctcgttctcggtgctccggtcaaggtaaattctctacttgtcttcaccttcggacatcaagaaagccgaactgactcgctggctttgctttgtaagggcttgacctctgatgtatggaagtacgtggttgaagtgaattcctcggaaatgcagccggagggcaatctctcttttgacccggtctggtatgtcttttgcgccagctttctttcctattggttacggttctcttgtctcggtcatctcattctatggtttcagcatatggctatggttcagatacagactaaagactttctttcgtgctttgatctcagcgcaagtagagtgttgctcctgaccattcaaagtagtcattcttttaaaacaatgcatggcatgctgntccaactctgcgttcatgtcctcatatntgtgatgctcg

SEQ ID NO: 13461 - DNA, 600 bp, Glycine max
atttctcacatctaaatcacatttgacaaaaattccttcattgctggaatgcttggctataatcacatttgttggtgggaatggtctggaggaaacagagagatcgatggacatactgtggcgagtgattcatcccagattgggttccaatgtagttgcagtcaaaccttctgctccattaataactgctgtggtatctgcttggtcctttctcctatctaccatgcgtaatttgaagctaaattctaaaaattggcaaaattcaatatcttatttatcaagtcttctagacaaggaagaccggcctgtgcgtattgctgctggcgaagcactggctgtaatttttgagattggaattatagagaaattttctgctgattctaagggtgcaagtgatatgagtcaagaagagattaatctgcaggaaagttatacccatttacaaggattgaaagggaaggtcatcactcaagtcaaaaacctttctggtgaggctggtggaaagggttctgctaagaaagatctgaataatcagaggaactgttccgaggatattgtagagttttttgagtgtggttactctcctgaaatttcaatgaa

SEQ ID NO: 13462 - DNA, 495 bp, Glycine max
cctcacatttttttttctctctctaaaacattcttttcttttcttttcactgatccttgaatctggtaagactcaacttcaaccataactgtttcaactttgatcttcctccatatcacagtcccaaaaggagattttttttttatttttaaaaaagacccaccttaaaaaaaaaaaaaaagaaacagtggtcttattttctttgactgcaccacaaattgtggggtgtcttcaaaatcattgggttctcacttttgtctgccaaagttagggtctttagaattagcgtttgcacagtccagcttttggagatttatgattagggtttttggaggggagagggattttggggggtgtttggttggtgagaatttgggggttgaggtggttggtgcaagtggcgggagtaaatgagaaattttgagagatggggtgtgcgtttggaagagaaggcttcagggaggagaggagagaggaaatgagagaggcaaaaac

SEQ ID NO: 13463 - DNA, 429 bp, Glycine max
cccacgcgtccggccaccctttcacattctaaggtcatattcaatcagaaaagcaggtgcaaatttagttgaagtatgacaggttttgtgatagttgaggggtgggagggtaactttttgtcctacctagatagggatttcgatggaggagatgtcctttgcggttgcagtgccattaagagtaggttcagatgattgtcatgatagtggcaatttggaggatgaagttggtattgcggaagtcataccaccaattcaagatagggaaggagagagtcctatgttggatatgatatcacaaaatagaagcactttggttgctggtgatgaagagttaaccatggaaattgaggaggaattcgttgtcgtttgaaggtgaccagtttgttgatagctcgtgttctctttcggtagtcagtgagaacagta

SEQ ID NO: 13464 - DNA, 1213 bp, Glycine max
caaagtgtgtgtgtgcaagagtcattggatgatgatcagtctaacattgctgctgcatggtgctaatgttttgcaaatgaaagcattagatcttttagatgggaaaaatgtctgtgaagctctggtggcagaatcaccttccaatcaagccactaatggaagccatggggttgatttccagtgtgctgatgaggttgtcaaaacagctgacatagttaaacaaactgacttagattttgaaactatggaagtgtctgcaaatgctgatgatgcagccaaagatgttaataatggtggtaatccagggagaattatagttctgtctcgagctactagttcttcatctcctggtaaaactaggcccatttcaggcaggtcactgtcgtctcgagctggaagagatgtattgtctgactcacttgatggggataaattacacagaggaagagatgaagttttcattgatggccctcacaaattttctagagaaagacatcaagatatctcccctagaaactctagatttaactttgtgcgaggtagaggaagacttaataagtcgattagactcagttcgaaatgattgggaatctgaccgtgaattttctggtgagttttacaacggtccaagtcagtttcgtgggcccaggcctaagtatgcacctgcttttgccgataccgatatggagtacaataatgttgcacctgatgggtcatatgttggtaatggtcgattaggcagaaagccattgaatgatggttcttacattgcaccgaggaggcgttcaccaggaggaagagatggcatccaaattggtcatagaaatccaagaaacattagtccaaatagatgtattggagatggttcagacttggttggagtgaggcataatgataaatttatgagaggcttgcctgaggataatatggatgctatgttcacccggtcccaaacatttgagggaatggatggtcggtttacgagagggagtaggaatttttcttccatgcagagaaggggtcctcctcgaattcgttccaagtcacccatcagatctaggagtcgctcacccggtccatggtcatctccaagaagaaggtcgcctagaagaagatcccctgatggttttggtggacatccagaactatcccatagaagatcaccattttacagggttgacagaatgaggtcccctgatcgtccctgtttccc

SEQ ID NO: 13465 - DNA, 761 bp, Glycine max
aaataaaggatgtagttgttattgtcaaaattcctataatatattttcaactttttctcttgggctttattttatatcttaacacttaaaatatccaatgtataaagtttctaatagtttggctttgtacaaatttcatactgaactacacaaagacgcagagctgaattaatcggcattcatcacatcacagcgacacagccctgatttatctttttctgcctttggtaaattactcaaagttaatttgtcagtgtttgagatgatgcatgattgcatgaatatattgtggacatgttcttaagcatttatctgttgttttgttgagtttacctgtttatttatctttatttatgttctattgtgtcactggtaaggcatttcagggtttcaaggcatataattcttcctctactgtattcctgaaatcttggtgcatggctttgttctcctcattaaccctgtaaagaagtgactttcttctgtagtcagttgggattgttctatggtctcataattggccaaatttattttgctgtccaattggcagagctgattaatggaaaatattctcttttatttttgagatgaactgtatgacctccattggtcttactacttgtaatttgtaaatctgctcagtttagttcaagaaagttcttgaaaagttaaacataatattgattggtcttgaaaaaatgttgtgaattgtttcatgggttagcttgagtttttgaatgaagtgatttcttaaagtatta

SEQ ID NO: 13466 - DNA, 439 bp, Glycine max
ttcgagcgaatcggctcgagctcaactcaagtttatgacattttgatatgtggaatagtgtattggtgttggtgttcctgtgtcttagtcttagtaatggtgatgatcaagagaagaagaaaccctgtttgtgggagtggaagagactgagtagcgcttactctgcctatcgggcactttttccttcaagtattggtcttgacatgcttaagaaccttgtcactcacacatatgcccgtttctttcctccaaatatagagtaagttatttcttcctcaaatcaatatactatttactaaacactaatcacatgttatgaatcaattaattatttagcttgaaaaagttttagaagagaggaggaagggcaagtcaaagagaatggagctggggaaaaggttagagaagcttttgcgaaaagcctaggaaatagcaaagc

SEQ ID NO: 13467 - DNA, 282 bp, Glycine max
gtatgattgatatgtggaagagtgtattggtgttggtgttcttgtgtcttagtcttagtaatggtgatgatcaagagaagaagaaaccctgtttgtgggagtggaagagactgagtagcgcttactctgcctatcgggcactttttccttcaagtattggtcttgacatgcttaagaaccttgtcactcacacatatgcccgtttctttcctccaaatatagattttagaagagaggaggaagggcaagtcaaagagcatggagctggggaaaaggttagag

SEQ ID NO: 13468 - DNA, 1479 bp, Glycine max
cccacgcttccatccactcctgcactgttatttattgctaaactaaatatcaatatcaattatcttcttcctctttaagtcaaaccataactattccatttctttccaccccacagtttctgaattctgggtgttgagtttcattttctccatttttttttatctcccttggatgtgttattttcaatccaaaagaccatgcaaaaaactatatttgagaatctgaaagagtgactaggtggtctatctgatcttgtgaagtttgtgtttgtgtgaaaggtgtgaggcttattattcagaagagtttgtgtttgttcacataattgattgtggtgtggtgtgtgtcggtggcaatggaggcaagtttggtggagaggggtagagagagagctggacatgttaacaaggttggttatgttagaagggtcattgcaaagaagaagaaacagctttatcgaagggttaggagacctgagttgagtgtttcaaagacacttcaccaattatttgattcatgcagagaagctttcaaaggccctgggactgttccttcaccacaagatgttaagagattgactcacatacttgataacatgaagccagaagatgtggggctaagtagagatctgcagttcttcaagcctggaaatattgtcaaagagaaccaaagggtcacttatacaaccgtgtacaagtgtgacaatttctcactctgcatctttttcatacctgaaggaggagtcattcctctccacaaccacccggacatgactgttttcagcaagcttttattaggactaatgcacattaagtcctatgattgggttgagcctgaggcctctgatgataacatgttgcaaccacaatctcaattgagattggcaaggttaaaagttgataaggtgttcacatcttcatgtggcacttctgtcctgtatccaacaacaggaggcaacatccatgaattcacagccataaccccatgtgctgtgcttgatgtcattggccctccttattccaaagaagatggaagggactgttcctactacagagatcacccttatacttgttttcctaacgaaaggattattggtgaggcaaaagaggaaaatgatagttacacgtggctggaagaaattgagatgccagagaactctgaaatgaatggcgttgagtacctgggtccaacaccctcttagtgtatgtttgggaatcacttgaatccaactcaaatggtctttcaatgaaagctacaatatggttgctttgaaatttttacattggaacgtgtaatttctccgtgattttaatgttaattcaaacgcacccttagtattaacatcttaccgtgtacttctaacgctacggatcagacacagaatcttctgtcgctttccctttgtgtccacattcaaggaatgtgtgctgcacgtgttgacttttgttcctccatgttaaatgtttcgcacagttgggacc

SEQ ID NO: 13469 - DNA, 305 bp, Glycine max
ggcttgtatctgttcctactacagggatcacccttatgcttcttttcctaacgaaaggattattggtgaggcaaaagaggaaaatgatagttacgcgtggttggaagaaattgagatgccagagaactctgaaatggatggcattgagtacctgggtccaacacccttttaggttttttcaacaacacaacacatcttcttagtttgtgtttgtgaatcagttgaattcaacgccaacggacttttagatgaaagctacaatatagttgctttaaaattttcgcattggaacgtgtaatttatac

SEQ ID NO: 13470 - DNA, 574 bp, Glycine max
caccttttcccgcagcctctctctctctctctctctctctctttccctctttttctaattatggagagcctcccgcttgagacggcggagaagatcatcctgcggtgggactcgacggcgtcggaggaggcccgcgacaagatgatattctccggcggcggtgaccgcgacgaggccgatctctacctccaagctgtcgacgaaatccagcgctctctctcctccgtctccgtctccgtctcctccgacaaagttaactccgccatccagatcgccatggcccgcttagaagacgagttccgcaacatcctcatctcccacaccaaccccttcgacccctcctccgaagacgaaccctcccaaaccctagactctctttccaccacctcttccccaaaacaccctctcaccaacgaagaaacaacagaagaagaatccgactccaaccataacaccatctctactcctcttttccgtttcaacagtgacggcgctgcttcctctgttcgctcttctgttaactccgttaacagcagcagttatcgttccacaagcagcatccgcgagatcgatc

SEQ ID NO: 13471 - DNA, 377 bp, Glycine max
cccacgcgtccggttgtccatagggggtagtttcgggaaacacacggtggagaagcccgcaccggattccgaagcgcgtgtttcaaattcggatagtcgcgatggaatgcgcgtggtggtggagccgagcgacaagcacgacattcaggcgttaaggagaatggaggcgaaaaagaagacagagcagaagagggagcgcgtgagggaaccgtccgagcccgaattgaaacgggatttcaagagggagaaaacagaatacgggaacggcgttagtggcgcgtggaatgcgacgactacgcctgtttgacctgcaccaattcccgacggtgcagtacttgccgttgaataacgggtctccgttaccgtgctgggtcgga

SEQ ID NO: 13472 - DNA, 295 bp, Glycine max
caacgatggttgaagtcgaagagatagagctggatttggcgttgtccatagggggcagtttcgggaaatacacggtggagaagcccgcaccggattccgaagcgcgtgtttcaaattcggatagtcgcgatggaatgcgcgtggtgatggagccgcgcgagaagcgcgagattcaggcgtttcggagaatggaggcgaggaagaagagggagcgcttgagggaaccgtccgagcccgaatcgcaattacgggattttaagagggagaaaacggaatgcggtaacgggttagtggc

SEQ ID NO: 13473 - DNA, 416 bp, Glycine max
cccacgcgtccgcccacgcgtccggcagaaagcacggtgtgggaaagtgaacaatgggcgagggcatcttgttttaaaaagaataattgatcatgtacttagtcggcatctttctctatccaaggaaaatattgtagttgttgtggatcaacttgatttctctttgcttcacggagctggagatcctatatcatactctggaagtttgcttggggcatttgatgttttatcaaagcgtttgcgtcttattgaagacctccctttgaaggtgtctagtgtacagcctttagactctgctttcaggtttacatcagtcttccctcctgaacctcatcttctagcatatgaaaaaaatgaatctctcaaactgaataagttagttccgtcatgcattcaaccactggaagttatgattc

SEQ ID NO: 13474 - DNA, 490 bp, Glycine max
tctttctctctcactcactttctttctctgtacaacttggaagctttctctctctaaaagcaagcaaggtcctccaccaccacccctccagtctccctctttcacacagagaaatactgtgtgtgagaccagttttcggttcatggattccttttctcttctacaattccaagcatctattcttggttcgaacaagttttgggcttttggtggtaatgtggtgggttgagtgattccttcttgttgcatagctatggctacagattcgtcttttgagggccttgcacttgatccttctaagtgcagtaaattgagtatggaagaaaaaagagaacttgtatatgaagtatctaactggtcgcatggtgcatctgagatgctgcagtcatggagccgtcaagagattttgcaaatattgtgtgcagaaatggggaaagagagaaagtatactgggctgacaaagttgaaaattatagaaaatcttctaaaa

SEQ ID NO: 13475 - DNA, 438 bp, Glycine max
ctagtagtagtgtgtaatacacttctcatttcccttcaatttaacccctttttttctaaggcccgtgcttcttcttttagctaaaagctactcattttcagtttcaaaggagatgctttcacagaggaaaagtagaaagcatccatcgaaagaaaataatatcaaaatatatattctcaaaaattaaaacaccgttttcaggagaataaacataatctatgcgacatcactagttacttgctcttcttccttttgcaaaagaaaaagggtgcccagctcctcaacgttgattcttgcagaatctaattttcaagattttatacaaaactgttatttatgtatctaatcttaatcaactacaactaaacaaccaattgttttgtttttcattagggtttgcagacattcaggtcatattttccacaacattgtttggaa

SEQ ID NO: 13476 - DNA, 642 bp, Glycine max
tcatgctgtgagtactacctcatcaccaatttttagcagcgagcctgtgtatgatgaacaaccatcttctgaggacaaatcttcggagtgtctgcctgcagctccctgggatgctcaatctcctggcatcattccgcccccaccttcaaagtataatcaaagacaacagttttttgagcaacaaggtgtatctcattcaagtagtggatccagttcctcttatgacagcttggtgggacaaactcaaaatctctccctgaattcatccaccccaaccaaacaacagaagccagaagatgcccttttcaaggatcttgttgattttgccaaatccaaaacctcatcatcttccaaacccaataggtcatattgatatgttgtgtttgtttgattgcttatgctggtacagtttataaatgttgtttatcacgttttacttcagaccgctgagacgaccgttttgtggttggttaggacccttcggatatgaactgaccatgcgtgtacttacatatatttcttatattcatgtatattgttcatattgaatttgttgccttatgttttcaataatatcagattcttttgaggaaaaaaaaaaaaaattatatccactataaaaaaaaaaaaaaaatatttttg

SEQ ID NO: 13477 - DNA, 509 bp, Glycine max
cccacgcgtccgggcaattccaaagcttagtgtacatgggatgacttctgcagtcaaagatctgctaaatctggctccattagataaggtgacagtttaagcaatccaaataagtgttcactgagaaatgagaatatcatttttcagataaatgtaccaaggtctaagaagaaaaaaatattcatgtggtatatgtaaataatattagaagttcactactgtatttcccctgctacaggtatactgattgctgagattgaaatttaaatataaattagttatgtatcggatttgaactctctaatctccatataccagttgatatggcatgtctcaatgactaaattttaaagtcaaaatgtaaaaaaataaaaaaattaccattttcttaaaattcccttactttttattttcagtagaaaagtatagaatgtgcatgaaatgagccactttatgaaatatactgaaatataaaatgcaattgttttttaaagtttgttatcctttta

SEQ ID NO: 13478 - DNA, 852 bp, Glycine max
gtctttcttggaggagacaaactctgtctttgattgaaactacaaaatcacgtgtcatagagcttgttgaagctaatctgcaattgtcaaattttgatattattgcttcatatgctttcaaaggagatcaaaatgtaatgcctactacctcaaggattcaggatgacataattggtcctgctgtctccgctccccagaaaattctagaagaatacggaaattggttatattccaaatatacccaacaagggagactatacaaggaatcctttgaaaaacgatggccctccttgagccatgaaagtagtcagataaattttgagaccgaccagttgctaaagaaagtggatcaagctggcagccaggtgattgacaatttcagcagcaatgcagtttctaagtcatttgagcaagaagtacgggaaatggtgtggctggtttatctgcttcgctactgacatctgtgctgcaaaccaccttggacgatcttcttgctcttggcatttgttctgctggcgggtatctagctatatcaacttttccagctcgtaggcagaaggtgatagataaggtgaaaagaaaagcagataccttggcatatgaacttgaagaggccatgaagaaggatttgactgaagccatagaaaatttggatacctttgtgaaagtccttagcaaaccttaccaagatgaagcgcagaatagacttaacaggctagtagagattcaagaagcattgtcaaatgttgagaaaaaacttagaacgctacaaattgacattcaaaatcttaacgtgtcatgaccctggactatccaattacgttattgaaacaaaagaaaaccgtcctttct

SEQ ID NO: 13479 - DNA, 637 bp, Glycine max
  unsure (1)..(637): unsure at all n locations
ggttttccttttgtcgtaaaaacacataaataagcttttgcatttgcaagctccattgtaataacagcgaccaacgcaccaatcttaatccttgtttttctcatttgtcccaaacaaaattaatttttgtggaacactttttcgacacccccgaattcccacctgcagattctccccatcaattttcagcatagtgattgtggaagctcaacagagggattggtactgtagatagggctaggagtccctgaaatgtatatgcctgtggctacctctgccacgctgcgcggcggattgcctactgacagtggggactctgttgtggcattagaccaagttcctcgatggaatgatgctgatcaggccttggggtttgaaacttcgttttcgagttcacacttccccgatcctttagcatcgccctcaagggtagacagtggcgatggcagtgagtcggtgtcaaagtttcctgttgacgatgaagtcaattcgaagatatatttgtggcggnggaatccctggaatcttgaggtggatgcggtcgtaaattctacaaatgagaatatggatgaagcacacagcagcccagggttgcatgatgcagctggacctggtcttgcagaagaatgtgcgacac

SEQ ID NO: 13480 - DNA, 849 bp, Glycine max
acagaagaaggtttgtttggtttagagagaagaaaacgttggtcggagaacattaccggaaagagaatctttgttgattccagaaatgtctagcatcgcttcctcacaccaaagcttcctcaccaacgcccttattccactaacgcacaacccaaagttcaggaccactgttactttcccttcttcactcaaaactgtctcttgcagttccccacaacatgaacagcaacaatctccaaggaagaagaatgagaacaagttagcaaagttggcaatagttgcacttgctgctggtgtgttaacacttgggtcagttcatgatgcatcagccgccaagactggtggtagaatcgggggccaggccttcaagtcagcagctccgcgctcctcaccaagaatcaacaattccagaaccaatatctatattaatcctcgagtggcacctccgctagttggtggctatggctatggttatggtgtgccattttacggtggctggggatggtctccattttcattctttgcaccaggtcccagtgtagctgtaggcgttggaggtggatttgacactattcttctgtttatgtttcttggtgctgccgctgcagttgtgaggagattctttgggtcaagaaatgaagatgatgactactagcggtataaaaaagagtgccaagtcgatgtatagaagaatggaagggtgaccattgtgaccaatttattagtttgatgtattttgagatattatacttgaaaaccaagcaatcttgtgctttctaatgcactggtttacatgcttgttacacaggatgtaatgaagcaatggagatacattatactcgttcaggg

SEQ ID NO: 13481 - DNA, 783 bp, Glycine max
cataatctttgtcgattccagaaatgtgtagcactagcattagcatagcttcctcacaccaaagctttctcaccaacgcccttattccaccaaagttcaggaccaccaggattagtattgtttcttgcagttccccacaacaatctccaaggaagaagaataatgagaacaagttggcaaagttagcaatggttgcagttgctgttggggtgctaacacttgggtcagttcatgatgcatcagctgccaagactggtggtagaattggtggccaggccttcaagtcagcagctccacgctccgcaccaagaatcaacaattccaggaccaacatctatatcaatcctcgagtggcacctccgcttgttggtggctatggctatggttatggtggctggggatggtctccattttcattctttgcaccaggtcccagtgtagctgtaggcgttggaggtggatttgacactattcttctgtttatgtttcttggtgttgctgctgcagttgtgaggagattctttgggtcaagaaatgaagatgatgactactagcagcataaaaggctttttaaagagagtgttattttgatgtatagaagaatggaagagtgaccaattaattactttgatgtattttgagatattatacttgaaaaccaaagcaatcatgtgctttctaatgcactgatttacaatttacatgcttgttatacaggatgtaatgaaacaatagacatacattgtacttgttcagggaagttcccaatatttacactaattt

SEQ ID NO: 13482 - DNA, 586 bp, Glycine max
  unsure (1)..(586): unsure at all n locations
attggttaataattatattactttgggataaaacatttgttacaagtttagttcatcctaaaaataggataaaactatacacaatgaaatcccttatttgaaaagattctgaataagtcgtacattttagtttcactaaaggatgaaaatagaaagggagggaagagagagagagagagagagagagaagattcttccaacaaaacaaaagggagaaccctgtcagtatacacgaccaattaaggtatacaaattccctgttttcttcctctgttcatggccaattaaccttttctctttagtcaatgcagaaaacaacaaaacaacagaaattttttctgcctgcttaacttctttggtacatctgaattcatactttgagttacaatggtgtttagttttttctgcctgcactaaagagaaaaggttaattggccatgaacagaggaagaaaacagggaatttgtatnnnnnnnnnnnnnnnnnnnnnnnnnnnnnnnnnnnnnnnnnnnnnnnnnnnnnnnnnnnnnnnnnnnnnnnnnnnnnnnnnnnnnnnnnnnnnnnnnnnnnnnnnnnnnnnnnnnnn

SEQ ID NO: 13483 - DNA, 506 bp, Glycine max
gaattttataaaaaggcctacatcttctactccatttgaaaacaattgttttgggaggattctcgttttaatactcttaagctaaacaatttgtttccttgttttctaccatgtaccaaacacgaaagtgaaagaattgatggatgggtacaacatttttggcttctcaaaggtaaacttaattaatcaagtagttgtggaattttgtggaaaaaaaaactaggtaagaatttataattaattttacatgtgtaattctcttttttgaaggttattggtttatctatgtatgtattaaaaggggttgaactgtttttacatagttgcttaaatattgaaattttgataaataattatttaatagatcatagatttgacaaaaacaaatatttattattaatttttttttggaaaactagatatataatcacctagaaaaaattaaataaatatcaactcggacaagtaattcatttgttgacttttttaccaaaattggtgtgatg

SEQ ID NO: 13484 - DNA, 768 bp, Glycine max
caaactctttgggaacatggggttatatagaagcagtacgggaaattgagcagcagattcagaaggggacaggcaatgtcaagtttgatgatattgttgttgcttgtggcagtggtggcacaattgctggtctgtcactaggatcgtcattgagtgcattgaaagcaagggtacatgcattctctgtttgtgatgacccagattacttccacaactttgctcaaggcttgcttgatggactcaaggctggcgttagctcaagagatattgtccacattcaaaacgccaagggtcttggctatgcaatgaatacatcggaggagcttaattttgtaaaagaagttgctgccactactggtgttgttcttgacccagtatacagtggtaaggctgcttatgcaatgctgaaagatatgtctgaaaatccaaagaagtgggaaaggagaaagatcctcttcatacatacgggtggcctcctaggattgtatgacaaggtcgatcagttggcttcttttgttgggaattggcaacgaatggatgtcaatgaatctgttcctaggcaggatggtattggaaagatgttctagagaaggaaaatgaaaaaacctgacgttgccagcatctatattttgtactatcttgctctaaataaattttatacttatatttaatagccatatgctcacactgaatcctgcctgaagttaccataagatagtaaagttccaaaaacttaagtgacaaataaatcaagttttatttattttt

SEQ ID NO: 13485 - DNA, 231 bp, Glycine max
tgcaaagatgggtaggcacaagtgctagcccagaagggtgggtattttatcttgaaaaattgcccttgacttggtagtttatacatgattttttaccttctcaaattcattggtggccttgaacctgaattttgcaccaggaaacacactttctaacgcattatttccagcacattttttttattggttgtaattcatgcgtttctaaataatcaatgaaattctttaaat

SEQ ID NO: 13486 - DNA, 568 bp, Glycine max
tttttccgaaatactcttgtgaccaaccaaggtctcttatttctagacataggaggaggagagaagaattgtttctatttcaaagattcagcaaattaaggagcagaaaaaagtcacatattttgttgttgaattcatcaatatggctaagggaatcagaaacctaagttcgtggatggaggttgccccggcaccaataattttcccaacaaagccttctaattcgcctgctttggagaccatcacagaagaagttgctgaggaacacaatgatgaagcttccatgaatacccttctcaagtagtagcaaatgttgcaagatcaattatgaagccacttttgaaggttttatgaagattgaagaggatcaagctgtggtaataatcactagtagtagttattcgcaacaactttgtatagtcaattttgtgaaatatgtagttcgcttttaattttcttcttctgggatgatttaattttaatccatgcatccctgcctttgttttggcaggggttggtttaaaaaatggcaaattgcagtttctcgttgttttgaaaaaaaaaaaaa

SEQ ID NO: 13487 - DNA, 352 bp, Glycine max
gccacacgtacggagagagaccgggtagggtcactggaagagacgaaggatatgaagagggcttctggcagcgcaagggagcaacagagggtgcgacgctaatccgcaccagatgctacctccgacgctcctgctaggaaacaagatgtgaagaaagatgtggctcaggttgttgctgataatgttggagatcataaggagttggctgcaaggcgggctgctctacaggagactcgtgtagagtatgatagagggaacgattttgtgagccattcgaagctccatgccgtgctcaaagacgttctggaatcagatacgaatgtggatgccgacgagattgtcgacattctac

SEQ ID NO: 13488 - DNA, 293 bp, Glycine max
gtgctctctactcttttcttcctaacatgcgattctctcttctcacgcattgtggcgctctcgtaaacagaccgaacaacccgcgacggaggctccgacccgaatcggacgagtcgactccagctccgaacactttcaggtgcttgtgcgccaatcgcatttcgctcccattttcgccgatttttcttcttctcgttttagccattgacgccgaatctgtgagtcctccatttccctttcgattgatgccgcaatcgccctggacgaagctcccaatcgttctctctcttttt

SEQ ID NO: 13489 - DNA, 470 bp, Glycine max
gtagcggtagaggtagtagaagtttgtgtaaagaaagaagaatggaggaggaaggtgacatatacgacggtgttcgagctcagttccctctctcattcgggaagcaatcgaagcctcaaacccctcttgaagccatccacaatgcgacacgtcgttccaattccaatcccaaaacagccaacgaccttccttctgtctcctcctcttccagggattggctcaattccctccgccctcccaaaacccctactcctcctcctccgctgccgccgccagatcacgacgacggcccaatggtgggaccgccgtcgcctccgcccacagctgccgacgaagaagaagacgacgacgacgccgagatgattggcccgcccccgcctccgccgatcgcgtcggagtccgaagacgattcggatcaagatgaggtaggaacccgcttccggattcccctcagcaacgagattgtactc

SEQ ID NO: 13490 - DNA, 625 bp, Glycine max
cccagagcgtcccataaatagctggagcgtatataatatatcatatggtatatgattatctttatatctcattgtggttgatcttcataatatacactgatctctcataaatacatcccaaatttcttctctgaatttttgtaggatggaactggtcttcagttcaagtctgtgatgacagggaagtatctttgtgctgagtccggaggaggaacaatcctagttgcaaattgcacagatgcttcgggttgggaaacatttagattgtggaggataaacgaggatactttcagattgagggtgtttaacaaacagtttgttgggttagatgggattaacgttgttgctgtttccaatatttgcacttattctgagacatttcatatagttaaggaaagtgacaattcaagtcgaattcgaatcaaagcttctaatggatacttcttgcaggctaagacccaggagctggtgactgcagatgtttcagaggtgagagaatgggaagatgatgacccaaccatttttgtgatgacaatagctgcaaggttgcaaggggaattccaagtcacatacggttatgggcccacaaaagcttcccagttatgacgaacattggagtctttta

SEQ ID NO: 13491 - DNA, 469 bp, Glycine max
gaggatgagaaaaagatggaactggaacatgtgaccagcttgtcaagaagagatcatgaaagaccaaatcccttttttcgagtgagagcagttagcttgggtggttggttggttactgaaggttggatcaaaccttctctcttcgatggcattccaaacaaagacttattggatggaactagtcttcggttcaagtctgtgtcaacagggaaatatctatgtgccaagtctggagggggaaatgtcctacttgcgaacggcacaggtgcttcaacggcttgggaaacaattacattgtggaggataaacgaagatactttcagactaagggtgttcaacaaacagtttgtggggttagatgggattaacgttgttgctgtttccgatactcccatccattctgacacgtttcgaatagtaaaagaaagtgacagttcaagtcgtgttcgaatcaaagcacccaatgggc

SEQ ID NO: 13492 - DNA, 500 bp, Glycine max
ttttcgcccttttgtttagattttgactccacttcttccttccctatatgagcctataattcctaagcaaaatcatctcaaggtagagagacaaagatcacaagcatctaataatgatgaccagttatgtcaacctcaaaatatggcttcttaactttgttaccttgtttagtattctttctttgtcccatggaagaagagcaaatgcaaattttcgagtgagagcagttaatctaggtggttggttggttactgaaggttggatgaaaccttctctcttcgatggcattccaaataaagacttcttggatggaactggtcttcagttcaagtccgtgacaacacggaaatatctttgtgctgagtccggtggaggaaccatcatagttgcaaattgcacagatgcttcgggttgggaaacatttacattgtggaggctaaacgaggacactttcagattcagggtgttcaacaaacagtttgttgggttagatgggata

SEQ ID NO: 13493 - DNA, 528 bp, Glycine max
gtgttaccagagcagaagaaacaaaaagaagttgatagctggaaaaatgtagatagagaagctagagagaggagacaagaaagggatgctgatttagaacgggataggtctgataagcgtaccaagggccttgacaaggaatcaaacgatgggtgtgctgatggagaaggggtgatggagaaggagagggaggtctataattatagcagtcagcaccgtaagaggatacaacgatctagggggagccctcaggcgccgaaccgggagcctcgtttcagatcccgtccccaagacaaagacgggtctcaaggtaaagtagaagtttcttctggtggttataaagttggcgaaagcatgcaagaactgataaagttgtggaaggaacatgaatcatctcaatctgaaatggagaaaaatggtgaaagctctaataatggtcccactctggaaattcggataccatctgagcatgtaacggctacaaaccgccaagtcagaggtggccagctttgggggaccgtgtgtaca

SEQ ID NO: 13494 - DNA, 539 bp, Glycine max
  unsure (1)..(539): unsure at all n locations
cccacgcgtccgcccacgcgtccggcctatctgaacaggaattcacatattgaaatagcgaaagaaaaaaaaagggggggtttcggattaaggtgcaaaggaagcagcgatggaatttgccaagcccgcaacgattgggcgcaacaatgagacaccggcgattcatacggcggtgagaatggcatgcgatggccgtgaatggcgatgtcatttttgtggcctcgacagaggagaagaattgtacggtggtgaagacggaataacagaaaggttagtgtggatgggttttgtctgatggatagcggattcgcgatttgattttcgcggtggtagttcagagagagtttgtctatggcgacgtggtgcgccggtggctcactaactacacgactaggtcctcttttttctctcaattctctactttttgctaatggaagagttctcttacaccaacaaaccangttttaccaaattttgttacttttgcgtgatgggtctttgttaacattttgttgctgtgcaagtttcaatcctttttg

SEQ ID NO: 13495 - DNA, 544 bp, Glycine max
atcggtgaatatttcaaagtttgaaacatctgagataaagcttttgaagactgactatcaggagtatctccagctaaaagctgccaaggaatctcaaacatcatctgctataagtggtcataactccactgcctgcatttctcaatctggaatgtggtacgggttggacgattggcgtaggaattgaatctcatggtctttactacctcaagcctaatctttcttgggtttgtagtgctgtcacatctccaaagctccttcatgaacgtttgggacacccacatttatctaaattaaaaataatggttccgagtcttgaaaaaataaaggacctattttgtgagtcatgtcaactaggaaaacatgtccgttcttcttttaggcatgttgaaaagtcgcgttgattccccttttttggttattcactttgatatatggggtcctaatcgtgtttcgtctatgagttatagatattttgttactttcattgatgaattttctcaatgtactagggttttcttaatgaaagaacgatctgaaattt

SEQ ID NO: 13496 - DNA, 488 bp, Glycine max
cggctcgagactctatatatcggcatcgatggataaccaatgatacgtcgtcgttttgccccccagaacctctgaagaagaagaaatggcgagtagcagcagcaacactccgaaggaaagcgttgttgtcgactgcggaaggcgtcgaacctcttgcggctattgcagatcctctcgtcacaatagcatctctcatggcatgtgggcacatagccttactgtggatgactaccaagatcttcttgatcgtggctggagaaggtctggatgttttctttataaaccagagatggaaaggacatgctgcccttcttatacaattcgcttgaaagcaagtgactttgttccttctaaggagcaacttcgtgtatctagacgaatgcaaaggtgggttccatttgacattgcaaggcctctgcttgacagaaaaccttatgttgtcttatcagattcttcaatttacaaaatggagagtaatcctacctaaa

SEQ ID NO: 13497 - DNA, 592 bp, Glycine max
tgtttcacagggagaaaggaagttactagtcaatggatcagaagatctcttatatagtagcaatatagcctttcaaattgcagcatctataaaacgagcacaatcatgtgacaaggttgtcaatgattccaaaccatcaagagtttgtgaaaaggagaatgattcatctcctaaaattattgcagaaaagctagtagcttctttagatccaactgtgaaaaattctggtttgtctatcagggcttgcaatggacatatcaatttttatgcttctagtaagcaagtttccctgaacagaagtgttcaaaatgctccagttcctaaaatttctagaatgaagcatgacagtggaggaaattgtttgattggtcaggtaaaaaggcaaaagcttgagatccgtttaaacagatccagttttgatccagaagaatttgctttgttcagaagatatcagctcaaagtacataatgataaaccacaaaatgtcacagagaactcatatcgtaggtttctggttgatactccattaatactagtttctcccactggtgatagcacagttcctccttgtggttgtggctctttccatcaa

SEQ ID NO: 13498 - DNA, 673 bp, Glycine max
tcgttgcctttctatcactaggcaagtactcggcttttcaagaaataggttgggtgaaagaaaaccaggtttattggcctagtctacaatactattatcttggctactatattcactcttgcagcaaggtgagataccaagctgcatatccgccttcagagcttttatgccctcttcgctatcagtgggttccatttgacattgcaaggcctctgcttgacagaaaaccttatgttgtcttatcagattcttccattttacaaaatggagagtcatccctacctcaaactacggaagatgtaatgagaaggggttttgatgatgttggccaagaagatgcaaatgatgttccaatgcttgatgatgaagaaatggttgagtctgaatcagaatgctctgatgatgaacctgacctagaaaccacttcagatgatgatccagaaattgctgatgtcagcaaggttttgctagggataaagggatctcatgtgaaatacaaggatctgtgggttgtctttgatcctgagcagcggagttacttggagtcacgattgcggagatacaggaaggttgtgggtccagcgctatccgagagaatggtccattcgctcggataatgttaatgttggtacttgaatttaataagatgctactgttaatctccccaggaaaa

SEQ ID NO: 13499 - DNA, 443 bp, Glycine max
atcagaatccaagctttgggcttcattttagggattttacatatatttccttgtttaatgtgtgataatcatgaaaaaatatgcaataaccctgatcagaatccaagctttgggcttcattttagggattttacacaattttttccaaaaacatgccaggccctttaaactcaatcacatgatcttagattggattagggaattgtatactcctttgcttgtggtggagggaggaaagataaaaagaatacgtatgagtttaatgaatgatttgttttatcttgactaatttactcaaaattctttccccatgttgtgttgcttgtcatgagcttttagttcatacatcacgaatgatgtgcatgttgtaattgattaatctttattggtagaagagcgatacagttattagatgaatccaaggaaagtgtaagttaacaacc

SEQ ID NO: 13500 - DNA, 562 bp, Glycine max
  unsure (1)..(562): unsure at all n locations
cttcactcttacgtctatcgctttcacctctctctctctctctctctctctctctctctctctcttcgattttgattttgggtttattttttcccccttttcaattttgttcatggtgttgagcgtgtcacggtaattggcgggaagtaaccgtcaattccgataaccctttggtgaaaagcttgaaacttgaggagtttgaagaaaagggggtttatcgtttcgtcgtggatgatggcgaacccatctggcaaccatcaagagcacacgcacgtggtgtcgtcttctgctccagagacttcaggtgcggctctcgcgatgaagcacaatcctggcatatccctcgattggaccgcagaagaacaagccattctcgaagatggactctccaagtatgcctcagaatccaacatagtacgctatgcaaagatagccctacagctacaccaaaaaacgggtcgtgatgtagcactgcgagtcaggtggatgaataagaaagaaaatagccagagaaggaaggatgatcataatttaactcggnaaagtaaaagataaaagggaa

SEQ ID NO: 13501 - DNA, 453 bp, Glycine max
cccacgcgtccgcaacatcttcaccctcttcaaatgacatgccacgcttgaagaaccttaacaaactcttaaaccatgcttcaaaatcaaacaacaacaacaacaacaactgttgtttgttttgccattgtggtgcttcctcttcagtttctccaacctccacactcttcggcatgtcgcatttctcgccaccagtatcaccatcctcgtcctcttcaccacctccttctccattgaaaccccgaagcgtggtttctcctatttctccaatttcccgttacagtgctgtgaatatgaaccctcatcacggggtggtgagttacaaagacatgttcgctgagttggtgaattctttggagggtttgagtttcaacgagggttctcctgtttctagtgctaaagcaccgaactttccttggcttgatgtttctcttgaggaacagcaacaacaac

SEQ ID NO: 13502 - DNA, 474 bp, Glycine max
atctgggcatgttagtcgattagatatgtcttctctaaaaaacttggatacagttgcatcatgctccatggttggtttccttctaaagcatgaaggtctggcccttccaacactacgaatgtgtttggaagcttttacatggacagacggtgaagctgtgactaaaatttcttcatattgctctgcattggtagttcttgcgatagtaacaaatcacgcagaactcattgaatatgtttctagagatctttttacatccattattaaaggtttagcccttgaatcaaatgcaataatcagtgctgatctagttggcatttgtcgtgaaatatttggttacctttgtgatagacacccagctcccaggcaggttttgatgtctctccccaatattaccactcatgatttagttgcctttgaggaatctttaacgaaaacattcagtctaaaggaacaaaagcagcttacgagaag

SEQ ID NO: 13503 - DNA, 473 bp, Glycine max
gtcgattatccatgttaggagaagagagtaacaacaacaacaacgaccgcggcggcggtcaccggagaacaacacattcccgatcagtttcctggaccgaccggtctccggttacccggaaaccgccgcgtccgcttcagcctctcgccatcaacaaacgcagcgttatggagtggccgagcgccggctgcgacgatctcggcgattggtctcttccaccgaccccaagagggtccaccataacaccagatccgggttcgggtaaagtatttcaattcaagaaagactattacgcgttctacgacaaggaatgttcgagaatcgcggagcacgtgtacctggggagtgacacggtggcgaagagcgtcgagcttctgcggcggcacgggatcacgcacgtgctcaattgcgtcgggttcgtgtgccccgagtttttcaaaaccgacttcgtctacaagaccctctggctgcgt

SEQ ID NO: 13504 - DNA, 500 bp, Glycine max
tgcatttgtgggatctgatgacatgcttttttcatggaagaggaagagtagtgattcttcgcctgttaaaagttctagggatgagaataatgctattgcggtaagatccagaaactcttctccaactacagtctcgaattatgggtatactgatggagagcttgtcaaactagaaaaggatgaaaaggttagcattgtaagggaagatgatataggtgcatcactggaggatgaagaggcagctgctgtgcaagagcaggtaatgcaaataaaggctcatgaggaggattttgaaaccttcaatctaaagattgtgcacaggaaaaacagaactggctttgaggaggacaagaatttccatgttgttttaaattctgtactagctgggcgctatcatgtcaccgagtatctgggatcagctgcatttagcaaagctatacaagctcacgacctgcacacaggcatggatgtttgtgttaaaattataaagaacaacaaag

SEQ ID NO: 13505 - DNA, 481 bp, Glycine max
aattaaccaaaacgtcacacctctttcaacaaccctgccgaatgcagagccgtatcctctgcttctcaacgcgtcgtttaccactccatcagcgtcgttttctcagccacttcattcccgaccaccaatacgacccgccgttctccccttccccaaaaccctactacaaatcaaagaagaaccacgcggagaagaagaaaaagaacaattccgaaaacggtgatccgaacaaaaacggagccccgaaactccctttcaagtcgaaccttccgttcgacttcagatactcttattcggagtccgacccttccgttgggcccatcagcttccgcgaatcgcccaagttctccccctttgggccgggccggatcgaccggaaatggaccggtgtttccgctccggttcagggtgaaccggaccgggagagggtcgaggaggagcggaaccggattctcggagaaccgcttagtgaggtggaggt

SEQ ID NO: 13506 - DNA, 488 bp, Glycine max
ctcgagccgctttaagctttgctactcaacattagttgggaattgggtctggctcagagagaaataaagaaaccgagaaaagacagcgatgcaaccaacgctccctctcctccttgtacgctttcacacacatccctaccttcttcatcctcgttcgacaatcttttgaacaaacccttctttcttctcatcatcgccttttcttttccaccgccactttttttttttttcaattcgcttcatttctggcaaactgtctctgtcacacacccaataattgaactcaccgaaccaaacccctctctctcaatcaccgaacagcaatttcttcactctactcctttcaagtttagggcttttcccacgtgctgccccaagaacactgatttccagggtttgttcttcccccacccaacccttttcgtttttctctatttctaatcatgggtatgcgctgaagtgtggaaatttttaaattttattttctc

SEQ ID NO: 13507 - DNA, 347 bp, Glycine max
  unsure (1)..(347): unsure at all n locations
gggatgttgaccatgacgaagtgttgccagagctcattaagttatcattgtgctgcaccctcccagatcctgaacatcgaccaaatatgaatgaggtgttatcttcccttgtgaagcttcagacaacactgtcttgataattgctaaacacaaccgatcactccttggagctgctttttctaaagaagaaatatcaaatgcttcccaattgcctcattactattgtctttaacaacagcaaagcctcattgtatccaatatccatgctagtgttccaattaatgtacggaattatcagctttccttcacagccatttaatataaaattgattgtccattgttgcnna

SEQ ID NO: 13508 - DNA, 421 bp, Glycine max
tgatgctgccagggatgaaaatcaaaagaagtctgtaaaagagcgaccaaaatcctcttgtgaattcgaattcaaaaggattgcagtcaagcaggagtatgcaaaattctgtcccaaagcaagtgaattcagacgccacagattctgttcatgtttcatcttctaaacctttgatacatcagactgcaagtatattaggctctagtgagtctaatgcatcattgcaccatcagaaggttttacaagtgcagaataagatttcatcttcagcgccacagaaagttgaaaaacttaaccaaacaaacatccacactttctccaagttgaatcaaagtcatgtatcatcagtgaatccttctccaatatcgaattcttcaatgctgagtgatgaagagcttgctcttctattggatcaagaact

SEQ ID NO: 13509 - DNA, 415 bp, Glycine max
tccacgcgtccgtgagctgcttccagaaaaatgttaccatggccatgtgtttagaaagcgagcatgccccattgattccttaagttggagattaagtttgttggagaaagttttgaggagttttcttgaccataagatacttaaagatcagctttttggccttcttaaagcaaatattaaagcatcagctgttgtaaagttccccttagaattagaaagggacataagtaataatgccactcttaatcgtacgattcctgattggagaacaaggcccggttttgaaaggttctggtttgagatattggccagagttgaggaaaacaagctcaagcctcttttaatcaaggaagtaagaccttttatcgaatcagttttaatttcctgggcgaaattgatgtccaatatgtcatac

SEQ ID NO: 13510 - DNA, 445 bp, Glycine max
gaagctcttgtgttgtactcttgctgcatcttgagtctttaaagaagtaaaccagcggcgcaccacatccccattcaaacaattctctttctctcttccccactcaacactccttataatcgattacaactaaagaaaaaaaaggggtttttcaatttgaatcctttccattcccacaccaaccaaccaagaaaccataaggcacattgttattatgaagaaattgaagaactactacatgcacctgcggcaccaccaccaccaccaccacgccgcggcggagcgcaagtgggtgttcccactcgccattggctccctcctctccctcttcctcctcttcctcgccaccctcacctccccggagggaacccccatcctccccttctaccgctccatcaccgccgcctcctactccgtcttcgtcgaatccaagctccgcaccctc

SEQ ID NO: 13511 - DNA, 441 bp, Glycine max
cgaaacctaaaatttctgagattaaaaaaaaaaaagggaattgtattttcttcttcttagatgtattctatttttatatattttttaatttagcttaattttgcagcttggaaagggaacgaacgacaaacttaacaacaaaagagcgccggttgggaacagggtgctggaacagcacaagacttttcaataatccatttgtgttagggtttggtctctctcatctcatctagaccaccgcgctcagaagacacacgcacctggatagctattgcgacacgccgcagcatcattcatagtcgattccccacctccggcgaccctcttcggtggaggcattgtttcgtgactagggttagagggagcttttgctttggatctcatacggggtctgctggagcaaatgagattatgattttgtagttttgctcagtgattgtg

SEQ ID NO: 13512 - DNA, 485 bp, Glycine max
acccttccgttttgttgggtgcaatgtgccaatgtttggtaggtcgaaattatgtcatttttaaacctcaattgctaatttctgctgggtgagttttattttattgtatttagcctacaatcttgatttaggctagtattcttattataaagtagtgatcttggaagatcttaacatatttggttcatgcctctcatggagaagaacctctttttggtttctcaagatgatatagtcttgaagggatctagcacaccctcttttatcaaaacccctttggcttcttttgcactttcacttacacaaacacaattatatcacattcaaatgccacactcttggtgattatgcttgaatcaacctggtggtggaaaccattttaaaatttattttcaagaggcaaatatcttaaaatgaatatgattgaaaatataaaatgcattgttttaatttaaatggaactagttttaatatattttaatggc

SEQ ID NO: 13513 - DNA, 366 bp, Glycine max
cagacattccttcggttcactcttgctccttttcctcgtgttgttgcagaagcgattccaaatgggcttgctagaagaaaaccctaatcattccaagaccatcctgatccgcgaggtctgggcatccaacctcgaatccgaattccagctgattcgtcaagtcatcgatgattaccctttcatttccatggacaccgaattccccggcgtcgttttccgtccccacactgtagaccccacaaaaccctacctcccaccttccgtccactaccgctttctcaagtccaacgttgatgcacttaaacctgatccagatcgggctcactctctctgtcaacgaattccactcgacgcaccgtattggat

SEQ ID NO: 13514 - DNA, 343 bp, Glycine max
cccacgtttccctgaaccagcaccatgccctcgtcgtcctctctccgtcgccgtcttcaccagctatcgccgtcgatcaccccaccgcaacggagcatggctgttggagaccacaccacgccgcttctggattccttcaaaaggggggtttgggagtgacgaaccagaaggagaaagagttgttgttgggggataggggtggtggggacgaggagggtttgggtctgaatttggttccttccaaatcaattctctcaacaacaacccaatgacattccaaaaccgttgtagtgcccacaggctagcgaaaccctatcccatactggcgcataagaagagaccc

SEQ ID NO: 13515 - DNA, 886 bp, Glycine max
gaggaggaaaatgacaataatgaaaaggactcatcttccacagatgagcgatgtccagaactcaggcagagaaggcgaaagaggcggaccagaggtcgtccttctcagccctcatcatcgacggcaagtcctgatggtggatgcatagaaagtgacatggacataagaatttcttctagactggtgtcaaaacctcaaaaactaacttggggaaggggtggttttaggagtcacacacggcatggcagtggcaatggtagcaatagcaaaagttcccgcagtagtcgcttggctaagttagttgattatctccatagcttgaatgaaaacactgatgagttagatgtccatctcattcttttgtctttagacaaacaaattacaccaagcttgcagcagccacacctttgctgtcggccaacattgtctgtgaagcatctttgtgaatatgttgctcatcagacacctttgctggttgaagaagttgagatattggcagttaaaggatgctgcagtacagtttgtgacaagtcatttgatgagacttcatcctctgatgagctaactacgctggttatagatcctagcaaagatgaactggaaactctgcaagggcatgaatctctggcagggattaaatctaaatgcatatctaaaagggagcatttgattctggccggcacgaggaaggaatgaacattatagacagttttgagatttatgaatgccagggcttattctgtacgtacataggaaaattttcgactacaaaactatatatagttaaataataatatgaacctcccgaaagattatatagacagttttgatatttattgatgtcaggatttattctgtacgcacatagggataatatttcaactag

SEQ ID NO: 13516 - DNA, 539 bp, Glycine max
gtgtctaagtgctaatggagtttgttggtcatactgctattgtttattcagttgattcacatgcatcaggacttattgtcagtggtagtgaagaccgttttgccaaagtttggaaagatggagtttgtgttcagagcatatagcatcctggttgcgtttgggatgcaaaatttatggaaaatggtgatattgtgacagcatgttcagatggagtagtacgcatttggaccatagatcaggataatgttgctgaccagctagagcttgagttatacacttcgctactttctgaatacaaatctagtagaaagagggttggaggattgaaactggaagagttaccaggcttggaagcactgaagatcccaggaactactgatggccagacaaaagtagtcagagagggggataatggggtggcatatggatggaacatggaagaacaaatgtgggataaaattggtgaagtaattgatggaccagaggaatcaaatcgtcaattttttgacggtattcaggatgattatgtagttgatgtg

SEQ ID NO: 13517 - DNA, 411 bp, Glycine max
gagacactaactcctctgtgaaatctaaagcgtaatattattaaaacaatggccacacgccaagcttcccttctctccaaaccttccctcccattcccgttcctgtctccgaaccactccccattctccctctccttcccccccacgcgccgcgtcccttccacgctcctatgttgcaccttccgccccgaacccaacccctctgaactggaacccgaacccggttcagccaacaccgaagaagaaccgggtataaattcacccgaagaagaaaaagaaggtgcagcttcggtttcagatttgggtttggaagaagaaggcgccgaggctctcgatagtggcgctgattcggagaagattgcgaatggaaggcggctctcgatagtggcgttctttgtggggctgtgggtg

SEQ ID NO: 13518 - DNA, 458 bp, Glycine max
aggagcctatgaaaaaaaaagaagctagcattgctgcaacagtgctgaaatggccagtggtgatcaagttacttttgttctttttgatgggcttcgaaagtcacaacaagggaaagacaaaagcggtggatgggtcaaatttttacccttttttttatttggtgctttagggtaaaaataaacaaagcaatttggaaggggctggaccatatttgcagagggattacggctccttccaattgttgaatcacagtggaatcattttgggggaatacttgtcagaagtaacatctgattccaacctgtccacccgcattactttactacaataaataataatgcaaggaattttcactatctcgttttacatttgtggacaatgatgtgttctgtagccttactagtattttttagccttctccagttttactaatttaagcccctttgttcttgataaa

SEQ ID NO: 13519 - DNA, 1096 bp, Glycine max
caatatcttagttttggtggagagaagagaaattgaaggaaacatacttatcatgacatgaactagatatgacttgccctcttcaactccaccgattcagccctgcaacagacacatccaccgccatcgcaaacggcgtcaactgtccaaagccagcacaaacggcgccgtcaacgcgccgtttattggcgaaagtaggccttagcgtgacggagatggttgctcggcaccacgctcacgcggtggggcccaaccagtgctgctccgtcgtgatccaggcgatcgacgcgccggtctccgccgtctggccggtggtgcggcgcttcgacaacccgcaggcctacaagcacttcgtgaagagctgccacgtggtcgccgcagcaggcggcggcgaggacggcattcgcgtcggcgcgctccgggaggtacgcgtggtctccgggctccccgccgtgtcgagcaccgagcggctcgagatcctcgacgacgagcgccacgtcatgagcttcagcgtcgtcggcggcgaccaccgcctaaggaactaccgctccgtcacgacgctccacggcgacggcaacggagggacagttgtaatcgagtcgtacgtggttgacgtaccgcccggtaacactaaagaagagacttgcgttttcgttgacacaatcgtacggtgcaatttgcagtccctggctcagatcgctgaaacctgaaaatatggcaagccaccaacactcaacattttattttctccgttagtttttttggttattgccttgggtgtttttttgtttcgaatacgggttcgggttcgaaattgatgattacagacaccattaggatttggttttggaggacttatcaaggtcagacgacaatggttgaaatgaagaatgtgacatataatatatggtatatgattcatgtatatatacatataatatatgtagttctttctatctacctctcttttattttttccattctaatagctgttgagtctgatcgaatctattgttcttgtatccgtggtcaatttatcattaattcatcttgtttgtgactctgtaatgtagtagagaatgtttctatttgaatt

SEQ ID NO: 13520 - DNA, 412 bp, Glycine max
  unsure (1)..(412): unsure at all n locations
ataaaataacaaaaccaatatcttaattataataataataataatnaaatatattattgctatgattatcacatgaactagaaatgacttctcttcaattccaccgattcaacccagcaaccgatacatccaccgccatcgcaaactgcgtcaactgtccgaagccaccgtcaacgctccgtttattggcgaaagtaggccttagcgtgccggagacggttgctcggcaccacgcgcacccgggggggcccaaccagtgctgctccgtcgtgatccaggcgatcgacgcgccggtctccgccgtgtggccggtggtgcggcgcttcgacaacccgcaggcctacaagcacttcgtaaagagcgaccaccgcctcaggaactaccggtccgtcaccacgctccacggcgacgg

SEQ ID NO: 13521 - DNA, 524 bp, Glycine max
gccaatggccggtgtatgatgctagtgttggccactctgaggagcgagctagaatgctttgttctggtaggcaaaggacccatgaggagaacaggcttaggaataagatgatacaggacaagccaactacttcagatgattccaaggaggttccacggtgggttgaaatgccagtaatagcaaaagcagatgttcagggaactgttcaagctgtcactgatgcattaaaaactttaaatagtgctcaggttttcgtaaatgttgtccatgttggtgctgggcctatttctcaatctgatgtggacttggcacaagcttgtggtgcttgcatagttggattcaatgtcaaaagtccacctactgctcttagtcaggcagcagctcgtgctggtatcaagataattttgcaccgtgtaatttaccacctcttggaagacataggaaatttgataatagagagggcccctgggacttctgaaacgcacgttgctgggcaagcagaagtgctgaatatctttgaaatc

SEQ ID NO: 13522 - DNA, 383 bp, Glycine max
tcgctgcaaaccctaaaaaccaaagctccgttttccacgcagcgcgccacaaaccggttggtgaatcgaaattcgaagagctaaacgaatggggaaaagaaaagagcgtcgtcgcctcgccgctatcagcaacgccggtcgcagagtcaaactcgatcttttcgcggaaccctctggagagttgggtggctccactctacaaggtgatgctggaggagatactgattctcaacatcgtgatgggttacccaattcaccctcttcttcaggtcaacaaccacagaatcccctgctgttacttgggcaatatagtgatgatgaaggggatgatggatcaagcaaagggcttaatgatgcaaatgtgcaaagccccatgcttaatg

SEQ ID NO: 13523 - DNA, 463 bp, Glycine max
taggtttgtacagcttttggtttggggcgaaagttcagccttttcagatttgcatcaatttcaacagagaacaacgtgatttgtggattgctgtaaagtgcattatttggccattagctaatggacaagggggtgcctcctagcctcttcgtcaatgatggttctttcatggagaggttcaagcaacttcaacaagagcaggataaagggaagaatgtcaaattggaggattctaaaccaattaaggttatttcagggtctttgtctcccaatccttcctttaccaaaacgcctgtggacttgaaggttaatgacacaaggaaaacatcccagggtggttccagtggcaagctagctttcagtttaaaacaaaagtcaaagctggtgccaccccctggttagtccagtgctgatgaggatgaagaagtaactgaagctgggtatgtttcaaacgatgcaccac

SEQ ID NO: 13524 - DNA, 278 bp, Glycine max
ctaggtttgtacagcgtttgctttgggggcgaaaaattcagccttttccgatttgcaccaaattcaacagagaacaacaccatttggtcagtcttctatgcttctgcctccaatctagggtttccttttcctgaattgttattctcttcaattgatgcggttcgatttgaaaggattgagggggttgtttgttggaattggactcaaaattagggtttgtgttttaggatcgtctcgtgtgaatcgattctgtaggcggagttgttggctttttttat

SEQ ID NO: 13525 - DNA, 644 bp, Glycine max
gacacctatcaatttcgtaggtttgtacatcttttggtttggggcgaaagttcagccgtgtcagatttgcatcaatttcaacagagaacaaccgtgatttgtggattgctgtaaagtgcattatttggccattagctaatggacaagggggtgcctcctagcctcttcgtcaatgatggttctttcatggagaggttcaagcaacttcaacaagagcaggataaagggaagaatgtcaaattggaggattctaaaccaattaagggtggttccagtggaaagctagctttcagtttaaaacaaaagtcaaagctggtgccaccccctgttaagttgagtgctgatgaggatgaagaagaaacagaagctgggtatgtttcaaacgatgcaccactaaaacggcaaaagttaggccaggaggaaggcattgaccaatcatcaagacaacttgatgttgcacctaattactacttaaactttctagtttctactgatagtgttggctaatgattgtcattcctgctgattgcaacttttatgttggaatagtcaagtagtagcttacattaattcttttatgttcagcatgtccattctgccatgcctttatatgtcatgctaatttttcattacgatcttatttt

SEQ ID NO: 13526 - DNA, 389 bp, Glycine max
tggttttctctccccaaaaacaaacagaacaaccaagacaggttttgttgctcttcgagagggttgaagaggatgttctgaaaggaccgctttatctgaaaaaagatttgggtttgcagaaagtcatctactgaggagagacgagagagaaagaggtgtgatagagaaagagtgttgtcttttgtttgtttgtaactttgcattgaattccattcattttttgtctctttctctctctctctctcttgtgttactcgctacaagctattcgactataacaccgactccctcttttaccgtggaagaaggaaaatgaatatctcaagtggaagaaggcacagaaggcggtttcgccattgatgagagctagctactttaagagaggacca

SEQ ID NO: 13527 - DNA, 422 bp, Glycine max
ggaatcgaatcgatattggtgttttgttccgttctaagcatggggaaggaaggagatctatgggacgattcagtactcatcaatgccttcgaccaagctatttctacttacaacaaaatgcatagcagcggcaaacacaaagacgccgcctcggttcaagaggaggcgaagacactgatcggagaaaatggctccaattttgacactacaaggggtgctgatacgaatattccagctactgatgcgcttgattcaggtgagactggtaatttgtcgaagttggaagaaaatcatgacacagagtcacaggtggatcatctggattcaacaagtggtcaagacatccagaatgcacagaacggttatgcatatgctcaagctgtagatggttataatcaattagttgtgcagtactatgaact

SEQ ID NO: 13528 - DNA, 402 bp, Glycine max
attgtttacttaacttagcggtggcgttgagagttgagagtgaggggtttaggtttaaagttgaagaaggagcgagcatggggaaggaaggagatctatgggacgattcatctctcatcaatgccttcgaccaagctatttctactttcaacgttctcttcataaccctatttttcactcttcaaattcggtcttaatctgagaatttcgttattaactaatttacagaaaatgcatagcagcggcaaacacaaaggcgccgccacggctcgagaggcggacacaatcatcggagaaaatggctccaatgttgacactacaagggatgctgatacgaatattccagctactgatgtgcctgattcaggtgaaactggtaatttgtcaaagttggaagaaaat

SEQ ID NO: 13529 - DNA, 477 bp, Glycine max
ttgtcgcgtgggcttcctcatcgttctcgtctttatctgatacccaaacctcttcttctttttcccaagatgggagttcaacggcatgaagcgttttctgaagacaacgagcctgctgaaaatgcttgtgctagtagttccttgaaccaaggtgctcttgccagtgagtctgccaacagcgatccaagtgtaaatactgaaagtcgtgaagttaatgaaccgggtgacaattcttataagaaaagtagtacaccgcatatctatagacaagatgtcgtgaaaaataatatcagtggcatgattgggattgtgacagaagttgctggtgattctgattcggattcagatagcagcatcactgatgacgaaaatgatagtgaggatgaggatggtgatgatgaggaaggcgatggcattaataatgctagtagaaattctgaaagtaatggtgctgctgggcattgtaaaaccgatgct

SEQ ID NO: 13530 - DNA, 394 bp, Glycine max
ctggagggctggtgcgacgtggagcacggtggggacggctggagggtggaggagcggccgggagactgtggggtggaattcatccatgatgagagcgtcaagaagtacttcgcctcctccttcgagtggtgtcgcaaagcgcagataattgatctgcaggctgagggctactgggaggagctactggacaccactcagccggcgatcgtggtgaaggactggtactctggtcgcagagacgccggctgcctgtacgagctcaccgtgaagctgctgtcggagcacgaggacgtgctggccgagttcaacagcgggcaggtggcagtgccggcggacagcgacgacggtggctggactgagatctcccacaccttcaccgactatgggcccggcg

SEQ ID NO: 13531 - DNA, 236 bp, Glycine max
tcggccacgccttcggcccacccgtccgggggaatccatgcctatcctgcccaggttgatccatcatgttccaacatatggattaacaatgtagtcctttacttgtcctctttctatctttgaacatgagagcaagattttgtgggatgtccatgttacctttaggaattggaattctcttggtacggacatgtatttattttggattaagagtaagaggctacatatcaagtgct

SEQ ID NO: 13532 - DNA, 404 bp, Glycine max
cgaaaaaataaaaaagaaaaaagacacgcagcgcacaagttaaaaccttctcaaactctttcgtcatcagcgtcaaaacgcgtccattggatccatcaacgcacgccaaaaatctcgtctttttgcgtttccgttggtgggttttcgttttcctcagtgttccttcagcgatcttcttctgggtctgtgaaaagctcggtgctttgtttcggaagcaccgacattggggaactgtgtgatggtgaaagcggagattgagaagaagggttgcagcacaagacaatggctttggctggtgatggctctcgtcgctgtttttgttgccatggccatgtctttcaaaacctctccaaaagctctgtttggagccattgatagagcttgtccgtgtgctcggggcacac

SEQ ID NO: 13533 - DNA, 625 bp, Glycine max
cccacgcgtccgaaattttttagacttatttctattctgtccctctcctttcaaatttattactttggaggtcaaccaaaacaaacagtgtaagactacagcgaatgcttcaagagttgaatctggattaaaagcattgaccagaccacccactagcggcgaattgtgtagcaaggaaagaagcagaggctgaggaaacaatgaagatattggtgaccggcgcatccggtttcctcggtggaaaactctgcgacgccctcgtccggcaaggttactctgtcagggttctcgtaagatccaccagcgatatctccgccctttctccgcacatcgaaatcttctacggcgacatcaccgactacgcctctctcctcgccgcctgcttctcctgcactctcgtcttccaccttgccgccctcgtcgaaccctggcttcctgatccttccaaattcttctccgtcaacgtgggaggattgaaaaacgtgttggcggcggtgtaggagactcgcacagtggaaaaactcctgtatacgtcgtcgtttttcgctctcggaccaactgatggaatcgtcgccgacgagaatcaagtccatcacgagaaatatttctgtacggaatatgagaa

SEQ ID NO: 13534 - DNA, 486 bp, Glycine max
cgcgtccgctcctgtctttccaagaataagcaccgctcaaacacataccatttttgaaaccccttcgtctcagctttctcttctgcttccattctgcatccacctctttccctcttcctctgtattcctctgtctctcttaaaggccctcaccaaatctaaagaaggattttctcaccttcctcgctattaatccttcttttagtatttaggtgcgggcacgagttgtttgggtttggaataaacactcccaaccagaataccatgtcaatataagagtgtggagaagaggggaaaatagaagagaaggaaaacccagaaatggcaaccacggataatcacgtgaaagagtttacgatcgacgacgagtcatcgccgagggcgattctggaaacccctgtttcgggaacagagtccgacaacagtggaagcagcgaaagcttcagttccgtctcgccggagaagtcgccggcggtgaccggaaaag

SEQ ID NO: 13535 - DNA, 473 bp, Glycine max
  unsure (1)..(473): unsure at all n locations
acgcgtccggtgctcgcacattgggggaaataagtacgctggaaatgtcattatatttggatcaagtgtcaagtatcaacagagaagtcactgggcacttgtatggatatgttactccagatgatgtacctttattgtttcaccagcatatcattaaaggggagatttttgactcactatggaggtaatttttatctatgatattttcattagtattgaattttaaagggttttttctttttttctttttagttccatccttcaaaagacactagcaaggattgctctcgtgctggtcttttggagcagaagctgggtctgtggggttagaagttaattttatacaatgttttgtcagagtagaccaacaaaggtttgtgcctgaggtggaaattttagctatgttcataaagtttgttgtcatttccaatatttcatattgcttcatcgnacatataattattattctcaat

SEQ ID NO: 13536 - DNA, 630 bp, Glycine max
  unsure (1)..(630): unsure at all n locations
gctctctcttggttcagagctccttctttgttctttctccttcgctggttgatatcagtgtttgaagaaattccccattgacgaagctcatgggcaagaaaggaggggccaaaaaattggagtctgcgtctcacactccaatatcattgagagaagaagccaccggaaaaatacaaaccaaggcagcctctaacaccaagtccaaattgagatttgaacacttgaaaaacctagcagtgtgggccaccaccataccatctttgggtgccttctatggtcaccaattcgctacctttggagaggccaccggaataccacctgatccttctttaataacttgccaaagatgtgaaactattcttcaacctggatttaattcaactgtacgaattgagaagaatcaatcaaagctcaggcataggcacaagaagtctggtaacatcactcaaaacaaggtagtgtacaagtgccatttttgtttgcatcagaatctgaagagagggactcctaagggacacataaaaggaatctgtccatcaaaagataaatcatcgttagagtgcacacctccatcaaaatccatcacaagtggatctactaaattaaatnaaggcattttaagcaaagatg

SEQ ID NO: 13537 - DNA, 340 bp, Glycine max
ctctccctgccgccgctgagacacgaagagtaactgcctcgcaacgccgcccttgccatcgcgacagagtgtcgtacacagcggactccctcgcgacgccatcctcactgtgccgtttcaggtgtttgacgaaattccccataaacgaagctcatgggcaagaaaggaggggccaaaaaattagagtctgtgtctcacactccaatatcattgagggaagaagccaccggaaaaatacaaaccaaggcagcctcaaacaccaagtccaaattgagatttgagcacttgaaaaacctagcagtgtgggccaccgccataccatctttgggtgccttctatg

SEQ ID NO: 13538 - DNA, 495 bp, Glycine max
aagaacttcatgccaactatggttggatcttggctccctggattttaaatcaagggttggattggctttaagtaaatttggagttttcaattgtggtgctcgactttagccgtgcaatttagactatgtgtcgggatgttgacgttttcttttcgttctctttcttgtaggctcattgtgaatgccttgtcttgcagctgaagtgtgaaggtatcctactagcatttcaaaattatatattgaagctgggaacaagtatgatgattcctttaataattgttaatggcatgggaagaagtgatcgatgtgtgctgaatttctgctcgtgtaaaacaattaattcttgcttttgaaacacatttttttttcctgatatttactttgttactggtttggtttggttgctcgatcatatataaccagggtgataaggcatggtaatacaaactctcttcttgcagctgatattcacacacttctccaaacactttattg

SEQ ID NO: 13539 - DNA, 240 bp, Glycine max
ctcttggaatagtatgagattaaaaagttgaccaatagtatatgaaagcttcccactcaattcattgttggaaaggtccaaatagtataatgaggcaaatttagtgaccttgaacataggaattggtccactcaaatggtttaaacttagatccaaaacatcaagatggggcaaatggtcaaatgataatggcccaacaatgttggtattttgaagtctcaatgtctttaagtatgaaag

SEQ ID NO: 13540 - DNA, 822 bp, Glycine max
gcattgcagtagtacattgatattgtgaccgagatctatcctacttggcttgatggttcatctttgaggaataaaagcggcgacagtggtggacatggttcagaggctaagggaccaatgggccccgtattcagcacttttgtttatgaagaggaatatggcagtgactcacaaatggaagccattcatggatttgccagggaaggagatatggctaatctgctcaagtgcatcgaaaatggtgtttcaatgaatttacagggacaatgatggacaaactcccttgcattatgctgttacatgtgagagagaagccatagccgagtatttattgaagcataatgcagacatatattcaaaagataatgatgggagttcaccacgtgacatctgtgagtcaaactggccctgtatgcagcatgtggggggagaagtaaattgattgattgattgtttgcttgttggctgcttctggccaatacaaccttttacccaaatccctataggatgttcgtgtctatataacttgattttttttgtccttactcatgatggtgtatacacccttttcagtctagtgtacgctgtacgcctatgcaccgcttaggtaatggttagttaattaggttgtattctgttctattatggtttcctctgctcagctctttaaatcaggctctcatttcttatatatttcatggataaagatatacacggcaactagaaatagtaacagggaaagggaatcttaaacgatattctttcctcggaaaaccttctacccttctattgaaggcgatatagattttacagggttatttt

SEQ ID NO: 13541 - DNA, 451 bp, Glycine max
ccctcctactcgtccgagaagtacattgatattgtgactgatacatatcctacttggcttgatggttcgtctttggtgagccaaaaagctgtttcttcttgtgccctcgatggatgaataactactttcatcaaaaggaggaaaaattatttatagaatgaaagtaaggaataaaagtggggacagtggtggccatggttcagaggctaagggacctatgggccccgtattcaccacttttgtttatgaagaggaatatggcagtgactcacaaatggaagccattcatggatttgccagggaaggagatatggctaatctgctcaagtgtattgaaaatggtgtttcaatgaatttaaaggacagtgagggccggacaccattacactgggctgtggatcgtggccaccttaatgtcacagagttgcttgttggcaagaatgctgatgtg

SEQ ID NO: 13542 - DNA, 511 bp, Glycine max
tcggtattctatgaaccggttattccgagagactggtccgtgggcgtgggtcgttcccgaaaccgacccgtcttctcgctcttgtctctctctcctatctcctgcatctctgcaagttcctcgctcgcttcctactctcccaaatactacccgccatggacaacctcttctctgattacttctccgacgactccgattcctccccctaccgtccccaccgccgcttcctccaagaccaagaccaccaccgcgaccgcgatttcgccgccctcgagcgcactctacctcctcccctacacctggtggctggaagcggagaacgaaggtgatcgaggagacgcactgctttatacggcgtcatgcaattccgattccgactccgagattttgcttcatctcaggaaggaagaggaaccacacaacaacattggggtttctgcccgtcagtatgccttggttcccgaggactttggttgcgtgctctcaagaggtataaatgatttaatatgca

SEQ ID NO: 13543 - DNA, 631 bp, Glycine max
gtacaatgcacgaagcaaagggcctattgcatgacatctagaagcagagtatagagtcagtcacggtggcatgatgcaaaggtacaatgtacgaagcaaagggcctttacaaagaggctataaaagcttttcgcgatgctttgagcattgatcccggacatgttcctagcttgatctctactgctgtggttcttagacggtgcagtaatcaatcaaatcctgctatcagaagctttctgatggatgcactacggcatgacagatttaatgcttctgcttggtataatcttggcatttttaacaaggatgagggtacaattctagaagctgcagactgttttgagacagcaaactttcttgaagaatcggcaccagttgaacctttcagatgactgactctgcaagcatttttgtcatttaatctgatgatgatgatgatgatatatatatatataacactttccctaacactctttgtgacgcactatctcctgttaggtaaaggtccggtgagtttccgtttctatttggtgggtcttattcacaaattagtaggatccacctaaattgttagcgaatgtgttccctacactcattgttcaataagaaaagcatgcttcatgtttggttt

SEQ ID NO: 13544 - DNA, 497 bp, Glycine max
acggcatgacagatttaatgcttctgcttggtataatcttggtatttttcacaaggatgagggtacaattctagaagctgcagaatgttttgagacagcaaactctcttgaagaatccgctccggttgaacccttcagatgactgactctgcaagcatttttgttattcaatctgacgcttttgatgatgatgatatatatatatatatatatatatatatatattcatgtatcaacaacactttccctaacactctttgtgacatacatctcctgttagttaaaagtccggtgagtttcattttctatttggtgggtcttgttcacaaattagtaggatccacctaaattttaagcaatagaagaatgtgttaaaaaagagtgttagtgaatgtgttactgacactcattgttcatgtataatttccatgtgtacctgacgacggtataaggtcaataagaaaagcatgcttcatgatttggtttttcttgtttgt

SEQ ID NO: 13545 - DNA, 615 bp, Glycine max
cggacgcgtgggggatgaatgggttgcctcaagggtttttcacaagaaccacagaggtcgaaaagtcctcaactcctggcctttggaggataaactctattggggatgatcttcttgattattcttcactaccacctctcatggatcctccttatggcaacaccaacaccaccaacaacactaacccactttcttcatcaactaaatcacaatcagagggctattatcttcccagtttctccatcaacaaccaccagcagcagcttctcatcaagccagaagatcaccaccaccacagaagctataatgagattcccacaattaactacacctcaaaccaagccaatctcagcaacaacgttaacgcaatgggcaacaacactctctcacagcccttaaacatgttctcagctgattactatgtgcaccaaaacaggatcaaaagctccatcatgccaagtgttgcaggctcaggttttgttagcgacaacaataaccatgatgaagctatcctaagagcatttgcagccaagaacaacgagcacatacagtgcaagatggagcaattttcttctaaccactcacaagacacgggcttgagcaacgacagaaaca

SEQ ID NO: 13546 - DNA, 702 bp, Glycine max
  unsure (1)..(702): unsure at all n locations
tgattttattgaaggagaaagagttggcaatggtcagataccaaaagctacttttggcagctgctactgctagagctgaaaaagctgctgctgtagaaatgggtgatgtggaagaagctaatctcctacttgctgaagccgaggcagcagactgcgatgctgagaaacttaaatcaacttacaaatttgaggcagaagacttcactgatctacaaagacatttaatttcaatggatcttgtttcgcatcttgatcagaagcaactggaagaattagctgtgtcacttcgtctatttactggctgattgttgaaaacaggattttaatggaattggtgattgataatcaaagatatgaaagcttagttactggaagtactgaagtacgacatgagtggccaacccttgggatacaatgtttgtactcttcatgcatctctacattttaacgactactgagtatgtcatttgttcaattttcctttttttccttcactttttctgtttttgaggggtttgggtcgatactgagtatgagatttgtgttttcttttttcaattcttaagggttctgcccgaaccctgaccaaaaatataatggaaggactcagaacaacaaaaagtgttataagcaactatgcttatgaggatattgatctgctgtgaggattgtgtttattttcaaccagaaatatattnctag

SEQ ID NO: 13547 - DNA, 430 bp, Glycine max
gcgtccggttacttctttaactaatttgttttctctatacacacaagagtcaagattggaagtctacttgcttcatgaagcacatgactttccatggtcaatgatgcttcatgcagtgatctaactttctgaaactgaaccaacaacggatcgttctcagtcaccaccccagacgaatgtttcctttattacgatcgacataatcaaacatcaatatcctcacacgtgtcttactcacgtgcacaaaacttaagcttatagttattgtcgtcatagtcatcatgggagaaggtacaaagtaaattaaaacaaccgaaagcataagcttggattattttattttgtctcacaataatgttattacttattccaaccaaagcatttatttagtcttacactttgttctcactaggagaaaaaggttcttaat

SEQ ID NO: 13548 - DNA, 469 bp, Glycine max
atttgttttctctctccctccaaattcgcgtggatctctacagaatttatttcccaagcgcattcatttttcttttatccagatcgccgcacgattccattttctcaatcagcatcggtgattgatcctaatctcccaacagttgaagaaagatctagggttcctcctgctgaatccacagctgtctcaagcgcatttcttccattccgatatagaatctaattcacgcacgcggtttcgattcaaattcagctcgctccagcaggtttcgttacgtgaatgagaagagatacggttacggcttaaaatgagcatggaggtcattagcgatacggcgtcgttggaggtcgatttgttgcagctccctgaggtgtcctctctcgcactcaaatctaacctaactttcgtcgagacgctcttcgagcagtggctttcgcttcccgaaagcaaccgattggtgacatcattg

SEQ ID NO: 13549 - DNA, 1177 bp, Glycine max
gttttgccaagttaaacagatctatgctacttattcgccccatctgttttctgatagttttcccggggtctcagctaatgactgcaaggagaaagatgatgctggagaaaaacattgtgagggaaatcctgatcagtatggaaaccaccgcttgccaaagattgtatcactgaagcatcattggtggtggatgatgaacacggtatggaatgggttgagagagacaagggatcattctggtcatattcttttcattgaagaagaccactttatatttcccaatgcgtatcgcaatctacaggttctaatttcactgaagcctaaaaagtgtcctgattgttatgctgctaatttagcaccttctgatgtgaactcaagaggcgaaggttgggcaactttgattgctgagagaatggggaatgttggttactctttcaatcgaactgtttggaagaaaatacacaataaggcgagagagttttgtttctttgatgactataattgggatatcacaatgtgggcaactgtttatccttcatttggcagtcccgtttacacgttacgaggtcctaggaccagcgccgttcattttgggagatgtggtttgcatcaaggtcaggaggagaataaggcttgcattgataatggcatggtgaacattaatgttgaagagcctgatacagtttctaacattgaattaaattgggaagttcacacctataagaatcagcctggttataaagcagggtttaaaggttggggaggttggggggataatagagatcgtctcttatgcttgagttttgccaaaatgtaccactccactggcacagcgtctccattgtaagagttagaatttcttgctgccgcatctctttcttcttcttcctctttatttttcatttggtctgttatatgatagaagattagatttttcaatccaggaattgatattagacattcatagagggtgttagggttcataattactttgataatcatccctgtcttatgtactagttgtaacattgaatggatattcattcatatcgattcttcctcacatgaaggaagtttttgtattatgtaaactgatctctctctctctctctctctctctgtctctctccatgtgaacatttataatgcttagtaatgggaaactgcatctttcccc

SEQ ID NO: 13550 - DNA, 569 bp, Glycine max
cccacgcgtccgcaacttatcacacaactcggtttcatattgcatagtgagagaggtatacgtacgaggatgtctgacattgctatgttggtggcggaggagtatgagaggagggtcaagagtttaagaaaggccggtggtggtggaaccggagcgggggaatttgacatggtttcttgtgtttcggtgatggtgtctaggctcaaggaaaagaagcagcttcttcaatgggtttgggagcccaagacccaagttgccatggctgcttccaacagcttcttctctgcttaaacaactcattcatcaactcctctggactctgacgtgcttggtgtcattcattgttgcaaccaattgttatctagtttttccatcttctatttttcatgaaatattgtacatagctatgttttgggttcaattcaaaggcaaagcaatttgtgtttagagagggtgtaccttttccgacaacaatatttatgcccccttcccctccggcttctctgttttgataatgagagatatttattggaaaaccttatcaaagagtcttttctctcatttttagc

SEQ ID NO: 13551 - DNA, 614 bp, Glycine max
  unsure (1)..(614): unsure at all n locations
cggtccggaattcccgggtcgacccaagccttcggccaacccttccgtccggttgcgaaaaaaacaacagaaggggaaccttttaagcacaacacatcacacagtgagagaagtatacgtacgaggatgtctgacattgctatgtttggtggcgaggagtatgagaggagggtcaagagtttaagaaaggccgtggtggtggaaaccgagcggggaatttgcatggttcttggtttcgggatgggctagctcaggaaagagcacttttaatgggttggacccaagacccaagtggccatggctgcttccaacagcttcttctctgcttaaacaactcattcatcaactcctctggactctgacgtgcttggtgattgattgttgcaaccaattgttatctagtttttccatattctaattttcatgaaatattgtacagagctatgttttgaatttaaatcaaaggcaaagcattattctgtttccttagatgttaaatttagaaaacaacatcattgcaaagtatttatctgttttgatgatatttattggnnnnnnnnnnnnnnnnnnnnnnnnnnnnnnnnnnnnnnnnnnnnnnnnnnnnnnnnnnnnnn

SEQ ID NO: 13552 - DNA, 266 bp, Glycine max
cggaaaacggagcaggccggaaacccccttgtccaagtggaagatccacgacggcggaagagagaggaacatcattggcggcggcggcggcggcgatccgctcgaggaccacgtccggaagaaggaggctccgccgcatgccgccgtgtcggcgaggaagctcgcagccgggatatggcggatgcagctgccggaagcagcggcgggttgatggcggaaggcgaaggtgttcgaggaaaatcggtgaagatcgtttgggagttcat

SEQ ID NO: 13553 - DNA, 722 bp, Glycine max
tctcgagccgattcggctcgaggaatgatcctcctatttccaattactccttcattagagatcgaaaatgatgttaccaagagtaacagtaaatgcagtagctcaagcagctctagtagtgaatctggctcttcatccagtgattcagactcagttagttcatctggtagtgagttggatatggctaaaacatcagaacctcttagtgccaccaaggaagacataggatttggcttgacttcagatcaaaacaaaggggatcctggtaattcagaaactggaaaggattcaacaaatgtgggaggccaagttgaggagagttcccagagtaggcctgttgctactgagccagaaagccatcaagagggggagagtgctgcatctaagaggcaagtctctcccgaaaagctctaccgtgcagctttattaaggagccgttttgctgacaccatacttaaagctcaagagaaagcacttgaaaaggatgaaaagcgagatcctgaaaaacttaggattgagcgagaagatcttgaaaggcggcagaaagaagagaaagctccgttgcaggcggaggcaaaggctgcagaagaggctcagaggaaagctgaagcagaagctgcagctgaagccaaaaggaaaagggaactggaaagagaagcagcccgccaggctttgcaaaaggtataaaaaagggaagtatgttaggatgctaattcagcttc

SEQ ID NO: 13554 - DNA, 1222 bp, Glycine max
gacggatccaaaaactagtttaacttatttaatatgatatctctcaaaggcaaagtaaaaccatctcctccgtgtctctcccacactgattgcaaacacgaacaagtaattgaaactcctacagttgaatcagaaacactccacgcctacgctattgccttataatctttgttccacgcttttccctctcctcttcgcacacagccttccttcctagggtttcatccaattatgaactgtgaagtgtgccagctcaaggaactggaactggagcattttgagatacgcgaggtcttgcgatgcatattgcacacgatcgtctttcaccgtgccttgggtctcgtgcgccctaaagacgttgacttggagctatttgacgtcacttatgtgcaatgtggagaggcagagcttgaaaagaaaatagatgagaagattgagcagtttgtttgttgggtggagaagcacccaaacaagaagagtcagatatgtttatctttctatgaggtgaagaacaaacaggcgtcttggttcagtaacaagattgaacgtttgtattgggagcagtggtatattaatctgaatgtggcccagcatccgaaggcacattctagcaagtatcatcattccaaagttgttgatcctggagagaggagcattggaggatagaaatgctcgaagtgcagcactggaggcatcgcttcgtgaggttttatttcagataattaaatttgttaatgagaagaaggatcatgttccacctataccaaatcttgagggtgctgtttcatttccctatgaaattacaatccctagttcatcagattctgcatttgggatggacatgatcaagagaatgctacagacaggacatccaacaatgctaagttgattgtcaaagttcgcagagcggtctataaggttaaaatggattcttgttcatatgaataggctggtaatatgatgctgaagaaaagctaaggaaggcaaagttcaatctctctgtaaacaaagcagaatctataggtgcaaaataacttgtatatattttcaaatgaaaccccttttttaatctgtcgttgatatcttttatttcttttatttatcttctctcaagagtttacggtgttatgtagtggctatgtccaatgtcacatgaacatcttagaccatttactgttacgattgcgtcaatatgatgggttgcatgttatattttgaagat

SEQ ID NO: 13555 - DNA, 457 bp, Glycine max
ttttcttctttcaccttcgaatcgttgatgcagcgtccgatttattctttttctgtgtagtttttgattctcgggttctgactattatttcttaaaaaattacagattctttgcttttggttttggttgattgaaggccttcacggcattcgttgcggcattttaatcgatttatccaagcagatcttggcatgttataaagggtagactgcaaaatggaggcattgaaagcatcttatggggatggatcttctgattcagattctgaatctgcccattcaattccaacttctgctccctcagcagtattcacacccttgccaccacctcctatctcactccttgatcctccaagcattcttgatctgcagataggtcagacaactagacttaggagcttccctcatgtcgatggtaactatgccttacatgtatatataccaatttacatttcatc

SEQ ID NO: 13556 - DNA, 441 bp, Glycine max
tgccattattttttgtctcattgcccccaaatatcaccgtttctctcaagcgctctcaatcttttctcgatttgagtggctgcaaaaccccacgtgttacctccttcacttttttggctgcccccactttttttgttcacctctttcttcaaccaataatccctttggaggtttagggttttggtcctcgcggctctctcctaattaaaggatatttctttctttttttcaataacccgccatgtctaagaggtgaggttgatcatcttgtgttttgtattggattattaacattttcttgatgtaggttttctgtcttgtgttctgcagtttctccaatttctgttgattattgacttttttatttatatgtttctgttatttattggtcttataatccggctttctttgaaccgagaaaagattggttttggtttccat

SEQ ID NO: 13557 - DNA, 631 bp, Glycine max
cccacgcgtgcgcggacgcgtgggtagctagctaggcagccacgagccttggcgcattttcttttttctgtgggcgagtataataataattgcagtaaaatggcatttctgaggtcaatagcaacaacagcaattgctactatacctgcagccttagcattctcatcatcttcatcatcttctttccctcgctcttcccaatcccccaatccccaaaatagattaggtcttgtcaaaacacttgctactcctccctctgctctccacatggaccacaaactctcttctcagcctgacgctgtcttgcccgagttactgacggagttcatggtggacatgaaatgcgaaggttgtgttaatgctgtcaaaaataagttgaacgagataaatggagttaagaacgtagaggtggacttgagcaatcaggttgtgaggattctcggttcaacgccggtgaagactatgactgaagctttggagcagactggtagaaaagcccggttaattggacaaggcgtgccggaagacttcttaatatctgctgctgtttccgaattcaaaggtccagatatttttggtgttgttcgcctggctcaagtaaatctggcactggctacgattgaagccaact

SEQ ID NO: 13558 - DNA, 425 bp, Glycine max
cttcaaccatcacaaacccaccaccgccccaaagttgaatccgttctgtccccacaacatcaagtgcagcttcttcggatgccccgaattctgttccgttatggatgtgcgaggagatgggattttcccggatgaggtggttattcagattctagcaaggttgcctgtgaagtcccttgtcagagtcaaggttcgagcatcctgtaatggcttgctctgctgctctagtattcctgataagggtgtcttctatgtctgcaatccggtcactcgcgagtacaggttgcttcccaagagtagggaaaggcatgtgactcgattttacccggatggcgaggctaccttggttggtttggcctgtgattcagcatatcggaagttcaatgttgttctagcgggataccatcgcatgtttggtcataggc

SEQ ID NO: 13559 - DNA, 511 bp, Glycine max
cgttgttccaactggcaactccttctcttctcactgtcacttctttcttcccaacacaacacggcagacgcagtacataacaacttttgtttccttggcgccgccacaccaacatgtcagccttcactatttccaacaacgccgccgccgccaccgccacgtggccactcccccaattcaacacttgccactttccgcactctccatccattgttcttcatcattccctcctcaacatccgcgctttcaggatccactgtgtccctcaagaacctctccccccattacaacaacaacccaaacacgatcaactttctcccggaggcgacggaggccacggtgacgccggcggtggcggaggcggaggcggagatggaggtgaaggaggaggagacgaagagttcggacccttgttgaagttcgaagcggttatgagagaatctgaagctcgtggtgttaagttgcctccggatatggtagaggcagcgaggatcaccggcatccgggaaat

SEQ ID NO: 13560 - DNA, 412 bp, Glycine max
gaaaaagctggcagattccttgccctcaattggtgcaatagaggaccgctagaagagctagctcacatgagcttcaacctccaccgttcactcttcgaagaactagacggttcatgatcgtacagttacagaaccctcaccactctcagcctcatcgttacggaatttgaaggctccttttctgccacctcaatgttgtcgtcttgagttgacagacctactcgtggttggaaccatcgaaatgacagtgcaggtgcacctatggctcttcattcccgcgctgattgatagatcagtggagaagcatggagtgaagatagagattacaaaataggaacggttggaagtggaagaaggatgagttggatcgatggtgcttgaagaatgacgagttttggaagcggattctatg

SEQ ID NO: 13561 - DNA, 462 bp, Glycine max
tgggaggcatcagagacagagacagagacgatcaaagagaagttcccttctctctgctgtgaggaaaatgctgaaattagagagggtgatattgatgggaacccagttcctatggttcttggacagactacaagtgagaaagctcttaaggtctacaccaagaggcccaaggccaaagtgcctaaaagctagcacaacctaacatgaacccctttcggcgcgagggaggagttagttatatagaaagtgaaaaggacgtagaatctgatatatagggggaaagagaataagtgggggatatcttttgagattattgtcgattgtagcctagagacgtgtctctggcttgggggcatgttcttattttcttgtaattccttcatcatctatacacagtaatacaattccaattcagataggaatagttcatatcttagagggaaggaagggggggggggggcc

SEQ ID NO: 13562 - DNA, 841 bp, Glycine max
gcaagagcctatagttgacggcgttggttggggttctaagattgttttgtttgagttaaacgcgacaaactcaaatacgtgtgcattacaactcctaacccctcaccatcctcttcttctctctcattcatacccctccttttttatttgtattctcagctttgttagattccgtttctggtttttcccaattccaaagtactctgttatcgtcgtcatcccttttataggacagacaaagctgattcacttaggagcctcgagagctatgtctacatcttctcgtgttcttcccactccattggaaaacaagtatatgaaacccccagattcttttcagctttcgccagtcagagatctgactgcaaattcagcctcatcaaattcaatcagaagtgctgggaagatgttttcttcaccttctaaatgtcccgatgacttccctttttcctctgtttcacagcatgataggcaatatcaagatcccccctttgtttctcagacaattggtgatagcgtgtcttccgaaatacattcaatgacattcatttctcaccctcaagaaaatgaagatctttcctggggaccagatccatgtcaggatattcttggctttcctgaaaatgtttctgtccagcatgatcaggtggaaaacaatggttgttacataaatgatgataatgtcaaaagatctgattttggggagtgggttgatcagttaatgtcaattgatgattctcttcacccgagctggagtcagcttcttgctgatgacaatgtagcagaaccaaaaccaaaggcatctcaggttcctccgcagcagcatataccatctggagaa

SEQ ID NO: 13563 - DNA, 552 bp, Glycine max
ctctccaaggcaagggggttgatgttagtgggtcccttggcctggatggagctgctggtttgcagttgatggatgtaaaggacagtgatgatggtggtgatggtgttgatgggataatgagcctatcattaactcttgatgaatggatgaagctggattctggtgagattgatgatatagataatatcagtgagcacacttccaaacttcttgcagcccatcatgccaactcttttgacttcattcgtgggagttcaaagggagagaagagacgaggcaaaagcagaagatgtggtttgctaggaaacaatttcacagtagcattaatggtgcaactccgtgatcctctgagaaactatgagccggttggaacaccaatgcttgctcttatacaagttgagagagagttcatgcttccaaagcaaagaattttcaacagtgtgtctgagataaggaaaaattattatgaggatgacgagagcgatatagtagcaaaattgaagacgaaggacaccgagaaagaggagaaaagttctgaagaggaagggggca

SEQ ID NO: 13564 - DNA, 564 bp, Glycine max
gtgcattcttggcaaatgttaaagaattgaattcccataaacaaacaaaagaggagacgctgatgacaggtcttcagtgttttcctcaatgtccttaacccatggttcaatatcaagctctgatgcaggaacaggatcacaaactggacgaacacgggtggatgggaaagagttctttcgccaagtcaggaaccgtttgtcttatgagcaatttggtgcattcttggctaatgttaaagaattgaattcccataaacaaacaaaagaggaaacgctacggaaagctgatgaaatttttgggcctgaaaacaaggatctgtacactatatttgagggattgattaatcgcaatctccattgacattgtgcttaagagattctttccaaatttgtaataacggatactatcgtgcatgtctccttatttatagcaacttttttttctcccctctgtataatacaatacttttttttgaacatgaaaaccgaatgacagtcttggcaggactacaaggttgcagttggtttccttgcagtatggatgggaggtactctagttttaat

SEQ ID NO: 13565 - DNA, 762 bp, Glycine max
accaccaccacaattttcagttccatgtcttcccatgattttcaccctttttctctctctcactttctgtggacttttctgtggtttccttttcagtgaaataaaaaaaaaaccactctggcttattactgtctatatagattcttctgaatccagttctttctaaaccaaaccaaaaaaacattccctctccaaccaagttttggttttttttttttttcatgtgaaaattgaaatcgcaaccgcaatttaaaaccttggtgtatgttcttatattgaaattgaaattcttggctagggaagcaaaagggtagtaattggttttagagtaagtgagaatggaaaacgtttcggttcttttgtgtaataaggaaaaggatcagatggatttgcctcctgggtttaggtttcacccaacagatgaagagcttattagtcattacctttacagaaaggtcactgacaccaacttctcagctagagccattggagaggtggacttgaacaggtctgagccttgggatttgccatggaaggccaaaatgggagagaaagagtggtactttttctgtgtgagggacagaaaatacccaactggtttgaggactaatagagccactgaatcaggatactggaaggctacagggaaagacaaagagattttcagagggaaatctcttgtgggtatgaagaaaactttggttttctacaaaggaagggctcccaagggagagaaaactgattgggtcatgcatgagtata

SEQ ID NO: 13566 - DNA, 421 bp, Glycine max
gtaggtcccttctggtgatgcaagggttatcaactgatttcgccaagcacgctcttccgtctattcacaaacaacgcataatcataaccttcacaaagtcccaaccaaaatgttccctgccaaatgattctcagcgacttgctccaccggcagcgtcccattgggcaccaccacagagcagatctcccaatcacgtgcgtcatcaattaggccccaagcattatcccacggttccagcaactgtagtactgccagctccatccatacatgcacctccaaacagtatgcagccattgtttgtgccagcaccagttgcacctcccatgtcatttcctacacccgtaccaatcccacctggttccaccggatggacctcagctccttcgaggcatcctcctcctcgaatccctgttcctggcac

SEQ ID NO: 13567 - DNA, 761 bp, Glycine max
tacggctgcgacgacagaaggggattgtaaaaaatttcatttatgacaagagagaagggagcaaaatctggaaaagcttttgaagaggaaaaaaaggctgagaataataaataaaaagtaaagaaaagaaggaaggaaatggtgtgtgtatatgtgttggtgcatctgcatgacaccaaatcagtgaagaaactgagtaatattactgccagctcaaatttctcatttataacaagccagcctcaggaggaaaatcacatcaaggagtattcagggaggggttgaatatttgctgttgctattaatttcttcttcttcttcttcaatatctctgtctgttctaatctccctctagatttttcttttgctagaattctcttgcttatgagtttttttcttcctgagattggggatgtgaattgagggaggactcaaattgcatgtgggttttccagaattctgattcagttgtggggttcaaggagtaaaagaacactctctcaggtgaagcagaagaaggctaattgctatatataggacttgctataagagatatggcggcatcatcttcctcagcgtcgctctttggatttagagaagaggatcagaatcagatgaagcaacaacattccctgacaccatcttcatcaacaacaccagctgcacccccaccccagaagaaaaagagaaaccaacctggaacaccatatgcagatgcggaggtgatagcactatctcccaagaccctaatggcaacaaac

SEQ ID NO: 13568 - DNA, 379 bp, Glycine max
  unsure (1)..(379): unsure at all n locations
cccactcntccggtttgtaatatggcttagcgtaatcgtttaggtttcttcttcttctagttctgacgcttttgtctgttgctcttcatcatttcggttacctctggttgattttttcgatctgctcccgtaatcgagttgtggtattggttttggtttgtggattgttatgcttcttccgatcttaatcgagtttgtgtagggtttttgccgattgatatgcttttaccggaatgaagatcttgaagaaattgatagtctagcgacttcttttacatcaattatttgaattaggatataattcacttcatttgatcatggataattatctatctagttgttgatgaagttgaactgtttgcgtttgattggtttgcag

SEQ ID NO: 13569 - DNA, 601 bp, Glycine max
ccctttctgcccctcagtcactctccctcacctataccttcacccacactggaccaccacaaacttctcctcctcagcatcatatcttctgagttctgagtgttccattccaattccaagttacaacttggctgtgtctatggatcgcgctcagcttctgttgctgggtgtacccctcttcctcttctgctctgacctcttctcccttttcactcatcatccaccaccgccaccccaccaccatcacccccaccaccatccacctcaccaccaccaccacccgcctcaccacccaccccaccaccaccatcacccgccccaccaccatcagcagccggtgataatagagttccctcccgagaaacccatcagcaatattgcaactccgggtctcggcaacactgtctacatcaatttctgctcttcctgctcatacaagggaacagcagtgacaatgaagaatatgttggagattgctttacctggaactgaggttattcttgcaaattatcccccatcgcttccgaagcgtctgctaagcaaattggttccagttgttcagattggtgttgtaggggtggttgttgcaggggaacatatt

SEQ ID NO: 13570 - DNA, 422 bp, Glycine max
accctttctgcccctcagtcactctccctcacctataccttcagccacactggaccaccacaaacttctcctcctcagcatcatatcttctgagttctgagtgttccattccaattccaagttacaacttggctgtgtctatggatcgcgctcagcttctgttgctgggtgtacccctcttcctcttctgctctgacctcttctcccttttcactcatcatccaccgccgccaccccaccaccaccaccaccaccaccatcctctacccgccgcaccaccaccaccacccacccgaccaccatcaccacccaccccaccaccaccatcatcacccgccccaccaccatcaccagccggggacaatagatttccctcccgagaaacccaccaacaatattgcaacttcgggtctcggcaacac

SEQ ID NO: 13571 - DNA, 388 bp, Glycine max
cacaaacttctcttccgagtgttccattccaacttgggtgtggctatggatcgcgctcagcttcttttggtgggtgtgcctctcttcctcttctgctcagacctcttctcccttttcactcatcatccaccaccgccaccccaccaccatcacccccaccaccatccacctcaccaccaccatccacctcaccaccaccaccacccgcctcaccacccaccccaccaccaccatcacccgccccaccaccatcagcagccggtgataatagagttccctcccgagaaacccatcagcaatattgcaactccgggtctcggcaacactgtctacatcaatttctgctctttctgctcatacaagggaacagcagtggcaatgaaaaata

SEQ ID NO: 13572 - DNA, 753 bp, Glycine max
ttggtcttgactgatgaagtaaagcacgctgttccttactcttgggatccaacatccttggctagttttattgagaattatggtacccatattgttacatctgcaactgttggtggaagagacgtagtgtacatcaggcagcaccaatcatcttctttgtctgcttcagacattgagacctatgtaaaggacattggagatgataggtttcacaacgttaaacacttttcgggtcctggtcctttaaagtataaggagaaggatgttactgtcatatttaggaggagaggaggggatgatcttgagcaaagtcatactaaatgggtggaaactgtaaaattggcacctgatgtcattaacatgaactttacacccattgtttctcttcttgaaggagtgcctggcataaaacatttggctcgtgctattgatctatatctgcaacaaaccacctatcgaagacctacagtatttcttggatttccaaataactcaagtttgggcaccagagcaaaataatctacaaagaaaggaacctgtctgtcagtctcttcagttcagcttgatgggacctaagctttttgtcagtccagatcaggtaacagttggacgcaagcctgtcactggacttaggcttagcctagagggcagcaaacagaatcgacttgctattcatttgcagcatttagtctccctcccgaagaaccttcaacctcactgggacacacacatggccataggtgctcgcaagtg

SEQ ID NO: 13573 - DNA, 494 bp, Glycine max
atcgcttctgtctactgggatgcagcagtcatttaatgattttttgaatgatagatcatggcattatcaggatccaactgggaagattcaaggacctttttctatgttgcagctgtacaagtggaatgcaagtggatgtttccctccagatctcagaatatggagggtaggtgagaaacaagataactctatactgttaaccaatgcactaagtgagaagtgttccaaaaatgtgtcattgccattcaacagccaattgctctctctaggggtcagtgttacattggatgatagaggtaatagtcaggatgctgggaagaatgcaaagaatgaaatttctacagatggccaaattattgaacagacaaaggaacaaaagccacaggtggataatacctctacccagtctgatggcaaagatgaaccggttaggagcaatggatgttccagccagctgcctgtataccctttgctactgtcaactgccattcctg

SEQ ID NO: 13574 - DNA, 639 bp, Glycine max
tctcgagccggaaagaaaaaaagaggaacagagagcgataaccaaaggaagggtaataacccaccccatatctcttttctcttcttcttcggaaccctaaatttctctctttccgatgacgaccatgatgctttcgccttagtttcgtttctttgctctctctctctccctctctctctctctctctcactgtttccaacgtctttttcctctttccaccactacgcattctccgcgctttccactcacgatcttcacttcgatcgcgattcacctccctgatccctttctattttccgcagcttgccggatcgatctgtgagaggaattttgccattatttgggggtgactgaagtgggctatgatttgaatggagagaggatgccagagttgagaagtggagctagaaggtcgaaacggcttggagatcttcagcctggtccactgcctgttgatcaaggagagaattggcaacaacctgctgctccgaatcgaactatgaggagagttggaggtggtagaggaagaggtggtaatgccacagctgtaggcaaagggccatcaccagctgtacccacaaggcgaactgcagctggtagaggccgcggagcaagattgattgatctggaccctgaacc

SEQ ID NO: 13575 - DNA, 605 bp, Glycine max
cccacgcgtccgcccacgcgtccgggttttcttggatcaataattcctgatgctgtgcatgatgtgctggatcctgctcatcatcatgtactacataatgctgtccctgcaggggtcaaaagctatgctgtaattcgcaaggttgaaaatgtcaccaactcctcatcatctgaactcctagcttgtagggccattatgtccgtaataacttataacggttacttccaggaatacaacttaagcattgatgctcacaatgaattatcttggtctttaggacgccagttcaatcttttgactgtgaccatggataaggcatcatgagtgacataaagtgttcttagagcgccaactattactgcgaagcttgaggaatcacatgctacacttaaacttccagacctactactgctgccaatgttgaagtgttaatcaaagaaactggtagagctgtcgaggctgccaacatgaatgtgttatttggaggaaacaatgagtccaaattagagaacatttaaatgtaaattattggaatgaattaaaaaaaatgtaaattagtcgtgtatttgggatagaatattcttattttataaagtagtttctct

SEQ ID NO: 13576 - DNA, 684 bp, Glycine max
ctcgagccgaatcggctcgaggctgcaacaacccactctctctctctctctgtttctgtttctgcaatggcgaagaagaaggagaagaaggtgaacgtctccggaaaacctaagcactctctcgacgtaaaccgcagcaatgacgcgaagaaggagtcgcgctccgccgccaccgtgcgccgcctcaagatgtacaacaccaggcccgtgcgcgaccggaagggaaaagtcgtatcccacgagcttcagtccaaggagcttcccagcacaagaatccaacccgatcgtcgatggttcgggaacacgcgtgttgtgaatcagaaagagcttgagtttttccgagaagagctacagagccgcatgtctagtaattacaatgtaattctgaaggagaagaaacttccgctttcgctactcaacgatcaccagaagcaagctagagttcacctgcttgatagagagcctttccaggatgcgtttggaccgaagactaagaggaagcgccccatcctcttggcggctgactacgagtcattgctgaagaaagccgatgggtctcaggatgcttttgaagagaagtatggttccagtgtatccgcggaaggtaatgatgaagatggatttagagatttagtgcgacatacaatgttcgaaaagggtcagagtaaacgcatatggggtgag

SEQ ID NO: 13577 - DNA, 726 bp, Glycine max
catgagttgggcttgggccttagctgttatccaagattttgttaacaactgattcacagactcggtcacggtggcatcggatagaggggcaagaaaggatgaggtggtgcagccaggtcttctctgtgtctgggtccggtgcacatgcacatgcactcgctctcgctcctatagttactgcttctttttccaacacaagtcttgtgttgcaattccaaaagcctctcttcaaattcagcaactcctcttctctcgctcttacccatcgtaagctgttaccctctgcactgccactaacgcagccctcaagttcaagggaggattttgatttcgtggtcgtcaatttctaccactttggattcatccaagacccacaagctgaagtcgacaaacaccgttctttcttgcaattggagggtcttgacatcaatggaagattatatttgaatgaacaagtatagcgggccatcaaaagatgctatgacgtatgtcaactggttaagaaaggataacaggttttctgacatcttggttcagatatctccatcagaaaagggacatacctttccaacattgaagttgcgttataagccttcattagtacaggcagcacggatttcagaatttgtatactctgaagggaggtgtttctcactatctaaagaatgaaggccctgccgaatgggtaggaaatttatttgtatttgactcccgtctatctctccc

SEQ ID NO: 13578 - DNA, 464 bp, Glycine max
gaaataccaagatgtacacatgtgcaatttttggtaccccaaaatgcttggagtatgcatgtatgtgaatttagccgaggagatgtgtgtgatgtaggtaacggatacgccttggaagtacgtgtaaataatctaggtaacgaaggtgccttgattgtatatgggtgcatttttcttagttataagaatgtcttgcgcaagtgaacgttcgtgaagaagtatgcgcataagcttgctctaaatttacattgatgtttgtatttattggagggggttgtatgccatttttgttttaagggtagcatttcttggtaaaaactaactttccaaatgtttgccttcgcaggaatggccccgaggaagcttgcctcaaagaggtccaggaaggacaaggcggccgaaggaactagttccgctccggagtacgacagttaccgctttaggagtgctgtacaccagcagcg

SEQ ID NO: 13579 - DNA, 586 bp, Glycine max
ctcactctcaccatttttctctcctcaacccattccccactcacctattcactatttctatcatattatagttatagttatagttataacatagcaatagcaaattatatatatacatcgaccacccagatttaatttcactccaacccatcatgcatcaccgtagattcagcaaattaatacatgtggctgacccagatgagcccgagtccgggcccgagcccgcctcagaagctgggcctgcttctccttcttccggtgaagacactaaaactgaagcaccgtcacccaagaaaaggagggagatgaagaagagggtggtgacgataccgatcggtgacgtggatggatctaagagcaaaggagagaattatccaccgtctgattcatgggcctggaggaagtacggccaaaagcccatcaaaggctccccttacccaaggggatactaccgatgcagcagttcaaaggggtgtcccgcaaggaagcaagttgagcgaagccgtgtggaccccacaaagctcatagtcacctacgcttatgaacacaaccactcccttccttttccaaaatcaaattcttccgc

SEQ ID NO: 13580 - DNA, 399 bp, Glycine max
cactcacctattcactatttctatcatattatagttatagttatagttataacatagcaatagcaaattatatatatacatcgaccacccagatttaatttcactccaacccatcatgcatcaccgtagattcagcaaattaatacatgtggctgacccagatgagcctgagtccgggcccgagcccgcctcagaagctgggcctgcttctccttcttccggtgaagactcaaaaactgaagcaccgtcacccaagaaaaggcttgtatttatcttttctattttattttgtctctatgtgaattgggaagttaacgttgaaggggttcatgtatgttcatgaaaccatacgtaggagcgagatgaagaagagggtggtttttctaccgatcggtgacg

SEQ ID NO: 13581 - DNA, 585 bp, Glycine max
gccgaacaatgttgacactgcgtatgggacagtcttctgcagaatctgttgttaacgctggaccagcagtttacatctctccatcagggccaaatccaataatggtgcagccttttccactttagacaagctacatctttggtggtccagttcccccctcaactcctgcaactttaggcaccattggtattggaaatgctcctaggaacgtaaacattcatatacatggtctcggtacctctcttgcacctattgtttcagccattggttctggggcaaataatggagaggggacaagaagtgaacaccgtaatgagcctggctctggtgattcaggttcaacacgggtattacctgttagaaatgtcatagcagcaactatcccatcacaccctcctggtgttggagtctctagtagcacacaaactgggtttggtattcctacctcacagccaccttctgattcagcttcattgtcatctgttttagctgaaatcaattctcgccttagaaacgttgttggtaatatgcatggagataacacagttccatctggtcaaatggaatcaaacagcagggacttgc

SEQ ID NO: 13582 - DNA, 933 bp, Glycine max
attttcatagggaggtctggggctattggaccactggtagaattattgggaagtggaacccctcggggaaagagagatgtgccactgctttatttaatttgtcaatatttcatgaaaacaagaatcggattgtgcaagctggtgctgtgaggcaccttgtggacttaatggacccagcagctggaatggttgacaaggcggttgccgtcttagcaaatcttgccacaattccagaaggaagaaatgcaattggtgatgaaggtggtattcctgttctggttgaggttgtggagttgggttctgcgagaggaaaggagaatgcagctgcagctcttctacatctttgcttacatagtcccaaattttcaagcaaggtgcttcaacaaggagctgtcccgccattagtagctttatcacagtcaggcaccccaagggccaaagaaaaggcccaggctctcctcaatcaatttagaagtcaaaggcatgggagtgctggcaggggctgatcttgaattcccaaccttgagtggtatccaaaggttttgaattgactcctatagaatgtctccaatttatacgttacacggtgcaaataaagtgtgtaaaggtgtttcgtattgttttcacttgcttgggaagggaaaagaatatttgtggaggattgattgtgtcctctttgtgaaaaacctttctgtgttgtaaaaaattacacatgtaagtctagcttttttgtattaacagaaaaaggtctggtttttgttgttgtggtagggcatgatggttgtccacatataaaacatttggtttatttagtgacactgtaactgcccctttcattgagatagggatgtaggtgtaaactgttatgttcatgcgtggatgattttataacaggcaaggcatgcatcttgaagaaagcatgattatttgtcc

SEQ ID NO: 13583 - DNA, 763 bp, Glycine max
  unsure (1)..(763): unsure at all n locations
tcgctttcaagcctcccaaacacaatgatccactcttcatcaggcatatcattgtggcgaggatctgatgataatgaatccagtgacatctttctagaaccaataaggtggaagggatttgcaaatgtgtgcactgcagtggtcaaacatgaccctaactggttgcatgaaacaagtggtgtttatattgtaagtggtgcacaactcattagtaaaggaagttggccaaagaatgtgcttcacttgcgcctcctatacactcacatacccaattgctgtataaggaagtcagaatgggatggtgcaccagaggcttcaagaaaatcatctttcctcacaaatctaagcacaacattttcattcacacaacaaagtccttctcagaagcaggctccaacagtacttgactctggtgtgtatccagatggtccaccagtgccagttcgatctggcaaaatgcttaaatatgtggacacaagcgagtttgtgaggggcccgcatgatgctcctggtcattggttggtaactgctgctaagcttgttactgagggtggtaagattggattacaggtcaagtttgctttgttagactactagttattcattcattctaagttacttctctctcatgtatatgtagaaagaagagaaacattagtggactgcatttgtaaattnnttttgtttgaaaatacagatcacatgtacataggcacatgctttctgatgaatttgtacagtcagtacagtatacagtaatgag

SEQ ID NO: 13584 - DNA, 1628 bp, Glycine max
tgttggaagggtgccagaggtgcttctggacgttgtatatctcatggtgggggtaggaggtgtcagaaacctggttgccacaaaggagccgagggtcgtacagtgtactgcaaggcacatggaggtggcaggcgatgtgaattccttggttgcacaaagagtgcagaaggacgtacagatttctgtattgcccatggtggtggccggagatgcagtcatgaaggttgtacccgggctgccagagggaaatctggattatgcatccggcatggtgggggcaagagatgccagagagaaaattgtaccaagagtgcggaaggcctatcaggcctttgcatctcacatggtggagggcgtcgatgccaagttcctggatgtacaaaaggggcacaggggagcacaatgttttgcaaagcacatggtgggggtaaacggtgtactgcaccagggtgcaccaaaggtgctgatgggagcaccccatattgcaagggccatggagggggaaaacgctgtacataccagggtggtggagtatgcactaaaagtgtgcatggaggtaccaacttctgtgtggcacatgggggtggaaagaggtgtgctgtaccaggctgcacaaagagtgctagaggaaggactgatcattgtgtccgccatgggggaggcaagagatgtaagttcgaaggctgtggaaagagtgcacaaggcagcactgacttttgcaaagcacatgggggaggcaagagatgctcttggggccatccgggttcagaatatggcatccaacaggatggtccttgcaattcatttgcaagggggaaaacaggtctatgtgcacttcatagtgggctagtgcatgacaagagggttcatggaggcatctcactgggatctgttgttcaggatcctcattccagtaaaacagatgaactaaagcaggtactcgttgacaaaaacatggatatagatatgatgaaaatagggagtagtctaggcactgcaacctgttccgacttcgaacagtttgaagctgcaactgctcatgtctcagccaaggaaggtagtcacttgccagtgtcagttgctgttcctgaaggcagggtgcatggtggtagcctgatggcaatgctaacggggagttctagccgtggctcaagcagcggcagaggtctagttggcgatccatctgaaccaatcaaaggttacgccatgccccagagttggatttaaatctagttatcgttttcattgtcatggtctccgtagttaacaagttttatcagcatgttacattattactccattctacgttaggttgttgacgaattgagttattctgtcatccgttgaaattgtgttgagagaatatccaaatcgtttggcaatctggtggtggaggggatatcaatttggaaaggaaaattgtactttgattaggttgttggtgatgttcttttaccattcttcctccttctgtaaatattacatctgatgaaacgtttagcagtttgtgaatacaggttgctacctgtaatgtaaggtctgtcagtgtgccatgtattctatttaataataaaacttcactgagattgtatttgttataatagtacttattttgaattcaatacaaa

SEQ ID NO: 13585 - DNA, 474 bp, Glycine max
gcgccacgcgttcgccagcgtccgccagcgtccgattgttctttcacaaactctgacattccaaaaaggagacacttgttagttcttacattacatggctcatttggtttatggtgaaactccgtcttttggagcctcacaccatggacaggctcagcaaattgttccatttcaaaccacttcgagctccttaaggatcctgctcttacatggcaacttagaaatatgggtcaacgaggccagaaaccttcccaacatggacatgttccacaagaaaacgggagaaatggtttccatgttgtcccgaaaacttggcggcaaaatcgaaggtcacatgtccaaagctggaaccagtgatccctatgttacggtatctgtggccggtgctgtgattgccagaacttttgtcatcagaaacagtgagaaccctgtttggacacagcatttcaatgtccccgttagcacatcttgctt

SEQ ID NO: 13586 - DNA, 756 bp, Glycine max
gtccgttagcattcactgtccgtgccctcgatgctggacctgtcattgctactgaaaccattcaaggtgatgatcaaataaaggcccctggtttgcttgagctcctgtttcataaaggatctaaacttctgattggagaacttccttctatacttgatggatcagcaagagtaaaggcacaacctcaagacgactctaaggctacattggctccaaagataaatccagatgaatcatggctattctttgatcaagaagcatctgttctacacaataagggtggccaggaactagagcaagagtgttagtggttgagaaaaatggtcagcagaaaactttggagattaaaattataaccacacgagttcgcagtcatgaaagtgtgcagttcgatgaagcagatgacattgcattcgttgagggtgcgttggtatttccatgtggaaggggcaccacacttgaggtattggaagttcagcttcctgggaaaaaggtagtaaactcagctgctttctggaatgggctgcgggggcagaagctgaagaaattatgagaggtggttcatcaaataggaagccatattttaaattatttttggctgtttaggaaatccatttttttttgttttgatttgattcaaatttttattttcttctttcactttatatatgatttatgctgcttttttttatggccaatttttatatgatttatggataaccatcaacctttgcaatctctatagaagggcttctc

SEQ ID NO: 13587 - DNA, 374 bp, Glycine max
agaatattaactgtttccaacaagttgtattgtaaggaaatgtttctgaaaacaggtacggtaaaactgagagaaaaaagaaactggtgagaattcacgtctttctttgtagttcaacttgtcacaaaaattctggtttggattcctcaaatttagtacatatacctagtttattttaaaaaaattcaatatggattgtggttatatttaggtagctgatgaacttgtggccgaatttgctgatccaatcaatggtgtttcaactcctgatcagcaaccatatgatgagaaaaacattcgtcgaagggtgtatgatgctttgaatggtctcatggcaatggatattatttctaaggataaaaggaaaattcaat

SEQ ID NO: 13588 - DNA, 1330 bp, Glycine max
gttatagaagaaagtgacagtggatgaacacaagagaaagaagaagaagaagaagaagaagaagaagaaaagggttttgtgtgtgtcgaagtggataattccttccttcaattaatctccgatccgaaaccgtatggggattctatacgcgctggttggtcgtggatcggtggtgctggcggagttcagcggcaccaccaccaacgccagcgcaatcgcgcgtcagatccttgaaaaaatccccggcaacaacgacacgcacgtttcttactctcaggatcgctacatcttccatgttaaacgcaccgatggactcaccgttctctgcatggccgacgacaccgccggaaggcgaattccttttgcgtttcttgaggatattcatcagaagttcgtgcggacttacggacgcgccgttcactccgctcagccttacgggatgaacgaggagttctctagggttttgagtcagcaaatggagtattactccagtgatcctaacgccgataggatcaatcgtctcaaaggtgaaatgtctcaggtacggaatgtcatgatagaaaatattgacaaagttttagatagaggtgatcggttggaattgctggtcgataaaactgctaatatgcaaggaaacacatttcgcttcaggaaacaagctcgtcgcttcagaagcactgtttggtggagaaatgtcaagcttacgattgcacttatagtcgtcctactagtgatagtttatgttgtattggcatttgtttgccatgggcctgcgctaccatcttgtttttaagtgaaggattggcaagtgaattttatgtgtgctttcttgtcttcttcagcttgcagaggtcacttcttttttatctgccattgttatgcagacttccatttcttcaacttaatttctgggttggccacttttgtgctagtaaatttcttggaatagattcaagtggtttgggtcggatttttcattatgacacttgaggggcaaaaaaaaaattaaaaactattggatcatggtatttattggattctcctaccagcccaaagatttggattgaaccagaaaatggctgagattttgattgatgtatagtgttgcagcgtgaggttgtcaacgtgtcatggatgtcctcttgttcaagagggagaagggtaaaccttaaattccatttgtcccttcatagcttagtgaagggagattttatactgctcggccaggttctcttgtccagttgatgcatgtgaaccgcataagcttaatgtatatattcttaaatttaaaaaaaaacgaaactggggcggcctcaatatatgccggcgg

SEQ ID NO: 13589 - DNA, 485 bp, Glycine max
cggctcgaagctattttggccctgtgccactaaagccatctcccccatttttgctcctctatctcttttttctaatcatcacaattgggtgagaaaaaaacacacacacaactcaacaatgggtgagaaatgtgatggcttgggtttggggttgagtttgaagttaggatggggagaaaataatgataacaataataatcaacaacaacaccctttcaacgtgcacaagcctcctcaatcggttccaaaccaaagggtttccgtcaatagcttgttccattttcatgatcggagctccgagatgcggtcgttcttccgcggaatagacgtgaatttgccaccgtccccgccttcggcggctctggcggcgttcgatgacgagaacggggtgtcctcgccgaacagcacgatatcgagcatcaacgggaagcggagcgagagagagggaaacggagaggagaacgagagaacgtcgagttctcgcg

SEQ ID NO: 13590 - DNA, 557 bp, Glycine max
cttgaatgttcacatgagattcaaataacaagctccctccatttcaaaggacaaagatgcatagcacattgatgaagttaaagttttggttacctatggtggctgacataaaagacaaattcattttcttatttgtttcacacgtataaagaaggctgcctcttctgtatgcttgccaagttcttgaatattttcagcttcagcaaaactactagaaaacccatgtgatcaacttttgaaggttcaaggtaccatgccatgacatttggaattatgctgattttctggtgctcctaagttaatgcaagcagggatttggagtacctcttcaaattagccatttagatgaatgaataattttgcttttagaatttattgatagtaaaacttatctaagaactgtaaaaggttgagatatattcacaaaatggtaagtgacaatgacgtctacaatcaggggaaactagcatggtatgaatattggtgatagtttaactgagcatttatctgtatacttttacaaaacccaattattttcaatatatagtttaaaacag

SEQ ID NO: 13591 - DNA, 511 bp, Glycine max
gcggttggtgtggtttatttgcaaccaacaaatgaagtgctagagcaaacatttggagacccaaaaagccccgagttctccaaacgcaatgtaatccctagagtgatatctcggtcattagctattgctatttcaaccactatagcagccatgcttccattttttggagacataaactctcttataggagcttttggctttatcccacttgacttcatcttgccaatggttttctacaatttgacatttaagccatctaagcgaagccctgttttctggttgaatgtgataattgttgtggctttctccgcattgggagctatagcagcagttgcagcagttaggcagatagttcttgatgctaaaaattaccaattatttgctaatgtatgatcatgttggaccatccaatgaagttttgttgttctaaaaaaaccaatgaaaaaaaaaaacaagccaaaagctgtagattattctaacaaaaatgggaccctcataagaagttaaaaat

SEQ ID NO: 13592 - DNA, 445 bp, Glycine max
gagcgttcggcaagaaccccgtggtcttcgagaggcgcaaactccggcaggttctccagcgtggtttcgagattgttcagcctcgcagcaaccaaattggtgccatcaaggtaggactcgtcggagtcaatttcctccgatgatccccccacgctcgtattcgagccatacttgctacgatcaccgcccccgcattcctccgttacggtcaccttaaaagtctcctcaccaatggcgacatcgatggtatgttgtatttgcggcatccacgaagtcttaataagcacccgggctcgatctagtcgccgtctatcctccgcctcgtcgtccatgtcgacgaactcccccacggccgccgtgatctttcgcaagtgtttcgaactccacgcttgaagaggaactccccaaacgtaaacccaggttagtctatctcccactcgcactc

SEQ ID NO: 13593 - DNA, 791 bp, Glycine max
ccgaaacggcggcggatatggtggtaacgatggtggatgttatggcggaagaggcggctacagtgggaaacgatggcggaggctatggaggaagaggcggcgggggaggtggtggtcaaggtggccggggaggtggaggttatggtggtcgaggaggtggtggtggatttcaaggcggagatcgcggtggtcgaggtggcggtcgctgcggcggccgtggcggcggtagagatggagactggcgttgtcctaaccaaagttgtgggaatttgaactttgcgaaaagggttgaatgcaacaaatgcggtgctccaagtcctaatcccaatagttctaatgatcgtggtggcagtggcagtggcggtggttataatagaggaggtggaggctatggtaacaatcgaggaggaagaggtaatgactatagcagcggagggggtagatctggtagttatgatggagggagaggcaatgaatataatagtggaaggggtggtaatagtgaaggtagaggtggttcatatagaggtagtcaggggagagaagatggtggttatggtcaagttcctgctcctactgcccaatcttacggtggtgttggtggaaactacccatccacttacagttcttatagtggtgggaatgcaagttatggaacagaagcagttcctccacctgcaagttatactggtggacctaattcctatcctccatcatatgggggtagcgtgggtggttatgggggagataatcaatgggatggacggagtggtggtagatctgggcctcct

SEQ ID NO: 13594 - DNA, 399 bp, Glycine max
gcttgctttatatgttcttcagtcaaaccaaaatctctctccgcagctccaggcaacaacccaattccccttttcagttacaaggattggtttgggtcttgttcctgcattttgtgcactagttggggtggtagtgacttgcaccatggatttccacaatccttcaaagtctttgacggcaccactattagcctagctgtgtcattgatcataattattctcctttctctaacatacaaaggtaaatggttatatcatacttggagaaatttcagctgctcggacccattggaaaattcaagcagcaagtagtactgagaatattcactttatagtttatatatatgtataatcttgtatatttattgaattattaattgttacaaatattatatgtca

SEQ ID NO: 13595 - DNA, 263 bp, Glycine max
cccacgcgtccgggattgtggaaatccatggtgcaagtcactaccatacaaaggtaaatggttatatcatacttggagaaatttcagctgctcggacccattggaaaattcaagcagcaagtagtactgagaatattcactttatagtttatatatatgtataatcttgtatatttattgaattattaattgttacaaatattatatgtcaaatgtatataacgtgtccacattttattaaaatgtaacattcacagtttaaa

SEQ ID NO: 13596 - DNA, 641 bp, Glycine max
  unsure (1)..(641): unsure at all n locations
atgacagctatgagcacgcatgcacgcgctcggaactcggatagagtctcactctgtgactgtcgctggcagctcaggtgttccttgttaagatctgtggtttggttttcgggagggaacaagaaaaaaaggaaaagatgaatagctacagctactatgggtaccaagagaagaacaccttgacaagctgtgaggagacgagcatggaatcagtgatttgccccaaacctcgccgattgggtctcataaaccactcttccatcaacacgcaaatcagaccctcaaggcacccaatcatcagcttccaatctgaggtggaagattcaggagttggggcagagcttctggacatcatcctccccaaggaaaattgctatctggaaagatctggaggccaagtggtagcatcgtcaccaccatttttctgcggatctcctcctagcagggcctctaaccctctaatccaagatgagcaatttggtaatgggaattntagtccatttaccgaggcatcctcttcttcagctcgtggttgtgttccaaagaaatttggtcacacaccagctgctgtaaggatcgaaggttntgactgtcttaacagagataggagaagctgcagcatctctgctgtagcatanacc

SEQ ID NO: 13597 - DNA, 474 bp, Glycine max
  unsure (1)..(474): unsure at all n locations
ttccacgcgtccgcttcctcttctcctctcggggtgtcccctctcactctgtgactgtcgctggcagctcaggtgttccttgttaagatctgtggtttggttttcgggagggaacaagaaaaaaacgaaaagatgaatagctacagctactatgggtaccaagagaagaacaccttgacaagctgtgaggagacgaggatggaatcagtgatttgccccaaacctcgccgattgggtctcataaaccactcttccatcaacacagaagtcagaccctcgaggcaccccatcatcaggaaattctctgttcttttttctttttggtttttcaagcaaatcggttataaaaattatgacttttctgcatttgttcactaaaaataagcagcttccaacctgaggtggaagattcacgagttggggcagcgcttctggacatgctcctncccaaggaaaattgctatctggaaagat

SEQ ID NO: 13598 - DNA, 349 bp, Glycine max
ggtagcacttctctctctctctctctctctctctctctctctctatattcttatctcttcccccactttctctcttgtttctgtttcttcttctcagggtgccctctctcactttgtgactgtagcaggcagctcaggtgttccttgttaagatctgtggtttggttttcgggaggaaacaaaaagaggaaaaatgcatagctacagctactatgggtaccaagagaagaacaccttgacaaactgtgaggagacgaacttggaatcagtgatttgccccaaacctcgccgcttgggtctcataaaccactcttacatcaacacgcaaatcataccctgatggcaccca

SEQ ID NO: 13599 - DNA, 437 bp, Glycine max
cccacgcgtccgggcttctggtgctaccaatatgtaagtaacgaattgccttcacagtgatgaccgatgagaggtagataatggattttactttactgcccctgtagagagattaatcactgtctggttttgaagctttggtcattggtggaccttgcgaatgttgccaaaatttcaattaagtgtttgtttcaattacttggaaaagtggattctaaaagcatccacttggtgcactgtaaggtgaagctttgttaatattggccgtgcaattagggtttcatttcaactttataaatacaaattcaattcagtgttatgtattataattttattaaggaagggaataatggatagctctggaatgtttttgaagtaattttttgaaaaatggagattttatcatccatagactatggaatctggaagatagaagt

SEQ ID NO: 13600 - DNA, 866 bp, Glycine max
tgcggagaatataggttatgtcattccaacgccagtcatcatgcattttatccaggattatgagaagaatggtggatttactggattccctattcttggggttgagtggcaaaaaatggaaaagcctgatctgcgaatggcaacgggcatgaaacctgaccagaaaggtgtgcgtattagaagaattgatcctactgctccagaatctaaggttttgaagccatcagatgttattcttagttttgatggggttgacattgccaatgatggaacggttccattccgccacggagagcgcattggtttcagttatctcatatcacagaaatatactggggataatgcagcaatcaaagtactgcggaattcagacattttcaaatttgacattaaacttgatagtcacagaaggcttattccagcacacagcaagggcaaacctccctcatattatattattgctggatttgtttttacaactgtttctgttccatatcttcgttccgagtatggaaaggattatgaatatgaagctccagtcaagcttttggataaactgctgcattcgatgccacaatcaccggatgaacaacttgttgtggtctctcaggtgctggtggctgatatcaacattggatatgaagatattgttaacacccaggtccttgctttcaatggtcaaccagtgaaaaacctgaagagcctagccactatggtagagagctgcaatgatgaatatctaaaatttgatctagattatgatcagatagtggtgcttcgcatgaagactgcaaaagcagctactcttgatattcttgcaacgcactgtattccatccgcaatgtctgatgatcttaagtcatgat

SEQ ID NO: 13601 - DNA, 548 bp, Glycine max
ccaaccttggtgctacagaggagcaactagactttcctgttctttatgcttctgctaaagaaggatgggcgtctactacatttaccaaggatcctcctgctgatgccagacatatgtcacagttgcttgatgccgttgtaagacatgttccaccaccaaatgcaaacattgatgcacctttccaaatgctggtttcaatgatggaaaaagatttctatcttgggcgaattttgactggacgcatattctctggggttgttcgtgttggtgacaaggttcatggattacgtaataaagattctggtgctgaaaaaattgaagatggaaaggtggtgaaactgatgaaaaagaagggtacaaacatggttctaactgattgtgctggagctggtgatataatttcaattgctggcctgtcaagtccagcaataggccatacagtggcaactgtggagattatgtctgctttgcccacagttgaattggaccctcctacaatttccatgacttttggtgtaaacgactccccactagctggccgtgatggc

SEQ ID NO: 13602 - DNA, 443 bp, Glycine max
acgcacacgcgtccgattttggcatgtttgatgagactgtcttggcctgaataaaatgttgcaggtggacttggatactgcggagcctcaagctcaacaaagtgaacaaacaagtgggttttaatggccttctgtatttttttctactacatatatatgctgtggaactcaaaatcccaacacttttatttgctgtgcagatgaatcaaagtttgttcgtgtatcttttcagttagaaaagaattgtaacttcggtgaacagtttcttatcgttggagatgatcctgtgcttggttcatgggaccctttagaagcattacccatgacatggtttgaaggacatgtatgggccgtggagctggtgagtaaaatctgttcagaattttaaaatattgtcggattgaaaacttttataaatgttgtttttgcttactttgtgtaat

SEQ ID NO: 13603 - DNA, 512 bp, Glycine max
ccaaactctctctcggggctcgcctcagcttcacagcaccacgcgcacacccttccgatgccttcttcgcctcttctctgatccactcgccgcgcccacggcgcctcctaaatgtctgtcatcgacacccccgccgttcaccaccgcagcgggggcgccaccgatcaccgtcacccgtccaagcgcaaattcgacgatgaagacgacgaggatttctcggacttagtctgcgtgaggatgcggaaagacgaggccaaggcggtgaattcctggtccgcctcctcctcctcctcctcctccgacgccggcggctgctcctccttgcagcagcagcagcgatcgcacatccagttcttcgtgcgaatgatgtctgccggaaacacgattgtgatgcaagccttccccgaagacacggtcaaatcgattcacgagcgtatccaaagcatgaagggaatcccattgttcgagcagaggttaatttatcgcgggaaacagctccagtgggaacagac

SEQ ID NO: 13604 - DNA, 437 bp, Glycine max
tgattttcatatttattttcttcccttcttcctccaatcgataagtttgtttagtgtaagggccctgagccgaaacccaaacaggttctcacacagcggaggtttaagcgtaaattcgacgagaatgcgtaaggacgaagccaaggcccccggcgccatgccgcagcagcagcgatcgcacatccagttcttcgtgcgaatgatgtctgccggatacacgattgtgatgcaagccttccccgtagacacggtcaaatcgattcacgagcgtatccaaagcatgaagggaatcccattgttcgagcagaggttaatttatcgcgggaaacagctccagtgggaacagactcttgccgaatgcttcattcagaacgactccaacctttaataagaaggccgtatgctcattacccaacaccctcaatcctgaccagtta

SEQ ID NO: 13605 - DNA, 421 bp, Glycine max
agggttgaagtggtttaagagattcacaaggtaaggaaattcaagaaaaaaaaggcaaagtcataattccatttccatgcgcatggcttccaacgaaacttcaccgtttgagtctcgcgagatgctcgcatccttcgtctcgtccacgcccctgctgtcggactcatggcgcctctgcacccaggccaacgccactcccttcctgaccttcgtgactgagcgtgtcggcgcctccgtgtatgtggctttctccggcgtccatatggccggcgagtccgacccgaactggagaaatttgactcctttgtacagcatcggcggcctgcctctgttttcgtctcggcggagcaaggaatgggaggaaccggtcatggttcatgctggcatcctcaatctcttcttttcacttttcaattctttc

SEQ ID NO: 13606 - DNA, 473 bp, Glycine max
gcaaagagaaacagaagagcaaaatttgaagtgcaaagtgtgtgtgtgtgtagcgatggctgatgtttcagattctcaagaacagcctgttcttgattccgctgaactggaaatgaagaagaagcgactgttggtggagctggaatctgcgctgggcggtgagaaatcggtgacggcgcaggcgtcttcttcttcttcttcttcctccttaggcttgggtattgaggttatcgacgaaacggcgttgcttgactccgttgcgaagaagaacggaggttcaagaagaaccaagaacaacaacaatggtcacaatcacaagaagtcgaagccctcaaataagattgggaacaaaaagtactctcgtaaggagttggagtctctgagattcgtgaacatggcccgacaacgcaagttctggaaagcaattcacgctgcctttcaaaccaccgtggccatggagtatgatgctttag

SEQ ID NO: 13607 - DNA, 887 bp, Glycine max
cccacgcgtccgcgttccgtgactgaaccctctcttctcttctcttgtgcgatggcaacgcgacagatacgcttctccgccagctacatcgccggaggagaacgctctctttctcgatatactacacgaagctcctcttttcgctcatcgcaaagccgcgagggttatcgggagcgttttctactgcatactactggttatgctactttggccattggagctcactggatatttcgtccagtgcaaggactcatctctcccgtgctttgtagttgtgatgttctgcttttgctgttgacaggaatctttcaacaatacctggtttatcaagtgcagaagatacgcttgcagggctattatagtttcagtcagaagttgaaatttattgtccgcataccctttgctattacagcttatgtttgattttatttcaggaactgctgcaatgctacttgttatagtctggaaaccttacactggttttctgtctatctctgcaatattgaggatcattatggtagttgaagcagtatctgccggctgttttatgagtcttttcattggttacatacaccagtacaattcattaaactcacatcctgatgttctgaagtccttatactcaccactacaaccatcaagttctctggagggtctaaggtaccatgatggtaggctctctgatcagcaaatggctttgctgcaatatcagcgtgaaaatcttcattttttgagtgaggagattctccgattgcaagagtgtctaagcaaatatgaacgaactgatgatcggagcacaccacaggttgaccttgcccatctactagcagctcgtgatcaagagttacggacactgtctgcagagatgaaccaagtgcaatctgagt

SEQ ID NO: 13608 - DNA, 616 bp, Glycine max
  unsure (1)..(616): unsure at all n locations
ggaccgggcctgacaggctggaccgacgcatgcgtccaggcatgcgtgtgccgagactgaaccttttcttattttctcgggagcaatggcgaccggcagatgcgctactccagacggtgcataagccagaggagaacgctctctctctcgatgtacgtacacgaagctcctctcttcgctcatcgcaaagccgcgagggttatcgggagcgttttctactgcatactactggcaggttatgctactctggccattggagctcactggatatttcgtccagtgcaaggactcatctctcccgtgctttgtagttgtgatgttctgcttttgctgttgacaggaatctttcaacaatacctggtttatcaagtgcagaagatacgcttgcagggctattatagtttcagtcagaagttgaaatttattgtccgcataccctttgctattacagcctatggaactgctgcaatgctacttgttatagtctggaaaccttacactggttttctgtctatctctgcaatattgaggattattatggtagttgaagcagtatctgccgtatgttttatgagtcnttacattggttacatacaccagtacaattcattaaact

SEQ ID NO: 13609 - DNA, 456 bp, Glycine max
gcggactgacctagcttcgaatctacaatatctgtccctttctttaatggccttgccttgtacgaccagtcgcgatctgaaactcagctactgctgctacttctacttctacttctacttcttctttcgcctccatgatactctgcatgtgcctctccgcacctgaaccacgcttctgaacgcaatggctcgtcctagtttccctcttgctctctgtttctctttcatcttcgttgctcttcctctttccctcgccaccactgacccttctgatgttcaagctcttgaggtcatgtacaatgtgttgaatagtccaactcagctaacgggttggaaaatcggtggtggtgatccatgtggagagtcatggaaaggggtaacgtgtgagggatcagccgttgtttccattaaactctcaggtttaggactcgatgggactctggggtacttgctttc

SEQ ID NO: 13610 - DNA, 300 bp, Glycine max
ggcgaacaccgcctccgtaactaccgctccgtcaccaccgtccactccttcgacgacgacaacgcctccgccgacggcaagatctacaccgtcgtcctcgaatcctacgttgtcgacgtccccgacggcaacaccgaagaggacacgcgtctcttcgccgacaccgtcgtcaagctcaacctccagaagctcgcgtccgtcaccgaaggaaccaacggcgacggtgacggtaagccacactcgcggtgaggaagcaagcaagcctcaataaaaaaatatatatatattaaagcaaacaac

SEQ ID NO: 13611 - DNA, 667 bp, Glycine max
cccacgcgtccgcccacgcgtccgcccacgcgtccgcgaaggaaaaagaaaaatgatgaaaagatgtgaattggtgtttgaagcttcaacaagaggagggtgtgaggagcacccatatgataagcaatcaccaggtgtttgctcctcttgcttaagggaaaagctatctcagctatacaacacaaaccctattattgatcctcgttgtttttcttctccttcttctccttcttcgcctcatcaatcttttttttcttcgaagcacggttcttccggtcaccggagaccgcgctttcggaggaacgcttcgcaagcggcggaatctgcctcgtgcatgctgagcttgaacttgaagaagagcaagtcgctggcgtttgcttcgaggaatagggagagggatgtgatgatgagtggaaggaagaaagatgggttgtggacaaaggtgctcaaactcaagagaaaggatacacggcgcctaaagggaaggaagaaaccgtgttcaattttttttttctttttctttcttgtcccaaaggtgatcatgtttagctgtatcataattgaaggatgtttctgttgtgggtcgtttcaggaatttcagagttcatctaagttgaaactcgaataggaacattatgggcgcgcagaatggttcacccccccgcaa

SEQ ID NO: 13612 - DNA, 1872 bp, Glycine max
tcgaattcccactactccttaatttctctcttcacttatcatcatacttatatattatataacccaataattaaattaaatacatgctagcactttaacagtactcctttctctaacctcgttcccactctcatattttcccttctgctgatattcagctaaactaagtcaataagatgactcagggaaagatagttgaagctgcagaagctcataaaacacttgaggatttcgatcctccaaagaagcgcaaaaggaacaagtatgcttttgcttgtgctatgctggcctccatgacttccatcttgcttggctacgatattggagtgatgagtggagcagccatatacataaaaagggacctgaaagtctcggacgagcaaatcgagatcctgctcggaatcatcaacctatactctctgataggctcatgtctcgccggcagaacctccgactggataggtcgccgttacacgattgttttcgccggcgccatcttctttgtcggagcacttctcatgggtttctcccccaattattcctttctcatgtttggccgtttcgtcgctggcattggcatcggctacgccctcatgatagcccccgtctacaccgccgaggtctccccggcctcctctcgtggcttcctcacttccttccctgaggtatttattaatggagggatattaattggatacatatcaaactatgcattttcgaagctgacactgaaggtgggatggcgaatgatgcttggagtgggtgcaattccttcggtagtcctaacggtgggagtgttagcgatgcctgagtccccaaggtggctagtgatgaggggtcgtttgggagaggcaagaaaagtgcttaacaaaacctcagacagcagggaagaggcccaactaaggctagccgaaatcaaacaagccgcagggatccccgagagttgcaacgacgacgtcgttcaggtaaccaaacgaagcacaggtgaaggcgtatggaaagaactcttcctctatccaacgcccccaattcgtcacatcgtaatcgctgcccttgggattcacttcttccaacaagcgtcgggcgtagacgccgtcgttttgtacagccccaggatcttcgagaaggctgggatcaaagacgacacgcataaacttcttgcaaccgtggccgttggattcgtcaaaaccgttttcatcttggcggctacttttacgttggaccgcgtgggtcgtcgtccgttgttgttgtctagtgtcgggggcatggtgctctctctcctcacgctcgctatcagcctcacgatcattggtcactccgagaggaaactaatgtgggccgttgcattgagcatagccatggtgttggcttacgtggccacgttctccattggtgcgggtcccatcacgtgggtttatagttctgagatcttcccgttgaggctgcgggcgcagggtgcggccgcgggagttgcggtgaataggaccactagcgcggttgtctcaatgacttttctgtccctcactagagccatcactattggtggagctttcttcctttattgtggcattgctactgttgggtggatattcttttacaccgtcttgcctgagacccggggaaaaacgctcgaagacatggaagggtcttttggtacttttaggtccaaatccaacgccagcaaggctgtagaaaatgagaatgggcaagtagcacaagtccagctaggaaccaatgtccaaacttgaaaaatgagtattgggacatccagtaatagtgaagtaatttcgtgattttttttttgttttttactttttagactagttcttctaataaaaacgacaagttaaagtgacaagtcttgtgtattta

SEQ ID NO: 13613 - DNA, 1864 bp, Glycine max
cttcagagcacagggcaccggtatgaaggtggattctggacagaccatgcaaagcatgttccattggacaatgaaagacatgttgcaatagtcacaactgctagtcttccttggatgacgggaacagctgtaaacccactatttcgagctgcatatttatcacaatctgctaagcagaaagtcactctgctggttccatggctttgtaaatcagatcaagaactggtttatcccagcaatctcacttttacttcgccagaagaacaagaagcttatatacgtagctggcttgaggaaaggattggttttaaggcagacttcaaaatttctttttatcccgggaagttttcggaagcaaggcggagtataatacctgctggagatacttctcaatttataccatccagggatgctgacattgctatcctggaagaaccagaacatttgaattggtatcatcatggaaagcgttggacggacaaattcaaccatgttgttggtattgtccacacaaattatttagaatatatcaagagggagaaaaatggggcactccaggcattcctggtgaaacacataaacaactgggttacaagagcatactgccacaaggttcttcgtctctcagctgctactcaggatttaccaaagtctgtaatttgcaatgttcatggtgtgaatcccaaattcttgaaaattggagaaaagattgctgcagagagggagctggggcagaaagcctttacaaaaggggcgtatttcctgggaaagttggtgtgggcaaagggatacaaggagttgatagatttattagcaaagcacaaggctgaccttgatggcttcaagttggatgtatttggaaatggagaggatgctaatgaagtacagagtgcagccagaaggttggatttgaatctcaactttcagaaaggaagagatcatgcagacgattctcttcacaggtacaaagtctttataaatcccagcattagcgatgtgctatgcacagctacagctgaggcacttgccatgggcaaatttgtagtttgtgctgatcatccatcaaatgagttcttcaggtcatttcccaactgtttgacttacaggacatccgaagactttgtgacaaaagtaaaagaagctttagaaaatgagccttatcctctaacacctgagcaaagatatcaactttcttgggaggctgctactcaaagatttatggaatattctgagcttgataggatcctgaacaaggaaaataatggcgaaaagtcaagggtagataaggggaagctcattgctaagtcagcatcaatgcctaatctgacagaactagtagatggaggcttagcatttgctcactattgtctcactgggaatgaatttctgagattatgtacaggagcaatacctgggacacgtgactacgataagcagcactgtaaagaccttcatctcttgcctccacaggtagaaaatcctatctatggctggtgaatggattgactagtttgaatgtttgaaggaaaacttgtcacaccagattatgacaagcagtactgtaaagccatcatctaaatgcctttaggtagaaaaatttatggatagctggtgaatagatttagtggtttgagtttgtagtttgttttacagttgcttgtgttaggtgcctgctaagttttcaatccttaaattttgtagttctttttgtttttgtaagtgatgtagttcaatatttaccaaaacacgtgtagaaagctaatgtctaatgtaaagtaactgaacgttctcccacgtaacttgtgagaataagctgtaatgaatttgcatcggtttaacatgaaataaattgttcggttaaaaa

SEQ ID NO: 13614 - DNA, 380 bp, Glycine max
gtagaaaatcctatctatggctggtgaatgggttgactagtttggatgtttgaaggaaaacttgtcacaccagattatgacaagcagtactgtaaaagccatcatttaaatgcatgtaggtagaaaaatttacggatggctggtgaatagatttagtggttgaatttgtagtttgttttacagttgcttgtgttaggtgcctgctaagttttcaatccttaaattttgtagttctttttgtttttgtaagtgaggtagttcaatattaccaaaacacgtgctaatgtaaagtaacaggacgttctcccaagtaaccttgtgagaataagctgtaatgaatttgcatcggtttaacatgaaataaattgttcagtaatgat

SEQ ID NO: 13615 - DNA, 311 bp, Glycine max
aagaaaaccattcctttcaaattagtcgtatatactcaaaagatataaagatagtttataggagaagaaaataaaatttgtgtgagaaaaccattcctttcaaatttgaactttagcatatactatttgatgtcatcaacttttatatcaaaaaactatatttatgtgcccaaacattgctaaaaggaattcgtacttgctgtgaaaaaaaaataaaaaagcatggtcttaattaactatgtgttgtataactgtaaaaaaataaaccgagcaagtcatgttaaagggggcggccgttctagaggatccaa

SEQ ID NO: 13616 - DNA, 972 bp, Glycine max
gtaataatagtcagtataaaactactagttcagataaccattcttttttcccttcagagttgcctgcaaggtcaaggtttgaggctcagtcaggggactcaagggggaggaattctaagaatctgagaatcttggaaggcttggatgatgggaaggtaaggaagatttctaggccagagagaattgttagggaaattgtttcagagtctatacctgtcatggcattgacaattcaggagcttactgatgatgtcatagcatcaactaaggaatacttgaggaatctcattgagaagcccgagaagaaagaggaactggtaagcctccagaaccggctcgagagaagatctgaccttactaaggagagtctttcaaagtgccataaagtgcaattagaggttttagtggctgtcaagatggggcttgctagcttcctatctaataaaattcaattgtctgagatggtagaggttttcttgtttaagaggtgtaggaatgtaacctgcaagcatttgcttcctgttgatgattgtgactgcaagatttgctcaggaaacaagggcttttgcagttcttgcatgtgtcctgtctgtttgaactttgattgtgcaagcaacacttgtagttggattggatgtgatgtttgttcacattggtgccatgctacttgtggcattcagaggaatcttatcaagcctgggcctagcttgaaggggccttcagggacctcggagatgcagtttcattgtattggctgtggacatgcctcagaaatgtttggtttcgttaaggacgtcttcgtgtgttgcgcaaaggattgggggcttgaaaccttgatgaaagagcttgactgtgtaaggaagatcttcaggggaagtgaagattgcaaagggaaggaattgcatgttaagactgatgacatgctattaaagcttcaaactaaaatgatatctcctttggatgcctgcaatt

SEQ ID NO: 13617 - DNA, 425 bp, Glycine max
cagaaaacaaggggagcaagaacattggagggagagcaatggttgcacaataatctggtactccattcattgcaaagaggccacgtacggtcttctcaaagaaacccatgttcgaccgtacctgggcgcagtcgagggcgctgcactttgggagaaattaatgtggctggtcatcaatatcatgttgcaattgctcatgcaccaccactcttccagaacgtgcttcccaagtttggagaagcaaaaccttccattcacaccccaaaagatcgactagacaattaaaacacttactctgtcaaaaattactctaatatacatgtgtgtattatatgtcatctgtgtcagatcttttactcctccaagacagatatacaacttactgtgtatgcaattttttatactgatacattttttttaatcta

SEQ ID NO: 13618 - DNA, 550 bp, Glycine max
ggaattttgggctagatgggctcatagggctctctggcatgcttcgctgtggcacatgcatgagtcccaccatcgaccaagagaaggacccttcgagcttaacgatgtatttgcaataatcaacgctgtccctgccatcgctctcctttcctatggtttctttaacaagggactggtccctggcctttgctttggtgcgggtcttggaattacggtctttgggatggcctacatgtttgtacacgatggattggttcataagagattcccggtgggccccattgcaaacgtgccctatctcagaagggtggcctctgctcaccaacttcaccattcggaaaaattcaatggagtgccatatgggctgtttttgggacccaaggaaattgaagaggtgggagggctagaagagctggagaaagagataagtaggagagcaagatcatacaaaatagctaatgagaacaactaatacaaatcaagaatgtttcgaagaattatcagtgtaaatcagaaatatgaaataaaatgatccaaaaattttgcttgc

SEQ ID NO: 13619 - DNA, 550 bp, Glycine max
gtcgtggcagcattcaacggggccggggacgtggaagaggaggtcgtgatgaaaaggtatctgctgaagatcttgatgctgatttggagaagtatcatgctgaggctatgcaattaaactgaaggaaacaacgatgttctgttttattgctattacatttgcggttgttagggccatgttgatggaacaccgccgaattatgtatctttatcacagtcgtgcttttcggaaaggaaaaggataacttagagtgaaaacttttacagttgatatatgtagtttgggattctgttatgaaatatttgttttcgttgggtatgactatgaaatgtggctgaagaaaccgaagtctgcttgtattatgcactccggcttcctttcattggatttaatcatttgtttattcaagtattcaacaagtgggtttggaagtgggaaccatgatctcatctatgcatgcacacaacacaaagaaagcatgggctgcattgtaggaggctgcagaattcacccattgttgctttgtgctttggttaaaactattaaagtg

SEQ ID NO: 13620 - DNA, 452 bp, Glycine max
cccacgcgtccggaaaaacggtgttctgttctgttctgttcatgcacttgcacgcatgacagaccctttttaaggttaagctgtagagaggagttttgctcaagttactttgcttgcttctgtgatctgtttggtgtgttgcgtcttgcggcaaactgagtgaggtaaaagagggagagggaggaacagagagaaagagaaattaaaaaacaaacaagggaaccttcccttaagactctctctctctctctctctcttcttagaatttgtctctcatttctttctctctccctgtaacacagccaccgcaccattctctctctttctcgccgccatcatgttctcctcaaccagatgcgctttcctgagcaactcggggttaggtgggtgcagcagcttgtgtgatgctgcgcagaaaaagcgttcaactcgtttgagggtggtgagtatga

SEQ ID NO: 13621 - DNA, 436 bp, Glycine max
cccacgcgtccgcccacgcgtccgcggacgcgtgggtatagggtactactaattaaagtgagagaattgatagcaattgtgtgtaatgaaaaataaataaagggaaagggtagtagcggcatattattgcaaggaaaaatccaacgtcaaaatggaagacgacccgtgggagctctgcaacgacgacggcttcgtcttcaagcgcaagcgccgccgcatccactccccctcgccgccctccgttcccgaccaagagccggcggatacgctcctgagagagcggaagaaacaaaccctattgaagctcaaatctagctacgagaaagagattcttctttgggaaaccttgttgaacaccttgcgctcggtgcaacaacgcaccactcaacaacatccccaaccaaacctatccctatctcttccttctacttcctcg

SEQ ID NO: 13622 - DNA, 414 bp, Glycine max
agtgagcaacatctctaacgtcaggatttaggccactcagaaaacgagtcattgcgtcctcagtttcctcttcggtggcggccctcactagtgtcatctccatctccttgtagtactcctccacggtcaaacttccctgggtcaacctctgaagtttctatcgcatggttctgctgtagctagttggaacatacctatttcgcataacccttctcatctcagtccatgtacctatctcccacctatcctctcttatcatctctctttgatccttattccaccaaacaagggcatactctgagaattcagctgcggctaacttcaccatctacttttcagtataatcattgcaggagaatacatgctcaattttcatctcccactcaaagtacgcatctggatcactcctgccct

SEQ ID NO: 13623 - DNA, 417 bp, Glycine max
cccacgcgtccgggtgtgtgtaggtggtgattacaaagaaaaccaaaaaaggtcgtagaagattaaaaaggctttaataggtcaaattggttgccttgagcagccagtgttaacatgcaaagccgggtagggattccaatgatatgttggctgaggttgtcaagaattcttggaaaaaaagagcaaaggaatcagtcgtgattagtaaaggggagggctctgattttgtggcaaaagctgtggatttagcagccagagaattaataacaagtgcatcactaggacaaggtacagcttgaccgtgccaaggtatccacgaagtctgcagttctaatgaatttagagtccagattattggactcagtggaggaaagagactcttgagttcatcataccattactttgatattatagaaa

SEQ ID NO: 13624 - DNA, 547 bp, Glycine max
ttcctttcaaccatcagcaaaaacaaacagacaaactaagggaaaccatcaatagttcaacatcaagctcatccatcatatggctttggcacgtttggctttgaaaaacttgcaacaaagggtgtgtgcttcctctttcttgagtggcaatgttcacaagcagaggtggaacaatgagttgctgagaaggtttggtactgcagctggggacaagggaaaatctgaaggcactgaagttgctgtcactgaagggaaaaagtctaataggatgttcccaaggaggaggggcagaagatgggcttggagaaatgaggatcatgatgacttccctcctgctctttatgagttgtttccttcagggcttgggagtgcactgatgcaggcaagtcataacatcaacaggctgtttgagaacatgaatctgacaccttggtctctgactagtgggcgtgtgaaagagaaggatgaccattacaaactacggtacgagatgccggggatcgccaaagaggacgtgaagatcaccattgatgatgatggggtattg

SEQ ID NO: 13625 - DNA, 422 bp, Glycine max
acccttccgaaacatttcattttttttttactgcacttgttgaatcttgtttttcctttctcaaagacttgatttaattaattctttcttattttctgtagtaacagggtttgttttgttttgttgggttgaatcgatctcttttcctttttgatttttgaattaatcattttcctaatgtagtggtgtcactgcactggcaggaaccactcgccatttcgactcttgttggtgttctatatttggccttaattcgatgacttactcgaacaaaaatatctctagtggaaaatatttatgatataaacaaaaaaattcagcgacttccctttatcttcacaaaatctttggcttcctaaaagactttgaattggtgttggagttggaagcatgtctatctctttgacccgtttggcatggtc

SEQ ID NO: 13626 - DNA, 997 bp, Glycine max
tgggaagcctgggtgaaaagcaaagtcaattgctgctaaagattgcttataaacatttctggcttccacgtttgatatgttctggattttgatctgatctcacactagacacatcaccatacttttctttgcaaaagaaggggaaggttgcacactaactccaatgaaagaaaatgttcttccacccgtgactgtaaatttccagcaaggacttggccagaagtttaaacagccagctggaactggtattgatttttcaacatttgaggagtctgagttattgaaagtaggggacatggatgtctatcctgttgcaattaaagcagatgcatcctccagcgaccatgatgaatcaaaatcaaatgaaactcctgcattcggtagctcaaactctcagataactcaagcagtgtttgagaaggagaaaggagagttccaggtgaaggttgttaagcagatcttatgggtaaatggaatgaggtatgaacttcaggagatatatggtattggaaattcagtggagagtgatgtggatgggaatgacccgggaaaagagtgtgttatatgcttgtcagagcctcgggacacaactgtccttccatgtcgccacatgtgtatgtgtagcggttgtgcgaaggttttgaggttccagacaaatagatgtccaatctgcagacaaccagtcgagaggcttttggagatcaaagttgggcccgagcctgaggagtgaagattcattgttagtgacacaacaagcttcctgtacagtccaactgttatagctaatacttttctcttactttatcaggtttttccaataatcccacaaaatagaaattggaatttatgtatgacattatgtttgacatgtacagcaggctggcattgcacctgacttgtattattgtataagccaatgcctccgccatgcttgtttggttttacttctaatttttatgtggctttcccttctgaatcatatttagatgtgtttctc

SEQ ID NO: 13627 - DNA, 600 bp, Glycine max
gtgtaccctccggccgccacgccgtatcacaactaccccgggtactacccgccgccgaccaccatgccggcgccgttgccggcgccatacgaccaccaccaccgtccggcggtggacccgatgtgggtgaggtatccgccggcggcaccgccggcaccggcgccgtacgtggaacaccagaaggcggttacgattaagaacgatgtcaacatcaagaaggagacgcttaggattgagcctgatgacgagaatcctggccgttttctcgtgtcgtttacgtttgatgccaccgtttcggggagcatcaccatacttttctttgcaaaagaaggggaaggttgcacactaactccaatgaaagaaaatgttcttccacccgtgactgtaaatttccagcaaggacttggccagaagtttaaacagccagctggaactggtattgatttttcaacatttgaggagtctgagttattgaaagtaggggacatggatgtctatcctgttgcaattaaagcagatgcatcctccagcgaccatgatgaatcaaaatcaaatgaaactccatcatccggtagctcaaactctcagataactcaagca

SEQ ID NO: 13628 - DNA, 432 bp, Glycine max
aatgcccgctaacacacctgacaccagaccatgatacccactgacaagaaaagtacaccgtaatcaaccacgcacaaccataagcctctctcacttctcttgttaaatcaattggaatcagattctttcttctgttctctccgtttcagttgctatggataataagaagagaggggcgagggagggtgaagatgaagatgagatgaagatggagaagttttacgcgctgttgaggaacttccgcgacgcccgtgatcgccggcgaacggagttggtggagttggaaaaacacgagagcaacatctggaagaagaatatgaaaggcaccgtcccaactgcaacgaacgacaataaggcagaagtttctttcgaatttcaggactttaccaccgagattcaattcagaaagccacctttggttttcctaatcca

SEQ ID NO: 13629 - DNA, 373 bp, Glycine max
caattctgaattggttcaaaattaaaaagtataaggatcctaataacctggccaattgccttagggggtgcccttttggcaacaatttgtccaaggatattggaatgttggtggatgccaataggagaatgcatctggctctcagtgatgatcccttcaaaattaagttcaaagaagcctgagatcaaagctctttcaaatgatggcaaaattaaatgacaatccatgaatacgtgtgtttataatgatcgatccttgaaattatatttctttgtgaagaattagtaaatgaataaaaaaattaagagtgtatgtttttgtcctgctgttacaactttaatttcactattaaataataaatacaatttttaat

SEQ ID NO: 13630 - DNA, 399 bp, Glycine max
cccacgcgtccgcccacgcgtccggtcaactctagataaggtgctcggagccaaccttcaaaagtctactactccgggggtcttaccagaaccagctcagaccccatctctctcgggtttttcttgccaagagtggtaactactggggtaggaacaacaaccttgatgcctttgggttgggagatttgttgctgatgcctacactggtggatttaacatggtcatattttcttccctcgtatacttaatgggtaatccaaatttttttaatcaatgtgcaacatgtttttattataacttagtaatgtgagcttctacaacttcatatatcctgtctttttgatcaatttgaccactcctttagtccctgaaaataaattggaattttttttattgacg

SEQ ID NO: 13631 - DNA, 372 bp, Glycine max
ccttattttgcggatcccatattgactcagagacccacaaagctgtcctggtgctacccttggaatggttggtagtatttggataaaaaatagtataagtgaaagaaaaaagtctgtagattagatcagaattgaatccaagtggtgcagaattcagagcagcatttggtgtccaaaagaagaggagtaataggagagaggtgataaaggtgtcaagaatggggatacctggtgttgatggagaattgaagaagattttgaacgctaacatggacgaaggtggtgctagaaagcgtgcaacgtaaggctttaaaggtattcaacttggaaatgatcatatattggttaaaaacccatgtgattgaattaaaa

SEQ ID NO: 13632 - DNA, 356 bp, Glycine max
  unsure (1)..(356): unsure at all n locations
tttcattatcttgtttcaaatttgcaaagtgctcctctgcagcagctgctgcgtgttcagcttctcttagtctaacaagtagttctccagcagcctgaacagcttcagcagtatctcgaagttgaatcttcaagctctggttctcttttttcaataattttgattccctttctctttcctctctcgatgcagaaagctcagcagaaagagatttggcgaagcgagcatgacctttttctgaggcttttgctgctgccttcttcacctctgctatcccttccattgtagcatcatgcttagtaaccaagtcatcgtattnttcttgtagatcagcatagtgttctacattctagcat

SEQ ID NO: 13633 - DNA, 770 bp, Glycine max
attcccgggccggcccaggcggacgcgtctgcggacgcgtgggagaacctattttcactgttttttgaagaaattgtatcccagctatctggagtgtcctcgctcgtatgataagttgcgctttgatccaagtaaaccaaaatgcaggctgttagttacacatgatgactatagtataacgtccaaacttccaagggagagaacttctgttgttaccatacttagggatccagttgaccgtgtttttagtacttatgaattctcaatagaggttgcagctagatttttggtgcatccaaacttgacgtccgcaacaaagatggctttacgcctaagctctaagactaaaggagtaagcacactggatatctggccttggaagtatctggttccatggatgagggaagacctatttgctaggagagaagctaggtacagtaggggactgaatatcattgaaagcaatgattcttatgacatggaagattttgcaatgccattacaagaatacatcaatgatcctgtggctgtggatgttgtacataatggagccacattccaggttgcaggtttgacaaacaattcttatatagcagaagcacatgaagtgcgccattgtgtacagaaatataagactcttggtaaatatgtgctacaaggtgcaaagaagagactggatgagatgttatatgttggtcttactgaggagcacagaaaatctgccacaatgtttgcaaatgtggttggtgctcaagtgatatcacaactta

SEQ ID NO: 13634 - DNA, 561 bp, Glycine max
ctggattatagttgatggttgtcataaattcatgttgggggttgtgaggcctcatctgttagtcgggttcttttgaaatttgacccccccctcccccctttggatcgttgtttcatgctgtactagttagtggttaccatttggccactcttagaggtactttttgttaaactttgtctgattttgttatcagttagtttggaagagaccatagaaaagaatctgcttgtggggtggtttgatatatcacttgttaaggaggggtggatatgggtgacaaaaaaaagtttgagttggatagaaacgaggatcctatgagttattctagtggaatgcactcggattggagatttgggggtgcaaatattgcgaggtcttctggagctatgggtggcctggggaattctatgaatggcagccgaggggatttgattggttcttcttcatgttcctctgcttcaatggtggactcatttggtccaaactactgggaaaaccccctgttcccaaaacttgggattttgtgacattaatgtccacaacaatgggggttcttcaagc

SEQ ID NO: 13635 - DNA, 578 bp, Glycine max
cagaaattaaccgtttttcctttctgggttttgtataattttgttgattttccattccttcgatggttttgctgctgctaagtagcagtggtatgtatgacttatgagctttgagcctctttatattttgaaaagaagattggaattttttttttcttcttttgggaaaggcttctagtggttggatttttgtccatcaagttattgatcgaggagggggttatcacttatcaacctttggtagtgcgtgatcacgggatcttgtagatgatggagagggttttttgtgctttgtgattctgagatgtgaattaatggttggtgaagtaaagaatcaaggcagagtttgcatgataaatttgacttttggatcgaggtgggtccatttttgtacacaatttgttgtttgattctgtttccagctttctaagggagagatgggaggagggtggaacttgtgattttcttgtttgtgttgtacttttcttgatttcggaattcgtatccagaaagaggagttttagtacttaggtgttggatctgattgtaaggagggaagcaaagttggagagtttgga

SEQ ID NO: 13636 - DNA, 418 bp, Glycine max
cttaaatgagataaatacgactttctattgtgtgcccgtgggcacagtgtgaaagccttgtgtatacctattagatgcggtaaattacttacaaatcgtacattgaatgattggtgtattgtctatacataagtagttaagtactttgtattttcaacttcttatcatgtgctgacccccctgtaaaaaattgagtgttgagccttccaccattaactgagagttgagacttctgacaatatataaaattaaaacaagtgccaagtaatttgattcactaaggaattaaaagaaaactaaataaatagactgcatgactgcctatcaagtttaaatggctgtttccctttcaaaatgcttctgggtgttgttgctttagttgccatatcttaaaatacacttttaccaggaaaaaaca

SEQ ID NO: 13637 - DNA, 552 bp, Glycine max
cgagttaatgggacctgcacctttcagttgagatggatgtagcaatcaccaaccattcccatttgtctatttccttctttcacttgggagcagagcctctctcaccgtcactcacaccttccttcttccttgttccgcttttcacgaccatgatcctctgcttcacgcttactctcggatctcagtcgcagatccaccttcaacgttcaccaccttttcaatctttctcatggatccctctacttctcgtccagctgtagtcatcgataatggctccggttatactaagatggggtttgctggtaatgttgagccatgttttaatgttccgacagtggttgcaattaacgagtcctttcttaatcaatcgaggaattcctctaaaggcaatggggttgcccagcacaatgctggcgtaatggcagatcttgatttcttcattggggatgaggccctctccaaatctcgatctagcagcacttataatctcagctacccaattcagcatggccaggttgagaattgggatgccatggagcgcttctggcagca

SEQ ID NO: 13638 - DNA, 410 bp, Glycine max
cccacgcgtccgcttcctctacttctttgttccacaatttcacggttttctccaaatttcattttcaaattcaataggctaggctacggcgacactaagttgcaggcctcaaaggtcacgtcgccgaagcttatcttcaaagacccgcgctgagctttctcatcttctttgttctactaccatttcatggcttatttcaaatttcaatttcaaaaatagaagctttcgtctcactagcttccatacctatgagaatgcaggatgcttgtgttgcactatctctagtacaaagatgcataggatacaagtgttttaattgagaccaaacaaggtaagaaagttgcttgctgaagcattattgggaggattgaagggaaatagatgattgactttcatttacaatgcatcat

SEQ ID NO: 13639 - DNA, 411 bp, Glycine max
  unsure (1)..(411): unsure at all n locations
cccacgcgtccgcccaaacatcccttcagctccatgatcatggatagatcatctcaaagcagctccgattcaccgactcgagagcccaaggtgttatccatcgaatgtcttaaaggaagctccaaaggcgacgagtggaccggcgacatgctccaaaccggcgatatcgtggaggagctccgactcggatcgacggcgaactcacagatccggtaccagtggccgttcaagggcgggaagagcggcgtgcagaagattctgcaggatgcgttcaaaaaagaaggagccgtcgatcgcggttcgggtgcggcgaggatcggangagctggcggagctgcaggcttgcatcgtccccaacgaattcacggccaagaagaacttggtgcttcgatccatttttgacccgaatta

SEQ ID NO: 13640 - DNA, 480 bp, Glycine max
attcaattaacaccgtgttcgggtgaagactttatgaaatcgaggtcgtagtatggtggtttagcgggtatggattggaagcagtaccggctcgtacccaagaacaagaacatggattatggcttcctgcttttgctcctcttcttccatatcttccttcctcactcctctggtaaacccagtggagtgtgtgtttctcaaggaggtcgttttcctcccttcaaatcagagggtagcactcccaaaaagggtcctaaagatttgactctttgccggatctttcgcaaaaagacttgctgcgatgtaacccatacacatcctgcacttctgtctgtaaggaagcttgcttctactggggaagctagccaagagtgcttgcacttatgggaactgttggaatgttccatatgcgatccacgtgttggtactcagcctggacctcctcttatttgtgcatctttatgcgagagactttatgag

SEQ ID NO: 13641 - DNA, 395 bp, Glycine max
cttgttttgtactataatgcaatgtgccaatgcctcaatcctatagtttaatgaagtagttagttgtttgtccctagtacatctgtcagcaacctaagattaggcctagacataatctggcttcccatatttagttggatgaacttttctgttagatttgagagttacacacgcaatctagataatgttatttataattctttctgaattaaaccaaaaaaggtttcaacagataccagatagaaagtgtaaaacacaggataagggcccctaacagagaggtacttctctcaatacacaatacacaggcttctcaatcacacccaaaatacaatactgaatgcagaaactgacacaccatatgcattagagagagacatgcataactggagaaa

SEQ ID NO: 13642 - DNA, 407 bp, Glycine max
cagcggcagctagattgctgggaggaagcaacggaagccgggcacttagttttgttggaggcagcggtggcagcaagagtaatggaggaaatactaggattggttcgattggtgcttcaagtacaagtagtgcaatggcgaatccgaattttgacgggaaaggaacttacttgatcttcaatgtcggagatgcaattttcattagtgatttgaattcacaagacaaggaccccataaagtctattcacttcagtaactcgaatcctgtgtgccacgcatttgatcaggatgctaaggatgggcatgatttgctcattggtttgaactctggtgatgtctactcagtgtcattgagacagcaattacaggatgttggtaaaaagcctgtcggggccctgcattacaac

SEQ ID NO: 13643 - DNA, 537 bp, Glycine max
tccgtttcaaatatgagcagattgcaagatattggaagtcaccatcatgggttgctattccttttatctttcatgcatatagattgcaccaaatacatcgagcagcaaaatttctaacagttatatcatttcaagttaagaaggggtatagcaaactgcctgtagccaggggttctttgtcaacaactacaaatgcctttcgtatccttattgtgatttggatttggtctttctcaagcttcctcatgagattcctaacttctgcttctgcttctacaactaagcagtgatgcctagatgatgtaaggtttgttcacaatatcatctcactgttcaaaacagaccccgggtcatctttgggccgaatatttctatatgtactttgtctttgggtgcttttttgggtgtgtgaaaaaaacaagacaatctgattaggcgcggaccccctaacaagtctaaaactaaaaattgggggggctagaacttgtaaatggggttttaaatccagaaaaagcaaatgaagggatattgtttgcc

SEQ ID NO: 13644 - DNA, 396 bp, Glycine max
tgttttttcccgcataaaaggagaacttggtttgaaggtatatgtcactgatgacccttcagtaaaatcctcaaaccctcttcatgatgtggaaccctctgcgcacaccgtccaacactcaaccccagatcaatcaccagtttcattcactaattcaatcctgaacgtcttttctcggaagaaaaatgagacaaagcacacatttcatacccttccaaattcaaatgaagaaaaacagcataaatcttcttcttcttcagctgctgcaaagacaactaaagactctgggatgcatgagtctaaatctggactgcctcctccaaaagttttgcatgcgtatccaggtttgtcctccccaatggattatgcactcatagagacaagcccttttcttgg

SEQ ID NO: 13645 - DNA, 418 bp, Glycine max
tgatgatgctggagaaatcgtgcaaattccattggatgataatgaaatacaagatatagagttgcaggatgctaagaatgtggaaaatgatgctgatgccgtgccaattacagatgctccccttatcggtgctccatttcgtttgatatcatttgttgctaattttgttagtggtgctgacttggttgacccaagctcttcaaacaccgctcgttgacgtggttgaccaaagctcctttttattggcagtcttgaacatacaataacctcacttacattaggcagaataccaatataggttggcctaatttgggccattttaatgtttgtatgttaattctttgaacaaggaaatacagtactggggaaaagtatatagttttatgtgcgttcttacttcatgaagccataacaaaac

SEQ ID NO: 13646 - DNA, 444 bp, Glycine max
  unsure (1)..(444): unsure at all n locations
actctgccaccgcaaacccttcctcacagcactcatcgattcttttggtgccttatttgtctattcggttgaagttgaataatagaacattccatggctgaagaaatgaaaatggtagaacctggaagaggtaagaggaagtttttcaaaacgcaaggccataaaaagtcaagtaagaaagcaaaagtgatgccaccacaacatggacaaaagaaagttaaaatagacaaaaaaatgaagaaacttttccgcaagcgagcacgggagtataattctgatgatgaagaagatgatgaggccactgtccctgctaccttagagcctaaaagtctggcatctatcaccaataaaagaaatgacaaggatggcatagaaagtgaggataggtctgaggatgaangagctgctggacccacaaaaaacatggattaagaatgctactga

SEQ ID NO: 13647 - DNA, 400 bp, Glycine max
gcaatgcgccttattgtccgttgaaatttagttctggtacttctagttcattcagctgctgcgcaggaagccaaccccaactaaatctgagtctcttccatagctcacagcaacaaagccacattgattgtgctaacaagtccttaaagtcaaaggattccactttaagatctggaggcattgattttcatccacttctgcagaaatctgatgatacacagtcaccaacaagttttgatgccattcagcctgagtcactggttaatagtggtgtgcaggctatagccaatagatcttctggcctcaatgacaaatccaatgaacttgacttggagattcacctaagttctgtatctggaagggagaaatctgtgaaaagtagacagctaaaggcacatga

SEQ ID NO: 13648 - DNA, 612 bp, Glycine max
aataattctctatttccaaatttgaaaattccgttccctttacactttttatttttattattatagatatataaatattttgcctttcttgtattttatttaatatttatttattattcttcctttaccttgtgtttgtgtttcaccacaacagtttcctcgattggttgatctgctttctgggccatgttggtgtcgatgaggaggatcatgttcagaggcatccacagtgagttgtagaatagaagcaaaaagagaagttcttggtggcgatttcttagatgggtcttcttctgtgggtgtgagtgggtgtgagttttgactgtgttggaaaaagaaggcttttttttttttccttttaaatgttatgagaggcattattcttggtgggttttgtgaggggtggctttgatttgcctggattttgatatggggtggtgttttccttggtttggatcatccaacaaggggggcagtggtggtggggttgagggcagagggggttcccaacaaaagattcttcttttaaaggaagctgcttctggtggtcctcagtctcaccttcccagcagggttaactcagataaatcaaaatcacgaaatggcgctgat

SEQ ID NO: 13649 - DNA, 472 bp, Glycine max
gccacgcgtgcggtcagggtcgcatttttaggtctgccaggactgtggagaggagatccttcggacggtgagattgaacagatgtttgaagtgggagagtgcgtgaggttgaacgacaatgcatataattggaaatcaattgggccaggtagtgttggtgtcgttcatggaatagggtatgaaggagatgaattggacagaagcatttttgttggattttgtggggagcaagaaaagtgggtaggaccaagttcccatcttgaaagatttgacaaactctctgttggacagaaggttagagtaaaacaatatgtaaagcaaccgagatttggatggtcagggcatacccatgctagtattgcgacgattcatgcaattgatgctgatggaaagctctcggatatgcacaccagcaggatccaaaacatggatgttggacccatcagaagtgaaggtggtagaagagaaggag

SEQ ID NO: 13650 - DNA, 768 bp, Glycine max
ctgcatctctcctacactttctttctcttatcttcccaaacccaccaaaaaagaatcaattttttaattccccagaaggaaaaaacaggaacttttttctccctcaatccacccaccctcttctctctctctatttctcaacacacacaagcactcctcttcataaagccgtgaccttaggtggaattggaattggagatctagatgtgcctaatcagaagcatgagatcgcagtcgcagcgtgtggtgcaggaacaagaagaagcagagtgtgtcggcgacagcatgcgacagagttgttgggccaacatgccccaagagcttctccgagaggtcctcttcagaatcgaggcctccgaggacgcgtggccgccgcggaagagcgttgtcgcctgcgccggcgtttgccgcagctggagacaaatcaccatagacattgtcaaaacacccgaactctccttcaagatcaccttccccattgcgtatctgcagcctggcccaagggagaatctcctacgatgctttataaagcgcaaccgttccagccaaacatactatttgtatctcagtttaaccaatacactagctgaagatgggaagttccttcttgctgcacgcaaatgcagacgtccaacctgcacagattatatcatctctcttgatgcagatgatatgtcaaagggaagcaactcctatgttgggaaactaaggtgtgatgctaattaggcactgtggctattattgttgtcttgtttgttagtgcaaaga

SEQ ID NO: 13651 - DNA, 874 bp, Glycine max
acgcactcctcctcctcctaggtggaattggaattggggatctactagatgggcctaatcagaagcatgagatcgcggtcacagcgtgtggtgcaggagcaagaagctgctgagtgtgtcggtgtcgtcgtcggcgacagcatgcgacagagttgttgggccaacatgccccaagagcttctccgagaggtcctcctccgaatcgaggcctccgaggacacgtggccgccgcggaagagcgtcgtctcctgcgccggcgtctgccgcagctggagacatatcaccaaagacattgtcaaaacgcccgaactctcctccaagatcaccttccccatttctgttaaacagcctggcccaagggagaatctcctacggtgctttataaagcgcaaccggtccacccaaacatactatttgtttctcagtttaaccagtacgctagctgaagatgggaagttccttcttgctgcacgcaaatgcagacgtccaacctgcacagattatatcatctctcttgacgcagatgatatgtcaaagggaagcaactcctatgttgggaaactaagatcaaactttcttggaacaaagttcacaatctatgatggccagccacctcatgcaggagcaaagattatgaaaagtcgctccacaaggctggtgaatctaaagcaagtttcacccaaggtccctacaggaaactatccagtggcccatatttcatatgaattgaatgtgcttggctcaagggggcctaggagaatgcattgtgtcatggattccattcctgccgctgcaattgaacctggaggtgtagctcctgtacagactgagttttctcttaacaacatagacatgtttccttcattcccctttt

SEQ ID NO: 13652 - DNA, 1626 bp, Glycine max
gaagcattgaggtcacccattgaatcaactccaattaaggtatctggctcttctactgttaatgttagtccggtcaactgtaaagtggaaagaagctcccctgtcaggccttctccaattcttaatggagttgatcccatgggccgaagtgcagagaaaccaagaactgtggaagatgtaatagatagagctaaaccatggcaactatctgaaattctggatcctgtccaatgtcggtcagttaccatgcctgagagcacagattcttccagcaaggttgtcagacttttatatacaaactctgctgttggtattttggcccttggttcaaatggtatccagaagctttggaaatgggctcgcagtgaacagaatcctactgggaaggctactgccaatgttgttccactgcattggcaacccaacaatggtcttcttatgactaatgatatctcgggcgtcaaccttgaagaagcagtaccttgcattgccctctcaaaaaatgactcatacgttatgtctgcctgtggtggaaaggtttctctatttaacatgatgacattcaaggtaatgacaacattcatgccgccgcctcctgcttctaccttcctagctttccatccccaggataacaacattattgccattgggatggaggattcaaccattcacatctataatgtcagagtcgatgaggtgaaatcaaaattgaaaggccaccagaagcgtattactggtttagctttttctaccaatcttaacatactggtctcatctggtgctgatgctcatctttgtgtgtggagtatagacacatgggagaaaagaaaatcaattccaatacagctacccgcaggaaagtcacctgttggtgatacacgcgtacagttccattccgatcaacttcgcttattggtagttcatgagactcaattggcaatatatgatgcctctaagatggaacgcattcggcagtgggttccccaagatgttctgtctgcccccatatcatatgcagcttattcctgcaacagtcagttaatatatgctacattttgtgatgccaacattggtgtttttgatgctgatagcttgaggctcagatgtcgtattgctccatcaatatgcttgtcaccggcagctttaagtggaagtcaaggtgtgtatcctcttgtggttgctgctcatcctctagaacccaaccagtttgcggttgggttgacggatggatctgtcaaagtgatagaaccgaacgagtcagagggtaagtggggaacctgcccaccaacggacaatggaatattgaatggtagggcaggatcatcatctacaacaagcaaccacactgctgatcaggctcaaagataagatcaacaattgtattatactagtgtagttattttcatctgtaattgtatcagcttagatgtttagatttcgattcaccaatatgtctcatcaatatcaggtcagcttggacataaaatggtaaatgcttagacgtacaatcgtgtataccttttattcttgttaactcaattttattgtttatatttatgttgtaatgtccttgtatcttgcttacaagtgtatgtcaattttccttgcccttgcggaactccgtat

SEQ ID NO: 13653 - DNA, 544 bp, Glycine max
ctggaaggaacactttcccagatttgtatgaagactctactggagaagcatctgcttataatagcaataagagtcatagaatgagcactaaacatggtgttgaggggatgcgatctgattctgcttctaaccatagtgatcactatgaagagaagcttacagttaagcagaaaaccttgatgctgcatggttatgataacatcaatccaaagaatatacaaaggagtgaacatgtaaaatctaaaccttctagttcaatccataattcccgtgttcctatggatactgaagaacgggggttatctgctaggatggcaaaggaagagatgtttaaggggaacaggaaagcaaaaaatacatactgcgatgtagagggagcagggatgctttcaaatgaaatcatggttgcaaaacgagctaaagttgacatgcttcaacaatacaatgtgaaaaaatcacctgttgctgagatggaactaaagaaaattcagagatctgttgcagagatgccttctagctttagcgaggatgaaactgctgacac

SEQ ID NO: 13654 - DNA, 574 bp, Glycine max
acgagggactttcaaaggtctcaaggccagttgctctggcttttatgaagaggactcttgctagatgccgcaaatttgagggaacagggaaaagttgctttttccggcctctctttaaggacgtcctatttgctgctcctgctcagtgacaacactggttcagctgttgctgcaaatctctcactaacccgtaattctcagcaagaatctgcaccatcaggttattttccttgcagggagcatgatgtgttgggaaatttagaccatccctccgaccaggattttgctaggactggaccaatactaaacagagggaagaaaaaggaactgctgcttgatgatgttggtgctagtccttcgctgagatctgcatcaactcctggtagttctttaataggtggagcaaagggaaagaggagtgaacgagacagggacaaagactcttctggaagaaattctgtttcaaaaggtggtcgttcttctgcaaagggtgagcgttaaacaaatgcaaagtccaaaccaaaaacagctcaactatctagttctggaaatggatctctaagcaagttaatgg

SEQ ID NO: 13655 - DNA, 543 bp, Glycine max
cccacgcgtccgcccacgcgtccgcccacgcgtccgcccacgcgtccggtttgcaaaggaagcattttttcatttgccaatcgaccttcttcaaccctctagatcgaaaggccaattttctttttcttttagttcttgttattatttcgcattctttttaccttttcaattcttcaaaaattctcgcgactgaattcacgtcagaacacggaaacataaagttcagttttttgcatcgtttttattaaaatttgttggcgaacaaaacagagaaaaaaaaaccaaaaaattgaaatttcttatccgttttggcgaattgaactgcgtgttcaattgggttgttgaattcgaggcagagggaaccgcgggtgtacaaggaatttcgattctgctgttgttagaaacggtgtagtttggtgtgagagaagctggggacttggggtggtcgtaacgacgtcgttgacggagaaggtatggattgtagggtttgcgtggccaccggcggcgatttgtgggtcagagttggcggcggtggcgagattg

SEQ ID NO: 13656 - DNA, 465 bp, Glycine max
ctacatcaagagagaaattaacatagagagagatgggggcttgtttttcttgtgactcatcctccacgttgaagaatatccgtgtggttcatctcaatggttatgtagaggattttgatcaaccaatttcagtgaggcaagtaattggatacccccaaaaacactttgtttgcacttccactcagcttctttccccttgctcaacatcaatgaatggagacacccacctccaacctggtcaagtgtatttcatgctaccatactcggtactacatgccgatgtttccccggtggacctggctggccttgcaaagagactcaccgcaatagcaaaatcaggtcctttgtcaagccaaacccaaacattttggaattcaccctgcaggagtcctggtagagttggggtggcagagcaatatggtgttggtatgatgaatattggaggaaaaagcccttctaaagtgc

SEQ ID NO: 13657 - DNA, 607 bp, Glycine max
cccacgcgtccgcccacgcgtccggtttcacgtgcatcattttgttgatggagtcaaaatgtgacgcaagaaccatttaatttaagaaaaaaagcctcgaatcttattcaccgaatcacagttgtatgtagtctaaaaagttggcggaatataactctgttgtgtgcagtggtctctcacaagggaataatagtctcacatacattcacaaaaacctgagctttattgcgttgttgttgctgtagatggaaaagggtagaaccgtggtggtgtccgctctgcagtttgcttgcaccgatgatgtctcaacaaatgtcgccaccgccgagaggctagttagagctgcacataaacagggtgcgaacatcattcttattcaggaactctttgaaggttattacttctgtcaggcacagagagaggagttcattcaaagagctaagccacataaggaccatcccacaatcctcagaatgcagaaacttgcaagtagcttctgtaatctgcttcttagtcactgcttgcatgccactcaatggactggaaccatattatgctgctgtaagggacagtttaaccatattattcttttttgatgctcatgatg

SEQ ID NO: 13658 - DNA, 588 bp, Glycine max
ggtctaaaaagggggcgtaatgtgaattctattgtgtgcaacgtagtgttttcccacgaggcaacaaggaaacaataatctcatattcccaaaacttgagctttattacgttgtttctgtagatggacaagggtagaaccgaggtggtgtccgctctgcagtttgcttgcaccgatgatatctcaacaaacgtcgccaccgccgagaggctagttagagctgcacataaacagggtgcgaacatcattctcattcaggaactctttgaaggttattacttctgtcaggcacaaagagaggatttcattcaaagagctaagccacataaggaccatcccacaatcctcaggatgcagaaacttgcaaaagagttaggtgtagtcattccagttagcttctttgaggaggcaaacaatgcacattataactcaatagccataattgatgctgatggaactgatcttgggatttatagaaagtcgcatattccagatggaccaggttatgaggaaaagttctattttaatccaggtgacactggattcaaggttttccagactaaattagcaaaaattggcgttgctattt

SEQ ID NO: 13659 - DNA, 449 bp, Glycine max
ctctctccatttcccatttcttctcaactctccgtttcccatttttgttccgctcttctggactctctgttcctctccattcttctgaactctctgtttatctcaaaacttcatgagtaacggttcataaacacaaaacctttttgtgtttaggtccttttttggtggtgtaatggttcaatatattttttggcatgttgtttgcagagaaggtggaagaacacactttagctgcgatttttatctcgatcactaaaggtgcgacctttttgtttatctttatgagctttgtgtttctcaccatttttctgttgcgcaggtatgtattttcatgtgggtatctcttgcgttcaattatttttggatgttcctaacctctctatggtccagagctctcgatttctctcgatgatggtagctgtgacctttgtggtgctctcgatcgctaa

SEQ ID NO: 13660 - DNA, 480 bp, Glycine max
tcgcccacgcgtccggcgtttaactcggtgtcccctgattttccagttttctgtgttacattgaaattcttaaaacaacagatttttaggacattgagaaaagtcatcttaatctgcatggaattttaccacgtaatacgggtaccaattcattttgtcaaatgtacctaatacgggcaccaatacatgctgtttgtatgcagcttagtatgtatctaatgagactaggtgtggtttaaggtatagttaggtatgtcttacgtactaataagatcatcctgccccattccccaaattaaagattttaagatttagtgatcttttggctttttttctcaattttctcatgtttgtttctgtatttaatcaaaatccattcatccttgcttgtgagatgtgagatacaagtttgtcaatttcttttggtatagatgtttaaactataatctattaatatttcatattcttctatagaacacc

SEQ ID NO: 13661 - DNA, 463 bp, Glycine max
tttaattattctgacgttatcatgttaactagttgtgctcaaatttggttgaagtgcgaggagctcgaatttatttttggttttttgaatatttctaattattaaattaattcttgtctaggccgcagatttatatgtctgatttcatttccttgtgaagggatattatcttaaagctggaatatggtatatttatgttattatgtttaatcttggttggcccttgatatgaaataaatcgtattgggaggagaatacttgtgtgcacccccatcctctgacgtagatgtgtcactcctttcggaccttggtcagaaaaaaaaatacttaccatattttgctgtgtaatgagtaatttggcttttgcttgaccatgttctcattcttactgaattgggttgctttgaattcttgtgtgtgacttcattattatgattttactatacattcaattgtgcttgat

SEQ ID NO: 13662 - DNA, 454 bp, Glycine max
cccacgcgtccgcccacgcgtccgcccacgcgtccggaagggttgtggggtttgagttccgtttcgctcctttccatattccattttcatttccctcctctatttttttttggccagaacacgaaggaaggtggccggaagaagaatgaaggtgactggaacaaccttttgttacctcattcgaaggtggccagaatacgaacgaaggtgacggaacaacaaggagacaaacgattgacatggtgttgatggaccaaatgggtgcaaagattggcgcgactctctgacaaggattgtcccttgaatttcaacctaagttgcatttgggttggttatatttgatccagaacatcaaagttgtggacaatcagtatgaatacaaacatcgcaccacggcatactttagtagatgttgtgggtgttgatgctgaagttattgaacgtaaaacagtga

SEQ ID NO: 13663 - DNA, 453 bp, Glycine max
atataatgtagctggaggcggtgaaagccatctgtatgggactgaagggcctctttattagtctgaggaatggatttaacaatttcaacttttgttttgttcttgctctgctgttcttggggattttgcctattgcaaagaagaaatatgcaccagacctactgattgtgatatcacctatatatatttggctggggtttatgtctttgcagccacacaaagaagaaaggtttggctgaatttttacctggtcttctgttacaaatttaaatttagtcatatgatgttatttgagacaaacacttgcacaatgcacacaccatgtatattattatgttttatgctatgacattgaaatggatatcaatttcttatttcctacaattttgggttatacaagttcacataccttatatttattcgtaatctccaatataggcttcattttataag

SEQ ID NO: 13664 - DNA, 1023 bp, Glycine max
cccactcgttcgattccttctctctttctcctgcaacaacaaccatttaagggatttcgggatgcgtttctgcggtctgttgattgtgttggtttgttgagtgtggcgttaacgtaatttggttttgagtgaagatgaggttgtgatgtggttgagtgagtggtttttgtagtggaaggtttgttacttttgttgttgttgttgttgttgtgttggtttattttgttgaagagttcggaacatagtcggcggacgagaaaaattggaatttttggatgggtaataaacttgggaggaggagacaagtggtagatgagaaatatacgaggccgcaagggttgtataatcataaagatgtggatcacatgaagctgaggaagctaatactagaatcgaagttagcaccttgctatcccggagatgaagaaaccgcatacgatcgtgaagagtgcccgatttgctttctgtattatccaagtctaaaccgatcaagatgttgcacaaagagcatttgtacagagtgctttttgcagatgaaagttccaaattcaacccggcctacacaatgtcccttctgcaaaacggcaaattatgctgtggagtatcgtggtgtgaaatctaaagaagagaagggattggaacagattgtaagtggttacctaacatgattattgggtttaggaatgcattttcagaaatattttcacatcgaatcaggttcatgtgcatactcataattattcaggaagagcaacgtgttatagaggcaaaaattaggatgcggcagcaggaacttcaggatgaagaggaatgaatgcacaaaagactggaaatgagctcctcgaatgtgaatgtggcagttgcagatgttgaatacagttcaaatgcagtgtcttcatcttcagtttctgttattgaaaatgatgaaattgtttcttctcaagactcatgtgccacatcagtggttagagcaaatgcaaccactaggaccaatagagatgatgaatttgacgttgaccttga

SEQ ID NO: 13665 - DNA, 433 bp, Glycine max
gaagaaaccgcatacgatcgtgaagagtgcccgatttgctttctgtattatccaagtctaaaccgatcaagatgttgcacaaagagcatttgtacagagtgctttttgcagatgaaagttccaaattcaacccggcctacacaatgtcccttctgcaaaacggcaaattatgcggtggagtatcgtggtgtgaaatctaaagaagagaagggattggaacagattgaagagcaacgtgttatagaggcaaaaattaggatgcggcagcaggaacttcaggatgaagaggaaagaatgcacaaaagactggaaatgagctcctcgaatgtgaatgtggcagttgcagatgttgaatacagttcaaatgcagtgtcttcatcttcagtttctgttgctgaaaatgatgaaattggttcttctcaagactcatgtg

SEQ ID NO: 13666 - DNA, 619 bp, Glycine max
cggagcatttcaagagttcagagctgggtgttgcagttcctggagttttctgcttttatgacatatctccaatcaaggtcaactttaaagaggaacatactccatttttacatttcctgaccaatatttgtgcaattattggaggtgtatttactgttgcgggaataatagattcatcgatatattatggtcagagaaccatcaagaggaagatggagcttggaaaatttacatgatgtggtcaaattctgcatgagtgctctaatttcctaattgagtctgcttttgacgtatttggttggctggtgcattgagtatcgtttataatgtggtagcatatgcacataatgccaagggtaagcagagccgtaggttcggttgatgcatgaagtgtattttttggatcatgatttttcctttaatgtgtagcaatttctattaagttgctactttggtgggtttttaatatatggatgaagatgaggaatgcaaagagttgttgggaactttttagatatttttgctgcataatacatgacatggttgattatgcataacatacagttcttgtgttgctgttccccgtgctgtaatctagccaatgttttcattgaacttg

SEQ ID NO: 13667 - DNA, 471 bp, Glycine max
cggctcgaggtaacgcactccactgcactgttgttctctctcgaacttatcagatgagcagagacaatacgccagcaatggcaaaggaagaagtctgtgatgatggttcctccagtgttgagaatgtggatttagaatctcatgctcgaattagtctcgacaaggataatggcttgggaacctgtcgtgtgtgccaatgtaccgaatctgataaaaaggcagatgccgcactagaatttttgggcatcattccaggttcagaaatgtgtaaaaccaagggggaagtgggatctgatggtggtggcgatggaattcccgaaaatacgtctcttgacagaaataatgagaaaaatgctggtatggtggaatttgtaagccctaatggggaggttttcatttgtaaaagcgatttggaacttggtttgtgtcatcaagataaattagttgaacttggatgttcttgtaaaaacg

SEQ ID NO: 13668 - DNA, 600 bp, Glycine max
  unsure (1)..(600): unsure at all n locations
aaaagattgttataagaagcagaatgatgctattcagaatgcttcattgaaagttctatcatggctgaacatgtgttttaagagtatgattctcccttttgagcagctttatgagactgtagacaactttaatattcagatctattccaaaaacattatcagagatcttttagcaggccaatcaactcacaatggtcagcttaatggaattcaatgcaataagtttgttgaatcaatctatatgaattcttcatgtgacatgctgggaaatatagtgcactcgttaaagattgaaggtccatattctggtgtctgtccatccaatggatctttaccttgtataaggtattcagtttctttggctgtagagggtgagaatctgaaagaagttattgaagtttgtgatgagtttgagtttgaagtgggaattggtgctgtggtttcctatgttgaagatgttgtgatgcagatgtctgttggtcagtgcgcttatttctcttcaaacttacttactactgagttgattnttgcttcagctggtgattcagtcanaatgctggcctcgttatcttctaaagactggtgtatggaatatgaaat

SEQ ID NO: 13669 - DNA, 393 bp, Glycine max
cagaattaaacctgtgtcttacaatcttgcaaatcacatgaggaaaaatgataggaggtgtggtgtgtcttggatgaaattgtgacccttctagtcttttttgtcacattatggcatgtggggaaatgcatctaagttacttggctattttaacttctcacattgttggcgcttcaaatggtcaaattccaaattgcaatggttttttggaccatcatatataccacggcatgaacctttcggctgtgaagaaattgtcaacattaggtcattacaatgttgggccttgtcaatttgtcatcttattcatgaagagttctatttgacttcaaactttaaacacacgtgcaatggtaaagcactgttgatagtgaaacagcaatgattggtgtc

SEQ ID NO: 13670 - DNA, 675 bp, Glycine max
gccaaatatgatgtcataaaatactgcataggaacacttgtttcgatctctgctgttggtcttgctgttttacgcatattgatgtaaatggactgtattccaattaacatccacaaagaggaggtggaaaagaataagggtaactccgtagctgcattgaagatttatcttctgtcagagaaacaagtgcaactttttattttggtccataccagtggagctgaaaggaactagctccaatcaggcatgaattgggcctattttttaagccccattctatattcttttgttaatttatttgccatgccctttgggatatttgtgcaatttgtgctggctgtatggtatgaatacaatacaagcaccttggattataatgcctcgacccttctaccaaagtggaaggatcaaaatgcttattggctccaagtctatgcgaattaggttcctttattcgcttcaaattcacgatgttgtacaatcgatttataggcatagtaatacataatattataaccaatgaagaataaagagaatatattctcatatattggttaattgctcatacctgtccatagaattgactgtaaccagggtttttaaaactactgaaccgatcaaaatattaaaggttcatgacaacctctagcctgtgtcctgtgtccctttaaatgt

SEQ ID NO: 13671 - DNA, 1029 bp, Glycine max
tgtttatactttggttcctcaaagtcagccccttgttattcatgttcctgctttaccaaggaatgcacagtcattcaggtggagtggtggttccagttcaacaaacaaccattcctcaaactcagttatgtgtgcagatagaaataatctaccaaatgaggaagcaagctcaagaagtatgcctagaaacattatagaatacccaatgtttgtgcctgcaaccaacttaagaaacgttgttcggaatccagctagaacttcaaataatgcaaatttaagtattccaggaaatgttggttcttcatcgcggacaggctcaaatccagctgtcaatccaccacctgcctcggcgtgggtttctcgccctaatcctcagcagtatccgcgcagattatctgaatatgttcgtcggtccttgttttctcctggtttggaagctgctggaagttcaagcaatagttatactcccttccgtggtcctcctacttcatctgaatcaaggggactgtcatctggggtaaacccgttcgagaggcaaggtgatagtgaatttggaattccatattcgttacaatctttggttgttgctggtgaaggaagtagtagacttgtatctgagctgcgcaatgtgttgggcctcatgcgtaggggtgggaacctgcgatttgaggatgttatgatccttgacccttcagtgttctctggaatagctgatattcatgatcgacacagggatatgcgacttgatgtggataacatgtcctatgaggagctattggctctggaagaacgcattggaaatgtgagcactggattaagtgaggagattgtatcgaaacttttgaaaaagaagaagtattcagctgaaccagattctcagcatgaggcagaaccatgctgtgtttgtcaggaggagtataaagatggggatgatttaggatcactggattgtgggcatgattaccatagagattgtattaaacagtgcgtaatgcataagaatttgtgtcccatttgtaagacaacggg

SEQ ID NO: 13672 - DNA, 439 bp, Glycine max
cgaaatgttgcttcatcacagactggatcaaatccagctaccaatccctcatctgccccaacttgggtttctcctcctaatcctccacagcatccacagaggttatctgaatatgtccgtcggtccttgttttccccagttctgatgctactggaagtccaagcaataatttttcttccttgcgctctggtttttctacatctgaaccaagggcgttatcatctgggagtggggcaaacccgagatcagcttcatggttggagaggcaaggtgatagtgaatttggaattccttattcactacgtactttggctgttgcaagtgaaggaggaagtagtagacttgtatctgagctccgcaatgttttgggccttatgcgtagaggtgggaatgtgcgatttgaggatgttgtgatccttgatcatcaatcatttctttc

SEQ ID NO: 13673 - DNA, 712 bp, Glycine max
cccacgcgtccgcccacgcgtccgcccacgcgtccggtctgatgcaccctctcaattgagaggctcagctagtgcagggagcttggaggctgcaaaccatttaaatgcaatacaagtagactattctgaaagtgatctagagtcaatggattatgctggaatgtttacaaatacccaatggacttcctatgtggcttcacatcacaagagacaagcttttgtgatgtatttgcagacgaatccaggaggaatcactatatttggatggacagtcgaccggtctctggtcaacaccatatttttccttgaattaagtctggttacctttgttcttggtcagactctaatctaaggataaaatttgcacaatgacaccaaaaaacccttgagctttaggtcttctgggttatcactatcattttgattgaaagtcctccgctagtatgccgagccagaatgtcgcatgcacacagtagccatgcagagaagtagagaaacagtgtgtattgtccacccagggactggaccaggcacactactgttaaatgcgaggcctcttcctcaatccccagcaacacagatgtctccaaaattctattcgtcattctcattcctcagtcagcatacttatctccgtggatcttgtgacttctaatttgcacaatatgcaatcaaacaacataccttaaactaataccaccttaaaagatac

SEQ ID NO: 13674 - DNA, 526 bp, Glycine max
ctgccgccaccaagaggcatagctgaagaatactgtgagagaaagaaaaatgttaggaaaagagtgctacacaaacccgccatcaatcctaaattcctctagtgcggttggccatgttatcaatatcggtggtgttaattcttacgtcactggttcccctctctccatcctcgccataattctagtctctgatatttttggatttaaaccaccacttttaaggaacattgcagacaaggttgcagctactgggtattatgtcgtggttcctgacttcttcaatggggaaccctatgatcctgagaatgtgaaaaggccgaaagatgtttggttaaaagatcataatccggaaaaaggtattgaagttgcaaaacctgttattgaagccttaaaaagtaaaggtgtctctgctattggagctgctggtttttgctggggtgctaagaccgttaccaacctcgggaaatccaaacatatccaagtttctgtgctattacatccatcatatatcatagtggatgacatc

SEQ ID NO: 13675 - DNA, 665 bp, Glycine max
gagagccttcagacgttcagttagaacattttgactttgtttgccccatcggattcggaatctattatcgtttttctgttgcaatatgtcacctatatcacctcactgaagcaccacaatgataatatttaatgtcatttcctttttcttttcttcttcgtaataattaatcaaatataataaatcatccagaatcgggcttcagtgaagagcgaaaaaaagcgatgaagaagggcgaaaataagggccggactcggagcttcccggtggatccgaatgttccccgatgggtttgccagaactgccgcaaccctctctgcatcgtaggcgccgattcttacgccgacaagttcttcaacgatccttctcgctacgggatgcaagggtcgtccattcatggtgccagcagtgtgctgagtacgactaaaatggacaattcatatgtggtgttgcccaagcagagacctctggctcagggaaatgctcctcggccacgcggtgatgccgctgcacagcctgggaaggcgatggaggagtcatttgtggttgtgtacaagtctgaatcggggattgatggaaacggggcgcatttgttgggcacaggggctgattctggtggccatttgccgcctcataactctgggtttaattctactattactgtc

SEQ ID NO: 13676 - DNA, 880 bp, Glycine max
cctcgagccgaatcggctcgaggaagaaagaaaagtgtgaagatgaagcgctaattttactggataactggcacaaccatcgggacaacgactgggagacagcagggccagaagaggagaagggtgcttctttctgattcagattatgcatcttctggatcatctgattttgagtttaccatatctgaagaagagagagaacaggtgagagaagccaagagattgtgtggaaatttgagaaataacttgaggagttcatcccatctaataaataatgaagaggttggagtccatgagtatcaacatccgcagcggaagcctccagctcggaagggtaaggaaaagatagaagaacctctgggaagaaagggtaaggaaaaggtggaggatttaaaaagtaagggaaagcaaacatgtggaatttgtctatctgaagaagataaaagaagagtaaggggagtactaaattgttgcactcacttcttttgttttgcttgcattatggagtgggcaaaggtggaatctcgctgccctttgtgtaaacagagattcaaaacaatcagcaagcctgcacggtcaacgacggggattgatttaagagaagtggtgatacaagtccctgaacgtgaccaggtttatcagccctctgaagaagaactaaggagctatattgatccatatgaatatgttatttgttcagagcgtcatcaaggtggagatgatggcctcatgctactctgtgatatctgtgattcccctgcacacacatattgtgttggtttggggcgggaagtacctgaaggtaactggtattgtgatggatgtagaccagttgctttgggatcttcaagctcccaagttcaagaaggtgtggctgatc

SEQ ID NO: 13677 - DNA, 652 bp, Glycine max
ggcatctcttaggcaattatataaagtgaagatggaagaactgcgagctgaaagccagcagatttctgatgcatctgggtcaattggacgctcaaaaggagcgtcagtagtttcttctcaacagcaaatatctgttactgttgtaacagagttcgtgcgttggaatgaagaagcaatctcaagatgcaatctctttgcttcccagcctgctacacttgcaacccatgttaaagcagtgtttacttgcctgctagaccaagttagtcaatatatagctgatgggcttgaacgggcaagagacagcctgactgaagcagctaatttgagggaaagatttgtgttgggtacaagtgttacccgtagagtggctgctgcagctgcatctgctgcagaggcggcggcagctgctggtgaaagtagtctcagatctttcatgattgctgtgcaacgttctggaagcagtgtagctattacccaacaatactttgctaattctatatcccgggctttggttcccgttgaagggtgaaaaggtggtggttggtgaggaatgggcaatagcattgtcaggtgaagaggctgctgcttataaaggactacaacagtgcattgaaactgtcatggctgaggtggagcggttgctttcagctga

SEQ ID NO: 13678 - DNA, 432 bp, Glycine max
ccctttctttcgggtctagggttttgatcgtccctcttcccaatttcagggtaagctttggatctcggatcggagccttacccatcttttctaaatcttcaaggaacgctttgggacactaaagtttccaaattgtagagaaaaaaacagaatgagagggaagacttgaatcaggattcaggggtgagatatttgaggatggttacttatggtgaaaggtgggctgataaatagggagtaagcatggaaaatttggtgagcaaatagtttgatctgctttgaattttgataggctcagagattacaatatggaggatgagagtgggcttgagctcagcttgggtttatcttttggaggctcgtcagccaaacccaagggtaagaatggtagctcctcagatgctagagatgaagaagttggtaggggtggca

SEQ ID NO: 13679 - DNA, 265 bp, Glycine max
gagagatgcagacctgacctagggtttttttatcattcctcttcccaattccagggtaagctcttggatctccgatcggagccttacccatcttttcttgatcttcaaggaaccctttgggacactaaagtttccaaattgaagaggaaacgataaaaaaagggcttgctccggagagggtgcgtctgggggggaagatttggatcgggattcgggggtgacatatctgagggtggttacttatggcgaaaagttgggctagtga

SEQ ID NO: 13680 - DNA, 409 bp, Glycine max
acggagagagagagattcctatttcccagattcgaaattcgattcccatttctcactctttctgtcccccatggcgaagcctcgcaagcccaagaacaacgaagaccccaagcccgaaaactccggcgccgtagttcaccaccaaaagctatgcctctccatcgacatcgacaaacgccaagtccacgggtacactgaattggagattgcggtgccggagattgggatcgcagggttgcacgcggagaatttaaggattgagagtgtttgtggttacggcgagccaacggagttcgagtattacccgcaccatcagcagcagggggaggatgagaagaaggttagctccgtgtgttctcctagctctgctgccgatgctgctgtctcagtgtacatgtccgctcttgag

SEQ ID NO: 13681 - DNA, 412 bp, Glycine max
gaaatttctacaagcaaaggccatgtgtagttgttgcaattgtagggaagcaaaattggactatgatatggagagtggagaccaattccagaaattccattgagaaatatctacccccatggttgttaaaatcgcgctttaactcatgaaatcgtatgattttacgattccaccaagggtcggcgagttgaatcggaagtagaatcgaaaccggagtagactcgtccgatttagcgcagactcgggcgagtttaggtagactcgcgagtctgcgacgagtccgcaagttcatgaaattttcaaaacgacatcgttttgaagcagagctactcccttactcatcatgagtcgtgactccgtggccgtgctgtgctgaagctgctactcaccgctgttcactcgcatcgtcatc

SEQ ID NO: 13682 - DNA, 432 bp, Glycine max
ggcagatcgagtttccaacttggcatgggccaaggatggacaggctctgctttacgttgtgacagataagaaaatgaggccttaccggtgggtggattgttgttgatctatcggtggcttggtgctgtgatagaattgaaagaagtgcaaaatttatatacagttccttggttgcttttagtgatgttcttcaatcagaattgaagtttcatcttcgtaacctatgttaaattagttttgattgaagaatattaccaaaagcacataggaattgcatatgagttgcgtcttttaaagaatcccttagtttgtgttttgcttatgattgctagaattgaagttcatgcgatcttcctcaatctcaagtttctgcttggtgccacagtatctactacagtctgattggatcaactgatgaaagatgtttgcttt

SEQ ID NO: 13683 - DNA, 877 bp, Glycine max
gttctcaggtccatggatctcttgcgacaccacgtttctcccatcacttcgtagatctctgtagagccttttatcttctgaactatgtaccttctgttgctcatcataaatatgaggcttagtggtacttctttgtacagcttcgcttttccttcaagatttgtgtccagaagctccattaccctcattaactgcgccgcaaaagatgttcctctcactgtttctgagacaaagttaaggcattgaaggccgagatgccattttccaggcctacattaaggcattggtggaagatccagacaatacagaattgatgcacgaaagttggaagagtgggctggagttcaaaatccaacttctcttgttgagttttcattcaaagaaggagaagctgagaggattttaaaggacattgcagaaagggctggggggaaggggaattcagttatagtcgtttctttgcagttggactctttcgtctagttgagttggcaaatgccacggaaccaacaattttggacaagccttgcccggccttttaagacttattattattatgacttggatttattcaaataatcatttcattactgtattttgttttgcaattggaagttgaagctaccaagtctagttctcacttcccatctacacatgttttagcaaattacaaatcaagaaattccaacatattttgaagtgcttaatagattttgcctgataagttatcatccaaggatcgctctaatatcatgattgtaaaaatttctgtttcatacatccaaatgaatctttggtgttaacataacagctttgtgcggctttgaacatcaacaaaagaagtgttgattgggacttggatgtgtattgtatcctg

SEQ ID NO: 13684 - DNA, 446 bp, Glycine max
  unsure (1)..(446): unsure at all n locations
attcagtaaggggtgaagaggttgaggttgtttcatttcatgctcttcaatggcggttccactcagaatgaaccacaacaaacgaggcggcatgcttgctcgcttgaagattctcgtcaactctcactctcagagcttccactcccctgcgcccaaacgaccaaagcaagatcaatcatcaacagaaaatgacttggattactctatttgccggggccgcattgatgtctcaaaatggaagactttggatgcaaaggagcttggtataactagttctatgatttcatacccatctcagtttgtcctgaaacttcttcggagaaatggatttggtcctacttagtaggtgggtgtgtgagagatctactattgaataaaactccaaaagattntgatgttatcacgacagcaaagctgatggangtgagaaaagcggttcgtggttc

SEQ ID NO: 13685 - DNA, 615 bp, Glycine max
ccaatgactgcctaggccatcttcccttcgtaaataaaaaactgccattgctaagaggggaggttagagcatagtgtgctggttttattaataccactgatccttttctttttctcctgaaaccaacacacacacacacaaatagtaaaatgaaaaaagtaaaataaaaactactgattctcaaacacacgcgtctttataacaacccaccaaccggttattcctcctactaccacaaaccgctttctgattaatttcttcccttgtcttgtgtgtgtcctatctatgcttctctctttctcagtactactactgctctctctgcaactccatgccaatttttcagggctcatgatggtggcctgaactagtgggcaaataaagaccacagtgaaaagagataaccccactagtcataaaagggagagaagagaaaagaaagaaaaaaaaagagaggggctttatgagttatgaattatcatcatcacccgacttgcttttaacttttttttctttgtttgaattttccttctttttttttttttaacgttttgttggtgaaattggatattagggaccagttgtttgggttttagcatagagggtgtttgggct

SEQ ID NO: 13686 - DNA, 382 bp, Glycine max
ttcttttcctccatcatgatcgatcatgctacaacttgcacgcattcgttcattcttatcctttatataaacacattacacacttaacaagtacaagaacaagaacaagaacaacactcaggtgcggaatcagtcatcatggcggtgatcaacaaagaaataatcgatgagccctacgaacaagaggagtgcatcgactacgagcagctgaagaaacgcatgtggaaggaccgtgtgcttttgcagaagctgaaggagaagcgcgagaagcaagaacccgacgtggaagcgaaacaagaggcgtcaaggaggaagaagatgtcacgcgcacaagactcggtgctcaagtacatggtgaagatcatggaggactgtaacgcgc

SEQ ID NO: 13687 - DNA, 814 bp, Glycine max
gaacaattaaaaagattgtcatgctatcatgtaatcgaatacaattaggcttcatcttcatgctcatattcttgtaccttgaatatgagcaggaagatgaagcctaaatgttaatattcttatgtgaatttcaatattgattgcatatttgcttgaaccttgaatattgtttcaaagtaatgaactttatcaccctcttactaaaggttcagaagggttatcaaaagatttagaagtttctgagcatttggatggcaatcttgaccaggagtggtcacagatttcacagatgcacaagagtatagcttctttcagagacaagtcaatcaacaaatggcagcggatgacacaagtgactactggtgctgctgccattaagggaaaatttcatgcttttaatcaggatattagcaatcaagttgctgcttatatgagagatcctaatagaatgatcaatcagatgcggctgagaagatcagctgttaatatatttggatctgttccagaggttgacgataaacataaagaagctgaaacacgtactgatggtgatcctgaacttctggatgactctgaattttatcaacaattattgaaagaattttttgagacagttgatccttcatcgtctgagaaagcattttatgctttgaagagaatgcaaccaaagaaaagaaaaattgttgatcgtcgtgcctcaaaaagtcggaagataaggtataatgttcacgaaaagatagtaaattttatggcaccactacctgccaatattcctcctatggctccgaagttgtttgagaatctgtttggattg

SEQ ID NO: 13688 - DNA, 447 bp, Glycine max
cccacgcgtccgcccacgcgtccgcccacgcgtccggagaagagaaagagaccgttatctaggtctcgccgatagctagcatcatggcgtccaaggcgctcctcgtggtagcgctcctgctcgccgccaccttcctcgccgcctccgctaacgagcaagcccaggcggccaaagaggagaagaaggcggaggtccaagactggcacggcggcggcggctacccggggcacggcggcggcggcagcggaggctacccggggcacggcggcagcggcggcggcggctacccgcactgccggtggagctgctgcaaccgcgggtaccatggcggctgccggagctgctcgcaccctgatcatataccaaatcccatggaccgttctgagctcgtcgaggtccacaactaaatagtaatgagatgcgcttgttctatatattccggtacgt

SEQ ID NO: 13689 - DNA, 705 bp, Glycine max
gtctttcgctgtcatcctcatttaccttcagattggatgcgcgttaattggatcgctgggagcatcgtacaatggcgtgtcgctcgtaaatctggcacgcgtccggttcgctttggtcgcaattgagagtagcagtcagagccttggccgcacctacgcttttcttctcttttgtgccatcttgctcgacatttcttggttcattcttttcgccaacgaaatttgtaaatttacttttcatgtaccgttgtggactatgttgttgagaccaagtgactgagtgcgtgtttgaattagcatccgtcatccgcgattgatcaaattttcacgtcaagatgcaccaaaaacaactaaaagttgcttctgtgatccacgtttgagtttggtggatgtgaatccaaacacactatgagttttggcttgcttgtgtaatgattcttgcccctaaggaaggggaattgactatgatgttgtctttatcttggattatatgtgaccttaggttatataaaaagtgcaaatatggattgtgacaaaatttacatagagttccttaggtgtttttggtgttgttgtttaattagaattgaagtttcagctcaataatgtatgttagtctttaatgtaaacttttgttacacggatgtaaccctaattttgattggaagagagtgctaaaagcacctatagagcttcatctaagga

SEQ ID NO: 13690 - DNA, 357 bp, Glycine max
taagcctcttgatcatcattctagaggttgttattctgaaagtgctggacaggcttctcgtaggatgtttttggaagaggacgttgtcttcaagctcttgtgtcaccatgaaaaagttggcagtcttattggcaaaggtggttctgtagtgcgggctctccagaacgaaactggtgcttctatccaaattgtggaggctggtcctgattcagacgagcgtgtcgttgtcatatctgcgcgagagacatcagagcataagcattctcctgcacaagaagctgtcatccgtgttcattgtcgacttacagatattggatatgaaccaagtgcttcagatgttgctaaacttcttgtgcg

SEQ ID NO: 13691 - DNA, 471 bp, Glycine max
atttctaatgaagcataagttggacaaaaatttactttttaattgaaactaatactgaactgactttcttagttagagtgaatcatttcttattttttatatgtaagatctaatatacactatataaagaaacttgagagattagtgggggcatttccccccagtgttaaacctgcatccgtccctgactcaggtaattgtttaaagcaagtattgttataggactttcaatatctccttgttccttctcatttagagcagatgaaatatacttgggttgtattgaactattgatcaattcatgcttcttaatgacaaaaccttaaggtattgtctagtgcattgtataaagtagatctttattgtaagaaaattccatttttactaggtgtttgcacctaagtagtcaaatctagccaaacattttgattccttacaatcactattgcaacacttgatatcacctaaata

SEQ ID NO: 13692 - DNA, 1052 bp, Glycine max
actaaccgggagcaaaatcttggagcttcctctcgcgagggcgggccggttctagaaactatgggtgaattcttccgggctgcaaggttttcacgcgagacggatactcaggataagaaggattacactttgtcgaatagggaggtgcttcaggctgtggagtaccatgccgagagtgggttgaaggagtgggctactgcggtggttaagcttgaggtgaatgaggaaatgggtggtgctgatgtgcattttgaagcgtttcagatgagtgatgtgtgtgtgaggttgtttaaggaagggtggttcgagacggagatcaaggaggacgatgatcccaagttgtcgaagatgaagaaggatgtggttgtcggggttaaggatactagagaggttgacaatgatttcttcttggtcgtcgtcaaaatcgctgatcatcagggtcctctttcatcatcatttcccattgagaaccggaacactcaagtgactatgaaggctttgaagaatcatctggaacggtcaaaaaatcttccatttgtgaagcgaatttctgattttcatcttcttctcgtattagcaagggttttagacctgaatgctgatgttcctgcattgacggaatgtgtgcagacacagacttctgttccagaaggttatcagatccttattgagtctatggcaagcactgcttgatgctgtgggcacaagagaattatgcactctacattctggtctttgcagcaatatggtgcatattgccccatagcactcacgcaatgtttcgtatgttggtaatttgtacactgcttctttattgctgcggaaaatctcggatctgtcattttactgaaaatgagctgatgtggtttacatgttttaatgtttcaattaattagagatagctccttctaatagttactattttaagtgcgatactgctccaaaaattatagaatgaagccaatgtttaaaatgtgtgctcaaggctactggaatgtctttctcgggcattgtgagcgtggagtccaccgtcgaacttggctatgaatatt

SEQ ID NO: 13693 - DNA, 1040 bp, Glycine max
actcgagcgaattcggctcgcggtgaaacttgttttccttgcgcgaagctttggcattcccccaatcgcttcatcctcatctacttaaccctaaccccacactctcacatactacatatataaaaccgccgtcacgatgatgctcagaattcgtagccgcgatggcctggagcgagtgagcgtcgaaaaccccctcgccacaacagtctcggacctaaaacggattatccaaacccaattgggaatcccggttcacaaccaaaccctctccaccaaccagaacctcctcttggccaaatccctcgaagatctcctccgattcaccgacatgtccaacctcgatgcgtctctctcgtctcttaacctcggccacggctccatcgtcttcttggcctacgagggcgagcggcgcgtggcgggccccgccttcaaccccgccggctccttcggccgcaagatgaccatggacgacctcatcgccaagcagatgcgcgtcacgcgccaggagaatccacactgcgagctcgtctccttcgaccgcgactgcgccaacgcgttccagcactacgtcaacgacactctcgccttcgccgtcaagcgcggggggttcatgtacggcaccgtctcggaggtgggaaaggtcgaggtggacttcatctacgagcctccgcagcagggttcggaggacaatctcgtctttttcagggaccccagagaggagaagtttgttgaagctattgcggtggggttggggatgacgaaggttgggtttattttcacgcagacgataactcaggataagaaggattacactttgtcgaacagggaggtgcttcaggctgtggagtaccatgcggagagtgggttgaaggagtgggttactgctgtggttaagcttgaggcgaatgaggaaatgggtggtgcagatgtgcattttgaagcgtttcaaatgagtgatgtgtgtgtgaggttgtttaaaggaagggtggttcgagacggagatcaaggaggacgatgatcccaagttgtctaagatgaag

SEQ ID NO: 13694 - DNA, 940 bp, Glycine max
ctcgagccggttctactttatttggatctagttggcagcccagcaagtctccatttggttacacatttagtacatcattgtcatctgggtttttgttcggaggaacatccactgcttctgttacttctgccagttcaccctcgatgtttttatcaacctccagtgcatcaactcctcaattctcattcactccggcagcagcagcctctacctccacgcagcctgcttttggaagtcctaatcctgccttcgcattcggttcagctcctgttaataatggtgagatgagtatggaggacagtatggctgaggatacaggtctagcaactccacctgcgactgctgtatacagtcagcaacctgccccagttcaatcaaattttttatttggagcatcgactccatcaggaggcagtcctttccagtttggtagtcaacagaatattgctccacagaacccttctccttttcaggcttctggcagtctaggagggagtttctcattgggcacaggtggaggtgacaaatctgctagaagaattgtgaaagttaaacataaaccacgcaagaagtaggacctaaagttatgaaaatggttaccttgtatcatgctgcaggctaatcttatagtgcaacaaataaataagctctgaagagtgattgcaggatattactgctcacatggcagtctggacaagtggggtgctattgctaatcagcatatgcaaacttgtcagtcttcttttcccttccatattcaatagaatacaaggctgaagttttaccaattttgtattagtatgatatgatgaaacatgacgtcctgtactaccagtaatggttttaggtcacagtccatgatttggccagttgtgatgatatgatatttcacaaagatcgctgtatccttgttacttgtaatataaccggaattagaatc

SEQ ID NO: 13695 - DNA, 712 bp, Glycine max
  unsure (1)..(712): unsure at all n locations
gttgttcaaactcttagaaatgttgctcgtgatggaaggactgtcatctcggccattcatcaaccaagcagtgaagtctttgcactctttgatgacctcttcttactatctgggggcgaaacagttattttggagaagcaaaatcggcaattgagttttttgctgaagctggtttcccttgtccacgtaaaagaaatccttctgatcacttcctacgatgtatcaattctgatttcgacattgtaacagctacactgaagggatctcaaagaattcatgatgttccaaattcagcagatcctttcatgaatttggctacagcagagattaaggcaacgctagtggagaaatataggcgttcaacatatgccagaagggcaaagaacagaattcaagaactgtctaccgatgaagggcttgaacctccaacacaacatggaagtcaagctagttggtggaagcaactatcaacgttgacaaagagatcatttgtgaacatgtgtagagatgtgggctactactggttgaggatcataatttacatcattgtatccatatgtgtgggaaccgtttattttgatgttggctatagctacacttccatcctggcccgtggtgcctgcggtgcatttatatcangatttatgacattcatgtcaattgggggctttccatcatttattgaagaaatgaaggtattttatcgagaaag

SEQ ID NO: 13696 - DNA, 792 bp, Glycine max
  unsure (1)..(792): unsure at all n locations
gccggcactcctttgtggcagagttttcacttcccggcaaataccctggtccagnaccagaatttcacctccnacatgactcttttgtcctccaacggcatttattctatgcggttaggcaacgatctcatgggcctatacgaaaccacgactcgttatattggaaacgcacgccactgggagcaaaagcggaagtaaaggaagggcagggaccgatttacgcccgagtcaacccggagggttacctcgggatgtatcagacaagcgacgagaagcccgcggatgttcaaaagttcaacacgttccaactaacgtcgtcgtttttgttgctgcggttggaaccggacgggaatctgaagggttattactgggacggttccaggtggatgcttaactaccaggcgattactgaagcctgcgagctcccccgctcctgcggttcgtacggtttgtgcacgccgggtgggtcaggatgctcctgtttagataaccgaacccggttcgaaccgggtgggtgttttaatgatgcttcttctggagacgcagacttgtgtagtagtgaaggaattggtggaaaaagtagttactgggtgctaagaagaaccggagtggaggcagcgcataaggagctactaaggcacgtaacgacgtcgtctctggcggagtgtgagggattgtgccagaacaactgtagctgtcggggggcgctgtatagcaacctaaccgggtttcggtatttgggggagtattcgatccaaaccttgctgggtaccggggatggatcaaaagtgg

SEQ ID NO: 13697 - DNA, 424 bp, Glycine max
gaaaaatatagacttagcgaggacttatattggtggtgtgtacagtgcagaaatttcgtccgtaaacgctgcagactacacccactatatagttatgcttcaaaagtttggtgtcactctgggaaaaccaactgagttgtagtaacaagcttaaaggctacataaatggaagataaagctgcgataaaagaattgctggaagacgaggaaaacccatatgataatactggaaacaaacaagatgcggagaaattaccaatgctacacacccggcagtttttgaatatgggcgagtcttcatcaattttagacggctacacaaaagcatgtgcaatagcagaaaacgctgaaaaagaaaatgttaggcataaaaccttgcatgtgatgataataagtacaatgttgaaggtgaaatcaacagtca

SEQ ID NO: 13698 - DNA, 423 bp, Glycine max
cccacgcgtccgcccacgcgtccggcagaattcaagtttgctttagtgctggtaaaggcaaggtctgagtcatgcttgctcacctggtagtctttagcccggttaggagaagggagctttggttggtggtcttgaatagcaacaaggccactaaaagagagcgagtccaatgaatatgaaatgctatcatacgccacatgtgaggtgagcttgtccattgatttatataaccaaaatggctatgtgggttgaaaacttgtatatatatgcagaaacctgcttagacgctgggaccactttaatgcagctagaatgtgttctgctgagttgaagttgctctggttttatatttttctttttgttgcccgctctgtggttggagggggtaaagccaatacgcatattgaatattagggggcattt

SEQ ID NO: 13699 - DNA, 388 bp, Glycine max
gacaggcgaaaatgttgacaagcttctatcccagaaagttcctaacctaactctcttgcatggggctgtacacgagcgaaggagaggccgcacgtgcgatccttccgaagcttctggtggttcagccgcgcgtgcgcccggagaagctgttgcaggcgaagctgaacgaagctctgtgcctcgcgaactccctcgaagaccagcgcgatggctacttccacaccgatttcttccccaaaccgttgccacctcacgtcctcgttcagaaccgcctttcacgctgccactcctattttggccgtggaaccggcgacaacatcaagggtcacatcgacgccggcggctaatctaacggtgacgtcgatgctcgttttggttatgctatact

SEQ ID NO: 13700 - DNA, 398 bp, Glycine max
cccacgcgtccgcttttaatccttttagctgtgtcctcacacctttattttggcatgcttgaactgcgacacatttcatggtctttcctctcctaggggccttggggcagatatctaacattctcctcaagtcagaagcaacacatgacaaagatcaagatgacaacagtggatccataaatacaaaagtggaaaatagtcaactggaaggtttctatgtagacctatcaattaccaaggaagttattgtcgaaaactctatcagtgtctccattaggaagtgctctgagacagctaagaatattttatatttagaaacagatatacctggagatattctccttcactggggtgtttgtagggatgatttgaagtggtgggaaattccacctgttccc

SEQ ID NO: 13701 - DNA, 389 bp, Glycine max
agagaaagaagaggacttgggggttatatggctggtgggtcgttaccccccgagacaagtggggttgcaccagggtttgggaacaggattagagggaagggtttggagggtaggaatgagaatttgtatggtaggagggaaggtgggagaatggcgtctggtgagaggagcaatgtgggacttgttgatcagcttgatcgtcctgggccaccggcccggagtcacctccattcgggttcggggaatgagaccagtggcattggtgaagttggtggtagggatagtaagcacaagggatgtgggccattgtcgatgggtggtgtttcctgagtctggttggaagggttgctggatttgatgttcttggcgagcaattaacttgattcctt

SEQ ID NO: 13702 - DNA, 411 bp, Glycine max
cccacgcgtccgcccacgcgtccgcccacgcgtccggaaatttaaagctgggggagctcaaaactttaattatattaactttttgatctaattcagaagtaattacttggtgtatacatagttttttttttttgtttaccttaattagcgatttagctatttcgcaatagaagtctcattttctttgtttttgaagataaactgatttgggaaggggagaagtgttcttggctaagtcaatttttcgctttttctgtcttttacttgtcaaattcatggtattctgtgcctaacagctgtagtaaatgtctttatcgaatatttatcaaccaagttaagttccttctgggattttgacctgaagtgaggtttcggtgaatggcggtgtaaacaagatcaaatttggtattg

SEQ ID NO: 13703 - DNA, 916 bp, Glycine max
  unsure (1)..(916): unsure at all n locations
ttgtggaatccaaaaatgtgagggagctgcaactgcaaagtctccatggaatgcacctggtacttctgatcttttagtctcttttctttggctgacgtgttaggatattattttagaaaagtagtacctgcaacaagggttgacaagactgtctntcttgaattaattcacttttttttttttattattgcagagctctttgatctgtctgttcttgaaagtgagactattagggagtggctcttctttgataagcctcgaagagcatttgagagtggaaacagaaagcaaaggtcattgccagattatagtggacgtggttggcatgaatccagaaagcaagtgatgaatgaatttggagggctgaagaggtcctattatatggatccacagccactgaaccattttgagtggcacctttatgagtatgagattagcaagtgtgatgcatgtgccttgtaccgattggaactgaagcttgttgatggtaagaaaaactccaagacaaaggcagcaaatgattcagttgcggatctgcagaagcagatgggaaggctctctgctgagtttccacatgacaacaaaagggctgccaaaggcagagccaaaatcaacaccaaagttggcataggtggtggtgtctattcagcttcacacagagtgactccactgaatggaacatatgagtatgggttagctgcaccatatgactatcttgttgacaacatgggtgactattatgggacatgatctatatggaatgatctgcaagatgctgcattcaacttggctatacactattttgtgctggttttttattttgcccgcctaaatgcttggtctttttgtactacttttttaaagttacaagagatcaaagtcattttttgcgttgtcaagatatcttgtgaatagc

SEQ ID NO: 13704 - DNA, 467 bp, Glycine max
gttagctgaaaaaaatagaatttaaaattccatctatctcaagacagtgaatttggaaaattctcactctcgacggaggcggatcttcgtgctctcgacgcggagcctcgctcactcactctcgaatgcgaagcctcactcttgaacttctctctctgctgtataaacattctagttatggaagattctgatcaaccagccaaatctgctgaaaaccagcaaactgaacaagtgtgtagttttttcagaaagccagttaataaaaagaatataaggaaacgaactattgttaatgaagataatgaggaggactcaaacaatgaaacttctctgttgcatattcagaagaagaccttaaagcctgataataagttgtacttttccactggttcttcaaaaagctctgcatctgctgaacccagtgaagaaccaggaaaaccagtctttcaagtcgagtcttcaaaaga

SEQ ID NO: 13705 - DNA, 456 bp, Glycine max
cgcgtcactgttaaagcgaaaatcacgacactcaagtggaagagggaggtcggcgacggctgctacttcaatcggcgccgctaccgaggtctccgtcgcggcggaaaggggcatctccgctccactacggcggctattgactactatggttaattgcattaattgtacataaatagacctctaaatcaaagttatggaagattctgatcaacctgccaaatctgctgaaaaccagcaaactgaacaagtgtgtagttttttcagaaagccggttaataaaaagaatttaaggaagcgaactattgaaattgaagataatgaggaggactcaaacaatgaaacttctctgttgcatattcagaagaaaaccttaaaggctgacaataaggtggacttttccaaccgctcttcaaaaagcttttcatttggttgacccaattgaggattctgaaaaac

SEQ ID NO: 13706 - DNA, 377 bp, Glycine max
tcgtgccttacaagattgagaatgacaaggtggaaaactattccatcacccaaagcttcaataagcaggaaaattggactaaatctctcaagtacactctttgcaatttgaaatgggctctctattggtttgttggaaatactaacttccagcctctttcagcaatggtatcttcgcatgctgaagtgccggcggttgggcctctgtacacgaagcgtggtgttgatgccaaatctgaatctcgaaactgaacctactaaacatatgctaggttaggctacatagttaggtctcatacaaatgtgtacatagaactacaataaaaaattgttgcttgatcaaaatgaaaaggatgtgtttggagtttggcatgaaaa

SEQ ID NO: 13707 - DNA, 417 bp, Glycine max
gttagttagaaaaagagagagaaaaaggaaagaaaataaaataaactgacagtaacagatagcgaaacaaccaaacctacaaccgccatgaccgaagaagaccgctccgcccaggaaaccgtccacaatggcgtcgcctcgacggagctaggcggcgaggagatggacatcgctgaggtgacggccgccggaagagtgaagggaccgtggtctccagaggaggacgcgctgctgagccgattggtggcgcagttcggtgcaaggaactggagcatgatcgcgcggggagtgccgggacgctccggcaagtcgtgccggctccggtggtgtaatcagctggacccttgcgtgaaacgcaagcccttcactgaggaagaggatagcatcatagtttcagcccatgcaatccatggaaac

SEQ ID NO: 13708 - DNA, 1258 bp, Glycine max
accaattatccagaattgaagagaagggaagaacgacaaagtatggctggggaccgagatacgcataccatcatcatcatcatctacatacatgcatcatcagtcatcaactgataactatctgagtgttgagtggacaacactgacacgcatcatctctctcacattctcaaaatgctaaccttcaatctcaatgctatctcttcttcgttctcagttgttccatttcatgccaattatccactgtctactcaaacccaattgttagttccttccaatcttagttactcctttgctacaacaggaaccagaaagttcaagtctttccagctcaaggctggattttgggaatcaattaaatctgggttgatgaagaataactccatgcaagtcattgatccaccctctgcagatgaagaagacgaagaacctctgcctcaagagtttgttcttgtggaaaagacagaacccgatggtacaattgagcaaataatattctcttcaggtggagatgttgatgtttatgatcttcaagccctctgtgacaaggtagggtggccacgtagaccattgtcaaaattagctgccgctttgaaaaatagctatatagtggcctcactgcattctataagaaagtcacctgggtcagaggggaatgaacagaagagattaattggcatggcccgtgctacgtctgaccatgccttcaatgccacaatttgggatgtcctagttgatcctggctaccagggccaaggtcttggtaaagctcttatagagaaactgattcgaactcttctgcaaagggacattggcaatataactctgtttgcagatagtcaagttgtggaattttatcgcaatttaggctttgaagctgacccagagggcataaaaggcatgttttggtacccgaatcactaattgcaaccctaccaaagcttgtttttggattatgttaacattgcaatttgcaaccatgaaatatacaacgacagaagcagtgacaaatttatctatcacttgtaatacgaaagtataaagattgtacgtcaatcctgtaattattgtgttttaggtgtttgtaagttattcacttcttaaaaaagttttgcaacttttcgaacagatgatcatgagtctttgattatgcctgcttgatatttgtctgaaatccgtcagtgactacttactgattttttaatgttttttttcagttttggatcaattgttgtactatataaattagtggttttct

SEQ ID NO: 13709 - DNA, 415 bp, Glycine max
ctttgtgtatctcctataactgtacaactctttttctcatgcttacttttagtattgattattattacttttacatgtgtttgtgttgtttcaggttctcagttgttccatttcatgccaattatccactgtctactcaaacccaattgttagttccttccaatcttagttactcctttgctacaacaggtagacacactctcactgtctttgacttcttcccttgtcttcatttcttatcataatttgtttactgcaatgctttctctgttggttgcaggaaccagaaagttcaagtctttccagctcaaggctggattttgggaatcaattaaatctgggttgatgaacaataactccatgcaagtcattgatccaccctctgcagatgaagaagacgaagaacctctgcctc

SEQ ID NO: 13710 - DNA, 697 bp, Glycine max
ttctctcttcacctacactttcctctttcaattcaattcaattcttctttttggttcagaaactctgtacagttaatcaaaccctacctcacctcaccggttttagctgttaatttaatatatagatagaaaaccctaaaccccttccatttcccttccactcactcttctaacatggcgactcagatcctctctcgcatcttccccaaaaccctaaccctgcccccttcctctcccgttctctctccaccgccccctctcctccctccctctccgcgctctccttcctccgccgcatctccgttgccgccaacccctccctccaccgcgccctcctccccaactctccctccctccgcgccctctccacacgcgccactacctcctccctcaacgaccccaaccctaactggtccaaccgtcccccgaaagaaaccatcttgctcgacggctgcgatttcgaacactggctcgtcgtcatggagaagcccgagggcgaccccacacgcgatgacatcatcgatagctacatcaaaacattggccaaggtcatcggaagtgaagaggaggcgaggatgaagatatattcggtctcgactaggcactactttgcgtttggggctcttgtggtctggaaggagcttttctttacaaggatttaaaagaattggcctggtagttcgggtggggtgcttcc

SEQ ID NO: 13711 - DNA, 671 bp, Glycine max
cccacgcgtccggccaaccagtccgtcagtctactcctgcttccaaacgccccctcgctcggtgccctctccacacgcgccaccacctgctgcctcagcgacccgaaccgtaactgcaccaaccatacggacaaggaaaccatcttgctcgacggctgctacttcgaacactggctcgtcgtcatggagaagcccgagggcgaccctacccgcgatgacatcatcgatagctacattaaaaccttggccaaggtcatcggaagtgaagaggaggcgaggatgaagatatattcggtttcgactaggcactactttgcgtttggggctcttgtgtctgaagagctttctatcaagcttaaagaattgcctggagttcggtgggtgcttcctgattcttacttgaatgttaaggaaaaggattatggaggtgagccctttattaacgggcaagcagttccctatgatcccaagtatcacgaagagtgggttagaaacaatgcacgtgccaatgagagaaacaggcgcaatgacaggcctcgtaatgctgacaggtcaagaaactttgagaggaggagggaaaatgtggtgaacagagatatgcagggcaggcctcctatgccaaatcctggccctaatatgggtggtcctcctccaagcaatgcaggcgggta

SEQ ID NO: 13712 - DNA, 660 bp, Glycine max
caaagcacgacttagcttaggaaataagaaataatggaataaccggtagccaaacaggtcagagccgaagttgatgggtggttctacttgtttctgcaaagcacaagagcaaaaccctacttgaaccctttctctctctcaggtcactgctcacaaacatcacaactatgtccttgggaattcttcgatcccgagcgatttcattggcatcgaagcgattcctctgcaccaatgccgcttccgcttcccctcctcttccccctcctccttccgccgcctctcccagccgctggagcttcctcaaatacgccctcgtcggcgctctcaccggaggcactgtctttgccggttacgcctcttacgcttacagcttggacgaagtagaacagaaaacgaggtcgctccgtgaatcggccaagtacactgctggtgatggagtcactgctcttgataaatttcaaggtttgctatactcaactgcaatgacagttcctgctaaagcagtagagctttatttggatgcaagaagggtaattgaagaacaagttaagagttatactgaaccatacacagacaagctccttcctgatttgcttcctcaggagcaacatgtgtttacacttgttcttgatctcaatgagacattgattcactatatat

SEQ ID NO: 13713 - DNA, 714 bp, Glycine max
caaacgctttgcttggcagggtattgctaagttgccatttattgatgaagtgcgtcttcttgcagaagttcaaaagattgaaaacttgttaacaccagaggaaaagcgacggaatgctataatgttcgacttgctctttgtgaattcttgtcatcctctctctgcgtgcataagtacacttgacaacaagtgtaaaaacatgcccaacagtgaacgggctgtggtcaaggaaaaaatcaaccccaaagaaagggatacatgcagtggtggaatgaatggttacatatccttatgtggtggagaaccttgccctcctatttttaggtctcctattgcaagcatggaagatatcatggacaatcatgttatatgtgcaatatatagactcccagatgcacataaacatattacccgaccaccacaaggagttaaatttccaaaaaagattgttgaaattggggatctaaaacctgaacctgttttgtggcatgaagattcaggcaggagacaccattctgaaaatgggaggaaaaaccctccaggatctatttctggtcgggagcttggggatgcagcacacagactcattgtcaattccttacaggcaaaggttgatactaatggataccgccatccgcataatggacctcctatatcttatcctgcacccatgggtcattatcgacaaccagtgccttcgtatggttatgaatc

SEQ ID NO: 13714 - DNA, 597 bp, Glycine max
tttgcagatggagaaaactgttgatatcaatgagaacagtcaatttttggaagatctagaaatgcttagtgctgtacatgatgaacacctgccaagtttcaaagaagagacaagcacagatcaacctcaagatggattgggtgggatcaagctacagggaaatcccttggaacagctagggttgtacatgaaggatgaggatgaggaggaggatgaggaggaagaggatgaactgcctccgagtggtgctgtaggaccatcaaatgatgttgaagaaggagagattgattgatttgttccccttgattgttccattattttgaacggatatataaacggtatttctggggaacagttgctggacttagagatgctgctttttttgttgctacggggaacagttgctgaacaaataattacgggttgtatgtctgatgctggttcacacctaagtttgaagatgggatagcaaaaactagtggcaaacgagtgaagattggatttggttttggttctttctgattaattttggttttaacttgggaaatggtttctgaaaatgtggatagaaagctcgcagcccccattattgaagaa

SEQ ID NO: 13715 - DNA, 554 bp, Glycine max
ccctcgcggccgcccacgcccccgataatggaagcagtcatgatactgatcttaataaaacgccacggcaaaaaccaaggagaagaaagcaccgtcccaaggtcatcaaagaaggcaaacccaaaagaactcggaagccagctaccccaaagcctgttcaatcaaaagaaaagcaacctgtcaagaggaagtatgtgagaaagaatgcactgaacaagacttctactcctccaacagaagagactggggaattgactaaagaaatgtcttgtaaaaggtccttaaatttcgacataggaacaacatatgaaagttctgctgccatagaaaatacaagaacgctattgggaaaagaaaatggtgttcttgtacacgaaacaaatgtaggtcctgcatttgatctaaacacttccatgaagcaggcatcaacagttacatgtcactaccagaagacacacaagccctaaatacatcttcgggaagaaaaagctcacggacaaagccagaggaaaacccacctccgaagaagaagtatgtgaaaaggaaaggagtga

SEQ ID NO: 13716 - DNA, 502 bp, Glycine max
cccatgtgctaaaaagcaaattctcctttacttacccttcctttctgttcctttccaattctcaaatacattttggcttttagtttagttgtatcagcatagaattaacaagtaaagcaaatctcactttttctctctatctttcctcttctggtgttcattctaaagaaatatatagactcgaatggaaaatgaagagttttggagctgattttgaagaattttggctatgatcttttcaagcacatgaatttataaaagatcagatttcaggaaacaagctcagataatttgctgctgctgccatgaaggagtttccttcttgttttggagaaaatggtgttcgggttgtagattcctcctattcaagcaccacaaggggagctcaaaatgctgctacttgtgtctatcagtgcaagttaggaggccgttcatgcttgatcactgtctcttggaccaaaaatttgatgggacaaggcttgagtgtgggaatagatgaatt

SEQ ID NO: 13717 - DNA, 492 bp, Glycine max
gatcgggtagcttctcgctataatgatctggaagacaccctagccagggcaaatgcgtggctcaatgcaggtcaagcctcaggtgtccctattgtcttcatgaacatccaaaccgagtccctacttactaagatatctggagagacagcttcctccactgtgaacgcagggtcattatctgacttatctaacgtagcgaatgcaagcctttacggctttgaggattaccatggaatagacatcggagttgttcgagctgttcgcctatggtatgctccggttgcaggagagttctctattgagatcaaactaaaagaggaagatgcaaagcttggctttgccattagtcgaactgaagagggatttattttcatctcatcagtgattaatcaagaaaatgtaccggccgcacgatcagggctgagcaatctctataaactagcaacggatacttgtaggatgttggtagtttcaagagtgttcaatcaaaaa

SEQ ID NO: 13718 - DNA, 410 bp, Glycine max
cccacgcgtccggcccgggcgcggtgtccattgcgggccgagtgtttcggcccgcccggaagacgtggcggcccactagccacgttgtcgaatacggcgtcgtcttggactccgacggcaacgtcatcgatgaggttttggcggttccgatgctggcaccgaggtcctacacgcgcgaagacgtggtcgagcttcagtgccacgggagcgaagtgtgtctgcgccgcgtgcttaggacttgtttggaagccggagcaacactcgctcaaccaggcgagtttactcttcgcgcttttcttaacggtcggttggatctctcccaagccgaaaacgttgcaagattaattgccgcgaaatccgtggctgctgcagatgctgcactggaagggatccagggtgggttctcttct

SEQ ID NO: 13719 - DNA, 432 bp, Glycine max
cccacgcgtccgcagtgaactcttgccataggttatactatgacccccactgtgttcagtgtgttgtatggctgagatatataagtcaaaggtcatcaggtagcaaagcaaattttgggaacttacgggataaattcttataattagcattctatgctggcctagaccccacttgaccgcaatacgtcaataccaaaagaagaaaagaacaaattcctcaaatgcttaactagctgaagtgttcagggtaatataaagcagaaatcctaagatatgcggacatattttaagaagttttgtggaaagtagaaaaacagatttcaaaaaactcatcacatttgaagatattaagatgctacagaatttcaaacacaaaccaactatattataggaaaatataatttagtggtctccattttccttggggccggc

SEQ ID NO: 13720 - DNA, 436 bp, Glycine max
gtgaagtgtgctttccaaatttcctttactcattcatagttttctttctttctcttgtggccggtgcgagggagactgagaccgaagcaagagtcgatggcggacccctactactcatacggtgctccggtagccgctgacggagctagcattgcaaggagcagctttgctggttatatcccctctgagccttcaaattccactgaattgaggggcattggatcagattacctgcagagagatataggcttgttttacagtgctgatgataccttgggctccagagttcattctgagcctgttaagggttattcgcctcttgcagatcccggtctgagtaaaaaacgagatacaacaccattgggcattaataatggtgttcctgatgtaagcagtgaaagaccagcttctaaaagcagttatgacggtctaccaa

SEQ ID NO: 13721 - DNA, 1147 bp, Glycine max
ctcaggaactaagcagatcgaacaaacataattttcagaactaggaggcgtggagtgtaattaatccaaaaccttgtttcacttactagctaagaagcaaaaggagagcaccgcctcgcactgcgcatgcagagaaaaacctaaagtggcggaagatgacggaggtggcgagatcagtggtgcacgacgttttggggcaaagagtggtcgacgtggaccagccaatcgtcgattatatcgtcaacgtcctcgccgacgatgacttcgatttcggcctcgacggcgaaggcgccttcgatgccctcggcgagctcctcgtcgccgccgactgcgtcgacgatttctcccactgccgctccgtatgcagcacgctgtgcgacaagttcgggaagcacggtttggtgaaggagaagcccgctgtgcgaagccttgcggcgccgtttcgaatgaacgagggaatggacgacgtccaagctcccaagaagaagcccgagcccgtcgacggccctcttctatccgaacgcgatcgcttaaagctcgagcggcgaaaacgcaaggatgaacgccagcgagaggcacaataccaaatacacttggcggagatggaggcagcacgagcggggatgccggtggtgtgtgtgaggcatgatagcagtgggggaccaaacgtgaaggacattcatatggagaatttcaacatctctgttggtggtcgtgatctcattgtggatggttgtgtgacactttcatttggaaggcattatggtttggtaggaaggaatgggacggggaaaaccactttccttaggcacatggctatgcatgccattgatggtgttccaaggaattgccagatactgcatgtggagcaagaggtgacaggtgatgctacgactgctttgcagtgtgtcctcaatgctgacattgagaggactcagcttctcgatgaagaaactcagttagttgcccaacagagggaattggaggacaaaaacgaaaaaggtgatttgaatggagtggtcggtagggatgacatttcaaaaaggcttgaggaaatatataagaggcttgaactcattgatgctgattctgccgaggcacgagcagcatcaatactagcgggtttgagtttcactcctgagatgca

SEQ ID NO: 13722 - DNA, 392 bp, Glycine max
atgaagaaataataataataacaccccaatagaatagaagataggataagtcagtagggaagagccctttgtggttgtggttgtgggtaggtgctgctgctgcttccattcctattcttacagtgaaggttcaatggaagggacaatgcagcttgcatacgagactgttgtgaagctcatgctggctgcactcgaacgcaacgtgctccctgacgtcatcaccaggagactcacgcgcttgctgttggctactcgccttcgctctgcttacaaaccctcctcccaacttcaactctccgatctcctctacttcgcgcattcattacaagagatgcccatagcaatcaacactgacaaacctaagtctcaacattatgaattaccaaccgctt

SEQ ID NO: 13723 - DNA, 808 bp, Glycine max
tccacgcgttcgtccacgcgttcgcccacgcgttcgcgccgttacgaagctacccatttcagagggtcaacacatcatagcactgaaccaacggcggccgaaaccaccgttcgacgccgatctttttccaccgtttcttcaaagtttaaaagaaagtcatggcaatgaaccatgccaggtctattagacacattcttaccaccaaagaggtagttggggttgcatgccaacgaactttcgccaccggtaaagcaaagaaaggatctaaagggggtgcagctgctgatgcacccaaagcatcaactcttagcaaggaagtcaagtcaagtacagttgtaggtgccagcattctcaaggaaggaactgatccaaaaatccagcctgattcagaataccctgactggttgtggcatctgcttgataaacgccctgcacttagtgaactgcgttggaggaatattgatacactatcttatgaagatctaaaacgttttgttaagctggatacccgagcaaggatcaaggagaataactctgtcaaggcaaagaactgattcaattgtcaaatggagaaattagggggatggagggcttgaaataacagtttggagtttttccatttcttttattatttgatggttctcagtcttgctgggattcctttgactcatgcgcatacatctattgcgaattatgtgtaacataaccctatgtacttgattgttgaactacttgatacttttgttacaaaacttatcggatatgtatgtgatattgtctaattcgtacattttagatctattgcatt

SEQ ID NO: 13724 - DNA, 298 bp, Glycine max
gttcaattgaaattggaagagaatgactattcacctcacacagagtaaaatgtagatctgtacatgtattcataccgaggttttcttccatagctagttgtgttccaccctgaagtgaaataaatttgtctgaatctttcagaagaacgtcatggcaatgaaccgtgccaggtctattagacacattcttaccaccaaagaggtagttggggttgcatgccaacgaactttcgccaccggtaaagcaaagaaaggatctaaagggggtgcagctgctgatgcgcccaaagcatcaact

SEQ ID NO: 13725 - DNA, 256 bp, Glycine max
cacgccgttacgaagcttcgagttcagagggtcgacgcatcatagcattcaagctacggcggcggataccaccgttcgacgccgatctttttccaccgtttcttcatagtgtaaagtcttcgcttctcccgttcatttcttcagatgaacgtcatggcaatgaaccgtgccaggtatattagacacattcttaccaccaaagaggtagttggggttgcatgccaacgaacttttgccaccggtaaagcaaagaaag

SEQ ID NO: 13726 - DNA, 300 bp, Glycine max
gaagatatttgtaatgtgtcgaaaaaccaggtaacaaaaaaaatagaaggtaaaatagtaacaagaatgggaagcattggtttgggttggtgaagaagggaagcagatagggttctagtatggataaaaaggtaatattgaggatgatgaagttggaaattcatttaatgtaataagtaaagagtgattagtagtaattaggggtcaagaaacaaagtggagatcggagagagagagagagagagagaggagggaaaggatgggttgttgccaatcatcgacgttgctgagagtgggaga

SEQ ID NO: 13727 - DNA, 337 bp, Glycine max
acgaattatataactgcaaatgataaccatctgtgggagatgcagtatgttgcactgtttggtggtcgtgctaaactggttgaaggcaagaacaatacgcttttgctggaacccatagatactagaatcattactgattggaaagaagctgttaaaggagcatatactggagcattatccaggatattaacaatccagtcggcgatattgtggacactgcaaatcagtaggttgggtaaaataactcaaaatgccccaatgtacactctggaatatcggaaattcaagatattaagcctgtaacagcattgcaggctgtggaatatgttctagagga

SEQ ID NO: 13728 - DNA, 832 bp, Glycine max
ctgtacaaagattttttttttgatatggggggtctttgttcaaagtctgtgaaaggtgacaaggtgtttgctaaatcagatggacattctgataaccataaatctgatggtaagaaccacaagtccaccaacatgcctagtgatttgacaagtgcaggggatcatggagtggacaagaaaaaaacacgtttgttctgctgctgctgcagggaatggttcggatgatttctatgatggaatcccacggtttactgattctttttcccacaagtctaggtcagtaaaatcaaggcatgctgtggcgaaggtctcagaggtgagtttacgcctgggcagagctggtattgacgttttggacactcttggaagcagtatgacaaatttaagtgctggtgggtttgtatctggagctgtgacaaaggggaatgaaattggtattttagcatttgaggttgcaaacactattgtcaagggttttagtcttatggaatctctttcgacaaaaagtattaagcatttaaaagaagaggtgcttcaattagaggctgtgcaagatttagtatcaaaggatacggatgaacttctaaagattgttggtgcagacaaaagggatgagttgaaagtcttttctgatgaggtaattcgttttggaaatcgttcaaaggatcctcagtggcacaacttggaccgatactttgagaaagttagtagagaacttaattctcaaagacaatcaaaggaggaggcagaattactaatgcaacaattgatgactatggttcagtttacagctgaattataccatgagttgcatgctttggatagatttgca

SEQ ID NO: 13729 - DNA, 416 bp, Glycine max
ctctctctttctcgcgcgcgctacttattgtagatttctggttacatcaatttgtaagtgtgtatgttggtgatcttcacgatcccgagtgtgggtttcagatactatctagtttttcttttaatttcattagaagaatggaagtactcgaaggatttcttttcgctttcaggttttggatctacacgacgattcccaatccttacccctatgctaatgcaaggggaatttccgggttccgttccaacatgttcatgatatttttatctgatagctattaatataatgatcgcatagcggagtggatatcgcgttagactccggatctaaaggtcgtgggttcgaatgccactgcgatcgcttctttcttttttttctttcgaaaatgctgatttttcattttttttgcctttttt

SEQ ID NO: 13730 - DNA, 1138 bp, Glycine max
aaacttttgatcattgaagcagatttagaagaagcaggtaacgtttgttttattcgttgtttgggtcctttgagacgaaggattcgatttgatctgaaatagcttgattcgaagaagaatgagtggcggtgagaaagaggctatggcagaagtgaaggagtggctggcgaagacgttcgaaagcgcgggtaaatccgttcctgaattcgaatacacgccgcgcagcgtcaaacatttgaaccatctcatgactctctccaaagccaaagacgaagccgcgcgcctcgtcgctcgcgatttccgcctcaagtcctccgactaccgatcccaagctgcgaggattagggagattttggagaatctgggattggcgcaggagagcttgccctccaatgtggttacatcggcacaagtgcgtgcgaatgtcgcccacttgttgaatataagagatactgaaatgagtagctttcttgtagcaatgggtgatatttccttgaggaagactgaagttgaggaaaaaagggctgaagtgaacaaggaatccaagcttctacttgattacaccagaaaggccatagccaggctaacctatttaaaaagaacacttgctcagttagaagacgaggttgccccatgtgaggctcagaaggaaagctgggagacaaacttacaagtaatggctgcaaaagaaagacagtacaaccagcaatgtgacaactacaagagaatgctggatcgttcaggttataacccagaggttagccatgggattttggttgaaatggccgagcatagaaaggagctagagaagaaaactaagcccatccttgatactctgaggagttaccaagatttgcctccggataaagctttggctgccttagcaattgaggataagaaaaggcagtatgccgatgctgagaagtatcttgaaaatgtattgcagtcagctcttgctagttctgagtgatttagtacaaaaatttttcatttattttttttgtaaatttgcttgcttttaagattctatttttcaaccctgctaaagatgtgtatggacaaatgtattacgtaagttggctttgcttggactggactgaatgggatcaggtgcagttgtattttaaattgcccctcc

SEQ ID NO: 13731 - DNA, 754 bp, Glycine max
aagacgacagaagggggttgataaattaagcaagtaaggttgggatggagggaactaatagtagcggtgataacgtgagtgcgggtgtggtgcagagtaggatgaggatgaaggtgatggtggctatagacgagagtgaaggaagcttctatgctcttaagtgggcccttgataacctcttcaccaccatggccactgtgggagaagcatcatcacctgaaaatgatggcatggtgttcttggttcatgttgagcccaaagttcacaactatgtgtatcccatcggacccggtggagcagccttttatcctgcaactgtagtagtggattcggtgaagaaagcacaacaagaacgatcagcagctattctctcacgggcattgaaaatgtgccatgataagctggtgaaaggagagagtattattcttcatggagacgcaagggaaatgatttgtgaagccgcagagcaaatgcaaattaatctcctagtcttgggtagccgtggccttggcacgctcaaaaggacatttcttggaagtgtaagcgactattgcgcacatcatgcaaaaacaccgatccttattgtgaaaccaccatcagagcatagcaaaatgcagtagcctcagtttttctgcttatgttttaagtacgcatcatctataataaagtgctggatttatgtagtttaacgtcttttatctctaaggaagacttttttagaagctcaacagagattagtttgatgcttatttgc

SEQ ID NO: 13732 - DNA, 489 bp, Glycine max
ggcattcaactgaaaaaggaagaggaaaacctctcattttctctctctctctctctaaacacagatttcatttccaattctctatctctagaaaatgggaacaacaattcttcgttcccacgattgcctccaaggccggttcctccacaacgaagccttcgccattgccgcatcacgtgtcgcatcgcgaagaaactctaatcctaacaataatagcttcgcctcctccgccaaaccaaaccgctgccggaagcggagtccggtcaccaatcgagaccgccgtcgatctccggcgaaggccaccttgccggcgaatctcgtcatgggacacgttaagatcctgaagcgaggcgagaaattgagcctccagaataataccaaccaaagactcgcggagaacgtttcgatgaagaacgatatgggcctggatttgttattgggctcgacggatcggttgggcccggatccattaaccatgcagaagcatat

SEQ ID NO: 13733 - DNA, 518 bp, Glycine max
ctcgagccgaaaagaaaacctctcgttttctttctctctctctaaaacacgatttccaattttctttctctagaaatgggaacagcaatccttcgttcccacgattgcctccaaggccggttcctccacaacgaagccttcgcgatcgccacgtcacgtgttgcatcgcgaagaaaccctaactctaacaacaataaccataatagcttcgcctcctccgcaaaccagaattgccgccggaagcggagtccggtcaccgatcgagagcgccgtcgatcgccgccgaatctcgtcacgggacacgttaagatcctgaagcgaggcgagaaattgagcctccagaataaaaaccaaagactcgctgtttccgcggagaaccgtttggtgaagaacgatgtgggccctggatttgttattgggttccacggatcgattgggcccgggtccattaaccgtgaagaagcagattagggtttcggatgcgaacaacaacggcgtgtacgcgggatcggcgttcg

SEQ ID NO: 13734 - DNA, 393 bp, Glycine max
atgaaatggggtttattcatttcttaatacacttagttcgagttacattttctcatggaaaaaggattgtggtgcgaagaatggatttctcaatgggaaatagcagatgttaagtttggttttggtatttctttggtgtatagcatatttttggtattttttttaacttacatattgggcctattgtgaaccaatggccacaaagcatttgactgtttggtccttaaaattgggttcctccttgtgaaacgtttgttacatgcaaacttgccgaatgacaatggactattgcttcctgcacctgctttatggcttatgggatggtccatccaaaatgcactccttttttgacttctggaatgatcaatccagaatgaaaaataaaaacacttc

SEQ ID NO: 13735 - DNA, 472 bp, Glycine max
cggtttcgtgggtttcatttgcttcggaattcgagaatgagagaagaggttatcagctccggaggcaccgttgatccaacacctgctgccagttctgctggggcatcatccccagctgttccaatgaatgttggcagcatagatgggtcaagtcatggacaagtctctaaagcggcttctctctcatgtgttggttcacaaccaccatggacttcattgagcacaagtgctggtggttctgcttttggttcttcaagatcttcatgtagaccttgggaaagaggagatttattaagacgtttggctacatttattccttcaaattggcttgggaagcctcagatcatcagttcattggcttgtgctcagaaaggctggatgaataatggtgtagacaaaattgcttgcgagtcatgtggttcttgcctgagttttacagcattgccatcttggacattacgctgagctcaaa

SEQ ID NO: 13736 - DNA, 497 bp, Glycine max
  unsure (1)..(497): unsure at all n locations
cagaattcttttcaatgaagcattcagcaggggcctccggatattccagattgttacagggaaaaaatcacagagttgactgtgaattgagggttgacgctgaaatgatatgcacagggccatagaagatgagagattaaactttctgtgttccaaattttcatctgggtatgtgagggctgttgttgattgagttggtgactgtgattatattttgtttgtttggtggatagcggagattattttctgctttcctttgatggtcatatttgttattgtaattagtcaatttctcatgtttttcaaaattagttttgttcggtgatcttctgattatgtgtgctgttacacacccctggcagaaaacggttcattgtcccacagaacgataggcattaccatgattcagttttgttagcttatttccgtagttgatttnnnnnnnnnnnnnnnnnnnnnnnnnnnnnnnnnnnnnnnnnnnnnnnnnnnnnnnnnnn

SEQ ID NO: 13737 - DNA, 557 bp, Glycine max
  unsure (1)..(557): unsure at all n locations
ctcgagccgttgagttgaattgaaacttttggagagagaaaagaaaaaaaaaatcaatctggcattttggcattggggtcttgtttagtttgttccaatccaacgttggttgtgtgtgtttgtgttgggaggattgggattgggattggaatcagcgaccccatgagacctcagagaacgtcgatccacgccgtcacgacatgggtgaggcgacacccccaaaggtgaaggcttttctcgccgtcgtttccggcatggcggccctcgtcctccttcgcttcatcgtccacgatcacgacaacctcttcgtcgctgccgaggctgtccactccctcggaatttccgtcctcatctacaagctcatgaaggagaggacatgtgctgggttatcactcaaatcccaggaattaacggctatctttttagctgttaggctgtactgcagttttgtcatggaatatgatatccacaccttacttgatttcgctactttcgtaacaacgctctgggttatatacatgattcngtttaagctgaaagctagctacatggaagag

SEQ ID NO: 13738 - DNA, 488 bp, Glycine max
ctttatcataaaattaaaaatagtacaatccatcaatctgtttgacttgaattgaaacttttggagagagaaaagaaaacaaaaacaaaacatcaatctgcattttggcattgggctcttcttgtttagtttgtttgttccaatccaacgttggtttggttgtgtgtgtgtgtttgtgttgggaagaataggaatagcattgggaatcaatcagcgaccccatgagacctcagagaacgtcgatccacgccgtcacgacatgggtgaggcgacagcccccaaaggtgaaggcttttctcgccgtcgtttccggcatggcggctctcgtgctccttcgcttcatcgtccacgatcatgacaacctcttcgtcgctgccgaggccgtccactccctcggaatttccgtcctcatctataagctcatgaaggagaagacatgtgctgggttatcactcaaatcccaggaattaacagctttctttttagct

SEQ ID NO: 13739 - DNA, 527 bp, Glycine max
gtttggtttgggtggggtattgcagcgagtcagcgagtcaagttgacgttgacattgacgttggagtcgagttgtgccctaattggctaattcagaaagaattgaattcggggaagagattcacaattctcatctcattgattgcttaccatcaattaggattaggaaggaacgcaaaatcatcaaatcaaataaaagaattaatcatgaggagtgggaaaaagtctattcacgcgatcacgacatgggtgcggcggcagcccccaaaggtgaaggcttttctcgccgtcgtttccggcatggcggctctcgtccttctccgcttcatcgttcacgatcacgacaaccttttcgtcgccgccgaggctgttcactctcttggaatttctgttctcatctacaagctcatcaaagaaaaaacttgtgccggattatcgctcaaatcccaggaattgacagctatatttttagctgttaggctgtactgcagttttgtcatggaatatgatatacacaccctgcttgat

SEQ ID NO: 13740 - DNA, 495 bp, Glycine max
cggacgcgtgggcggacgcgtgggagacctaataatggtttatatctctaacaatgacactgagaatttcttgcaaaaactgtgccgtcataaaataatttaaaaaatcaattttctttcaattgattgattttgaactcaaaattcaagatcatagaaatataaattttagcctgctcaatattgatcaacaaataataacgtatggacacactataacaataacaaccaagatttatcccagtagatcagattggcaacatggattaatcatcgacattgagctataataaaaaccaaacttctcagtgaacaaagcattcaaggttttttccaatgtcttaacaatatggacactaaaaacataaagttaatgtacaatatgtaacagtcaacactaaacagattgtaactcttaattatttgtttataaaagcaaaatcatgacagcaaggaagcataaatttgaagtacaacaaaatatccattttaaat

SEQ ID NO: 13741 - DNA, 525 bp, Glycine max
ctcgaataagacattatgagtcagagatatcaccactgaggcttgaaattaaaaagttgattgagagattgaaaactgaaaatgctagggctcagtcatatgagaaggatgtaatggtaattcaacaggagattaaccatctaaaggagaagtacaacaccgagtgcataaaatttgaggaagttcaggaaagatgtcaaattgctgaaaaagaagctgtaagggctactgaagtagctgacaaagctagggctgaagccaacttggctcagaaggagatgagcgagatgcagaggcttgcaattgagagactggcacatattgaaagggctgagaggaaaattgaaaatttggagagggagaaagataatttggaaggtgaattgcaaagagtgagggattcagagaaagatgcacttgttagggtttcaacactagaagaaaaggtgggacagagagagaaagatatagattcactcttggagaaagatggaacacagaagcgaaatagcacacagattcttg

SEQ ID NO: 13742 - DNA, 508 bp, Glycine max
acgggtttgagaggctccattgatccattgcttgaggaagccgatatagataaagatggaaaaatcagcttaccagaatttcgtagacttctaagaactgcaagcatgggttctcgacccgtaatgagcccaagtcaccgtcatcatcgaaagatttaagattagatttgtttcggaggctgggataaaattcaggagatgagagtgatggatttccttttaagatgatgatctcttatgcagattgtgctgaagccctccttgtgatatctattctgctgcacattttgcactctgaccatcattatatggaactctgaaactagagttaatattgactatggcataccacacaggattgtgtgttaagcttagtctagacgaccatgtcaagaggaatttaaatagtgtgtggattgacttgaggtatcagagtttcatcggtgtacatcattggcttggttgtgccatacatgtaatgtgtaatactgtaactataaataaaaac

SEQ ID NO: 13743 - DNA, 594 bp, Glycine max
  unsure (1)..(594): unsure at all n locations
ggtaacaagagattattattatcttgtgattcgtgaatggtgcttagtgcgggagacagtagcaaatagaaccaagccaacaatgggtaccgacaagccaaaccgggtcgggtcgtttatatacatcactgatccgattcgtgttttcctctccggcgcgtcgaaagacgcgactctctccgacgagcttcgacgaacatcctccgatctgctcctccaatcggatgtaccctacgcgccacttcgcgctgtgtggatggcctctgacccatcaaccagacccgacttgacccgactcttttcgggcacccgcttcatcttctccagccctaagcccagaggagaagagtgaagaattgaaggcgaggctgaaaaagttggaagaccatagcggagaggaaagcgtatcaagaagcttgtgaaggatattacgccgccttaaggatggtcgggaccgttctcttcttacacaagatcaatttaagcgcttggtttgcgtgtgttggttaacatggttactggctatctntctcgatatgcagcaattaaaagattgttaaatacagtcctgccatgaatgctgtttggagaata

SEQ ID NO: 13744 - DNA, 516 bp, Glycine max
tttctctcttttctctctctcttttttttttctctctctctgtgcaaaactatgcttgatattaatgaataatgttgattcttatctgccagtttgctactactacttgggacaattttgatatgtaaagctgggtttgcttctattaattatttttcattattattaataatttcatttttccatagccgcctaatgtgattctcgcgttctttcttcagcagctcctcctagctgcttcttcttttgcacaccccagattccgagaaacccacctttccttgggtctcagtgaaaaggtttggtcttttggcttttcttctggttgggtggattggggtatctggattttcaacaaccaccattggttaggtcccaggtcctggcttggattccttgccagctggctccttgaggtgttttgtccgattggatggtgttcgaagtttttgcgaaattaaagaaacactgcatacaacacaactgtaacttcatccaagaatctcaattcaattt

SEQ ID NO: 13745 - DNA, 788 bp, Glycine max
gggtgaagagcacacccacacatcacatcaacatggcatagcttatccttaaatcccaattctaattctcttcttcatttcctttccccaaacaaacatggctcttctctctttcaattccttcacactctcccctctccattcaccattactcccctcttcttccacttttgctcttcccaccacctctgcttcaagagcaaacgtgattctgcccccgaagcccttgaatggagttcgaatctcgacacccaaaaggaggactgagtcggtgattgtctccgccgccgcggaggacgcgagttcggctgtggagggtgggtcgccgccgcctcctccggcggagagcgagaaagagagcggcgcctccgtggagaagcttccgttggagtcgaaggtgaaggagagagaggagcaaaagctgaggatgaagctggcgaagaagataaggttgaggcggaaaaggcttcttcggaaacgcaagttgagaaagaagggtagatggccaccttctaagatgaagaagttgaagaatgtatgattgtcaatttcaatgtgctttttttttttgcaggtttatttaagcttcattgttcattttctcattttattttcaaattaatgtgtattgtgtattgtgtattttgataatttccttaattttcgatcaaggatgctgtccccaatttggtgaataagggttttgatttggaatccatgttaacatgattgccatatcaccaaaatggatggaacttaatatgaacacaaaatggatgatcaaatgc

SEQ ID NO: 13746 - DNA, 387 bp, Glycine max
cccaattctaattctcttaatttcctttccccaaaaaacaaaggcaaaaacgaaaacatggctctttctttcaattccctcacactctccccattattctcctcttcttccacttttgctcttcccaccaccgctgcttcaagagtacacgtgattctgcccccgaagcccttgaacggtgttcgattctccgcacccaaaaggaggactgacgcggtggtcgtctccgccgccgccgaggactcgatttcgccgccggttcctccggcggagagcgagaaagagaatgtttccgtggagaagcttccgttggagtcgaagttgaaggagagagaggagcagaagctgaggatgaagctggcgaagaaaataaggttgagacggaaa

SEQ ID NO: 13747 - DNA, 522 bp, Glycine max
acactctcccctctccattcaccattactcccctcttcttccacttttgctcttcccaccacctctgcttcaagagcaaacgtgattctgcccccgaagcccttgaatggagttcgaatctcgacacccaaaaggaggactgagtcggtgattgtctccgcctcctccggcggagagcgagaaagagagcggcgcctccgtggagaagcttccgttggagtcgaaggtgaaggagagagaggagcaaaagctgaggatgaagctggcgaagaagataaggttgaggcggaaaaggcttcttcggaaacgcaagttgagaaagaagggtagatggccaccttctaagatgaagaagttgaagaatgtatgattgtcaatttcaatgtgctttttttttttgcaggtttatttaagcttcattgttcattttctcattttattttccaattaatgtgtattgtgtattgtgtattttgataatttccttaattttcgatcaaggatgctgtccccaatttggtg

SEQ ID NO: 13748 - DNA, 522 bp, Glycine max
gagagagagagagagaggaaaaaaggaggaacaacagaactacggagagggagagggagagggagagagagaaaaagagagtggttcttcacactctcgcattccgcagatcagatccaaacattctgaattcctagatctatttccgctctccacccgcgcttgaatttccgattcgcgatttcagtttcgtgttttcggcgcaattaggttttctgagatcgaatggcgtgcatcaaaggggtgaatcgatcggcgtcggtagcgctggcgccggacgccccgtacctggccgccgggaccatggccggcgctgttgatctgtctttcagctcttccgcgaatctcgagatattcaagctcgatttccagtccgacgatcaggaactgcctcttgtcgcggagtgcccgagctccgaccgtttcaaccgtctctcgtgggggaagaacggttccggctccgaagacttcgctctcggcctcgttgccggtggaatggttgatggcaacattgacatctgg

SEQ ID NO: 13749 - DNA, 396 bp, Glycine max
gggaccgattgcgacggagatgttcttcgagggtaagacggaggaggtggtgaatcggatcgtgcaagagagtcccttggggaggctcggtgagaccaaagacgtggcacccgttgtgggattcttggccactgatgcttctgaatgggtcaacggtcaaattgttcgtgtcaacggtggctatatttagtgatgatttttttttaaaataataacaataataataattagtgtattttctttcactttgtccctacttggcatgaaataaatcaccttccgagaaaaatacttaatttatgtgcgatcataatcgtggcaaaaattagttatcgcattcaatgcaaccttgtatcaatacctgagaataaaaaagaaaaaaggggatgtgtgttg

SEQ ID NO: 13750 - DNA, 443 bp, Glycine max
cccacgcgtccgctggtgggtctggcagaaatgttattgacaatggtaagaatgacagtgatggagattgcaaggattttggtgtgtgcctagagaaagtaatttccagcaattcagataatgttggcatgatcaagtgttcaccagtgcatgttgatggagactttgatgatgttgttgttgatgatgaagaagatgatgaggagattgatgttgagatggagaaggggagctttgatgttaaggaaatcagtgtgccagaatccaaggttgtgaatgaaccagaaaggaaggaggttgtgaatgtaccagcaaaacagaagattgtgaatgaaccggaacctaaaaaggttgtgactaccaacagacaatttcatcaaaaaaatgaaaggccagtgtctgttcctatatctgtgaagccatctcttccaattagaaagctt

SEQ ID NO: 13751 - DNA, 661 bp, Glycine max
ggttatattaaaaagaaaaaggataagaaggagaaagagagggatcacaaaaaggaaaagaaggataaagaggagggtgagaaagaggatagcaaggttgaagtttctgttagggatattgatatagaagaaataaaaaaagaaggtgaaaaagaagataaaggaaaggatggtgggaaggaagtgaaagagaagaagaaaaaagaagacaaagacaagaaggagaagaagaaaaaagttactggaaaggacaagaccaaggatcttagcactctgaagcagaagcttgaaaaaattaacggaaaaatacaaccactccttgaaaagaaggctgatatagaaaggcagattaaagaagttgaagctgaaggtcatgtggtcaatgaggagaacaagaatgaggtacagtagctgttcaggatgttcaggacacacttatactatattgcataatatacaaactatgtttgttctttttatgttgttttgacttttgtgtaataaagatgtctttttatttgagtaagaagtgatacatttgtacacattcttatgcttcatatgggagtgatttcattccctttgtcagtgaagggctgtgctacttttagagctgtctaacatgtcaactcccattcaatggaggcattacttaacgtgc

SEQ ID NO: 13752 - DNA, 537 bp, Glycine max
attctgtcgatcgctcgcgattccctcttcctccctctctcttctactcacgagcgtcctgctcctgcaggcaaaccgcgatccgttggtgatgaaatccaaggcctcaaccctagcttgccctcgtggtcggattgatgtggattacatgagtgtcggttctggcgtccagcctagcgatgatgaagacctcgtccaagtccagcgtcaccacgatcactgacgtatccctcaaagcacctaaaattcgaacgaacgaacacgaattaggttgaaaactggcaagtgaaagtgatcaaatgaaattaagggatggaccccaaaccactacaccttctcttttgttttcaaagcttgtgtctgtcgaccttccctctatctccattgatgcccccctccacgctaccatttcggaacttggtgtggcactctgcgacacgcacacaacatgtttggtgacttgtgtcaccgagacattctcagaacttggattcttggaattctattgtgtctgttgctggagtttggagcgattaa

SEQ ID NO: 13753 - DNA, 488 bp, Glycine max
  unsure (1)..(488): unsure at all n locations
aaacaacacaaaatacaatcaccttaacgacatcagaggacctaggttaaggttgcggtgctggtggtcgagttcacaggaagaggaagagataaaatttgaaagaggaagttgaattgaaggtataatggcgaggcgagagctttcaagcacgttgaagaacttaaagttcatgcaaagggcagctctgagggaggagagaaccaagaaagaagaagaggttaagcctgatgtcagtgttggcacatccactgcggttactagaaagtgtgtggttataatggaaggtgatccccatcctggagcagctaaaggtcgaatgtcatttcaaaggttcaatcccttagttgataaattaaatgaggaagaagcaagactacatcagccagcagctgaaactaccatgtctagaaatcaaaatgcanatgccaatatcagagaaaataggtctccagtagaaggtccagaatgtggcaacatggacaaaa

SEQ ID NO: 13754 - DNA, 487 bp, Glycine max
cagaataaatcctaacccttaatttttaattggagaggatcctcccccggtgggtgacatgaacgacttgaggaagaagagaaaagccgcaggcgcagagtgagagccgaaacttctcatggaatcgcaaacggatctgcagaaccgacccggaatcttcattatcggatcctccaacgtcggcaaacgcaccctcctatcccgattgacctctgttgatgttgatgatgcttttgattcggcttctcaagtgaatgtccatgggtggactatcaacaataagtactacactgctgatgtttctctttggatggctcatcttcacgacgatttttctgctgccaacgtgaccctgtctcgacgaatgactgcactggtgatggtttttgacatgaatgaaccatcttccctagctgcacttcgagaatgggtatctcgcactgatattcagaacttcgagatattactgtgtattggaaacaaagtg

SEQ ID NO: 13755 - DNA, 520 bp, Glycine max
gatcctctatacctctctctcccgtaagtggaggttcagccgttggatcatacaaaatggctctgataatctaaatgaattaaagtttcggtgtctcgcacgcacgcacgcttcatggatgacatgaacgagttgaggaagaagagaaaaaccgcagacgccgagtgagagccgaaacttctctcatggaatcgcaaacggatctgctgaaccgacccggaatcttctttatcggggcctccaacgtcggcaaacgcaccctcctatcccattccggaattatttattcagtgctggaactggaatttgatttggctgatgttgagtgtaggattgacctctgttgatgttgatgatgcttttgattcggcttctcaagtgaatgtccatgggtggactatcaacaataagtactacactgctgatgtttctctttggatggctcatcttcacgacgatttttctgctgccaacgtgaccctgtctcgacgaatgactgcactggtgatgggttttgaca

SEQ ID NO: 13756 - DNA, 461 bp, Glycine max
cttcttccatcgagacaggttcctgacagttgagagcttattatgctagctttgtggactgtaaattgggttatgaattgacaccattgctctgaagccagtgaagttatatatcaaatagcatgaattcacctttacaactttgtatatccctgtaaggtgaattttggcatcatttttaacaagtatacactcgaccaaatgtccaaatccatgggagatgggaatatgcaagtatacacacatcaatacctcttcacaggtgtcacaattctttaactggtgccacctttacaacatgcatgttggtatatgaatttgttttacactgacgattatttgttacatgtgatttctgcaaatttgtgtacagtttgattttacgatatatacaacgactctactatgtgttactccaaaatattttttcggaatttgttttacaggcaattatttatgtt

SEQ ID NO: 13757 - DNA, 1633 bp, Glycine max
aactgggacctctattagtcctcctcacggcttgtgccttgagagaattggtaatggatcttagctcaacatggtggctcatccggatggctctaaccgtgcattcttctctaaccaaatgggaaaggtttttctggcaacacttccggatgagggatcaggaggaacattgaagcttgatgaatcaagtccttttgttgatctgactgatcaagtttattttgatactcaatttggaatgatgggcatggcatttcatccagattttgctaaaaatggacgattctttgcttcatttacatgtgataagtccaagtggtctggatgtactggaagatgttcatgtaattcagatgttaactgtgatccatcaaagttaggtactgatactggcgcccaaccatgccaatatcaaactgttatcgcagaatattctgctaatagctctggatcccagccttcctcggtggaaagtgctaaaccaactgaagtgagaagaatatttaccatggggctcccatttacatctcaacatggaggtcaaatactctttggacccgatgatgggtatttatacttaatgatgggatatggaggaggtgctggtgatccttacaattttgcacaaaacaagaaatccttgcttggaaagattatgaggcttgatgtagacaacatcccaagtgcagcagatattagtaaactcggcctttggggtaactactccattccaaaggacaatccttttagtgaagataaagatctgcagcctgaaatatgggccttgggactaaggaatccttggcgctgcagttttgatgcagaaagaccttcctactttttgtgtgcagatgttggacaggatgtttatgaggaggtggatctcatcaccaagggtggaaactatggctggcgtgtttatgagggcccctatccattccaaccaacacaatcacctggaggaaatacttcggtaaattcaataaatccaattttcccattaatgggatacaaccattctgaattaaacaagaatgaaggatcagcatccatcactggaggatatgtctatcgatctaccactgatccttgcatgtatggaagatacttgtatggagatctatacgctggagcaatatgggcagccacagaagatccgcaaaatagtggcaatttcagcaccagcagaattcccttcagctgtgcacgtgattctcccatacagtgcgactctgcacctggaaaccttcctgctttaggctacatcttctcatttggcgaagacaacaacaaagacatttacatccttgcgagcaccggtgtttaccgagctgttcgtccaagtcgctgcagttatgcttgctctcaggaaaaggcaactactactacaacttcagctccctctcctactccttctcatgctacacgttggagggtcctttctggatatctggttttgcagtgctcatttttcttgctgcttttgttgggttttatgtagtgtgttatgatctttgtacattatgtagtagagatcgtaagaggagaatgtttgccctttcttctgggttttctacattttggtttcgttccttttgcttaattaataaaagataagtaagttgagttactg

SEQ ID NO: 13758 - DNA, 1614 bp, Glycine max
ctccctcctcatcccttctctactccattatccacacaacttgcaactcttcccggatccccaacgccatacctcagatctgtacgtcgtcgtttctatctacctcttaccgtttccgttcaggattaataatttagatcccctgatgttgcaacagaacaaggaatcttcttagattctttttctgcgtttattagcgtttcacaaatagagagagagaaacagaaacagaaacagaagaagaaacttttcttatttatatacagtctctgattgatcggtttttcggaaactctttttccgtgaaatccacgcgcgcgcttcggttatggatttggacgatttccgatccgtattggacaccgcgggcgtcgacgtgtggatgttcatcgacgccgcaatcgccgtcgcctccgcggattccgccggtgagctgaagcgccgccgcgacggaatcgtcgagcgcctctacgccgccacggcggctactccgaagtgccggatttgcgacgacggaggcaatgacctcaacggtcaccaaatcaagaagcagagcagccccagccctgaacggcaaccgcaccaacgccgcgccgctgccatcgcagctgccgcttccccggcgacgccgcagtctctcgaaaacgacaacgacggcgaggaggatttagatccttacggtggtttgttcgacgacgaacagaagaagattctcgagattaaagagcaactcgaagagcctgaccagtctgaagattctttggtggagttgctgcaaagcctagcggacatggatattacattccaagcgttgaaggaaactgacatcgggaggcacgtgaatcggttacggaaacatccttcaaacgacgtacggcgattggtgaagttgcttgtcaggaagtggaaggaaattgttgatgaatgggtgaagttgaatcctcagggaagaagcaacactctgatggctgatggagactcgccgcctgtgcagaaaaccacccaaaatgggcatcatcatcagcagattcctgattttgcatactctcccaatccacacaatggtagctcagggtctgaccgtaacaactcagaagcagaacacaaacccaaagtagttccccgcagtgaacctaggccaaaacccgcgccatcaccctcagtttcaacccctgcttccgctactcaaaacagacagagggatagcaattttgacgcggagaggcttgcttccgcgagaaggaggcttcaagagaactacaaagaggctgaaattgccaaaaggcaaagaacgattcaggtgatggacatccatgagttaccgaagtcaaaacccaagaataatgccttctttgggaagaacaaaggtggtggtggtggtggtggttctcagggaaggcactggtgatggtgattactattatgatgatgcatgtttttccattgttggtgccattttgcgtgtaaaaaagccttgtgggaggggtgcggatataagtcaagtcccaaaccctgttcatcatccctgtggaatttttctccataaaccttttttttttccttgtggtttttatttaaattaataaataagcgaagaaaagaactcctcaatat

SEQ ID NO: 13759 - DNA, 693 bp, Glycine max
catcttacaacttgaaactcttccgccatacctcacctcagatctacgtcgtcgtcgtcgatcttctgttcagaataataattttagatccctgatgcaacagaacaaggaatcttcttagattctttttctggaagaaagagaaaacagaagaagaaactcttcttctttagacccgtcttatatatttatatacagtctctgattgatcggttttttcggaacctctattttcactcaaatccacgcgcgctcttcgggcatggatttggacgatttccgatccatattggacacagcgggcgtcgacgtgtggatgttcatcgacgccgcaatcgccgttgcctcctcggattccgccggagatctgaagcgccgccgcgatggcatcgtcgagcgcctctacgccgccacggaggctcctccgtggtgccggaattgcgacgagggcggccaccgcctcaacggccacagaatcaagaaacagagtcgccatagtcccagccccgaacggcaaccgcaccgctccaccgacacagcttccccggcaacgccgcagtctctcgacaacggcgaagacgaagacaacgacgaggatttagatccttatggtggcttgttggacgacgaacagaagaagattctggagattaaagaacaactggaggagcctgatcagtctgaagattcttt

SEQ ID NO: 13760 - DNA, 792 bp, Glycine max
tactcggaaaggtcatatgttgaggattcgttacaaggttgctattccactaaagaaggggaagtgtgttaaccaaagtgctaatgctcagaagccgacacagaaatacatagagattgtcactgaggacaactttgatttctggtttatgggtgtcttaaaatatcagaaaactttcaaatatcttgagcaggcagtttctcaagcatagtagagatacttgagtagcaaaatccaccattcaaacttgaagattcatgttgtcaggacaaacacaaagatacaaaggacgatcagaaacaaactaaaatttggcggctctcatgaagatgttgagcttcgtctctgataaaagggatttcacttcattgtatatatccatcctactggacacaacatttgacctgtgataatagcgaatggatgtggttcatatcagttgaattgcagacttggctttcatcatatctcgttgtgaatgaaagagttcactgtttggagatcatttgttgcagaatccaaactatatgtgcattatttggaccagaatgctttttgaggaagggatgggcttatgttagaactctatgaagggagattaatgtagaaggaaaactgttagcttcgttctcaaacgtacaagtttgaggctcaattacacgttgattcattatataaatgttttaagaacctgagttagtaattcagcttgtatttataacatctaactttcagtggaaaaaaaaaaaaggaaagtgtataaatacaaaaaaaaaaaataaaaaaaaagag

SEQ ID NO: 13761 - DNA, 464 bp, Glycine max
tacaaagtaggaagatacagcttcttccttggcatataatgaaaacataagacattaagaacggagaaaaggatcgtgagttgactcttggatggttgaatggtttcctattactgttttgatccaacagaatgtgagaattctaacaaattttttggttgtgtagctcatgcatattatctgaaaagcctctgggttttatttcggaacttgtacatgctttccatttcttatgtcttgtgatggatgtcactcaagaaaatatttgctaaatatctccagtggaatttgaacctttgcactggaggtaaagtttgttcacacggagctcagtttgtcagctgagccacatcttatgtgtgctagctgtcacattttaatgtagcaagccttctcttccaatatgattcagaattgtttcattcgatctcctaaattctatgaaaggggctgttgaaattata

SEQ ID NO: 13762 - DNA, 1185 bp, Glycine max
gtggagggaatgcaccttcagttgctaatcgaacatcttactcacagaagaacgtgcatgggcaaaactttacaattccagtgcaaccagtgaacttttcttttaagccatctgcaacatcggatattgttggcaatggtggatgttttggtgacaaacaacagcagcaacaggctttaaagggaggagtagagaatataccatctcaagcatttgcaatatcatttgctgcatttaatgggaccagtgttccttcaaaccttaacttctcatccatggcacagaatcctgtgatacttcaaagcctgcctgatatggcatggcaaggatatcaagctgcaagcattcctcagactactcagcaaaagacttgttcaataactgaagcaaagagtggaggaaattcttcacaccaagatgatgaaaagaaaatctctcgtgctcagtcttccagcaatgggccaacgacccttgtttttgataattcatctaagaatcttaactttgtgctatctactacgaatggaaactggtctaatcacaccattccttcaactgcaataacaagtgtgccactctctagtaatgcttcaagttctcaacagccaccgcatttgcttcagcttccaaagcagcatgctatgcaacagcagcaagctgctatggcatctcgatataaagcatcatctgccaatagcactcctgctgcaaaatttgcaaacaatgcccccgttttctcacaaactccttctcaatgcaagagttctaaccaagcttctcacactaaggcctcgagtagaactgcagattctcatattcatcactcatctgtcataacatctaatgctccaaccctcaaaagtttttcccaggaacaagggagagttttgccaggtcatatgcaaatttcttttgggggaaattacataacgcccctgccaccccaagggcaaccactactcaataacaaccatcctttatgcgcaacagctcaaggaactccatacagtgggggcaatgcgaagtcaaattcagaaggaagtaaagttagttcgtcggtgaacgcttcacaactgcaacaaactgaaaattctgctgggagtggccaaaaatcttctccagtttgtgggagaaatgtcccgtcaatattaagttcatgccccatgcacctatcagagctaaagt

SEQ ID NO: 13763 - DNA, 695 bp, Glycine max
atactttcttcctttggagtgtgagccgccaccacaccaccgcccaactacagatccactcttgctcttggtcgcggtcgctaatccaggctcatgtggccaaccacgccaaagatccgcactacagaacaccccccaattgactcgtgaaaccctaaccttctcacacacacttgccacacctttgcttgttgcttaattggagttttagttgtcaatggttggaaatggcttgaagactgcagtattattgcgaagttctccagtagagattcctgagaaccgaaggtggatgtattagaggttggatgctaataaatgttggacaaataagtttagagaaggagtgtttgaatttgtatagtttgttactagtcaggacatgcttcaaatgcaaggagaacaaacaaggtgtccctgcaagaaatgcaaatataatgttttcaagtttgttgatgatgtgatgagggatctttatgaggaagggttcatgccaaatgattattggtggaaaaaccacggtgaagagttaccacaatttcctctaatagtgctacaaggttcatactacgaaagtggtggacaaagggaagaattgaatccttatgagcaaatgatcatggatcatgctggaccatcaattggccaagacaaagaacaagagggtacccttttgttgtttttttggggtagag

SEQ ID NO: 13764 - DNA, 726 bp, Glycine max
tcggctcatccacgaccttcatcagctccataccattgctttcacattgctgtctcaattatacacgaaggtcattgttgataataatggtattcttaggttcggcgtagcctatctatacaaataacacataccaaataatggatagcagaaataagagaagcattcaccccaattcacttttgaatttccagttgttaatttagatttaattagaaaaggattaataaagtaatgcttgtgatttgtgaacagcatatacggaagtaacacacactgaagtcttgtggataattatactctcataacacttttatgatactttttacaatttaaaagagaaatgttttttttttctttggataagatgaataatgtaataaagagaaaaaaaatattataataaatcattataagaataatattactcaaattttatttcaccaaatgtattagttgcagaggaagtctcacagttattttcttcaaggtatacccggcccaaggaaaaggaaaaggaaaaggaaaaggggaagttttgaattttttgtttgtttaatattggcagcagttagagagaaattttgacatttaggatgattatccgtaggattcatagaatgaatagttacctaagattagttagtgcttattattctatacataacagtagctctgtatcagaacttataattatccttattaaaaggttaatcaaaattatga

SEQ ID NO: 13765 - DNA, 496 bp, Glycine max
aattctctttgtgaaagcaacaatgaagagtcgtgtaagaataccaggtttaagagactggctctgatggactatactgcagggcagaagaaaaagaagatgaaagcattgattccttagattatacaagctatttacttcggagtcctttccatactccagagggtcattggattgctatagcttggtttcatttgtgacatcgttgcttttcttgattcagccaatccaagcatatattgttatcaaggttcagctcttgaggaactgtctttggttatcatcaatctgaaaataaagaatcacacacgatgtagggaaagcttacaatgaatgcaggcagggagaaccagctgctgaacgcttgcttgccatgagcaggttcaaaaataaggtggttgaaaaaccagatgctgctgatttgatttggaccgtgttacaggggacctgaaattcaatcgatgacatgccacttgttttaaatggaatggattaa

SEQ ID NO: 13766 - DNA, 1242 bp, Glycine max
gattccgattgttgtgatccgtacaacacagcacaacaccatggctggccccaaccccatccccaagtggttgtttctctctctgactctgatcctcagtctctctgtctccgtcggcgcccgccacttcgtcctcgtcctctcccaggaagactacaaggacgacccccccgccgatcccgactccgccgccgagtgggacgagttcggcgacggagactcccacaaatccgaggacgacctcgaccccggctcatggcgccccatcttcgagccccccgccggagatccccaacccctccccgaatccgacgccgcctaccactccgccgtccacaagctcatgtccggcgaccccgacctgatccaggacggcgccgccgagatcggcgccttggccgagaccgggcaccccgcgtctcaatcggggctagggtttttgtggggaatggggcttttgagggagcgaagcaaggggaaggcctttctgtaccaccacttcgccgcggagggaggcaacatgcaatcgaagatggcattggcatacagctacacgaggcaggacatgttcgacaaaggtgtaaatctgtgtggcgaattagccgaagtggccgtgaacagctttctgatatcgaaggagtctcctgtgattgaggcggttaggcttcacaacggggcagaggagaacaaggaggctcttagaaaatccaagggtgaagaggacgaggactttcagatacttgagtaccaggcccagaaagggaatgctgctgccatgtacaaagttggtctcttttactactttggcctcaggggtttgaggcgtgaccattccaaggccctctggtggttcctcaaggccgtggacaagggagagcctcgatccatggagcttcttggagagatctatgccagaggagcaggtgtggacaggaactacaccaaggccttcgagtggctcacccttgcttccaggcaccacctctattctgcctacaatgggatggggtatttgtacgtcaaaggctatggagttgaccagaagaactacaccaaggccaaagagtattttgagaaggctgctgataatgacgaggttggcggccactataaccttggcgtcatgtatctcaaggggattggagtcaatagggatgttaagctcgcctgtaagttctttgttttcgccgctaaccatggccaaccaaaggccttctaccagctcgctaagattttccatac

SEQ ID NO: 13767 - DNA, 453 bp, Glycine max
cccacgcgtccggaaacaaacgctcactcactcactcactcctttgtttgttcttttcgccctgggcttcctcatccatcagcgctatcattagcaattaagaaaccaaggtacataactcacacctccaccaccacctcttcaaagtttgattttttcttcacaattcaacttcccccaaaggacacgatgagctactagtactagtgcgtggtggtagctagtagcatttctcaagaaaaaaaacctaagcttttatagtttatataatagttttgtgctactactactactacacgttctcttgtccctttccttcttttcctcttttttttcttttttttctgccttagatcttgcactcactcaccaccttgcagttttcagacatggggtttctcttcttcttcttcttcttcttctcctccttctttttcttctctccaaccactt

SEQ ID NO: 13768 - DNA, 479 bp, Glycine max
gatggaagttgagaatgcaaaactgaaagctgaacttgctggtagaatagctttaatatgtgcgctctgtcctgagttagagtacgagtcattggatgatgaaagggtgaataatatattgaggaatgccgcagagaagactcaagaagccttgcatttgaaagatgaatatattaaacatgttcaatccatgcttaagatgaagcagatgctatgcgtgtcctacgagaaacgtattcaagagttggagcagaaattgtctgatcagtatgtgcaggggcagaagatgtccagtgtaaatgatgcggctgaccttccccttgtggctgggaagacagataattacaagtcagaatctatcagtggtgaagccaacatgccttgcatatctacttctgagcccatggatgaggtttcatgcatctcaagttccttggatgcaaaacttggtttgttcatgttcacagagcatactggta

SEQ ID NO: 13769 - DNA, 603 bp, Glycine max
attctcctccgttccctagaagcttccatagactcctcgacctcgtaagtcctccttcctcaaaatcgaagtccccgattcctgttctctgctgcaactcaaagacactgttcctcgcaccatctcttcttcttcctcttctctacatctttccctcaacagaaaggataaaattcacgccccttcgcaggaagagcccctcaactctctcggtgtcgccatcggcgacctcatcttctactctgttaaccctaccgtcttcaccctcgctaccctcctgcacaagccagcaaccgctcctcgtgatggacccaccatccaagactcatcggaaaccctcaccagtgactcccccttcgttctagacgccgaaaagcctccgactttagatgccgcggaactggaatccatggaaatgattgatgggtctgacgagacggtggtggtgggtaccaattccgagcctttcttcatgagaagggttttgaaagaagcgcctgggaacaacgttaatgatttcaagttattagtgcttatggctcatggtgttgttcttgaatctggatttgtttgaatcgacaaggattctggtatggcgtttag

SEQ ID NO: 13770 - DNA, 853 bp, Glycine max
cccactcgtccgggtgaccatactgatgtccatcctgctcctttaaacaaatctagttgttgggaaggtctcagttactgtcaatcaaggttttcttttgcaaggcacgaggaatccaaaatccaaatgtttgatccacatgcatcttatggtgtcagccatcaacggccaaaccgtacagtcttcctgaattgtgcagaaagagacttgtatatggataagttgggcattgcaaatggattttctaccggtaactttgaggaagctgataatttggtcagtggtcatcccattgcatcttctaataagttttctgccatttcaagagcacaagtttcagccccaccaggattttccattccaagcaggctgccaccacctgggttttcttcccatgagagagtggagcaggcttttgattccatttctgggaattctttgcttgaccattcttccctattgagaaattcatatcagacaccttcagctggaaaccttggtagtgcaggggacattgaatttatggaccctgctattttggcagttggcaaagggagacttcaaggtgcactgaacagcccggcactggacattcgatctaatttcatgccacaattaaattacttcgaaaatgatgccagactacaattattgatgcaaagatctctcgcaccacagcaaaaccttagattttctgaaattgggaatactttttctcaacttggcgattcctatgctgtttcttcaaggttagatcaatcccaagtcagtaatctaggcccattccaacagctgtctctgcagcagtctacaaatgcagtcttgtcaaatgggcaatgggatgggtggaatg

SEQ ID NO: 13771 - DNA, 562 bp, Glycine max
ctccattccaaactcaaccaaagtcgttcagagagagtgtttacacaaagcctgaacctcaacctaaagtgaaaaacacacacacttgctagtcccttcacaatcacaaggttgaagaagacatggccgaggatcgcagcctccctccacgcgcctccattccctccgccgataactccgtttgggccgatgtctcccctctcctccaagccgcctgccaagatcttcaagagggagagcttattcatggagacaacttcaatctttttgccgccatgtccgcattggagataatggacccgaagatggattctggaattgcttgtacatactactctctcgatgaagccattgagaatggtgttgctcctgttcctattagtgcggataaaactactgatgttcgatgcatgattgacatcatggaccatctacttgcctgtgaggcaacatggcacaagggtcattcattggcacaaactgtctattcttgcctctatctcctacgacctgaaaggacatcgtcgcatgccctgttgcactcttactgtaaagtcatacg

SEQ ID NO: 13772 - DNA, 484 bp, Glycine max
cccacgcgtccgcatgactatatacgacgtcactaaatgaatggatactacatggacaggtatgattaactggacgtaattcacaaatatgacagcttatgtgctccaaagcatactacttctatgacctcagttcaaaggttttagttttaggcagtttccttgcttttaatcgagataatctggtgatgggctagtagtaccatatgcattataattctatcataatttttaatcagaggctggatgtgtcaatcctttgggccattctttactcaaattgtcatctcgtgcatcaaatttcatgggttcttcttattaaatttttattttaggcataaaaggatagaggtagtgttcagtctgaagttaccaattttagacagaaatcttcctttggttccctttcccttataacaaggtccagggatgggaaaggggttataaaacaaaattgaaaatatcaatgtccaaaaatggaaac

SEQ ID NO: 13773 - DNA, 483 bp, Glycine max
gccaggtggacctttctctctttcttccattccatcgcattgtatggtccccttttcatacacgacacatcacattccctcaacacaacactttccattttcaaacacccaccaccaccaccaccaccaccgcttttctctctctcgggttcggatctccgaccgccgccgcaccgcggaacgagcttccaaactcagaatccagatccctacttcaacaaacaaacaaacatgattgcgattccgtatttaaccgccttaaccacctacttcagctacggcttgctcttcgccttcggccagttcagggatttcttccgcaaaatcttcgactggtgcagcgccaacactctccagggttacgcgccgatctgcttagggctcgaagatttctatattcgccgcttgtacctccgaattcaggactgttttgggagaccaattgcgagtgctcctgatgcatggtttgatgtagtcgaacgc

SEQ ID NO: 13774 - DNA, 651 bp, Glycine max
gtttcttagcattgtctcttttaaggggcatctggaaaaggaggattcgccggataaacacacatctgagtctctctctcagtgtgggaagaacgaagcagaagaagcatctcagaacagaaccaccgaacccactcagaagcaaatccgaaaacccctcacttaatagtactggtattcagctgttcatgacaaaagcctgaaccgatcatgtcagaaggtgcagaaattgatgagcgtgtggaccttgacgaggaaaattatatggaagagatggatgatgatgttgaagaacaaatagacgatgatggagtggatggaggtgaagatgaaaatgctgaaggtagttttgaagaacatgaatatgaggactcagcagctgaggctggtgggaaagaccaattgcctgaagcagaaaaaagtgacattgctactgaatttggggatgatgagcaaaaattgtctttcattgatgaagatgagaaagagaagcatgatgaacttcttgcccttccacctcatggttctgaagtctttattggtggacttcctcgggatgtatgtgaagatgatttaagggaattgtgcgagcctatgggtgatattcttgaggtgcgattaatgaaagacagggacactggagaaaacaag

SEQ ID NO: 13775 - DNA, 457 bp, Glycine max
agattatgttattgtgaccattatcttgacaaggtaagaggatatatggagtatttttcatatttatatgatgtacacacaaaacaaggccaatgagaggaagccacttataggtggggaagaagcagcttcaattcagagagtgagtgctttttctctggcccgtgagattccatggcttcagttggtgcagtcaattgcaaattcttcttgtgtctacttctatggctctggaactttctacctctttctcaaggtaataagcactggcatgaaaatagatacccttttatcagaaatgcaagctcattctcatcaccgtcaatttcaactaccacctgcaataatgcctatgactacataatagttggaggtggcacagcagggtgtcctttggctgcaaccctgtctcagaacttcagtgttttggtgcttgaaagagggggtgttcctttca

SEQ ID NO: 13776 - DNA, 515 bp, Glycine max
aaaaacctcgtaaattatattttaaaacaaaaataaataaataattggtcaaaaagatgattcacaaatgaatggattagatgtcacgtagctcttcccttgttgagttaaatggtagctaaacagaagggtctattgtaatatttttttaagttaatagattgggacaaatttaacgttgggtgatgccattttgcaaaagggtaaagtctaagaggctgattgtaattttcccttgaaaaatatgtgctatttatactattttatgtgaagaatctgtattgcatatgttttggtcataacatgcttgtttgtctgtgatggacttcttcgacttgactggtgatcttttttctcaactcctcttagtaatttaacaagtttaatttgtttagcctgtaagtctaaattgaacctcttgaaattgaagctgtttatatggacttggatctgacattgtcttgatgccaccttatatttgcgctcatcttgctaagcttttaacattatgctat

SEQ ID NO: 13777 - DNA, 817 bp, Glycine max
cccacgcgtccgctgagtcagcatattactgaattggaaaaaactatagaacaaatgagaaaggaacttggtatgactcaagattcagatgttgaagatggggggagcatcgaggaagatgaccataaccaaatagacatctcagaattggccctaagtgaggatgaagattctgatggttatgatgatgaggaagacagtgattgggacgatggcgaggcctccgagttttcagaattcataaatgatgagcacccttgaaggcaggttgacatatttgcattgatgtttccttgatcacatattccattgcctgcggctagaaggacaatcaagaaggggcaggctaaaatcaacttgtgtggttcttcctctatttgcacattctttagagctgaaaatatggagttccatttattcaaacttgtacaaagatgtgcctagatatcatttgtgttcctgcagtagcaaaaatccaccatccattatctacttgcctctggttttttcatcatcttttaggatgctggctgacttttgagcagcatgaacaaaatttctgctgtatactggatggcccctctcactgtagttgacctgattattgtaaatccttcatcacattgtaataggctatatggtaaaggataatgcctttcttgtatttactatattgatgtcatgccttcctgagattttattttattttctttgatgttcaatgccatggagtagacaataaatgtatcatcctgatgtaatgggttaaaaggcacaattttggttataccttccaaactggctctgttgtccataa

SEQ ID NO: 13778 - DNA, 571 bp, Glycine max
cccacgcgtccgggcaaaacgtaacagtgagttgcaggcttcaaggagtagttttgctgaaactttgagcaaacttcaaattttggaagcacaagttcagacaagtaatcagcagaagggatctcctcaatccatcatccatataaatcatgaaagcatttacagtcaaaatgcaagcaatgcaccaagcttcatctccttgtctgaagatggaaatgatgatgtgggaagttgtgcggagtcttggtctacagcaattatctctgagttatcccaattccctaaagaaaaaaatactgaagaattgagcaaatctgatgccactaaaaagttggaactaatggatgactttctggaggtggagaaattggctcggttatcaaatgatttcagtggagtttcagttacttcaaacaatatggcaaatgaaactgtgaccaatgatgtatcagaggtcagtactgagaaagatgttccctctaacacccaagataatagtgagccaaatccattgcctagtgaggtttcttctgctgaggaattgtcagcacctgatccccaatctgatgtt

SEQ ID NO: 13779 - DNA, 516 bp, Glycine max
  unsure (1)..(516): unsure at all n locations
atcttcgtctactcctggcttcgtctgtcactctgtttctcccagcggcaacaaacaaggcagagctaactccttacttctttcactaatccaacgaacaaacaaacaaacacctctctctctctctctctctctctctctctctgcttctgcttctctctctagggtttggagtttcgacaccatgacgagggagaagcgttctgcgccataattctagtacagtttttgctctttctccatgccaattccattcaccgcgaacgtgaagaaagaaaaggaaagttgaaaagagaaagttcagatgacaaacctgtgtaagtatcacagtcacctggacatgatcagttatttcatactaagatccttaaatcatatgatagaagtaagcttcctccaggtaaggatttctntccctggtcaactcgcttcctccaaagaagcttcatatttcgttccaacaatattttcaaataatgctattgtttgcagaactgggaaattcagatagctctt

SEQ ID NO: 13780 - DNA, 619 bp, Glycine max
cccacgcgtccggtggatcgtgcatatgtatgtgctgccctgtctccgaatcgagtgttgtttactcactgcgcattgagactgaaaaagtcaggcactgttgtaccaagaatggaattggaagaagttggcccgtccatggattttgttgttcgtcggcatcgtcctcctaatgaaagtttgaggaaggaagcaatgaaaacatcgagggagaagccaaagaaaaaggagaagaatgttaaaagggacgaattacagggaaagattggaagtatttatatcccagatcagaaggttggagaaactcctttaccttacaaagcaaaaggagtgaagagggagcgccgagaatccaagcggaaaaatgagagtgatggaagtgcttcaaaacggaagaaggaagattcttaatacttacaaattacacttgtctttccctggcatctgattataatagaatgatcaattgtagatcatatgatattaaactgcatgttgtttaggtgtcatgaatattcatgattttcccctataagggggggttttgccatcattttattcagcgtatttttttccccttcatattttgccaagttgaaatgcagtcctttgaatcatg

SEQ ID NO: 13781 - DNA, 399 bp, Glycine max
gctatggcgatttaattattagtattattcttattgttatctccatttgactcactcgctctctcttgtttgtttgcgtagaaaaataaaatcaggtactgcagggttgtgaaagctagatactaattagatcgctgaatcgaagaaagagaaacaaaccatagtactactactaattttgattagggatttgatctaatataatataatttcacgatttaattaaccgcagaagctgcctcggtgtgtgagggacaaaagtgagtgagagagagagagagagaagaggagagattggaaaagatgtcatcatcatcgaactcgccgtgcgcggcgtgcaagtttctgaggcgaaagtgcacgcaggagtgcgtgttcgcgccgtactttccgccggac

SEQ ID NO: 13782 - DNA, 509 bp, Glycine max
gcttgtggcagtagtgctcaagaaactagaaagaaaacaaacaaacaaacaaacaaacgaaaccctccctctctatatatcattcccctctcttctctttcgtttcgtcttcgttgtttctctctctcatttctcagccatcacagcctcgtctcaatggtctatcttcctttgcgccgctccatctaatcacagatcgcacaaatcaaaacccggtactgcaggggggtgaaagctagatactaatcagatcgctgattcgaagaaagagaaacaaaccatagtgctagtactcttttttattagagatttcatctaatataatatggtttcacgatttaattaatcgcagaagctgccttggtgtgtgagggacgaagagaaagagaaaaggagagagatcggaaaagatgtcatcatcatcgaattcgccgtgcgcggcgtgcaagtttctgaggcgaaagtgcacacaggagtgcgtgttcgcgccgtactttccgccggacaat

SEQ ID NO: 13783 - DNA, 503 bp, Glycine max
  unsure (1)..(503): unsure at all n locations
accaggaatcaggccgttcatatattcgagcttcaaccccagaaactgcagagacaagtttagagaagaaccaaggagattttaaagtttcaaatagagtcggcggcagttattcagctccaatacttgcagaaaagaaatttgacccagctgaaaaagtaagacaacttttagcattttctgcagcaaagtctaatgcatatgttctccctacaccagtcaacatcaaagaaaccaaaactagctcagccccccgcactagtgccagtggatctttgcataatttgtggcattcttcccctttggatgaaaaaaagaatgagaaagatgttgatagtaaattgtcagaaccgactatccctagagctcactctgttctcaaagaaagtaacagtgatactacatacacccagttaccacgcccttcagctgatggactctcacctncacaagttgatcttttcagtgctactgatacctaagaaaataaaagacaagctttt

SEQ ID NO: 13784 - DNA, 573 bp, Glycine max
tcgggaatgcctctcttgaatggaaaggtattacggaggcatggagatgtatttgagcgtagtgcgaaaggatactatcatgcccatggtcgatcggatgatacgatgaaccttgggggaatcaaggtgagttcagctgaaattgaacgcacatgcaatggagtagatagcagcattctggaaacagctgcaatacgggtaccaccttctggtggtgggcctgagctgttgactatagctgttggattcaaggattcaaatagcacaaatcaagatttacaccaattgaggatgtcttttaattcagctctccaaaagaaactaaatccactgttcagggtttctcaagtagtcacactgccatctcttccaaggacggcatccaacaaggttatgagaagggttttgcgacagcaacttagcgaaactaaccaaaattctaaaatataatacaatcatgttaatctaatattgaagattggatatcctggaccaggagcgatcatggtacacatttaaaagtattgttccttccggtactagaatataataatattacggtaatttcaatac

SEQ ID NO: 13785 - DNA, 934 bp, Glycine max
  unsure (1)..(934): unsure at all n locations
ataaaaatctactctttactttcattcgagtaatgttgtacattccagtcaaccgagctggctagacgcttaggagccacgctattacgacataaccaacgtgtacactatatttgatcaaatctagtctatttatcctttcatttgttatttctggcttctagtttggtccaaattatttatatatcaatcgatcacaacccaacgaattagttgaaataaaattggagatagaaagcaaacaacatcatgccatcaacaaggtcatgggaaatggagcacgatgagtgcatcagttgtggcggttttattgggttcaagagaaaccaagtgatagattgcagcagcgagataggagattctgatacagaggagttgtttgagataaatctgaaggagaaggagcctttggctttggatgcaataagagaagactgcgagatcagcactgtgttctcgcttgatattgatattcacgacggcggtagcggcaacgatgatgatgttgtttatgtggcagtaggcaaggatggagattcgagcatggaagctctttcatgggcattgaagcacgccgtgacaccctctgccaccgtttgtatcgtacacgttttccctcaagtcaagctcattccaagtccattggggaaaattccaaggagccacgtaaatctagagtatgttaacatgcattngacacaggagaaaggcaagagaaaattgctccttcaaaagttcactgacctctgcgttgattcgaagggtaaggtggagatgaagcttattcgagggtgacaatgttgctaaaaacattcgtggaccttgtcggaaatcttaatataaaggaaatttgtgatttgaattaccaaatctaatttaagaaaatctgggttctagagtcatattccatagcgggccaggtattgaanatgcc

SEQ ID NO: 13786 - DNA, 649 bp, Glycine max
cccactcgtccgagcaaattgggcgttctcatggctccactgcttgtcgagttgtgagtatttggccacacggaaagatcaggctttgctttgctttgtgtgagatctgaagaagagaggtatggcaaaaagggtcttcttgtacaaggatttggttccttttggggccatggtgaccatggaatgcctcaacgtagccttgaatactctgttcaaagcagctaccttgagagggatgagttaccatgtctttgttgtctatgcttatgctgttgctgctattgttctcattcctggaccctttatctcccaaaggtgcagatcaagagtgcttcctccgctcagtttcccccctactacgcaaaattggtcttatcgggctaatagggtgcgcttctcagatcgtgggatacacaggcatcagtttcagttcccccactctctcctcggcgataagcaacttggtgcccgcttttacttttttgcttgccatcattttcaggatggaaaaggtgattgtaagaaatacaacttgtcaagccaaggtattgggtaccatagtatcaataactggagcattcgtagtgaccttctacaaaggaccaccaatcatcattgttcatacaccttccttgtcacttcatcaacc

SEQ ID NO: 13787 - DNA, 880 bp, Glycine max
gtagaccgcaatccaaatgtctttacacttctcaatcgaacttgttctttggttgaccctgacacaatcaaagacccaaacaccttcaattatggaatattttttgatgctctagattcacgtgttgtagaatcaacaacagattttcctcagaagttcttctactgcttttggtggggtttgcgcaatttaagttctcttggacaaaatctcaagactagtactgatgtctcagaaatagcttttgcaatcttcattgccatctttggattggtcttattctcattacttattggaaacatgcagaaatatctgcaatctacaactgtaagagtggaggagatgagagtgaagagacaggacgcagaacagtggatgtcccaccgtatgctacctgagaacttgagggacaagaattagaaagtacgaacagtaccaatggcaagaaaataggggtgttgaggaggaggcattaattcgtaaccttcctaaagatctcagaagggacattaagcgtcacctttgcttaactttagttaaaaaagtgccaatgtttgagaaaatggatgagcagttgttggatgcaatgtgtgatagactgaagccagtcctttatactgagaagagctacattgttcgtgaagaagatccagttgatgagatgcttttcattatgcgcggaaaagtttcgaccatgacaacgaatggtggaagaactggtttcttcaactccatgttcctcgtggctggtgactttgtggagaggaacttctgacatgggctttggatcccaactcttcctcaaatctacccatttcaaccaggacagtagaaaccttatcagaagttaaagcctttgctctcatggctgatgacttga

SEQ ID NO: 13788 - DNA, 826 bp, Glycine max
gtttgaatgtgcttcaaatacttgaaaccccatgatctctattcaatataactaatttgaggagttaagataacatgatggctaagaaaatggattctgactttctctgatcatctgagaagatacaaaaagttaaaagagcattctggataggtgaacttaggccggtttgagtggatgacataatttaaaataattatgcactctgttatgtttcaattcagatgtgactaaatagatatgatttatcatgtttatatattgtctcatttcaacctcaatgagtatttaccactttcacaggttcgtgtttgtgcttttccagcaagtcgattgggattgcaagggataggaattagtccagactgcaatcctgaaaacgtgtgtagcccacgacagtttttcaactgggcacttgaaccagcagaagatgcaattcttgaccgactctttgagcttggatatctagatgccgctgtctgggcaaaggaaaacccagttgaagtaatcgttcaagatgatagtcctgcgtttggaaatggcagtgcgacatagattgatgatataatgaactacgcaaagatagttcattctgcagattgaagatgcatgaggaaactacagaccattgaatcaccgatgtttccttggaatggagcatcaaattaggaaaaattcacggggagaagtccataattaatctcgtttattcatatttattgtacattgcaatagaattagaggaaaggaaagaaagaaaatagttgagaggtaatatatttaaaatttactagccagaaggttcatgttgttggaaatttatagt

SEQ ID NO: 13789 - DNA, 598 bp, Glycine max
ccggacctacccgctcgaaatgctcaaggtactagtaatcctattgttcaatgtaattgtctggccgagcgcatgggttgtgactgtgagcagatgaaattcctttggctttttattttatatgtaggatgtgcatctggtaccccccccctccctctcttgtgacaattagtggttattgggcctgtttgttacagtttttatttttcataaaaagtctcctttttgtttttaataatcacttttagaaggttttcatgcatttgtgtgagcttttcaaaataatcataagctgaaaaaaatctaaaatctgattaaaatcagaagctattttgaaatagcttctaataaaaaccaactcttttaaaagtgattttatgattgtaaacaatcataaattagtttatttttttaaatctctaaaatataatcactacattatattattttacattataatctctttctaaaattattaacaaatgtacccattattcgtattctatagctaaaaattattttagaataatatatttaaatcattacattgggaacttcacagcttgcagttttttttctagacttgagatgatgtcga

SEQ ID NO: 13790 - DNA, 558 bp, Glycine max
gaaccgtacctctttcttcttcgccttcttcgttcgatccttctccctttcgatcctcgatttcgctttaaattatttttcctaagttcttcaatcgagtccctgctctcgttcaattcccgttttcctcttccgtttgatcccttaatcgttcccctttcgtaaccttcgtcgctttttagggttagggtttcgattcggtctttcagggtcgtaagatcgtcgtttttttgttctgtttcccccaaaactcctggttttggttcttattcgcttgatatttcgtcccaatctggcgtaatttcttgtcgcgcttacgattctagggtttcgttccggtcgaattttagggctttttgatctttgaatttctggaggggttttctgtaaattgcttgacgggtttgcttccttcccatacctgacgaaattctagcggtcctattgcttttaatttattgatttctggggtgactcaagaatcaagggttaaggtttgacatacaattcggtattattctaattaaggaaattcaaatggggttacgctctttggcg

SEQ ID NO: 13791 - DNA, 406 bp, Glycine max
cccacgcgtccgcccacgcgtccgggctaagaacctattggttttgttggggctgggtttagctggaatagttctcatcaccagaaagctcaataagtccgtcagagaggatttcggcgctttcattcataagcttcagctgcttcctcctccccagccttctcctcccaaggctcctcatcccctcacctcactcaccttcgcactttccgacctatttcacatccatggacacgtgccctcgttcgggcatcctgactgggctaggactcacgaaccctcttcttccactggtcccgctgtttccgctctcgtcgagggcggtgcaacctgcgttgcaactactgttctcgacgacttagctctaggtattggcggcgaaaataagcattttggaacgcctact

SEQ ID NO: 13792 - DNA, 717 bp, Glycine max
taacaacaccgttccctcctatcttcactccctgaccatcaccgcaacccacaccatatccccttcgcctgcgtcatttccgcctctgtggcatcttcatatttcaaaacttttgcgaaatttctctcttcttcaccttgctctcaccttctgggtaatgtttgaaacttggtgttagctgagctgtttgacaaaaatgaatattgcacaagttacagcatggcagcctgggatttgtgtgaaaaatatgtctcagttgcaccggcttcaatctaaaccatgtgttataccaaagagttttggtcctctcacttgtgttctactgagcttaagagcaagacaatcgtttagctcgaaatgttggcccattttacaatctcggaaacctcttcatatttgcttagccggtggaaaagggatgatgggaaatgatgagaattccccatggaaatctattgagaaagctattggaaaatttaagggagaatcatcaatagaggatgtattacggcgccaaattgaaaagggtgtatattatgacagtggtggtggtggagtgaaaccaccaggaggcgggaacagtggtggtggccctgatggctctggtgaatcagaagaagaaagccttgctgggatgtgggaagaaaatatccaagtgattttagcgacccttggctttatatttctgtacattcatattctcactggggaggaact

SEQ ID NO: 13793 - DNA, 862 bp, Glycine max
cttcctcagacaaggatacttgcaatttcagctttgaatacactattcaaagaatcaccatataagctgtctcatggtgagaaatctgctgtacttgaggatttgcaaggccatgtcaaatcatcacttgaaggaactttaacgccaacttttcaggaagagggtttcttcaatgagacactgactagtctttctcatgttcatataataactgatactgaaactgcttcaagaggaggtcagcgagattcaagtttccaaagcttagcagacaaatccataactcgtttttactttgaattttcggcttcatggccacgtacgccaagttggatctcctttctaggaagtgatgataccttttgttcaagttttgctcgtatttttaaacggctagtacaagaatgtggcatgcctgtcgtattggctcttaaaggtgcagtagatgagtttataattgctaaggataggtctaaacaatgtgtagctgctgaagcgttggcgggtgtgctacattctgatattgatggtctatcaggaacatgggaaagttggctgatgcctcagttgaagaacatcattttagcccaatctgttgaatcagtttcagagtgggcatcttgcatacgatatgcagttactggtaaaggaaagtatggaacaagagttcctcttttaagacagaaaattctggattctttgatgacacctttacctccaacagtagctactacagtaacagccaaacgatatacttttctggctgctgcacttatagaaatatccccacagaaaatgccagtagctgaaatccagctccacaatacacttctgaaagaagttcttggtaatgtgccactca

SEQ ID NO: 13794 - DNA, 363 bp, Glycine max
gcgcccacgcgtccgttaacatatatatatccgtaattatcccttcatttttccatcttctttccatcgcgaggacagcaatatccactgcatttcccttttgggtgcagaatgggatcccttgatctgaaatggaattcatcgggatgcatggttttgaagaaggtagagtcaactaaaactaaaggggaagatatgtcttccctgtgtggtagttcagcctatctgtacaaaaggagaggaagaagaataagatgcagagaacaaagagtaaatattgttgctacggggccagccatagatcatgctcctgttattgccaagcccttgactaaagatgatctaattgactacttcgtatct

SEQ ID NO: 13795 - DNA, 425 bp, Glycine max
ttgtccggaaatctccattcggatcataagcaagcgccactatcgctgtagaatcctgggaaccagttttatgcatgcatgttatcagtattattagggtttctgctgttttaaaacatgccagagtatgtatatcagtatctgaccatacttaaggttgtgagtgctatgttgttttaatcataactacaacaaaagtgtctcgcaaagccagttatcagatgtcaaattttaagtctttgcctgactgacttagaccaggctttaaagttggtgttgtatttctatatgtaccacttgccatacctacctacccctcatcataattcatgttatgtctatcattatttgagattcagacataaactagcgatttttaatttgaatttaagtatgttctgggtttctgcggaaaatttaacata

SEQ ID NO: 13796 - DNA, 781 bp, Glycine max
ccctcgagccgattcggctcgactctcttcttcccttcactccctcttgagtcttgtctcattcctctctcaagtttctaactttttcccacattctcaatcaactctccaattcccaagtgggtcccaacccaattcggatttcgtttctggatttccccaattcgaagctctgcacttccccttttgaagtggatttttcgttcctgggaagttcaattccaaattcttggaatgggtctctaacacaagcttccaatttggagagaaagtcccaaacttttgggttcaatttttcagttttcgcaactgggtctgtgatcgtgattttggcctcaacttctaaggttttgggagttaccacaacttcaattgtggttgcatccgctgtaatatcaaaggatcgtgacgaaaccacaactgcaacaaccgcaatttaaaacctttgtgtgagaataatgcgtactacagcagaatttcaaggttctgttctgaatcttcgtggggttcaggttcactccatggagggttcaagcatggagcaagagcttgatttgtttcagaagcatgtgacagagcgattcctggagctatctttggctgaaagtggtgaattgctctctctttcatgggttaggaagctgctagattcgttcctgtgttgccaagaggagttcagggtgattctccacaaccacagggctcaagtgatgaagcaccctcccttggatcgcatggtgggcgagtttttcgagcgtaatgtgaaggcgcttgatgtgtg

SEQ ID NO: 13797 - DNA, 945 bp, Glycine max
agaaactgtaatgaaaaaaaaatatatcaggttagaagtcgcgtgtgggaaacaccaagtaatctcaacctccttagggtcatcatccccggcaaagttccatcagctttagtgtgtcatcccggtccgctatgcctagagattcttctacgtatggacacagctcgactcgtcgtgatagaagagccgtggtgaatgataaagcgcatagcagttcatcccgaacctatagcgaaaaagtgaattcggttttagcatccacgggaggctccatcgttcggagtgaaaaagcgcatagcagttcatcccgaacctttagcgaagtagtggattggcttttagaatccacgggaggctccatccttcggagtgaaaaaccggtttcacacagacatacggtgtctttgcttttggcatcccaagtctccaactccacctcaaaccgtttagcatccacaggaggcatctctagttataactacgaaaggagagtgagttccgcaattcggagtgaaattgcgtattcaatatcgcaatacgtcagtaaccaacagctgttggatcttatgattaggagtgtagaatcgcgtaactattctctgtatgccacgaggccatcccaacgttattactagctacaaaaggccaacttcgagcatggagcaaaaagtatatgaataaaaaacaaggaaacaataaaagaagaagcaaaacttcttcgtcctccattgccgcgtgtgaatgatgtgttgatttgtgtgggttttttagtttattttattgtttgtccgtgatcagtttggactaggtaatgcatcaagtgctttccatactcgcccattgagtttattaatttgtgctgattgaagaggtgttgattcttcattcttcaatcctatccacttgtattgtcgtatttttaataaaatttaaattaattttcct

SEQ ID NO: 13798 - DNA, 467 bp, Glycine max
gccgattttctctctcctctctttatatattctcaaatacactcagtctctgaaaagaactagctagttcgaaaacgaaaaccaagtaatctcaacctccttagggtcatcatccccggcaaagttccatcagctttagtgtgtcatcccggtccgctatgcctagagattcttctacgtatggacacagctcgcctcgtcgtcgtagaagagccgtggtgaatgataaagcgcatagcagttcatcccgaacctatagcgaaaaattgaactcggttttagcatccacgggaggctccatcgttcggagtgaaaaagcgcatagcagttcatcccgaacctttagcgaagtagtggattggcttttagaatccacgggaggctccatcgttcggagtgaaaaagcgcatagcagttcatcccgaacctttagcgaagtagtggattcgcttttagaatccacggga

SEQ ID NO: 13799 - DNA, 476 bp, Glycine max
aaaaaaaaaatttgaaaaaaattgagggaaaaaaggaaaagaaacccaaggaggaaggtgggttaatgaccagtagtggttgtcgcttctagtggaagcatgtatccctggctgcgtggggaggtttctgcttcttgacgaagtgtagagaaaattagttgcctcaaattgctatattatgtgactgctaaacatcaaaagtagtctttgtcttgactacgataagagagagggagcttcaacctgtaaagttgacttgttgactggagaaccattggggaatatgtgggtagttaggattgatgcttttatatgccaaggcgtggttaagttatctaaataatccgtgaaataggactcgttgttcccttgctctgaatgggaatcgctataatttcctgtgccaaataaaacaaaatcaacatttatagaactattccttccaaacttggaaacctgaagaaaaaaaggggcgg

SEQ ID NO: 13800 - DNA, 421 bp, Glycine max
ataacatctatctagtccacccctttttttttttttttttttttttttaaaaacaaaaatgctttgtactatattaaatctcagtattgtaaaggtaaacgtttgaattctaggagattaagctcctctatgcctctgtgtctatcactcaatcagactttatcatcatctccaaataaaatacagttgaattcaaaagcctcgtccatcaatggtactgctcttgaatctgtggagcatttggttgcacagggacaacaaattggcagtaaaatggaattggataatcttcaatccaagggtacaggtgttgctgtaaatggaaaagctgcagtgtataccacagtggtggatggtgtggaaaagggccaatttgtacaggaggacaatcatgaaaatcattttttcttaaaatcatctg

SEQ ID NO: 13801 - DNA, 499 bp, Glycine max
gtctatagccttggccgacaggtccgggtaatctttgaaatttcatcgtgatggggaaagagtctataccgagtattaagctatcacctcctccagcaccactttcacctgttttcggcacgcagaagtctccaacaaactcacctacaaatctcagccttgagaaaactaatatagttgagactcctaaaacagttaaagacacagaacctgaggattctcctgaaaaacaaagcacagaggatgtactagatgatgattttggcgatttccaagcagcaggttaagctatccattgccgtgtgtctctgaatttgtgatgattagaaaacatgcaaaattgtcgattccttgaacatctggtatataccaatgacttctgattcagctgggagaatcaattatgtcattccagaaagtgaatcctacatagccaccaacaaaatatcattaaagaatcaacctatatgctctgtaatcggtgattgttctagttgca

SEQ ID NO: 13802 - DNA, 462 bp, Glycine max
aaaaatcgttgcccaattaatcgtgttctttggactccaacaggccggcgacttattaccgggtcacagactggggaattcactctttggactggacaatcttttaattttgaaatgattcttcaggcgcatgatcaagcaatcagatccatggtctggagtcacaatgacaactggatggtctctggtgatgatggaggcgcaataaagtattggcagaacaacatgaacaatgttaaagccaacatatctgctcataaagaatcagtccgtgacttaagtttctgtaggacagatttgaagttctgctcgtgctctgatgataccacagttaaagtttgggattttgcacgctgtcaagaagagtgttcattaaccggccatggttgggatgtgaagagtgttgactggcatcctacaaaatctctattagtatcaggtgggaaggacaatctagtgaag

SEQ ID NO: 13803 - DNA, 539 bp, Glycine max
gggcttagagaaaatctgttccaatcctcgcttcgttttcgtgtcgagaacaatcttctccccatcaaaccctaaccctaactcacagatttgagttttgatcacaccaaatcaatcaatcaatccgagaaaatgcttcaatctccagggcactcgccgctccacatctcgtcgccgtccccttcaatttcccaggtatcggcgcaaaaccctaacgatccaccatcatcatcgtgtgcgaacacccagcggtgttggacgaggacacgtacgttgaggcgttggagaagatcatcgagcgcgactacttccccgacatctccaagctccgcgaccgcctcgactggctcgaagccatcaaaaccggcgaccccgtcgtcattcgcgaggcccaattgaagatcctcgaacgccgcgccggcacagccaaggtaaccaatcccaacgacgcttctagaacaacctcccacacacccggttccacattcgttagaaatttcacacctttcgatgaatttgacggaaaaccctctcaaacc

SEQ ID NO: 13804 - DNA, 330 bp, Glycine max
gttccaatctcgcttcgttttcgtgttgaacctgaaagagaatcttctccccatcaaactctaaccctaactcacagatttgagttttgatcacaagaattcaatcaatcaattaatcaatctttctcttcaccctgagaaaatgcttcaatctccagggcactcgccgctccacatctcgtcgccgtccccttcaatttcccaggaatcggcgcacaaccctaacgatccaccatcatcatcgtgcgcgaagcaccctgcggtgctggacgaggacacgtacgtttgaggcgttggagaagatcatcgagcgcgactacttcccgacat

SEQ ID NO: 13805 - DNA, 458 bp, Glycine max
tcccacgccacggtgctcctccttgcacttttcacgcgtccgaccacgcgtccgctttcttctggtcaatggttgctctacaattattctatttttcccattcagtattcttcactaggtgcaagtattcctcttagcgccaatcttcagcaaatttgaatacttttcgcggattcatcatttttaattttgtttgggttctgaatactcaaggggttttaaggatatttcgttactgggtatccattttctcaaaaaaccatgtctttgttccttaaagctttgcctttgatggccttccgcacgaggccatctctggtgtttctgcgcagagtttccaacaccattccattgtcactttccagaaccagaaccgtgtattccgcttctgcttcaacacaaccacctccttctgcttgtgcttctgaaacactcactttcagtgctaaaccaccttt

SEQ ID NO: 13806 - DNA, 560 bp, Glycine max
cccacgcgtccgcccacgcgtccgattcaatcccatcactcttttttttttttctctctccttccacccaatggcttcaatttatacaatctccttctacccaatatttaaaattgaggcatggctgttgcacacagtgacacacttggttttaattccattgttacagtacgatttaattaaacaaaaagaagaagaaaaaaataaatgggacttactactaggtgttattaaatttcgttggtgaggggtcggatatttaaaaaaggggtttagctttaaatttctcttgcgctgtgttgctccgagagtcttaaaacaccgactctcctcccttaaggcaatgaatgaagaaaggtcctccttctgcattttgtaattgcgatatttactccaaatttccccttcctgcatacttcttgggatttttccaaacaattaatacatttcctggcctaaatttacactctccttctacccaatacttcaattcaattcaattcaatctctttctctctctcctctctcctctctctctctctctctacaccctacccccc

SEQ ID NO: 13807 - DNA, 557 bp, Glycine max
ttgggtttttgttgtggcttttcttgcagccattccactggtaccaaagcatctttctcatagggcttatcgcctttgttttctgggcactctttgctcttctttgtactcattgtactcacaatatgggaaaccaagagcatggaattggcaggccttgcaagtttactttcagtcaataattgcttcgaaggattttttatacttcatctactgccttacatttgttacatctcatctttgccttaaatttgctttgatccctatcttatgttggtcctttgaacatgttgccaagttccttagacgtaatttcagtcgctctaccttgtacaggaagtacttggaagagccttgtgtttgggtggagtcaaacagttctaccctcaatatagtgacatcacatgccgagattggacttggattcctgctgataatctcattgttctcgtggcagcggaacataatacaagcattcatgtactggcagcttctgaagctcatgtatcatattcctgttaccgccccttaccatcagagtgtttgggcccaaattg

SEQ ID NO: 13808 - DNA, 394 bp, Glycine max
cttgcactccacaaacttattggagcagacaagaacttaagtctgtagccatggcaatagtaatcaaagtggcggctctctctggttcccttagaaaagcttcataccactcaggccttatccgagctgcaattgaactgagcaaaggggaaattgaaggaattgaaattgagttcattgaaatttcggagcttcccatgttgaacactgatcttgagatcaatgggacctacccaccaatagttgaagcttttcgtcaaaagattcttcaagctgatagtattctctttgcttctcctgaatataattactctgtcacagctctacttaagaatgcaattgattgggcctctaggcccccaaatgtttgagctggcaaaactgcttcaattgt

SEQ ID NO: 13809 - DNA, 433 bp, Glycine max
cagacaagaacttaagtctgtagccatggcaatagtaatcaaagtggcggctctctctgggtcccttagaaaagcttcataccactcaggccttatccgagctggttccatctctctcaattatcttcatgttttgtttttaatttttgtttcatctttgatatatgcttaattgcaaattattgtggtgttgttgactttggtgagtgttggtgatgatgatgatcatggttgcagcaattgaactgagcaaaggggaaattgaaggaattgaaattgagttcattgaaatttcggagcttcccatgttgaacactgatcttgagatcaatgggacctacccaccaatagttgaagcttttcgtcaaaagattcttcaagctgatagtattctctttgcttctcctgaatataattactctgtcacagctct

SEQ ID NO: 13810 - DNA, 535 bp, Glycine max
attgttattataccacgactctgatgtgaccattctccattcccatggcaccaccatcctctcctccgctcgtcgacgattccgatgccgagcgccgccttcgcgaagcggaggagcgcctccgcgacgccatcgaggagctccagcgcccgcagcgccgcgccgccgctcacgcccagcagcaccgccacgtggactcgctgccttgcgatcaccgccccgacgagtcctgcgtggctcacgccattggcgacctctgccagaccttcctcctctcctacggcgtcagagtcggcattggcatactcctccgcgccttcaagcttgttcgaggccaatcctactcctctctcctcgatctcaagcaacttgtttcagaaaaagatctgatagtaaggggaagaagcatgccgcattggtcttctttttggtggtttcactggatcttatcatgctcttagatgcttgttgcggaaattgagaaagaaagagacaccggctaatgcagttttagcaggttctatagctggtttct

SEQ ID NO: 13811 - DNA, 387 bp, Glycine max
cacaactcaccaccttctctctatccatcaagtcccctattggctattagtctattacgaatcacaactaattctcctcgatcatctttcatttgtcttgataatttcttagttacatcaaagtattcccggttaattatattagttcattcactcatctgcaagcatggccgataagcacggaagaagctgctgttgctgcctctttggaatcttgtggaagattctggttgcactcatcgtcctcgttggcctcgtattcctcatattctggctggtggttcaaccccgctccttcaagttccaggtcacggaagcggacctaacccaatttgattactacaccaacaatcacactctccactacaacatggtgctcaacttcac

SEQ ID NO: 13812 - DNA, 589 bp, Glycine max
aaaaactgcatttgtagaaacttcatttgaaatgaagttgctcaatcacaacagtaatgtaggaatacacttgttaaatcaagttttaatcaaattatatactcaattgatccgttttccacacttctcttcacctcttagggggtgcttggtacaaggaattttttttatgcccgggaatctttgtttcccaactttagattcccaggaaactaaaactttctcttgtgacaaacacccccttaatggttggtagttgctactggctatatattgaaagtgagataattaacaaatttaaagttaaaaccacagctatgtgcaagggtcaaacttgaacgggagatatttgcattaacatttgtttatagaactatacatgcagtttaagcctgtgtttggtagtgttgaaatggattggaaaggaagggaaagtttaaaaaattagtgtgggtccctcaactccaccacactactttaattcaaatatttcctcatttctatttcattatatttctttccactgtaccaaacacaccctacatgtttatactatattactatgtcttaattattttttctttttaaa

SEQ ID NO: 13813 - DNA, 426 bp, Glycine max
cccacgcgtccgtaaaattgatgtgaagtaaatattgtggggaaaaagtatgggcttgggttaagtggcccaataatgttatgctctgaaaccaaaaattggaggcccaacaatgacctggttttgcatcgttcctgttctgttcttcaccgcgcctcggtttccattccttcttcttcctttgtgtttctttgcgttcattataccattcccatggctcaataatcgttgctttgttcgttgggttcaagaaaaacgctcaaaatttcaaccatggctgctacccttacttcaagatgttctcttctgggccgttctttgctcggtggattaaggaataataacttgtctggttcattaacatcgcatgagataaaatccaccaatttcttatcccagcaacattacgttcatacagattatgac

SEQ ID NO: 13814 - DNA, 486 bp, Glycine max
ttttatatgtacaatattaggattggatttgctatgattttctatgaacttattaacgaatcgaattggtcttttgcagctttgccccatatgtctgaccaattcaaaagacatggccttcggatgtggacatcagacatgttgtgaatgtggacaagatcttcagtcgtgtcccatctgtagaagccccattaacaccagaattaagctttactaggcggcctcttccgttgtgaattaattattttgttgtgtaagctaaaattctttgatttttttaaccttctctggttgtatacaaacgttagatcagctgtgtctattgatgaaaaatggtacaacaaaaaaatatccaaaccaattaaattatttggttttatttggtttggacttgtaaaaaaattcttcaaaccccacccgaacaaatgtgaacacgaatatgaatgggatgtttcttgggttgtccaaacataaaataaacacatt

SEQ ID NO: 13815 - DNA, 462 bp, Glycine max
ctagttccaattggatctaccagtacaaaaaaaggagtaatttgcccttttttcaagagaaaaaaaagtgagaatggggtgtgaaaattacatgggccatgatttgcaaagatgaatattctaataaatttttgggctcaattcagacaattgtgccaatcccgtccattaaaaaagcaaagaaatacaaatcgaatattaatttgctttctcctttcggtttaaaccttggaggcgaagacattcttaattgacgttcctacccttggcttggtggggtttcggaagaggaacgtgtggggctttatgtcatttgacgcaaacgcgcgagcaataactaacgaatagaagaggatgtagctttatattggagaatatcaacgaaacatcatcttgggtcactttgtaccaaaccacaaagcgcaaattgttttcttttgctgtcactgttgccgaatccct

SEQ ID NO: 13816 - DNA, 814 bp, Glycine max
ggaactactgcttttggagaatcaagttctcataacgtgttttcaaatatgagaggtgggtctcagtcaaacttccgttcctcgagtaccgatctacaagaacagatgagaaaccagatgaaagatccagccatgcggaagatgttctcatccatggttaaaaatatgagcccggaaatgatggctaacatgggtgaaacaatttgggtgttaaagctttcaccaggagaaagctgcaaaagctcagcaggccatgtcatccttatcaccggagagcttggataaaatgatgctttgggcggacaggattcaaagaggagttgaatccgcgagaaagacgaagaactggctgctagggaaacctggcatgatctttgcaatattcatgctcattttggctgtcattcttcaccggttaggcttcattggtggctagagtaagaggcaaacattgtattatgagattccttaggcattcaaactcaggcataaccttcttgtgtgatgagaatatgagaaaatgattgattgtattctcagcctagagacaatggagagaggaggaaggggacatattggttatctggaaagcaatgccaaaatggcatctcatcagatatgtccaaattgtggatgtgattggcacttattttttttgtaatatattagcttttgagttgtttgccatttagcacttgtagggtccccaccattcaataaatttgtaacttattttgtcattcttatacccctagtcccaatgtagcattggtatggtgcgttattatttataaaatttacatgattccctttt

SEQ ID NO: 13817 - DNA, 393 bp, Glycine max
atcgagccgattcggctcgagcacacgtcttggcagttctcttctctgattacgaaattttttcagcaaaagcaggcaatggacttcttttttaagggaatgaacagggatggatctgagtgtccctttgatgtgaaagacatccaacggtgtccgtttttaagaaacatcaatgaacctacaaacttctctttctcctcaactaaaatctccattcctgttcatggatccaagggtcctatatttgaagatggtcctagttttggcatggcatttaagctatttcatgggaaggatggagtcattcccctatctcagaaatctgactttcacaatggcagcacaaaaagcgattctatgtcttgtttcaaccctttggcaagaaaaacttgc

SEQ ID NO: 13818 - DNA, 484 bp, Glycine max
  unsure (1)..(484): unsure at all n locations
tcgcttcctcaccaaacccactctagcacaacccttcagaaccaacacatatgagtgcccatccaaacgcaccccattttcgagcatcaagcagagcagcgccaaaaaaatgatggttttggaggacaaaggttaccaaaacctcatcatgccttgccaccctctgcggcggtgatgactccatctttgcaatcttctctggtggaacacgcatctgtggggctgacgcagtgcgtagggacttaacttggagaagatccccgtggcacgaacgtgatggtgtggttgagcaccgcatgacacagcgactagtttgagagcgtgcaacccttctcgctttcttcggaaacccttatttcccccctttttctccatcactcaaaaattcggaaattcctcatatggaacagagatctgaatgtgttagagtcaaatctgctcgtaggtaaggtgccatanngtgcngtgatgagtgagagcccac

SEQ ID NO: 13819 - DNA, 781 bp, Glycine max
ctcgagccgattcggctcgagggctcgaagaaaggcaaatggggtgtgcttcctcgaagcgtgttgatgcggcagcagtcccctaccgtcccgcacccacaagcttggcggtgttcgacatcaacaccatcgaggagccatggctgaagcacctcaacaacaccatcgaggagccatggctgaagcacctcaacaacaccacccctctcccccaagacaataataaaccctccctccccgcccctattctccacaaactcaacttgctcgacgccaccgatgccccccaatcctgggatgagattagcaaaacactccaagacctcaaatccccctccacctcaccccaacaacaacctcaacctccacaaaagaccaagtccttccacacggtggaagagctagacgccaagctcaaccccaagcccgagcccaagcccaatccagaattgaaaaagcccgctgatcagataattaacagtagcatagttaccgagccagtccgagggaacaagttgaaggaaaacatgttcatagttcgggacaggctggagagacagaaggaagagaaggagctcaccttcgagcgtcttcgtcgggacccgctgagcgcgttcccggagaagtgtccgccgggagggagcgagaaggtggtgttgtacacgacgtcgttggggggcgtgaggaagacgttcgaggactgcaaccgcgcgatacacgtgctggacgggcacatggtggtgttcgacgagcgagacgtgtcgctgcacggggactttct

SEQ ID NO: 13820 - DNA, 417 bp, Glycine max
ggcaaatggggtgtgcttcctcgaagcgtgttgatgcggcagcagtcccctaccgtcccgcacccacaagcttggcggtgttcgacatcaacaccatcgaggagccatggctgaagcacctcaacaacaccacccctctcccccaagacaataataaaccctccctccccgcccctattctccacaaactcaacttgctcgacgccaccgatgccccccaatcctgggatgagattagcaaaacactccaagacctcaaacccccctgcacctcaccccaacaacaacctgaaccttcacataagaccaagtcctttcacactgttgaagagctagacgccaagctcaaccctaagcccgagcctaagcccaagcctaatccagaattgaaaaagcccgctgatcagataattaaca

SEQ ID NO: 13821 - DNA, 595 bp, Glycine max
agagtctcaaaagattagagatccaggaaggcctagatggctagatgattgcatttgtttgttatacaaacaggcttgaaattaacgctttcccttatctcgctggctttttccatctgagtgttgaacagagaagaagggagaagccaatcatgggttgcacttcactgccatcttttattcagatgtcatctgctacacactccagcttcagtgaaaaactccgcaaccctcaaaagaagtctcaaattgtgatacctacaactacaagagagacacacacaacaatttcttggtctttttcttctcaatgcaaagctcttcacaaatcagttcctttggctgcttcacttgcaattcttctctggtcaacccctgcacatgctggtttcatgtcaggaatttctggaatagaggctattcctggtcctcagctacctcagattgactttctcaagcagctcaatgaagaaaaccagaagaaatatgctgagaatgatgagagaattaaatcatcccccttgatgaaggaactgcttgagaaatccaagttgaacaaagagaagaaccgttaagaaattgagaacaaatactg

SEQ ID NO: 13822 - DNA, 456 bp, Glycine max
cccacgcgtccgtcacattcatccacttttcttcaaagtcttcatctcatatcctctttgttgtgtcctcacacgagtgtaggaacggcattattgtgatggagagccaggatctttcttcgccaccccacgtggacgcatctcgaccgtcccttgggttccccttgggcactgcccttctcttgatcatcatcttcaccttgagtggcgtcctctcttgctgctaccattgggatagggtgtgttccctccgtcaatctttctctgattccgaaccccaaatgccttcctcacccaccaaatctaagcactccaaggaattgaagcaaaacaggggacaaagcttgccagtgttgatgccaggggatgatgtgccaaagttcatagccatgccgtgtccgtgccagccttcaagaccagacagcatcgttgtcaccgtcgaaatggagaagccac

SEQ ID NO: 13823 - DNA, 1410 bp, Glycine max
caagtctgaagcatggcttcatgtagcgcacctccctccctgatgctggtccaccctcaagacctctctcgctctcagagaaccacattctctctctatcctctcctttttaagccctccaaatgcctccacatagagcccaaatccaggacttgccatgccctcgtcgccgctttggctgcagaggtccaagtgcctctaactgtccacgacacggaggaggacgacggttctgatggctccaccgccacctccgccgccaccaccaccaccaccaccaccaagcctaagaaaggcaaggccgcgttgcctcttaagagggacaggacgagatctaagaggttcttggaaattcaacaattgagggagcgtaagaaagagtatgacttgaagacagcaatatctttggttaaagaaacagctaaaaccaagtttgtagaaacagtagaagcccatttccgcctcaacattgaccctaaatataacgatcaacaattaagagcaacagtaaatcttcctaagggaaccggaaaacccgttaaagtggctgttcttactcaaggcgaaaaattcgatgaagcaaaaaatgcaggagctgatttggtgggtggagaggatctgatagaacagataaaagcaggattcatggagtttgataaactaattgcttctccagatatgatgcctaaggttgctagcctagggaagattctgggaccaagaggactgatgccaaacccaaaagctggcactgtaacacccaatattccccaggctatagcagaattcaagcagggaaaagttgaatacagggcagacaaaactggaatcgtgcacttaccttttggaaaagctgactttccagaagaggatcttcttgtaaacttgcttgctgcagtgaaatcagtagaggcaaacaaaccttcaggtgctaaaggtgtgtactggaaaagtgctcacatatgctcagccatgggaccttcaatcaggttaaatatcagggagatgcttgattacagacctccatcagaatagaaccctcacatgtaaatgttcgtttggcctcagtcagctatcccgggtgccattgtgagatcttgccaaatatttattcaaagatgttaccaaagttacatacaggggatgggatctctctgttccaaatgtttgcacactgctacattacataatctttgaccccggctgaggattttccttgtattactttgtaactaacaccagagatctaattatattttctttcgtgggaataaattttcatttttacgttttgatcattggtattagggatttcactcttcaaccgcctgtgttcattgtactcaatacaattgctatggccgagtaaaccatttacaagatcagcttcatgttttctagaagctatat

SEQ ID NO: 13824 - DNA, 720 bp, Glycine max
tcttatccccatcatttttatatccggataggtaacctaagcttttcttccagagactctgaaccatggcttcatgtaccgcacctccctccctcatgctcgtccactctcaagacctttctccctctcttcgctccttctctcacaggcccatttctagaaccaccttctctctctatcctctccttttgaagccctccaaatggctccacatagagcccaaatccaggacttgccatgccctcgtcgccgctttgtctgcagaggtccaagtgcccgaaactttcgacgacacggaggaggacgacggtgctgatggctccaccgccaccaacaccgtccccaccaccaagcctaagaaaggcaaggccgcattgcctctcaagagggacaggacgagatctaagaggttcttggaaattcaacaattgagggagcgtaagaaagagtatgacttgaagacagcaatatctttggttaaagaaacagctaaaaccaagtttgtagaaacagtagaagcccatttccgcctcaacattgaccctaaatataacgatcaacaattaagagcaacagtacatctgcctaagggaaccgcacaactccgttaaagtggctgttcttactcaaggcgaaaaattcgatgacgcacacaatgcaggagctgatctggtgggtggagaggatctgatagcacagatcaaagcaggattcatggac

SEQ ID NO: 13825 - DNA, 543 bp, Glycine max
agaatattacgcagtgaaagattcccgaaacccaaatttacgcagtgtgccttgcatgcccatcaaggctgatttgaagtggccgaaagaggcatggattctgggtcaagatgtttctgccgggttcactcctagcatgtatattattcttttccctcacttctggctcccgctgtgtgctctgcttcacactactgcctctcatccactccctatcgctgcaattttatatttgtcattttggttccggccttgcctcttaagcctcttaagagggacaggctcatgagtaaaattggcgtatcttaatgtcctgtgcttatttggagcccattatggcttgcacaagttgctcacacttccatgatctattggaaatgaacttgcctagcgtttgatgaaagtgtggtgacataacagacgagatctaagaggtccttggaaattcaacaattgagggagcgtaagaaagagtatgacttgaagacagcaatatctttggttaaagagacagctaaaaccaaatttgtagaaacagtagca

SEQ ID NO: 13826 - DNA, 1001 bp, Glycine max
aaaatggaatttttcctagagttacttgagcacttagattatgattgggtaaataatgtcacagaagcaatattgctgtttcttagaaactggatctcatctagtaaaaatgtaggtaaatgtgaaacttctctccatgaaattattacatacagcagaagaagtttccatctccccagatgatgcataagctgatggatctcaatatttttatggactagtaagtagggtggcaagctgctctcaccgtgttgtaggtgaattgtctttctgaaccaaacttgaaatcaaattcaattttgttgcatagaaaatgtgtatttgtattgttggcacttgacagtaatcacatgaaattttactctggctcaacaggagtttgtgaaatggccactgttgataatgatggccgtaggagaaggtataaaccaggccctaaaaatggtatcaatgatatgggaaggagccaagaacctttgtcaaaccgttttcgagcagtcatatcgttgtaaacccaaaacggtgcaaatgtggaaagtataatagaatcaatggacgtaatatggataaatttgctttccctgaagtactggtaaaattctttccacacatcttgtccagctagaccagcataagttatgatggctacccctgccgcaagtgatatcattgcagttacttttgattccaggaaattcaaaggccatgttttaagctgagtttcttcgacaggaggagctggcggtttccaaagtacgaaatatggaagaagaacatatgcaccaccaaaacatgaaagtatcaggaatggccatacaggaatattgttttttgagctgtagaacaacaaatggaagatatgaaaccagcttcttcttccggttggaagcaagagcatgctatataccaatggccacaagcccattaaataccacaatgatactagcacttcattcattctgaaaccatcatctcctttcagattcaggagcctcgaattc

SEQ ID NO: 13827 - DNA, 358 bp, Glycine max
cttaaaacatggcctttggatttcttcgacaggaggagctggccggttccaaaggtccaaatgggggaggaggacctatgccccacccaaacttgaaagtttcaggaatggccatacaggaatatggttttttgagcttcttccggttggaagcaagagcatgctatataccaatggccacaagcccattaaataccacaatgatactagcacttcattcattctgaaaccatcatctcctttcagattcaggagctttttcaagaaatacgcgtcccttgacggcgtctggtttggggtgcgaaagagaacatagtacattagcgcagcccacaatagacagagcgaaatggaggtc

SEQ ID NO: 13828 - DNA, 501 bp, Glycine max
cccacgcgtccgaactttcttctttatgggtaagatgtttttccatgtatcgatcaccatctccaggtgcattgaccttttgcttacactcatgatttcaagttacttcaagatttttcttattgccatgatggtctgggactttccatcttctgtgatcttcatcattgaattattttgtttatcatctaatgctgcggcattgaaagtgatgactgagtcaactatgcgtcgatgtgtttggacctgcttcagtgcatatgctataaaatttattgtcactcgaatactggagctcatattgttggggcaattaatgcaaggctggagtcaaatgccattcacattctctaaagccaccatgatttagtttagcattctcatgctaatgtattagaatttagaagcagaatttcgtggcatgtgtttctgaactgtatatatgctcattgacattttttaaatttctttaatttaatttgatgcttgaactcttctagc

SEQ ID NO: 13829 - DNA, 516 bp, Glycine max
ggacatttcacaaacacctactctaccctccattttccatttccattcttctctccactataaattctccttctctttctttctcgtaatcttcgcctcccttcaactccaccctctctccttcttacctccttgaccatgatgagtttcgccatggattcagtttcggtgttaaaccctaaactctcccactcccattcctctctcccattcagcaggttcccccattccctcaacttccaccccttactcaaaccccgcgcagttaacgccgccgtcccccctaacggcctcgccgcctgcttcctcaccctccaccgacggaaaccgttaaccgtcgctttcacagcttctcaccaagactcggaacacagagagattgaagtggagaaggagcgtgacgtccatgcaggctctgaagaatctcaggaagcgtggaagcaggttctggagacgtttagggaacaggcagagaagtttcagggcgtttctcaagaggcttatgaggtgtattct

SEQ ID NO: 13830 - DNA, 428 bp, Glycine max
ccttctttccgcccacgcgtccgcggacgcgtgggttgatgaataataggtagtaggacttccaattctcgttctcgcattcttcaatctcccccttggcgtccaatttccatttccattcttctctctactataaattctccttcaccttcgcttctctctcgttctcagctccttcaccatgatgagtttctccttggattcagtttcggtgttaaaccctaaactctcccactcccatttctctctcccattcaacaggttcccccattccctcaacttccaccccttactcaaaccccgcgcagttaacgccgccgtcccccctaacggcctcgccgcctgctacctcaccctccaccgacggaaaccgttaaccgtcgctttcacagcttctccccaagactccgaacacggagagattgaag

SEQ ID NO: 13831 - DNA, 764 bp, Glycine max
ttcgccgataaacactccttagctctatcttgttgctcaatcctcgcccctccaatccaatttctctctctctctctctcttccccttttcttttcccctgcataaattccacgcacacccacttcccaatccgcgcacacagatccaaagttcttctctttttcacctttccacgctaattccccatctgggtcatccaaattcacaacattactttgctaatcaacccaaccctaattctctgtttttaatcccaattttcatcccttcggttttcctgatcagaatcttccacccatgtcgcgagtcttcggtagatggaagaatgcgaaggaaatggcgttgctttcggggtccctgccacgtgggcaccatcgaaccgggttcaatttttgcccaatttcgacccacctgaacatgatcgccggccaccgctggcgggaggctccggtgggggttcaggagcggtacaagtgggaccgcggcgggtcggacgatacctcgtcccggaagatccgggccgaggcgaattgcccacgttgcaccaaagacatgaaccttgttttctacaatcgccactttcccaccccacaaattgaatctgaattgggtggtggagaaagagaaaagggttaccaatcggtgaacctttgcccaagttgcaaaactgcttattactttcgcccttatgacactacacctttgcaaggtacctttgtggagattgtagggtcactagtactaacaataaatggtgtaataa

SEQ ID NO: 13832 - DNA, 486 bp, Glycine max
cttcctgaaaggtgttatctcagaaggtcaaaatgtgtatagcttagtgactgggacgagaaggaaaaaactagtaaggacagtaaagtctaagtgatgggaacataagcgtttcagacacttggacgaaaagtcaaaaactagcttattaggtttgaccaaatcttacccgactgcttgagctaattaagtatattgcttcaatttagaaccaacccaatgaatgaactctagtattgagcatcaagtggacgcggcagagatgggaatatagcgtttcagacacttttttctcttattaatgaagggtttcttgacctataaaaaccaacaatggtattagtagtatgtggcagagcttgatataaaaatgtaagggggctaaaatagtttagtttataatatgtattagaatggagatatctcattttgatgtacacataattgctcattgtcatgttttatttaacttcttttcttttcttc

SEQ ID NO: 13833 - DNA, 536 bp, Glycine max
gttcagatgatggtacatttcaactttatgagcaattgagtttttcatatccttctttattgccacttctcatacatgaacgagatacttatcttgcatggtcattgaagcggagcaaagctgtgaataacagtaaaaatgttgtgggtgtcattggaaaaggccatatgaacggtgtaatatatgcattgttatccgacacaggaaatttgaggtttcgagaccttgtagggaaagattcatatgatggaggttctagtggttggattgatgatctaatcaagagcttagtgagggacacaatcattatgggccttatatgaattagtaaatggaggaacatgaagcaggcccatttagtttttcatcttttattataatttccaagattaaaaaaataaagagcaatagatataagctaagagatttttgttgtacctcgcatacagtaggcgggcgtggttcatttttataaagaaataggaaaaaagaaggaaagaatgggattgtgttagattaattgatgttttccaaac

SEQ ID NO: 13834 - DNA, 542 bp, Glycine max
gacagctgaaaagaatagcaaaggcagaaagagctgaagcttcttcgtgtgtgacaaagtaacaaatttcagcattagcttagaaaatggagttcgttcctgaagaaggcaagcaccttcacgaggattgctccactttgattttgcctgctctgtcgattggcaatgtggggcagctagttgcagatcttttgatttcatcaatgggttctgagagagttgggtatttggatgatcctaacgttttgccctgtgttggcaatgatgcttatggaccctttcctcaaggagacctggctcttcctcttgaagcttatgattccccttctaatgctctcactatcatccaacagagatcaccggtggttaagggtatgatgattgagtttgcaaaaaatatggctgattttcttgctggtagtggaaagaagcatattgttgttctctccagcttagattttggaaaatggcaaaaagttgacatgtcaagtggcttgcagattcattacctttctagtgccaacagcaatggaacagatgaa

SEQ ID NO: 13835 - DNA, 1189 bp, Glycine max
tcgtaaatattacatgcactatttactcatttttaatgtatgaaatatttaaattgagggatgaaattaagaatcaaagtagattggtgagaataattggagagttgctagttcatccatgtgatcaacctcgcacggccatgttgatgttaccaatgcaatgtgcttcgctgttcatctctcccatcacgattgacaaaccctaaccctaaccctaatcacccgaccagcatggtgaagaataaggtccccgattggctcaacagctctatatggtcctcatcatcgccgtcgtcccctccctcctccgccgtcgccagccccttcgaacagccaccgcgtcctccgtctcccgccgtcgtgaccccctttgaaccaccgcctccgcgtcctccgtcgcctccctccgtccacgatcctctgccgacgcagagaatcgatgattcgccgagggaagatcacggcgacggctttcgttccgcgcacgacgtgtctcgccaggctcaattgctggccgagttgtcaaagaaggtggtggatatgagcgagttgcggagcctcgcgtgtcaaggtatacctgatgctgctgggatacgttctactgcgtggaagggaaaatggagcaaggatttctgcactagggtatgtgcattccaaatcatctaaccaaatatgcaagtggcttattcccattccattccaaccaaacagcttttgcttggatatcttccaccagatcgagggctttggtcagctgaattagccaagaagcggtcacagtacaaacaattcaaagaggagattttcatgaatcctctagtcagagatcacaaggaagatgttcaactcggcaaattgtgatactggtgatgccagctgtgcgagggcgttgctctctagatccgaaatcactcatggggagcatcctttgagtctggggaagaccagcgtatggaatcagttcttccaggatacagagatcatagatcaaattgaccgagatgtaaagcgcactcatcctgatatgcactttttctctggtgattcccaatttgcaaaatctaatcagaggctttgaagaatatattaattatttttgcaaagttaaacccgggtgtaagatatgtgcaaggaatgaatgagatattggctcctctattctacgtgttcaaaaatgacccagatgagg

SEQ ID NO: 13836 - DNA, 621 bp, Glycine max
  unsure (1)..(621): unsure at all n locations
ggaaggaanaacccggtcgggccgcgcgtcacgaaatattacatgcactatttactcatttttaatgtatgaaatatttaaatttaggggggggattaagaaccaaagtaatcaagttaagaataattggagagttgctagttcatccatgtgatcaaacctcgcatggccatgttgatgttaccaatgcaatgcgcttcgctgttcatgtttcccatcacgattgagaaaccctaaccccaatccccccgaccaaaatggtgaagaagaaggtccccgattggctcaacagctctctctggtcctcatcatcgccgtcgtcccctccctcatacgctgtcgccagccccttcgaacagccaccttcacctgcaccgcgtgctccatcccccgccgtcgtcaccccctccgagccgccgccgcgtcctccgtcgcctcccgcagtccacgatcctctgccgacgcagagaatcgatgattcgccaagggaagatcacggcgacggctttcgttccgcgcacgacgtgtttcgccaggctcaattgctgacggtagttccctctctccgccttcgcatgcttctgatgctgctggtgtgtcgtatgctgtgtggaaggttag

SEQ ID NO: 13837 - DNA, 766 bp, Glycine max
  unsure (1)..(766): unsure at all n locations
gacgcaccgattgacataaccctataccctaatccctaatcancccgaccccagcatggtgaagaataaggtggcccggtngtggctcaacagctctatatgtgtcctcatcnatcgccgtcgtcccctccnctcctccgccgtcgccagcccccttcgaacagcccaccgcgtccctccgtctcccgcccgtcgtgacccccctttgaacccaccgcctccgcgtcctccgtcgcctccctccgtccacgatcctccgccgacgcagagaatcgatgattcgccgcgggaagatcacggcgacggctttcgttccgcgcacgatgtgtctcgccaggcgcaattgctggccgagttgtcgaagaaggtggtggatatgagcgagttgcggagcctcgcgtgtcaaggtattcctgatgctgctgggatacgttctactgtgtggaagcttttgcttggatatcttccaccagatcgagggctttggtcagctgaattagccaagaagcggtctcagtacaaacaattcaaagaggagattgtcatgaatcctctagtcagaaatcacaaggaagatgttcaactcggcaaattgcgatactggtgatgccagctgtgcgagggcgttgctctctagatccgaaatcactcatggggagcatcctttgagtcttgggaagaccaacgtatggtatgagttgttacaggatacagagatcatcgaccaaattgaccgagatgtaaagcgcactcatcctgatatgca

SEQ ID NO: 13838 - DNA, 413 bp, Glycine max
caacatattgagttcacgagttcaaaaataaaaattattactcaatttggtatatgaacgagtttggacgaattgcattaaatttgacctaaacattcaaaatctaaatctatactcgtaattaaacaccggcccatacttttacatctgtagcttacaacaatttctttttataaatgatgatttatatgatgtcatttgtagttttttattaaggatttcatgatgtcgttttaagtttttcataatatatagactggttatgtgtgtgtcaccacacaaacatacatttttttaaaaaaaaaaccttaaggactttgatgatgtggttttaagtattctttaacatgtatgtatccaaaaaaatattttcttataaacatgcaaacttattttttttagtggaatttaaa

SEQ ID NO: 13839 - DNA, 843 bp, Glycine max
gacagattttcacatgtgaaaaaatatgaggttgaatttaataaggctgcacagtctttaacagatgctgtgattccaaccactcagaagaaaactgccttgaatcggctggttaaggataatgttgcactaatagtggttctagaagcaaaagttaacaatcagccatttgataatgctgggaaaagacagcttctttgtgtggcaaatacacatgtaaatgttcaccaagatctaaaggatgtgaaactctggcaggttcatactctcttaaaaggattggagaaaattgctgcaagtgcagacattccaatgttggtttgtggggactttaattcaattccaggaagtgctcctcatgcacttcttgcaatggggaaggtagatccatcgcatcctgatttagcagttgacccacttaatatattgcgtcctcacagcaagttggttcaccagttgccactggtcagtgcttattcgtcttttgctagaacagttggccttggatatgagcagcataaaaggagaatggatggtggaacaaatgaacctttattcacaaatgtcactagagattttattggcactctagattacatattttacacagcggattcattggttgtggagtcattattggagttactggatgaggagagtttgaggaaggacacagcacttccttcacctgaatggtcctcagatcacattgctctcttagccgagtttcgctgctgcaagaataaatctaggcgttgacagtatctccatgtggagtcattgcaatgatctgctatgaatcatgtcacctttatctcagaaaaaaaaaatgcccctgggcct

SEQ ID NO: 13840 - DNA, 553 bp, Glycine max
cgcacgcgtccggttcatcagttacctttggttagtgcatacacatgttgggcaagagcagttggccttggatatgagcagcataaagggagactggacggtgcaacgaatgaacctttattcacaaatgtcacgagagattttattggctctctagattacatattttacacagcggattcattggttgtggagtcattattggagttgctggatgaggagagtttgaggaaggacacagcacttccttcacctgaatggtcctcagatcacattgctctcttagctgagtttcgctgctgcaagaataaatctaggcgttgacagttaaggtcactttcagtgatacataaagaaaaagtctgaaagaagcatttggttggtaagttttttgtaaaaatggtagatcatgcctgtctttttcaggtatctccatgtggagtcattgcaatgatctgctatgtatcatgtcacctttatctcagagaaaaattatgataatgccttactgattttcgcccatatcttacccaatcttttttccctataaagt

SEQ ID NO: 13841 - DNA, 464 bp, Glycine max
cccacgcgtccgcccacgcgtccgtggcataataacagatgccagttgcgcctcaagaaagaaaaaaaaggtttcaaggggctttgggcatttaacagaaggcggttgtatctccaagagtcaaatccatttgcgacagaaccaccaaacgacgatggaggaaagcgttttcgcagcgctaacagacgacatcgtcctctccattctggcgaagctagacgacgatccacgacactgggcgcgcgcggcgtgcgtctccacccgattctccaccctcattcgccacttctgctggaagaccaaatgctcccaaaccttcccctcatctctcatctactccgattacccctgcacctggtcctccctcctcaagctcgccgtttgctgtcccggactccgacacgccggcatccccgtcgaccggaacgccgtgaaacggatgaacatctgccggaattcgcatt

SEQ ID NO: 13842 - DNA, 620 bp, Glycine max
atcgctttttcagtttctctccgtcatcaaatctagggttcctgcagttgtagttgccgtcaccaccgcgagcgccacctccagaatagttgccgccaatttctgattcgtgatggggaaaaatgagtttctcacacctaaagcaattgccaatcgaatcaaagcaaaaggattgcagaagcttcggtggtattgccagatgtgtcagaagcagtgccgagatgagaatgggtttaaatgccattgcatgagtgaagggcaccagcgtcaaatgcagatttttggacaaaacccacaccggatagttgagggctattccgaagagtttgagagtacttttctggagcacatgaagcgcagtcaccgattcagccgtgtggcagccactgtagtttataacgaatacataaatgacagacaccacattcatatgaactctactcagtgggccacgcttactgagttttgtaagtacttgggtcgaactggcaacatgtaaggttgacgaaacacccaagggatggttcattacatacatagatagagattcagaaacccttttcaaggagaggatgaagaataagagaatcaaggcagatatggtagatgaagaaaagcaa

SEQ ID NO: 13843 - DNA, 533 bp, Glycine max
ctcgatccgcctagctttcaattcattttctccattaccccaaaatttgggctctttcttatcctttctaatctaatcccaccatcatctcataaccaataaacaacaaaaagaacatcagcagcagccatggccctgaagtttgcacctttctgacacacccaggttctcccaatttgggttgggcaccatggaaactggaataatccagggaccttggggatttcgctctctatccaaattcgttttatgcaccatttctggggcccttaccgtgtgttttgcccttgctggggccctgacaggagctatagctggtgctctagcagctaaggccactaagagtggtcttctccggggagtttcattgggtgccattgccggctctatactctctgtggaggtgttggaagcttcccgtgcctattggtgtatggagcaaactggctcacggagtgcatcatctatggcagatttcatagaggaacttgttcgtgggaggcttgttgaggaatcccttacacctgctattt

SEQ ID NO: 13844 - DNA, 532 bp, Glycine max
ctcacttaacttaaaaaacactcactactacttacgcacgcccttactttctctctctaaaacccttctcgttttctctctctaattgcagatcaggccgcaccaaccgttgtggttgtggattcggttggggttcggagtcgctatggcttcggcttcgtcttcgtcctccaagctatgcttcaattccgactgcaaagaattgaagtccgaaagacctaagaaagggtggagactccgcagcggagaactagccgagctttgtgatcgatgcggctctgcttttgaagaagggaggttctgtgaaatttttcactcaaatgcttctggttggaggagttgtgagacttgtcgaaagcggattcattgtgggtgtattgtttcaagtcatgcttttatgttgttggatcccggaggaattgaatgttatgcatgtgcccgcaaaagtattattttgccatctaacctgccttggccacagtcctttcccctttaaaatcgtttatcggatagacttagagacctatctggc

SEQ ID NO: 13845 - DNA, 503 bp, Glycine max
tcggttttcatcagagtgtaacatctagtatacatatatagtataacatacttacattgtgtgaaatgagatttgtgctgaagctgaaaatttcattgatatatgaagaaattaatactgatgcaggtggaggaagctgatatgaggagagttgccttcctccctcacatgctcaaaatgcagtggcttatattcaaagcgataccaccaacaagacctgcatcaccaaatggactgtcgagcataaaatggaagctcctatttatatctattatcaactagataattactaccagaaccagttgcagaaaaatcttcttccatatttctgtttgaagttacatataagatatgttaagagtagaaacgacaagcaactgcggagtaaggcagcatagggggaaacaacgaattgttttcccgaagacaagacaaaagataaccagcctattgttccctgtggtctcattgcatggagtctgttcaacgacacatacaaattt

SEQ ID NO: 13846 - DNA, 601 bp, Glycine max
cccacgcgccgtctcaattgtgtgtgcatcagtggagaaatccgttgatttttacgtgaatgttcttgggttttctcctattaagagacctagttcattagacttcaatggggcatggttattcaattatggcattggaatacaccttcttcaatcagaagacccagaaggcatgcccaagcttgttccaattaatcctaaggacaaccacatttctttccaatgtgaaagcatagcagcggtggaaaaaagactgcagcaaatgaagatagagtacgtgaagaacagagtagaggaaagtggaatcttcgttgatcagctattctttcacgacccagatggcatgatgattgaaatctgcaactgtgacaacatccctgtagtacctttaccagaggacaaagtatggtcatgctcacgcttcaattgcaatattcaaaatcgccagcagcagatttaacaaatgataccaatgtagtaaacaagttgcaatgacatgcctgccttcgatccccgttaattcttgtatataattatcatatgtaaaccatgttgtatgttagcaatagtaataaatttttcttgagaaagtgtaattagt

SEQ ID NO: 13847 - DNA, 510 bp, Glycine max
cttcaatctagtaaaaattttgtgaactggtgaatttttcaaaattgatattttgaagtattatgtattgctgcattaatattttgctgatctcactgttcatgctcattcaagtgtcattctgaattgaatgcttccaggttcactcgctgttaaaggacttggttcacaaagctatcagtgagactttggtatgttccgggcagtacttatttcatgttcctattgtatatctttatgctgtatttgatgttcacaaagctattgtgaaactttggtatgttcccagcagtacttatttagtttttctgttgtatttattggtgctgtagttgtgtttggtaagttttcgtgcttcatagtctagtgacaaagtgcagtttttaatatcatttacaacaacaacaataacaacattatcccagtaggtgaggttgcctatatggatcagacaatgccattgtgttcatttaaaaaccaaaattgaaagatactatccatcatgggatt

SEQ ID NO: 13848 - DNA, 633 bp, Glycine max
gaaaaattaaataaacaaaatacaaaaaataaagttaaaacttgcgtgtctgttttagtgttttctctctctctccctctccaccccaattcccattgtacgttcttcttcttcttttctttctttccaaaataaaatcttttacccttcacacccccacccctttgggtttctctcctcaattttgcatctggcggcttctcagttctcaccaccatcatggtttcacttggagctacctgtgctctgtgctgttctatgttcatggtgtttgtcactttgagtttggctggggacatagtacaccctgatagtattgctcccagaaggcctggctgtgacaacaactttgtcctggttaaagtccctacttggattgatggtgtggaaagctgtgagtatgttggcgttggtgcaagatttggccctacattagaatcaaaagaaaaacatgctaaccatactagagttgcgatagcggaccctcctgattgttgtagcaagcctaagaataagctcactggcgagatcattttggtgcaccgaggacaatgttagttcacaaccaatgcatttatagctaaataagctttttcttcatccatcctcattataaattatcggacacaactt

SEQ ID NO: 13849 - DNA, 520 bp, Glycine max
cccacgcgtccgcccacgcgtccgatcaaatcacaatttagtaattggttcagttaatttccatggattcggggcttgctatatcttctcctaaaccttattcagtgatcacaactggttcttatgcatcaaaagcttcgcagcacacaaaaaaaactcaaataaaatataatttgaagcgggtacaacaattaagtttgggccatcgttacaaatgcattgaaggagggtttgcatatcaagaatgcaatagaaagtatgttgtgcaagcagtccctgaatcatcttttgattctgaacctcatacttccaatcctcaaatcattttgcactctgtcaaagatttcttagctactttatgcacactttcctatccatatgcaatgattggcttagcattatgtgcactttcttcgtctctccttgcagtggaaaaactatcagacatatctctatcattttttgttggtgtgttacaagctgcggtacctcaattgtttttcgcaatttatagtaatgc

SEQ ID NO: 13850 - DNA, 358 bp, Glycine max
atcaaataaaagttcacagaacaagctggggtggggcgacgcgctgcctggaacgggacagagacagagagggttccttccggtcgctgtaattggtttggcgttcaattgaggaagaacaatgtcggtgacagcgggtgttagtgatactgtaatagccattagggataagctcagaggtaaaattggccaaactaaagttaagcgttattggcccggtaaagttcctgaatgggctgatgatgagaacgaagaagatgctgcccctgccgatattagaccctccaaggaagctgccttggagaaagcctttcctcgtcacgaagaaaacgcttgtattgtcagaaaagacgatcgt

SEQ ID NO: 13851 - DNA, 417 bp, Glycine max
atttaattaaataaatttgacaggagaagctgggtttgggcggaacgggagagagagggttccttccggtcgctgtaatcggtttggctgagaagggaatcgaaaatcaattgaggaagaaggatgtcggtgacagcgggtgttagtgatactgtgatagcagttagggataagctcagaggtaaaattggccaaactaaagttaagcgttattggcctggtaaagttcctgaatgggctgatgatgagaacgaagatgctgcccccgccgatattagaccctccagggaagctgccctggagaaagcctttcctcgtcaccaagaagatactgctattgtcagaaaagatgatcgtaggctccgccgtttggctcagagccggatagataaccgtgaggaggtccgagctgatcat

SEQ ID NO: 13852 - DNA, 566 bp, Glycine max
cccacgcgtccgcccacgcgtccggcaaaggataggaaataagagaaaggaaaggtgtctcgctctctcgctcttggactgattcgcctcaaacgcatctatctcttcctttcccacctctttctactaccacccactactcttaaggcaaagtcggtgaaaacatagcataggatgatggtggtgccggtggcttctttctcaacagacacagacaccatttgttccatttccattttcttctgattccttctctttctacccatctcatctcatttactatatcttctttttggtccaccctcatattgaagactccgccttataggggcatctttatttctctttcattcttcttgtgtgtttgtgattattgccctgtcctctgacattgctcattcctttaattcccccacccatttcccacctttctctcactcttccttttcttctcgcaaacaaaactcatgggcgccgttcaatctctcaatccatccatccatcctgcttcttacacatattatgcaatatcaataatcctgattactgacacataatgcaatatc

SEQ ID NO: 13853 - DNA, 505 bp, Glycine max
aaaatatccatcccaaactcctcagcggtatttcacgttcgtgttcttcgcttacagttcatacacctgtttctttctctgaaatggtgggaaaacgtgagagttcaaaacgctgagtttcgggttccacaacactgggctcaagtgtacttaagtcgtgagttgttcaggtcctcaagatgcttgcactgacagattctcctctacttattgctaaaacatttgaagcaactaaaataccaacaagcacacgaggcactggggtatgtgctgcaaaaggtccaagaccaagatatccccgagtttggaagacccataaaaaaattgggaccatttccaaggctgccaagcttgttaagtctattaaggaactgtctaatgtcaaagaggaagtttatggagctcttgattcctatgttgcttgggaattagagttccctttaattacagtgaaaaaggcactcaagaccctagaattcgaacaagactggaagcgggtaataca

SEQ ID NO: 13854 - DNA, 472 bp, Glycine max
gtcattttaggtgttgcagtgaaggtgacactgagcaacacttacccatcccatggaatccgcaacatcatggagtaaccctctcccactttccagtctcccttccccttcgcattcacgccacccctccgccttcaaatttatggctttttcaactcttcacactttctcactcccttccctttcttctccctcttctttccacccatttcccctttcctctctctctccaaaacccacttctttcaaccctcgccctctcttccctcgcaccatgcacgcctcgcgcatccaagatgccgttggaggggcactggccctcgtccaatcgtcccccgctacgtggcagtccgcgcttctcagcaacgcgctgatctttttcttggggtctccgattttggtcagcgggttgtctctttccgggatcggtgctgcgtttctgctcggaacgctcacttggcgcgcttttggg

SEQ ID NO: 13855 - DNA, 435 bp, Glycine max
  unsure (1)..(435): unsure at all n locations
gcgcaattttcttactctaacatccgtccgccctcgcggccgtgaagatctcgtacgcaatgagggcgaggtcagaattggggaggcttggtgagctggtcgagcagagaagggaggtcgtctgtgacggagacgacgacaggattcggaggcattatcgacgatggtgttggcattgactctcttggagtggcccgatgagagatgtgtgaagagatgagcctgtcagtatggtgaccaaaatgcatagaattcatggttgtgatgaaactcaattcgaaacatacaaattgatcgaagggaatcgaacccatgactgagactcaattatggttaaccattgagctactgtacttagttggtatatagacgtgagaaataaaatatatagntattggaatttttattgttattttacacgtctttatatgtttt

SEQ ID NO: 13856 - DNA, 1096 bp, Glycine max
tcatgatctctcaagttgaccttgctagggaagctgcccatttgagtcgcttcatttataatttccgcagatggaaggattagatcttttcccaagcctgtctatccacttgtgcacccggctgttctggtggaaacatctgaatagggtgaaagtgtctcatattatgttgatgatcttcaaggacatgaacgggttaaatccgctcttgctcacattgggactcatgcacttttgaaaatgcttctggtggacaacttcattcatgcagatatgcatcctggaaatatccttgttcgagtgtctcagagcaagtctcgcaaacggctcttcaaatcaaagcctcatgtagttttccttgatgtaggcatgactgctgaactctctggcagtgatcgggtaaatttactggaatttttcaaagctgttgcccgccgagatggccggactgctgcagagtgcgccctcaagttatcaaagcaacagaactgtccaaatccgaaggcctttgttgaggagatggaagaggcgtttactttttggggcaccccagaaggtgatattgttcatcctgcagagtgcatggaacaattacttgagaaagttaggcgtcatagagttaacgttgatggcaatgtttgtactgtcttggtgaccaccttggttcttgagggttggcagcgcaagcttgatcctgggtatgatgtgatgaatactctgcagacattgctgcttagagctgattgggcaaagtctctttcgtacacaattgatgggctcatggccccttgggaggaggggtttccttgttgaggactttaggctcttaaaaatacaatttctgaccaaaacctgaaacaggatttgtactaatgggcactaccaaatttgcccttttattttttgcttgccttcttttgggaaggttatccccttattcatctttgtcaatttccagcagttattactgtgtgcttgagcatcacagtttacgagaaaagcttaataaagcagtcaattttgtacccactatactgtactagttggaacggaagtctccgtttgataatgtcgaaatcttgagatttatttaact

SEQ ID NO: 13857 - DNA, 576 bp, Glycine max
gttgcccgccgagatggccggactgctgcagaatgtgccctcaacttgtcaaagcaacagaggtgtccaaatccggaggccttcatagaggaggtggaagagtcgtttactttttggggcaccccagaaggtgatattgttcatcctgcagagtgcatggagcaattacttgagaaagttaggcgtcatagagttaatattgatggcaatgtttgtactgtcatggtgacaaccttggttcttgagggttggcagcgaaagcttgatcctgggtacaatgtgatgcagacactgcagacattgctacttagagctgattgggcaaagtctctttcgtacacaattgacggactcatggccccttagggaggaggaagttcctttctttgttgaggctctctcttgagaaacaattttgactaacataaaaacccaaaacaaaaacatctgtcctaagggctctctcacatttgtttttttatttaatttttttaaagatttatcccttgtatttatcttggttaatttccaagttatttttgtgagcgtcacagtttacaacaaaaatggaagtag

SEQ ID NO: 13858 - DNA, 882 bp, Glycine max
  unsure (1)..(882): unsure at all n locations
ctcgtctgcaactgagggccgagtgggtcgttgcctggcccttatccaagctgcatccgatggtcaagggcaaggaggagttcatgacagtgatcattttttgcatgctattagagacatgctaaaaatttattcatatactcaagctcaagctacactgtccacatatgtatcagctcctggcattgtccaacagatatcagctcttcattcagatttgttgagccttcagtcggaccttgagaattctcttccagaagacagaaataggtgtattaatgaactgcgcaatcttattaaaaatctgcagaaactgctctttgcatcttcaacaacagcacagccaatactgacccctccgccattaatgaaagagcttgatgaaatggaaaagattaacgcanagctgtctgttgctgttgaaaaggtgacactagagcatgtaaaagaaaatgagattgtgaaacatcataaacaagaaattggacttcaaaggcgagtttttgttgatttcttctgcaatcctgagcgattaaggagccaagttagggatctgactgatcgtgtcagagctatgcaaatttcgtagcaatcataatttactcaagtgttttaacatttcatgcctccgaacctgtggacgaacgttagtaaggagcgttggctaagatatagaccaggcacttggagaacaaaatttgcaacaatattctttccttttttcccctattaaaaaggaagcaatcaaaaactttattctggttgtctagatatttgtaagtgtatgttgatcatctccctatgaagttggaattccttttctttacatgtgcaaatcccctagtacctcacatatatgtgtacataaaaatctttatattc

SEQ ID NO: 13859 - DNA, 693 bp, Glycine max
gcgatttacggtttaggtgtatcaaatacaataaatgttttacaatatctaaccttgtgattgaacaaagtatagggcacgtaaccatggattcttgttaaatttacaatggctttcttggtgggcatgcattataaaatcttgagtggggaatgactctgcaagattcctaatgggtgaacaataatctcatttgcatcaatgcattttgggtcgttgattgtcgtcagtgctatattggccactacttttctagcacaaatatgaatcttttaggattcttaatgagtgaacagtaacctcgcttatatcaaggtgttatgggccattaattgtcatcggtgttattccagccactacttttctggcacaaaagacaaagctctacatgattcctaatgaatgaacagtaaccttgtttccgtcaatgcattatggttgggccgttgattgtcgttggtactatcatggtcgttacttttatgacccaaaagatgaagatctacaagattctcaacaagtgaacaggatcctcgtttacatcaatgcattatgggtcattgattgtcgttggggctatctagacccctacttttttatttcaataactaccttttttgcacaaaagatgaagttttacaatattcttgatgcatgaatgtggtgaaagaatggaaaacatgtttatttgtg

SEQ ID NO: 13860 - DNA, 617 bp, Glycine max
  unsure (1)..(617): unsure at all n locations
acgtgaagcaaacaagttacttccatttgggttagggaggagggcttgccctggagctaacttggctcaacgcacactgagcttaactctggccttattaatccaatgttttgagtggaaaaggactactaaaaaagaaattgatatgactgaaggaaagggacttactgtgtcaaaaaaatatcccttagaagctatgtgccaagtgtgccaatcactgacagttaaggatatttataacttctagtgctgttaaaagcataaacatcttataatgtttttgaagaacttatatatgtaaaataaaatttatagtagtgctttatttattcaatgttttgagtggaaacgaactagtaaggaagaaattgatatgactgaaggaaaagggatcactgtgccaaggaaatttcctttagaagctatgtgccaagtgtgtcaatcaccaacaatntaaggatattttgtagctagtgttgttaaagcacacacatgttgtagtgttcgaagaagatataaaaaggtttaaataaaacaaaatttataatacttggtgtaaaaataaaacatagggatcaagctttattcttcaaaaagtactttacacttttaaattt

SEQ ID NO: 13861 - DNA, 769 bp, Glycine max
gcgggccacctcacttggccacttcactcccaaaaacccatcatcaattacaaatctggtgacactcttcccctcactgttgctgtatctgaagctgatttcaaccacctagcaggcacagatctttatgaagccaaagaaattccccatcttttaccccacttgaccatatcccacgaaaaagccacgcttttggccctgcaagttaccttatttccaaactctggattttccattggaataacctcacaccatgctgttcttgatggcagaacttcaacatcgtttatgaaatcctgggcttatctttgtagagaatcacaatcacccacttctttaccacctgaactgtgtcctttttttgacagggaagtagtcaaagaccccaaccatctaggggcaaaatatgtcagtgattggttagagcagaatggacccaacaaccgaagcctcttggtttgggatctgcaagctccagaagatgcaactagaggcatatttcaattgtctcgttcggatattgaaaagctgaagcaaatagtggtgtccaagaagaaagggaacaacatcaaccttcgcttgtcaacctttgtgttgtctattgcctatgcttgtgttttcagggtgagagcagaggaaacaaagaacatgagagttatgttggctttgaatgttgattgcagggcacgtttggagccacctattccaccaacatattttggaaactgcgttggagcgagacttgcaattgctgaaacaagagagatat

SEQ ID NO: 13862 - DNA, 529 bp, Glycine max
cgtttgcgtgggcggacgcgtgggcggacgcgtagacggactcgtgggaaaaaactgcgcgagtatggaaagtttttccatgcttgtgttgttgcattgtccctgaatttgtacttgattctgggacgtcactcagtctgagtctgtttctgcaaatttcaaaaccctctctctcgttactcgccatcactagcgagtgctccttcttcctcttcgcgaaattcgtatgcgaagaaggaggtagggattcgcgctcctgctttctcagactgcctaattatcttttattctgcgaagtaactgagagattgaagatgggaggagatgattctggtttggagagtgacaattttgattggaacactgaagatgagcttgaaattcagaactataactcgtcgtcttcatgtttaacccttcctaatggagatgctgttactggctctggagaggcaagctcgtctgcagctttggctaattacaacgtgcttgatcacttcctcagcatgggtatttctagagaaatggt

SEQ ID NO: 13863 - DNA, 768 bp, Glycine max
ggtactcattcacctcaaggcttgcggaatcagatggagatagagtccgcaaagttgtcatctggtggttttgttttacttgattgcccccaatcaataacgattgagagcagcaatgcatctcttgttggttcagtaagtgattattttttatctttatctaatggttgggacctgactagttatctcaagtctctttcaaaggcacttagaggtttgaaaattggctcttgcttttctacaaaccccggcgaaggaagtaacagctcatgcttggtaatctatgtggtgtgcccatttcctgatcccactgcaattttgcaaactgtaatcgaatcttctgttgccattggatcggttgcccaacagtcagatagagagaggagatctagcttgcacagccaggttgtgaaggcattaagtggcttgaccactgtcgatgaagcttcagcgtctaatatccttgtgctttctgggtttagtattccaaaattggtcttgcagatagttacagtggatgccattttcagagtcacaagcccatctgttagtgagcttgtcattttaaaagagactgcctttactgtatacagcaaggctcgtcgcatttcacgtggaatctctagtgattttgctcaatctgcatttcctagatctcattctgttttgacacaaatgccttctcccatctctgggatgtggaaagactgtgttggtcctcgaatggcaggacattctcttccaagagagggtgacattgatgctagc

SEQ ID NO: 13864 - DNA, 597 bp, Glycine max
  unsure (1)..(597): unsure at all n locations
ataattcaaatggctctgtattctttgacactatgaacttctttgctctatccttctcccccttcctccaaaactgaccaagtcccatactcttccgccatatcactacttttcaacacgctctaatttaaacaatactcccactaccgcacatggatattttcacttcctatacataaccctattccgccatctcttttttcacacttcatttccttcttcttctctgattttggttcatggcgtgggcgaagaagccaggtgactcaaataatgtaggctttatgagatggttagcgttggtgttggtgttggtgttgttatcgggcttttggtgtgtttcgggtgtgaaagaaggaaaaaggaatgcgtacgcgacaatgatgtacgtaggtacgccgagggactacgaattctacatagccatacgcgtgcttctgaaatcgctggctacgctcgacgctcaagccgatcttgttgtcattgcttcccttgatgttcctcctcgctggattcgtgctcttgaaaaggaagatggtgcgaaagtagtgagagtggaaaatntggacaacccctacaagcatcaagataattttg

SEQ ID NO: 13865 - DNA, 370 bp, Glycine max
agctcggattcggtcgagcccacctctcttttatctcccctcaattaacacttcctttcgttgttttcctctgatttttttggtggttgatggcgtgggcgaataagcgaggtgactcaaaaaatgcagggtttatgggaacgttggtggtggtgttgttggtgttgctatcggggttttggtgtgtttccggtgtgaaagaaggaaaaagaaatgcttacgcgacgatgatgtacgtaggtacgccgagggactacgaattctacatagccatacgcgtgcttcttatatcgctggctacgctcgacgctcaaaccgatcttgttgtcattgctatccttgatgttcctcctccatggattcgagctct

SEQ ID NO: 13866 - DNA, 691 bp, Glycine max
atcaaatctccacttcaatagactgcagtcaggcctatttcaagctggtttccctccacttgatcacactgcttccccagtattgagagtctcctccaacaatgcagcaacaatgcaaaaggtcggcacgggtgacaacgtctcttgcttactgtccatgtcaactgctactcaaccttcaaagaaagtggatgatgtgaaggcaccccaattggtgctttttggccaaacaattctcaccgaacagcaaatttctttgaacacctctgctaagacagatcctactcgaaataattcatttgatggaaatgctgataaaatgtgcaagttttcagatggttttggttatgctcttcacccacaaggctcttctcttgagaggttacagtggtacaaggatcaacaaaaagaaaccatggctagtttggagacaggtcactgtaaagtttttatggaatctgaagacattggtcggactatggatctcacaatgcttggatcttatgatgaattgtatagaaagctggcagacatgtttggcatagaaaaatctgtggtgctaagtcacatgctttaccgtgatacaactggggcagtcaagcacattggagatgaagcattcacgtaaaaatcaatgtcactatatcctcttgtgttgcaaatacaaaacccgtcttagaggttcaaatgt

SEQ ID NO: 13867 - DNA, 473 bp, Glycine max
gcgaaagccccaaatccccttaaaattttggcagtctgtgtgatctaagaaccagaaaccatcctcactaacccattttgtgttgtggaataagcatgtgtgagagacctgtccgtcgtatccctcatgaattcatccctcgcattataaaacctcgccgtgtcacggcctctgagctgtggcctaacttactgcgtgatcctatcattcataacttcatccctactcatataactacacccacaagtgcctctctttttgcctccaagcctcactcattcgattcactcaccagagagtgtccatgtacccttcaaaacgacatgtcgtcgtctattcgcttcgttaagcagactcggaccgcatccgattctcaccgtagaaactggaaccaagtccacccagagttcaatatgggttacagggttcaagttcagcaagaatgcaagtaaactcaatttactgttttttct

SEQ ID NO: 13868 - DNA, 497 bp, Glycine max
ctgatggattcccaattacacaaagaacatttcaaatatcaccaagcatgcctactatggacgcaggagtcatttggtggtcaaaagtctatgatcgagaaacagagaagaaagtatttaattatgtagtacactgtactcaaaattcaaatctggctgagtggttcatctgcaacaccacatatgaacttgaacctaaagcattatcttttgttccaaagctcctaccaggtggtccattattgagaagctatgacaatacaaataccaatgcaagttcattggggcagttctgggaagaagatcactctcgcttaaattggctgaatcaacaacctcatggttctgtgttgtatgttgcctttggtagtttcactcattttgaccaaaaccaattcaatgaactagctcttggactagacctcaccagtagaccatttctttgggttgtacgtgaagacaataagttggaataccctaatgaattcttggggaat

SEQ ID NO: 13869 - DNA, 851 bp, Glycine max
gactgaaggtggcatattgcaacaatgtcaattgatgctgatttaggtgaagcaacatgttatttggatggtggatttgatggctatcagaatggattaccattgtgtgtgggtagcagcatttgggagcacgggacagaagtgtgggttggtgttagaccaccaacagatattgatgcatttggtcggtcagatagtgaaggggttgaatctaagatgcatattatggatgcttttctttggggaaggtgctttactgatgatgaggtttcttctctctatacctcaatggcttcggcagacttcagtgcacttgatttccctgaagataattggcagtgggctgattcaccttcgagggttgatggttgggacagtgatcctgctgatgtagatttatatgacagagatgacgtagattgggatggacagtattctagtgggaggaaaagaaggtcagagcgtgatggcatgatggtggatattgattccttttcgaggaagtatagaaaacctagaatagagacacaagaagagattaatcaacggatgttatctgtagaattagccatcaaagaagctctctatgctagaggagagagacgttttactgatcaggaatttcctcccaatgatcactcattgtttgtggaccctgcaaacccccctgcaaagttgcaggttgtttctgagtggttgaggccaggtgagattggcaggcagaaccatcttgactgtcgtccgtgcttgttttcaggagctccaaacccttcagatgtttgtcagggccgtctaagtgattgttggttcttgagtgctgttgctgttctagcagatgtttcacgtatatc

SEQ ID NO: 13870 - DNA, 572 bp, Glycine max
  unsure (1)..(572): unsure at all n locations
tcgcaaaaattactttttgttgacttgaacacttaagttgtcatctttacacaattgatacacttgggaaaaacataaaagattggtttaaaaatatgaatatatcatcatttaaatatttcattatatgttactcatacttcatttagttagaatgtctttgtttgtgtgtgtatgcagtgttcctgtgtattttagatgttaattgcattaaagtgtatgtgttgtatccgatgttcaagtcagagttcatgcttcatagatctatagtccctcctaagattttggttttttcttggagattattacaagacagactgcccacgtgttagcaactacacagaagaagggcctactatatcaacctttacaacaatcttgcagattatgtaaatctaaggtggagaccaacatctttctttatcatgttcttctccttccatatatggaatgcagttatcaactggctaagtataaactttgtaattccagaagacatcaatttgctatacacagggtcgatcctaacattntgtaggcccatggtgaaataataaatatgggccctttac

SEQ ID NO: 13871 - DNA, 446 bp, Glycine max
gcgcccacgcgtccggcacgacacagacactggtccacacagccaagaatggcagatccagctactgaattggtgcgcaccaccatcttcacccaccaattcatccatttcctcctctgatcttgacaccgagaagcaccacactgggcactcttatgggtgtcagcttcccacctattaccttcagagcctccgacccccatccaaattccgccaccgccaccgccaccgctgctgccggaggccctcggagggctgcgggctccaagaagaagagggcgatcgcggtggcggagaggctgaggaggtggtggtggctgtgcagggacggtgacgcgaggccggcttcgctcggtgagtttctcgaggtggaacggcgctgcggggacggcgccttttacggcacggcggcggaactcgaaggaatggtgatggacccgcagagt

SEQ ID NO: 13872 - DNA, 915 bp, Glycine max
cttcccgaaacaaggaactccgtttaaggaaaggaaaacagcgtacgaggaagagaggtagaaaacggcatgcagtggtgggcgtcatggcggaggtgttatattggatctcaacgtttgttctaattttgacccttctatgtatcctcggttaccagcttatattattggtggacttggaatttgattatatcaacccatacgattcaacgtctcggataaaccaggttgtcttaccagagttcatcatccatggaatcttctgcttcaccaatcttatagccgggcattggtttatattcttgatatctctccctttcctgtattacaatctgcgattgtacattaaaagagagcacttagcagatgttactgaaatctacaataagctaaattgggagaaaaagaagcggctgttcaaagttgcatatcttgttttggtatttgcattttgtatagtcagcttggtatggacccttaccgaggatgtgcattaattgatggcttgccttccatgcctgccatatgtttcgcttacatttttgttcgagaattgtgttattctttgtataaatgtaccagctaattaaattcttggtaatatcaaagaagttacaggctgatacattccctacattgagggcaaatccatcttatgagctgaattccattggcaagagccatggtgagagcaatccgtgatgagccaagctctttggagggacacgtcacaatccatattggtgctaaggctagaaagagataggcttgagaagttgtgattctttaagttttgtattacttctgcaaggttagaatgctttaggcatgaaaaaattatttgagctcacagtggtttaaccacaagcataaaaggcttttttgcctaatatgtatattttgcttttgtcacaa

SEQ ID NO: 13873 - DNA, 437 bp, Glycine max
gcgtgacttgtacagatgacattctttcattaattcacgagtgacttttccccttttcttttcttggttttaatgtgatttttgttgtcattgctctatttatgcatggctgaatgctcatattcaataatatcagaagcccaagttatacttttttaatatttttcttaatgattgcaagtacatgcatcatgggttttcgtgaccagatttcatgtgaaatcttcttgcagctcctgttccctccaaattccatccaataaagcaaaacaaaagaacttaataaagaattattatgtcatgtctactttttcattacttggtttctgtgcttttttaatcgtcattcggaggctcgggtatgcttttaaagtacagtttttgttttcctcgcctatttggaaatcctcttatctatgcctattaaccatctggtg

SEQ ID NO: 13874 - DNA, 656 bp, Glycine max
tccgaccgtcgaaccaacaacaacaacaacaacctttcttcatgtcctccgaacccaaccaaacctaccaccaccccgaccaaaacaaacccttccaacaagggttaatgcagttgtctgatcaccttaacaacaacagccaccacaataattcacccttcagccttccctttctctccaacaacacaagcaacgcttcgttctctgaacacttcaacaatgccaatggaggaggaggcaacaacaacaacaacaacaacaacgagggcactaacatacttcgcaacttcaagtgcaccttctctcttcagcaacagtgtcaatgccagtgccttatctcacatgtccgcaactgcactgcttcagaaagcagcacaaatgggtgcaactacgagcaacggcggcaccgcttcgctgttgaaaagcttcggaagcgcgtactccagcagcggcggcggcggctcgaaactggtgaatgctgcaaactacgtcagtggcatgttcggagggaataatcacgtggacgaacagagtaacagtaacctccaagacctgatgaactcgttcgctggtggtggaaactcttccattgtcgaagatgggtttgaagcatatgaacatagcaacaattacagttatagggacccaaaagtgca

SEQ ID NO: 13875 - DNA, 1831 bp, Glycine max
ctactttcttttctttgccaacactccttcgattaggggtttcgatcccaaattacaaattggtcgccatgaacgcaacctcatactctgctcttccttctacgttccgcagtctccatcatcggaatttctcagcgttttgttctgatatccaaaatcctggctatgttgattgccattcaaattgtaataagtctacatctcaagcgtctttgtttttgtgttccgactccaacagtagaagaaatggtgtttttggtagaccactttgtgtgaacccctctggcaggagaaacctagttggtccagctttttattctctggagactagtgcttatgacgtggctgctttagaatctccttcccgtgttgcagaagaaaaagttggtgtgctgcttctcaatctaggaggaccagagacattgaatgacgttcaaccttttctgtttaatctttctgcagatcctgatatcattcgtcttccaaggttgtttcggtttctccagcgaccattggcaaaattgatttctgtacttcggtctcctaaatccaaggaagggtatgctgctattggtggtggctctcctttacgcaaaattacagatgaccaggcacttgcaattaaaatggctttggaagcaaagggcatctcttcaaatgtctacgttgggatgcgatactggtacccatttactgaagaagcaattcagcaaattaagagggacagaataacaaggcttgtggtactacccctttatccccagttttctatatccacaactggatcaagcatccgtgttcttgagcatatattcagggaagatgcctacttgtctaagctccctgtttccattataaactcttggtatcaacgagaaggttatattaagtcaatggctaacttaattcagaaagagctccagagtttttctgaaccaaaagaggtaatgatatttttcagtgcccatggtgtacctgtcagttacgttgaggaagctggggatccataccgagaccaaatggaggagtgcatcttcttgatcatgcaagagttgaaagctagaggaattagtaatgagcacactcttgcttatcagagtcgagtgggtcctgtacagtggctgaaaccatatactgatgaagttctcgttgagcttggccaaaaaggtgtgaagagtcttttagctgttccagtgagttttgtgagtgagcatattgaaacccttgaagaaattgacatggagtacaaggaattggctcttgaatctggcatcaagaattgggcacgtgtacctgcccttggtgttaccccttccttcattacagatttagcagatgcagtaatagaagctctcccatcagcaacagcaatatatgcaccgaccagaacctctgaagatgttgatcatgacccagttagatattttatcaagatgttctttggttcaatcttggcattcatcttgttcttgtcacccaaaatgatcacggcattcaggaatcatgtcatttagaagaattaaatcctgcttgctgaattcaatctgcaagcatatagatgaagcctattgatagcaacaaagtatactttgattttttgtctctgttttacttatttcaacctctactgtatacagcacagagctataaggaagcaatttttcgcacttgattataatgagaacttgcacctcggcttaaagaggattcaaagaataataattgtagaccaggatctattcaggagccaagaggcattgtctccatctccgatattaaaccccgaacaagttattgatttttgtatattatttatttacactttttctac

SEQ ID NO: 13876 - DNA, 371 bp, Glycine max
cttttcttctgggcggacgcgtgggcggacgcgtgggcggacgcgtgggcggacgcgtggcggacgcgtgggttcgatcccaaattacaaattggtcgccatgaacgcaacctcatactctgctcttccttctacgttccgcagtctccatcatcgcaatttctcagcgttttgttcggatatccaaaatcctggctatgttgattgccattcaaattctaataagtctacatctcaagcgtctttgtttttgcgttccgactccaccagtagtagcattggtctgcttggtggaccactttgtgtgaacccctctggcaggagaaacctagttggtccggcttcttattctgtagagacgagtgcttatg

SEQ ID NO: 13877 - DNA, 754 bp, Glycine max
tcagttaataattatttgggtttctcacggaatggtagtgatctggggataaacagaagaataatggaattggaaactgagcttcgtgaggtaaaagaaaagctatggatgcaggaagaagaacatgtagatggatcatctaggggatcaagaagtgagaatactgaagatgtttataccaaaattaatgcatatgaacaagaactgatgactgtgaatgagaagttaagactttcagaagaagaaattactaaactgaagattgagcttgaaaaatacagactcttcaatacagaaaatttggaggctggttttgagtcatcatctatcgaaagaacacatcaatgaaggaggggaagcacacaagatgatagagcttgagggaagcattgatggtgtggataaggaattgtttgaccaaaatggtgagatcgagacgcttgcgagggagctaagaattaccaaagaaaatctcaaagcttcggaaatgcaaattacttcactgaaatttgaggccaataaatcatctgaaagaattcagcaattacatgatcagcttgagttggctcgtaaagacatttctacttggaaaaccaaattcaatagtgagaaaagagagagcaccaaactccatgaaagacttgcgaggttaaggactagtctatcagatcgtgaccatgagatcagggatttgaaaacagaagtatctgatgccgagcagaaaatcttcccagagaaagctcagttgaaatct

SEQ ID NO: 13878 - DNA, 572 bp, Glycine max
  unsure (1)..(572): unsure at all n locations
cggatttaaacgtgatgaacacccgaaccaatagacaccagtttttattggtttggtttgaagctaacgtgaataggcaaaaataccatatgtatttgcagtaaaaaaattatttatttttagtataaatattttctttttgaaagggaaattttttttagtataagtatgtatttgcagtaaaaagaaaagtataaatatacatttcaaaattacttatttgtttcaatgattttaaggataaaaagtcatagtgacctttcctaatttttggcttttaccgtttagagttcgccatttgttgagaatgaaatttttgtggcagcgtagaactgcatcatgggtatgtttactaccttacttttttgggaaaattatatttatgctgaataatttatattaatggacaaataccgtatacatttcatttttttaggcaatgtacatttcatattattcataaatgaatgacattatggcaacattagaacatgatagtggcaaaaaaattattacattagtaatatgaatttcatacagacattatttaattactgtgntaaatacataac

SEQ ID NO: 13879 - DNA, 392 bp, Glycine max
ctttcttcccgatcgatcgatttcttccgcctagggtttttctgcattccgattacccatcccaccgcattcacaatcacaattgcaatagggttttcgtttccttcggcttgcttctgtggtaattgcagctttctcgattgaattttggatttagggttccgattccgagtcttacttctaaaagccgtcgattcgtcctggaatttcaggctctcggagccgcagagatagggttcttccattttgtcatgttccccaaggaaaaagagagagagaggggtcaacgaattttttggtggtgagttgtgggctgagcctgcaaccgttgttataaactggagttatcgcaatgttgggtgtgaatcgtactggctttaatttctgtagcc

SEQ ID NO: 13880 - DNA, 553 bp, Glycine max
ccgccacttcctcctacccaattcctctgtccattcttcattttctcactaaaataaacgaaaaaaaaaacatttttttctgctttctctgataacccttttgtttctctccttgaattttgcatcaagaaactcagttctcacttctcagcatggtttcacttggagctatatatagtgtggcctatgtgttcatgcttgctgctactttggtcttgggtggggatatagttcaccatgatgatgttgcccccagaagacctggttgtgagaacaactttgttttggtaaaagtccccacttggattgatggtgtggaaaacagtgagtacgttggtgttggtgcaagatttggccctacattggaatcaaaagaaaaacgggccaatctttctagagttgtcatggctgatccgcctgattgctgtacaaagcctaagaataagctcaccaacgagatcattttggtgcaccgaggaaaatgtagtttcacaaccaaggcaaatatagctgaagaagctggtgcttcagccatcccattaataaactaccg

SEQ ID NO: 13881 - DNA, 569 bp, Glycine max
  unsure (1)..(569): unsure at all n locations
gcagttgacatgtttggagtcttaccttccaacgaatatgagtgagagcaactcccacctgctgcttctcttgttctctacacacttgttgttcgaccattgacaacagcttgtcgatgagctcagcaactacatcagacctgaaattgggtccaacaagacctgtcagacactctgaagcagatggcaataataatgctgacaaaccagacggtgacagtgcccaatctgacagcgagggtccaagcaatgggtggatgatgagggtctcaaacaacgtggacaaccaggtggtcctggcagaggacactatgtactaccccactgctgaagaggtgcacagcaaagacgaaccccttgaacatccatcattaagctggtgacgggcataaagttctaggtcctcatgaaggagtcttccacattccatctgtgtcctctcagatgctacttggcctcacgtcaaaccactccaagttgaagctcanggacttctggaaagcaccagacaaggaagaaaaatattgtgatcaaccttacaagctggaatttcaagattagtttacttt

SEQ ID NO: 13882 - DNA, 1460 bp, Glycine max
ttttcttcttccttcgctgaatccctagctgttctcttctccgatccgataatggcctctctattcaacaatgctaacggcgttctcggaaaatccgagaagctcattatcgacaccgaccctgggatcgatgatagcatggctatttttatggcttttcaaagtccagacgtggaggttctgggtttgacaaccatttttggtaatacaactaccgaactttccacacgcaatgctttgcttttggatagtgtgagatcgcaggccgtgaagatattccagttgcacagggaagccatgagccattgaagggtggaaagcctcgtgttgctgattttgttcatggtaaagatggactagggaacacattcctacccccacctaaaggtgagaaaattgagaaaagtgctagtgagtttttggtagagaaagtctctgaatatcctggtgaagtatctgtgctagcacttggaccactaacaaatttggctttggcaatcaaaagggattcttcctttgcaagcaaagtgaagagaatagttatacttggtggtgcattctttgccttggggaatgtgaatcctgctgcagaagccaatatccatggagacccggaagccgcagatattgtgtttacctctggggcagatattgttgttattggaataaacattacaacccaagtccaattcacagatgctgatctcctcgaactgaaggaatctaaaggaaagtatgctcccttcttgagtgacatatgcaaattctatagggactttcatgtaaaatctgaccgtgtccacggaattttcctccacgatcctgtaagttttgtggcagttgtgcgtccagatcttttcacatacaagaagggggtagtgagggtagaaacacaaggcatctgtgttgggcacacacttctggaccaaggattgaaaaactggaatacgagcaacccatggacgggttattctcctgttgcagttgcttggacagtgaatctcgaggaagttcttgattatatcagggagctggtgatgaaaccctgaagtataggctcatttgtactacccttctgacagacaaaaagcattggaaagtgataggacgatagcttcttatttgcaaaaatatgcataaggtcattttctttatttcattcaaggtcacaatgagttcttaccccgtttaatattataaagttcatgtaccaatgaaattctctttacatgaacttatttgtgtttggatttcgctactcttatttgagaagaaagcagtcattctttacttttcctacctctgaacttgcatgttgcttcttagttcttactatggtattatagaatttcggtttgaaaatcgcactaaagacttcttcgcttgtaccaagaacattcataattccattattatctcagttctgaattctgaaatatatatgttaaaagttgtaaggc

SEQ ID NO: 13883 - DNA, 385 bp, Glycine max
cccacgcttcctcttcctcttcctgcatttctccgcgtgtgtgtatgtgtgtatactctctcaagtacgcacatacatacacatccattcgtacataaatacttatatctcttcttccttcgccgttaattctctgaatccctagctcttctgttctccgatccgatcatggcctcgcttgtcaacaacgctaacggcgccgtcaatggttttcctggaatatcccagaagctcattatcgataccgaccctgggatcgatgatagcatggccattcttatggcttttcaaagtccagatgtggaggttctgggtttgacaaccatttttggtaatacaactaccgaactttcaacactcaatgctttgcttttgtgtgagatgg

SEQ ID NO: 13884 - DNA, 451 bp, Glycine max
gcccttcttttttttattttaacattaaacttgaccattttatatatatttttttggtacatcaaaaagtagtataaacataaatttatcacatatatcctaattcccaccatcccaattacccattttagagatgggttgttaacgatattatactactttcacaatacaagaatttttcaactactacctctacccataattcctaccctagataaaggaggtgttcactaagattccataaattcctagtatcttaaacacttgaatatatgatatttaggtgtaagacatatggaaattcaagatctcttatgtttttacaccataaaggatcttggatttccatacatcgtatacacgaatatatcatattcaagtgtttcaagaggcttggaatttatgattccttaaacgtgtgaggaggtaaaattaaaacaaatgcttaatc

SEQ ID NO: 13885 - DNA, 869 bp, Glycine max
gaagcatagtagcatcaatgccttccttatacagaagactaaaattagcagagtgcatgcggccaggcggttatttgagtacctatccgacaattctctaaacttccctgttattcaccatattcagttcccaaatgggattcacagagatgacttggtaattggtgctggttctgatgctggagcccttctggtggatgggcttggagatggacttcttttggaagcgccagacaaggattttgaatttattagaaacacttctttcaatttgttgcaaggctgcagaatgagaaatacaaagacagagtatgtctcatgtccatcctgtggcagaacattgtttgatcttcaagaagtaagtgcacaaattcgggagaagacatcacacctccctggtgtttcgattgcaatcatgggatgcattgtaaatggaccaggggagatggctgatgcagactttgggtatgtgggaggcactcccgggaagattgacctctatgttgggaagactgtggtgaagcgtggaattgcaatggagcatgcaaccaatgccttgatcgatctaataaaagaacatggacgatgggtggaccctcctgccgaggagtaaaagcaagagcttaattttgagattggcattcaaggccatagtaagatgagcattgtcatatccaattattgtacacatgtaatataagataacactcaatgcttaagtttgagcctagttttaagttccttttgagaaagatcccaattaaagcttgttgtgaggaaatcgacagctagaacatgtatacagataacagtgtattgctttgccccatcagccatcaataataatgagaatctcttagaatagtgcc

SEQ ID NO: 13886 - DNA, 325 bp, Glycine max
ttgcaatggagcatgcaaccaatgccttgatcgttttaataaaagagcatggtcgatgggtggcccctcctgcagaggagtaaaggcaagagctcaattttgagattggcattcaagtccaatgtaagatgatcattgttatagcctattattgtacccatgtaaagtaagccctgaatgcttaagtttgagcatagttctaagttaaggatcccaattaaagcttgggcggtgaggacatcgccagctataacaagtatacagccaccatcaataataataataataataatgataatcccttggaccatgcccagttatcctt

SEQ ID NO: 13887 - DNA, 819 bp, Glycine max
tcgacccgcgcgtccggttttggttccgcagaagattctgaattctgatgctctagtgcgattccatgggagaggtggtcatcatgagtggagagaagaagtcagttagagtggagggggtggagaaggaagatagtggtggaagtgggagcaaggctggtgaatttaaggggttgatgaggtgggagaagttcttgcccaagatggttttgagggtgctgttggttgaagcagatgattccacaagacaaattattgccgcgcttctcagaaaatgcagctacaaaggttatgtgatggggatctgggttcaatgaaagtctaaggatctaatggctcctttccacttgctttaagagtcttggcagtctggaaactacaggcttacatgatagtgatacaattattttcttacatgatatgattattttcagttgtctatttgccataaagaatttctattattgacctttgttcttgtatgaaacttttaatgtgagaaaatgaagtacttgaaactaatttacacaatattagaacttcaaaataactttgctcatctgctttgagcagtggttgctgttcctgatggcttgaaggcatgggaattactcaagggaagaccgcacaatgttgatctaattctgacagaagtggatttgccatccatatctggctatgcacttctcacattaattatggagcacgagatttgcaaaaacatccctgttataatgatgtcttcccaagattcaattagcacagtatacgaatgcatgttgagaggtgctgctgattatcttgttaagcctattagaa

SEQ ID NO: 13888 - DNA, 1079 bp, Glycine max
gacacaacactgtctctctctcttctctttctctgcgtttctctgcaaaaccagaacaagctctggagaaaccgccacaaaaaaaagaaaagaaaacgcaaacctaaccgcaaacggtaaccccattatgccatgcttcacaccacacccctctcttctcttccttcttctcacccttctctctatttccttcttctctccttccaccgctgcaagaacctcttctttccattccttacgtatttcagatggagtcgaggatggtggtgagggagagtactaccacgaggtactaccatggaaaacgaggagatccatggctgaagaagaggccacgagcaacacgtctctgatattggctcagagaagaaccacaaggaaggaccctttggataactacaaccattacaccggtggctggaacatcagcaatcgccactacattgcttcagttgttttcaccgcggttcccttctttgttgttgctgcggtctggtttgtggtttttgggctcagtttatccttcatatgcttgtgttactgctgttgtccaagagagccttatggctattcacgtttggcctatgctttgtccttgatcttcctcgttctcttcacccttgcagcaatagttggatgtgttcttctttacactgctcaggggaagtttcatgggagcaccacaaacacgctgaaatccttggtgagtcaggctgacttcaccgccgaaaacctcaggaacgtgtcagattatcttgatgcagctcagaagatcggagtcgaagcggtttttttaccagccgatgttcagaagaacattgacgaagttcagatgaagattaattcttctgctgcagatctttccagcaagactaaagaaaattcagagacaattaaagatgtcattgatgcaatgagacgggatctggttattcttgctgctgttatgctctttcttgcatttctcggattcttattttcaatatttgggctgcaaggtcttgtatactttttggttattgtcgggtgtatttctctttcttcacaatgtcgttgcagatacatgtgttgccatggat

SEQ ID NO: 13889 - DNA, 463 bp, Glycine max
acgccggagaacagcccgagattgataaccatgctgatgaagtctcatcagccaaccatcctggtaccggtgtagaggaaaactttgttactgagggttcaagatctgcatcaggttatagcaacagtccacgccatgcaaccattgcaagtgcaacaaatagttacttttttgatagaatttctgcaacatggccagaggaaaaacttcttctggctacaagaacccaaagccctcgtgtcagtatggatttctctaacggggtaagtcaaaaaatgtcagcctggggtatggtgatcgtaactgccggcctccgaggggaaattagaactttccaaaattttggactaccacttcggatataagaggtgaaagaatatgcatgcttgtgagcatggctgagaatgagttgatgatatcagctcagaaggcagtagattacaccttctccattagttggtga

SEQ ID NO: 13890 - DNA, 422 bp, Glycine max
cccacgcgtccgaccgcatgccagaatggaaattattcaagccttttgaagcagcaatcggagatagagcttatttttcgcagaagtccaaaacaacccctacagatgagtttgctataagcactgtagctgctgtccttaaggagataccacctgcatggttcacctatgggcattactctactgtcatggctatcatgtatcatttaccgatctctgttagagattttgttttgaagaaagcaatgaaaggctgagctatagttaggtggtgcatctatctttccacatggacaccttataaagcatttactttacctttagcaacagaagagatattttctatttagttccattttatcatattttagtgaacaaagtttttgaataaaacttgaccaaactgaggacatagtttcttg

SEQ ID NO: 13891 - DNA, 1841 bp, Glycine max
ccgcccacccgttcggtttctactctcacagctgtttattttcttcctcttctcaactgtgttcgtgtgtatgcatttgagttgaaagccagactcaaggagctgaaagacaaaagaagaaacttggatttgaatcagccaaaatttgagttacacgtaattgcaaagataagatgagtgttatgtatagtcctgttctcaattactcagatgtggagcatcagctaaggaaaaaccaagacatggattcaagtattggacatccacaacaacactgtcaccaacccaattctggactattgaggtattgttctgctccaagctcattgctggcaagcctcattgacaacaccattcatggctgtgtcaacgaggaatcgttcacaagtgagaatcatcatcatcagcagcagcagcagcagcagcattatcttccatctacaagttcagaaatggagaccatgttatccaaattgctaccatccaacaatggatggagcaattcagaagctttgcaagaatttggaggcaagcctgtgaagcaggaaataggggaatctattccacaagagccaccacaacagaatggttattcttatggtggctctcagttgatttaccaatctcagcaaattcaaggcttgccaaatggtggatcttccagtgcttctggcagtgcttttgatggctcttttggtgtggtgcactccatggcttcagaggactccattcaatctaaaatgggtatcaggaattgctccaatctctttaggcaaaagagttcccctgctgcatttttctccattgaaaatgatcttgcagcattgagagaagtaggaagctttaaagccgatgatgtttcaaatggactagttactgcatcaactggtgggttgcatagttctcatactttctcatctaggccatcttcatgcttgaaacggttgccacaaatagccgaaaatggaaatgaaagcctagaagaaaattgtgaccaaagtagaaacctagtaaatgacaatggtagctcaaaatgttacatacctagcttcaccaatgaattatgggaaagttctgcattcaatgccccaaaaacagagaatgaagatgaaatcatgttttccacttcaaatattttggaatctcaggaagcagatttcagctttcaaaatctgggtttgactcaccatttgagtctacctagctcttctactaagatgtcatccatagaaaagtttcttcagattcaaggttctgttccttgtaaaattcgagccaaaagaggctttgccactcacccaagaagtattgcagagagggtaagaagaacaggaattagtgaaagaatcaagagactgcaagacctttttccaaaatcagaaaggcaaacaagcacagcagatatgttagatttggcagttgagtatattaaggacctgcagcaaaaagttaagatactctcagattgtaaggcaaagtgcaaatgtacaagtaatgagaagcattacactagaacttgtgcttgatttatttgcatgtagatagcaaaaggatggaagattttttagtgtgccaaagttagcaattgtaattagataaaataatgctgacatttgcctggagtgagtttaggaccaggtgaattttttttttacttttttttttcattttttcccttaatttctttttcttcatagtttgatttaaggatcataaagacctagcatgtttagcatgagttttgtagctcttcattattacatataagaatttatgttgaaatttatatggagaaaacacaagggggaccaaaaaaacgaaactttgcacggacatggaac

SEQ ID NO: 13892 - DNA, 572 bp, Glycine max
gaagagtgaaactgccaaaaagtgaggccaccccaaaaacaaagtgagattataggaaacaaaaatttctttgcttaatactagttcctcctttctcctagcctggtagtcttttgaaaattctttatcttgatcacataattttcattttgaacttgaagaaagttttagtgtatttttttttccttaaagaaacagaacatatcctgttctttctttctctgtttgcatttttgttcacttctttctttctttctttctttcttattatctagttaagcatgacaacatttatggacatgtacaacactactagtagcatcatgacaccggatttcttagaccagtgtagtgatcaagagctgatgaaagcacttgagccttttatgaaaagtgattcatctagcactacttcctcatcaataacaacatacccttcattctcttctttttcttcttctcccaacttgtcctcaacaacatggagcacccaattttgctcctcaagctaccaccaaaagggtccaactccaacccaagctagttccttcaaactgaaccaactcacccca

SEQ ID NO: 13893 - DNA, 501 bp, Glycine max
cccacgcgtccgcccacgcgtccggttgaatagaagtgtctggaatccaatccgaagtggtttggtgtttgcgcgttcactcctctctcctcccctcctgcaattacccaagcgatctctctctctctctctctctctctgtttcatatcatgaaacgctcaaacgacgacgtcgctgcccccgtccccgcctcaacctccaagccagtgttcctaaccaaagcccaacgcgagcaattggctctccagcgccgccaggaagaagtcgccgaccagaagcgccgccaggagcagctcctctcccgcaaccactcctccgatcccaaaccctcctccgaccgcgacagagacagagaaagagaccgagaccaccaccgagaccgggaccgcgatcgtgacagagacagacagagaacgcgagcgcgagagggcccccgatccggatcgcgaagccgaacggcgcaacagatagagggagcgcgaataggagagccgggcccg

SEQ ID NO: 13894 - DNA, 518 bp, Glycine max
accgtccgaatccggtcgaccacgctccggcaccgtcgcgacgctggctgaaatccaatcgaatggtttggtgtcggcccggtcactcctctctcctcccctcctgcaaggacccaggcgatctctctctctctctctctctctcctcctgtttcatatcatgaaacgctcaaacgacgacgtcgctgcccccgtccccgcctcaacctccaagccagtgttcctaaccaaagcccaacgcgagcaattggctctccagcgccgccaggaagaagtcgccgaccagaagcgccgccaggagcagctcctctcccgcaaccactcctccgatcccaaaccctcctccgaccgcgacagagacagagaaagagaccgagaccaccaccgagaccgggaccgcgatcgtgacagagacagagaacgcgagcgcgcgaacgcgcccggttggagaaactcgcggagcgtgagcgcgagaaggagcttgagtccatcaaggagcagtacctgtgctcgaaaaa

SEQ ID NO: 13895 - DNA, 1119 bp, Glycine max
ggactatagaaaataattaattggattttggggacggcatcccaggctagcggagcgtctgacccgaaggaagatatgatatgagatatgagatatgagatgggagtctccattctcacccgtttccatttctctctccctctcccacgcgccaccgccagaaagaggattttccatttctgccctccgattgcatgccgctcatccatggatcagtcttctggcctgaatctggaagatctgaaatgggaccattccttcgtcagagaattgcccggcgatccccgccgcgactcctttccccgtgaggttctgcatgcttgttacacccaagtctctccttctgttcaagtacacaatccccaacttgtagccttctcccaaccagttgccgacctacttgatctcgaccataaagaatttcagaggccagattttccccttttcttctctggtgccacacctttagttggagcgttgccttatgctcagtgctatggcgggcatcaatttggtatgtgggctgggcagctgggtgatggcagggcaatgactctaggggagatactgaattctaactctgaaaggtgggaacttcaacttaaaggagctggcaagactccttacagtcgctttgccgatggccttgccgtcctccgcagcagcgtcagggagttcctttgcagtgaggcaatgcaccaccttggtataccaactactcgtgcactttctcttgttaccaccggcaacctcgtcacccgtgacatgttttatgacggcaatccaaaggaagaacctggcgcaattgtttgcagagttgcccaatcttttctgcggtttgggtcataccaaatacatgcctccagaagtgatgaggacctaggccttgttcgtgttttggcagactatgctatcaggcaccactttcctcatattcaaaatatgagcaagagtgatagcttatctttctgcactggtgatgaagatcattctgttgtagatctcacttcaaataagtatgcagcatgggtggtggagattgctgagcgtactgcttccctgattgctagatggcagggggttggttcactcatggcgtgctgaacacggataccatga

SEQ ID NO: 13896 - DNA, 599 bp, Glycine max
tctttcacgcgtccgcggacgcgtgggttcacccacaacaaaaaagtaaccccctttggtttcacactttgctcattctcgttttctgatttttcccacataaataaatcccatcccttcttctcttacactcttctttgtttcagcaatcaatcaatttccccaccattagggtttttcatttgaaatgtggaagggcaacaatggagcccattgaatccgaatcagttagttcctccgccaaagaccagcaactgggtgaaccttcttccactgttcaccccctcgatcacgatcctcaaccttcagatctcaatcgcgttacccctgttgatgatgcacttggtgaggagtttcagaacaagttggatttgaaggatgggggtgagagtgagaataatggttcgaacttggaagatgggggtgaaaaattgagcgaggataaaggttcaaacttggaagatgcgagtgaaaaattgggtgatgaaggtgctgctgccccagaatgtggcaagggagaagggtgtgatggtgatgttggtggtgttgctaatgattatggtgcaatcggtgatgatgcagttgctgctgaggatggt

SEQ ID NO: 13897 - DNA, 611 bp, Glycine max
acgaggtcatattgtggctatgaggcattcaagttgttggctaggaattatctcaacattgaatcacacaatctgtttggcagaatatgtgaattgctcaaggaaaccaaaatcaccccagctgaggttgcagaacatctgatgccaaagaatgcttttagggatgcagacctttacttgaagagtctgattcaagcacttgaattggcaaaggaagatgcaagaaagagccagcatgatcctcattggactgaaaatgattcagaagacaaagcaacagaaaagtcaacaaactacacatcaacttgatgcaaagtagagtcactaagataaagagtgtgtgaaaggagtgaatcatagtgggagggagtagacaagacaagcacactatatgctcattttgttgtttataacctcagaaaattggtaagctaacaaatatcctaaggtattggttgagtaaacagaagtatatttaatactcactaacatccttatgatatttagtagctgaactttaaaagtttatagaactacacctgtcctttgtggctttagacattgttaatttgttatatggcctaatctaagtagtacctaattgatgacct

SEQ ID NO: 13898 - DNA, 420 bp, Glycine max
ccccttcggggattaaacaatgccagaattgttgatcagttttttgataaatccaactggtgtattattcttgagaagacagtgtgaccaagaaaaccttgagggagtatagcaggccagagtgtagtataacaacttttacaacatttatcttgcaagttaactttgtttggcatctaatttactatcgattaaaaaaatgggcagctgcagaagttggacagaatgattatctggccatttcatcatccagaccaggctgcattcttctagaaatcctgatgtattgtttttttggggttcttttttaattttttgcgaagcccaattttggttgtaacaatagggcacgaaggatgccactgttctgcagtgttggtattatagcttggcacactgtctgccctacaatgctgaata

SEQ ID NO: 13899 - DNA, 700 bp, Glycine max
cggctcgagctgaatgagaagtatgttgatgagtgggtaggaccaggtagtcctcatactcgggcaccttcatcctcgtcattggaaagtatccccgaaagtgaggtgagtacctctggtgagcacatggaagtttgccatgaggcacatgcatcaagatatttggaggaagaaaaaaatataaagaatcaacaggaatactttgttccctggcatttaccttatcatcgtgctgaaatcagtggcgcttctgccgaagctcttgctgctggtctggcaacgaaagatgacaaaaaaggtgctgtggtgtataatcgatattatcatgtttttagtgaaggcgagcttgaaagtttgacaactgaaataaacaatgctataattgttgatcagttttttgataaatccaactggtgcattattctagagaagacagtatgaccaagaaagaagaaacctggttgatatgtgtaagggaacaaaactaggctgctgcctcctttaaacatccgtccagcttctcatccttgagggagtatagcaggccggattgtagtataacaacttttacaacatttatcttgcaagttcaactttgaattaaggattgtagtataacaacttttacaacatctaacttgcaattaaaaaatatacacaaatttggatgaattaaggatttcatcagacttttagtata

SEQ ID NO: 13900 - DNA, 466 bp, Glycine max
caaactctgtttctttgtttctttatcgaagtttcaacttggtttccttctaatgcgaacctctcttcttctccgctcccacaattgtcttcaaggcagccacgatgtcttgtccctcactccatcttccatcagatcacaaagaaaccctaacccaaaccctagccccaacccttaccagactcgccggcggaagctccacgacggcgaccgctccggcatggtggtgaaaggcccctgcgcgaaccttgtcatgggccaagtcaagatcctcaagagaggcgagacgctcagccccgagaacccccgccgcgccaattctttcgacgacgacgacggtggtttcgattttgtattgggatccacgaaccggttgggccccgatccgagctccgttccggtccctgggttcctcgcgttgaggcggtgatgatgaattggttgattgattatgctgttggatttc

SEQ ID NO: 13901 - DNA, 426 bp, Glycine max
cgaagtttcaacttggtttccttctaatgggaacctctcttctccgctcccacgattgtcttcaaggccaccacgatgccttgtccccaactccatcttccatcagatcacaaagaaaccctaaccctagccccaacccttaccagactcgccggcggaggctccacgacggcgaccgctccggcatggtggtgaaaggccccagcgcgaacctcgtcatgggccatgtcaagatcctcaagagaggcgagacgctcagcgccgagacccgcggcggcgacgacgaaggtttcgatttggttttgggatccacgaaccggttgggtcccgatccgagttccgttccggtccctgggttcctcgctatgaggcggtgatcatggattcattggttgattttattgttggatttccgcgtttatctca

SEQ ID NO: 13902 - DNA, 471 bp, Glycine max
cacgcttaaggctttttaaggcctgaagctcttgtagcctcagcataataaaagccgggaagaattaaaaaaaaagaaaagaagaaaaaactgtggattttctttctgattctcctatgttctaaagatcaatcttacctttgattgatacaaattttgcttcaatcgggtttcaggaagtcatatattctaggctgcaatactgagattcagagataaatggcatcattggtagccagtggtagcagtcaaatggctccttcagtttctgtccaagaaaaagggagtaggaataagagaaaattcagggctgatccacctttaggcgagccaaataagattattccttcccctcagcatgaaagcctcagcaatgaattttctgctgaaaagttcgaaataaccacaggtcatggacaagctagtgcttctgacatgtgcagtgtaagccaagatcattctgatgggttg

SEQ ID NO: 13903 - DNA, 790 bp, Glycine max
agctggttctttaatacagcagtctttgtcaagcagagactttttgaatggaatgtttgacctctgaagatcatttgattaaggaatctgctgagtgggccaggttggctatcaatcgtgctatatctgtttgaggttcatctgagttagcatatccattgtcataaactatctgcatgcatttgggtgtgtcgaggtgggtcttgggattgcatgtgtcaatttgtctccatggtcagacaacagaaggtatcagtctgaaggtcttctagttgtcactaactcttgcatcatcaccaatgcatcactgacttttgcatgagcaccactaagtccaggtctgtcaagaggaagaaggtagcaatgaatttgcaaatgggggtgtaggtcttcatgaaattgattgaatgaccaaggggatgcaactgattcctgattgagaaattaagctactctttagttggaattggatgatgagtttggagttgatgctacgagaagataaacccatttgagcttgaaaacagttttttctggaactggtcatgcgttatttgagtggttgaatttgcagggttgagcgaactagttttcatctacaccaccctaagtgctttatttcaagtgaatctcttccttgttttttcttctgacttttaacctgcatcaaaatcattgttttaatcatcctattgtgtataattgcccctaggctgtttggtatccatataattctttttcctgcatacttgcttttctaggctggggatccattgcgattgatgaccca

SEQ ID NO: 13904 - DNA, 774 bp, Glycine max
gggcacgagtcatttacaaacctaaggtctcggggttcaggtctatgtgatattgcaatttttggttgttgacattatgcatgggttagagcaacaaacaatagaatccctaaatctattaaaaatgaggaatacggaattcattgttgccttgaataaggttgacaggctttatgggtggaaaacatgtcgcaatgctccaattgttaaagcaatgaagcagcagactaaggatgtccaaaatgagtttaatatgaggctcactcagactattactgaattcaaagaacaagggctgaataccgagttgtattataaaaacaaagaaatgggagaaacattcagcattgtgcctacaagtgcaataagcggtgaaggaattcccgatttgttattactattgattcaatggacccaaaaaacaatggttgagaaacttacatacagtgaagaagtgcagtgcactgttttagaggtgaaggtagttgaaggccatggaactactattgatgttgttttagttaatggtgttcttcatgaaggagaacaaatagttgtctgcggaatgcagggtccaattgttaccacaattcgagctttattgacacctcatccgatgaaggaacttcgtgtcaagggaacatatcttcatcacaaagaaatcaaagctgcaatgggtataaaaatcactgctcagggccttgaacatgccatcgctggcactggtttatatgtggtgaagcctgatgatgatttggaagatgttaaagaatc

SEQ ID NO: 13905 - DNA, 779 bp, Glycine max
atgcagctgccaaaaaggcatcagaggatgcttccaaacaggagaaagatggtgagcagcaagctagcccacaggatacaacaatgactgagggtgccagtgcagcagcttctgaagccgagactaagagaactgatttgacggacgatgagaatgctcttctacagcaggcccttgcaatgtcaatggatgatcccacaattaaccatgaagtgagagatacagatatgtctgaagcagctgctgaagatcccgagttggctctggctctccaattgtcagtagcagacagttcaaaggatcaagcaagccagtcagacatgagcaaattgttggctgatcaatcctttgtatcttctatccttgcatcgcttcctggggttgacccaaatgacccttctgtcaaggatttgctggcgtccatgcaaaatcagtctgagcctcaacagaagaatgacgacaagccatcaaacgaggaggagaagaagtaatctttgagaaccactttgccctgtatggttttattttcttggtagcattcttcgcggctgttactaatcgggggaactatttacgcatgtttcaatgtgtctctctgcactttaattggaaccaatgcatgtctctcgattgaatattggatgatttttaacttaaaatgttcttgattgtcatgccttattcttggttagtgcttatcatctgacgagggcttttaaatgactgttttaatacctaagaaagtttcaactattaaaatgtatttcaatctcatctcc

SEQ ID NO: 13906 - DNA, 532 bp, Glycine max
cgcacaattaaccatgaagtgagagatacagatatgtctgaagcagctgctgaagatcccgagttggctctagctctccaattgtcagtagaagacagctcaaaggactcggcaagccagtctgacgtgagtaaactgttggcagatcagtcctttgtatcttctatccttgcatcgcttcctggggttgacccaaatgacccatctgtcaaagatttgctggcttccatgcaaaatcagtctgagccacagcagaagaatgaagacaagccaccaaatgaagaggagaaaaaataatcttaatagtctcattgtggttttatttgtagtattcctttggtaggcatattggtagcatgttggaaagtgattttactcgggtagttatttcacgtgttccaattgttgagttcccctgctgattggaacgagtatatgtctgttgattaattacggatcattgagtagagcacatttcaaaagcctattgtctatgttcatcatcaagggaatacatggttttatggttaag

SEQ ID NO: 13907 - DNA, 1194 bp, Glycine max
gaactcttcgtaagttccggaatctacaccacccctaggctcttcgctccaaactccgaaccctaacctaacccaaccatcttcttcgcctcgagcacatcttaccctaattcgattattccccaatttcatcgaaccaatcaataaatcatatacacattttttgtttaatttttgatgccgataaaaaatgccgccgaagcagcagcaatcgaaagctgatttagcgaagaagcagaagattgtagaggacaaaaccttcggtctcaagaacaagaacaagagcaaaaatgttcagaagtatgtccagaacctcaagcaatccgtgcagcccaggcccgatgccgccaaagtcgatgccaagaaaaagaaggaggaagataaggccaaggagaaggagctgaatgagttgttcaaaatcgctgttactcagcccaaagtgccagttggtgttgatcccaagtccatattatgtgagttttttaaagtggggcagtgtgccaagggcttcaaatgcaagttctcgcatgatttgaatgttcagaggaaaggggagaagattgacatttacagtgataagcgtgaccaggaaacaatggaggattgggatcaagagaccttggagaaggtggtggagtcaaagaaaactgagtataatcagaataaaccaactgacatagtctgtaaatactttttggatgcagtagaaaagaagcaatatggttggttttgggtctgccccaatggtggtaagaattgccattatagacatgctcttccacctggttatgttttgaaatctcaaatgaaggctttgttagaggaagaaagtgaaaaaatatcaattgaagaggagattgaaaatcagcgtgccaaagtggcaactacaactcctatgactcctgagttattctttgagtggaagaagaagaagatagaagagagagatgccaatatagctgcacaacaggctgagagggctaagaatgatcgcatgagtggtcgggagctatttttgtcaaatgctagcttgtttgtggatgatgcagaagcatatgacgtgtaccagagagaaccagaatcttatgaaactgaagagaatgggagtaggaatgctgcagaagatggtcccagctcctcagcaacagccgctgctgatggtgattatcttgatgacatagatgacgatgacga

SEQ ID NO: 13908 - DNA, 316 bp, Glycine max
accccatctacgctctaaactccgatccctaacttaacctaaccagacatcttcctcgcctctgccaggcacatcgtcctacgccacacaaacaccacacagatcgttccttcacatcttaccctaatttgattattccccaatttcatcgaaccaataaattatatataaatatatttttatttttattttttgatgccgataaaaaatgccgccaaagcagcaatcaaaagctgatttagcgaagaagcagaagattgtagaggacaaaaccttcggtctcaagaacaagaacaagagtaaaaacgtccagaag

SEQ ID NO: 13909 - DNA, 435 bp, Glycine max
cacacacaccaaccatctcattataaattgctaagtttttcaactcatcatcaattggcactttttgcttcagaatgaatgcttgaggttgaggagaaccagaaccagaagcatgaatcaacttggtggtgttagcgttatccttctggttctctcagtcttgtgtttccatgttagagcacagacttctgcaccttcttcaggagatgctgtctccaatttccagccaagccttgctgttgtcataggaatccttggtgtcatgttcttactgacattctttcttctcatgtatgcaaaattctgtcatcgccgccatggcggcgcttcggccgttggagactcagaaaatcaacttacttttgtgagatcaaggtctagattctcaggaattgacaagactgtcatagaatcactccccttcttcagattctc

SEQ ID NO: 13910 - DNA, 496 bp, Glycine max
agccactactcctacttcatataattcacattcacccctcttcttccttccatcatcgaagtgccctaacaacattcgcgcgctcttcgtcttttccttcttcaatccgcgcgacaccaaaaccctagatccggcgcaatcatcgggagagagaaaggttttgactttgagacagtattgctagagagaggaccggtggtgggcttggcaagaaatggatcctggtcgctatgctctgcatcaaggctgggataataacagcgctcttgagggatacggtgccgtccacgaccccaacttccgggttggtggttcctatgacgagcgaaggtttatagatgaaagatatccaagggatgctgtttaccagagaaataatttccaccgtgacattttggatagggaggcctatctgccacctggacctcctgttggccactggagtcaagccaaacggagaggttatgatgaagattatgcacttgacagggaatct

SEQ ID NO: 13911 - DNA, 382 bp, Glycine max
tggatattgagttattgaccttcattctcatagaaagagtctcgcctagccactactcctacttcatatcatatcattcacattcatctctcttcttccatccatcatcgaagtactaacaacattcgcgcgctcttcgtattttccttcttcaatccgcgcgacaccaaaaccctagatccggcgcaatcatcggctcttgagggatacagcaccgtccatgaccccaacttccgggttggcggttcctatgatgagagaaggtttatagatgaaagatatccaagggatgccgtttaccagagacataatttcccccgtgacattttggatagggaggcttatctgccgccaggacctcctgttggccactggagtcaaa

SEQ ID NO: 13912 - DNA, 430 bp, Glycine max
cttggatctatcgatctcatctccgtcatggctccgaatccgatgaagatgaacatgaagcaatctgccaattccactacaactaccatacctaataaggagattctggtccgtgagacgatgcgtatcagtgccaatttggcttccacccctctcctcgaatccccgccgccgccgtcgcccattgtcggaatcatctgctgcgaagaattggatgggcgtcgttggaagtacgtggccgagagcgatgcccgtggcggattcaagaagaattcattccgccctgtcaggctcaacttccacaaccctcgcgaccaccctctccatgaagtcctcgctttcgttacatcctatgttgtccccgaaggttttcctgatagtgttattccttcctatgtcccctacatgacatggagggctcttaagcact

SEQ ID NO: 13913 - DNA, 449 bp, Glycine max
cacgcgcacggatgcgcgagatgcagggtctggaatgatgagcatggcatccggcgtagcagcgaggcagagagagcagtaatccaagtaaagcgacgtcgtgaaggcaaggaagggaaattgggaatttgatctccgtcaatgtgatggctccgaatccgatgaagcaatctgcgaattccactacaactaccatcgctaataaggagattctggtccgtgaaacgatgcgtatcagtgccaatttggcctcccaccctcagccgccgccgacgtctcccatcgtcggaattatctgctgcgaagaaatggacgggcgtcgttggaagtacttggctgagagcgatggctttggcggattcaagaagaattcatttctccctgtcagcctcaactccaaccaccctcgcgaccctcttcacgaagtcctctctttcgttacatcctat

SEQ ID NO: 13914 - DNA, 1004 bp, Glycine max
gccaccaccaccccttacctcaccaacctcggcttcggctactccatcgccatcgccctcggcgttctcttcctcctctccaccctcatcctctcctcctacctttgctgccgcaccctccgccgccgcaacaacaacaacaaccgccgtcacacccccgatggcgtcgtgctcccgcgcgtgatcttcgtacccgaggacgaggatgacgacgacgacgacacccgccagaacgacgtcgccaccggcctcgaccaggccgtcataaactcctaccccaagtttccttacgttaaggaaggtgattacgacagcacctgctcgatctgtctgtgcgagtacaaggattcggagatgctgaggatgatgccagagtgtcgacactactttcacttgtgttgtctcgacccgtggctcaagcttaacgggtcatgccccgtttgccggaactctcccatgccaacgccgctgtcgacgccgctgcacgaggtcgtgccgctctcacagtacgccgatgccagggcgaggaggtgaattcgaattttcttctccggtgtggctcgggttgctgggttcagtgggaaaagcataaaggacaaaacttagatcagttatttacatgtttttgcatgctgttattatcccatcaaaattggagttttacctttaatagttacgggttagttttactcagattatccaagtaaaacttcagtttttgacgagagaacagccggtaaaaacacttgaataattgtatttaagttctttgtaagtgtaaatctttctcccgtgatggttgatgatggggagtttctgttttttaataaaggggttgaaaggggccaccaagcgtgttgctggttactaaaaaataattggtaatgccctgaaagtctgaaactatgcaaaatgtcccttttaggggaaattgtccccgacttcgttttgttaggaccatgatttgacattggaaaaaatggatggtaggactatcccttttt

SEQ ID NO: 13915 - DNA, 569 bp, Glycine max
ggcacgcggattttctgcccagcagtccctaaaatcacatggtatcagagcttcggctctgatcttgtggtgtcccgccatggaaaaaagtgctgcgactggagaaaattcctccaccacttctacgaattctggtggtaatgaaactgtatcatcccctatcatatctgattctctgtccataggtaccaatttacagcttgtgattcaaaagctgaatggtgaaaattatgttgaatgggctcaatctgtgaaactggcccttgatggcaagggaaagttgggctacctgacaggagacacctctcaaccaggagtgaccgacccctctctcccaagatggaagtcagaaaattcactaatcatcgcatggctgatcaacttaatggactcttgcattgggaagtcatacttattcctcccaactgcgaaagatgtgttggaggccgtccgtgattgttattctgatctagaaaactcttctcagatttatgaacttaagactcaagttgggcagtccaaacaaggagacaaggatgtcacaaccctttacaatctcatgggtactc

SEQ ID NO: 13916 - DNA, 476 bp, Glycine max
tcgcccacgcgtccgtgaatctggttagtgtagtagcattgcaacagcatacttgtagggtttataagctataaatggaagaagccttctctgccataatacatttatatcttttcttttttaatttaattgcttgcacttttagtataatgttttatattgtcaaccaattagaaatcatagtgggtatgacttttaagtggtttttgttaaagtcaaaacacttaccatacacggaaattgtgattggatgatagtgtaaaacactttatagtgtcaatgcttgcactattttctcttcttttttctcctacgctgtacatactgctttgtcctggctattttttaacaagttctgaaagttcttaaacattttctcatgttttaggttgaaatagatggtcagatctttggtaaagggtttggattaacatgggaagaggctaaaatgcaggtatcctactttctttttatga

SEQ ID NO: 13917 - DNA, 445 bp, Glycine max
tagagagcacagacagagaacaaaggctaaaaccctgtcccgtggatctacgaaacccacataaaccctctctccctcccaacgaccgaggaagccatcaaaatcatcgcaacgtgaaagtgagagtgagagtgaaagagatctgattgtgttgtgaatcaatctcagacacgacgctatgagaagggtaccttccattctcttcagaaccctcacgtcccctcgcgtcgccacctctttctccgtccccaaccgccttctccaggccgcgctctaccgcagcgccgccgcccgctctcaccgccgccgcttctcctcgctcctcggtcctctcgccgccgcgtctctcggcgttgctggggctctggtctctcaggaagtcctcgccaaggagcccccgccgccagaggctctcccgaacgacgtcgttctttaccagttcgag

SEQ ID NO: 13918 - DNA, 1055 bp, Glycine max
cagccaaaaaaattgatgctctgcatgtctctgagaaatctgcaccagacattggtggtggtagtggcagtgatgttattaaccccaagtcaatcttgaagagtaaggataatctttcggagcccagggatgttcgcaaacgtgttcggtttgattctgaatgtgatgatagtggtaacgatgatgatgggcttgaaggaagaaccagggatgttcgcatgaagacctcttcaatggaagaggctacagcttctgaccagttgtcaaagtcaaaagaatttgattcagctgttccagattacattcgtaatccttcaagatacacccgttacacttttgatgattctccaagtgacatggatgacaaatcaaataaggaagcatgcatgagcttccttttgcagttgaaggggtcaaatgctgccaagagaactggacctcaagaagatgaagctttggaagatcttccatcagtaacatttatatcgaagaagaaatctggtgatgccaatatgtgcgacagcgagatggtgtcaaagccgaagcttgatgctggcacggaggccatgaataaaagagccttccctgttggcatagctgccagtgactctgaaaacagtgacgcttgtgcaatggaggaagatgaaccagaagttaaagacattaaaaagagctcgcagaaggtgaaccgccagtacaggaagaaagctcaggagaatttggaggagcctgtgtaatgtaatggcgcagttagttcctagacttgcataatttgacatgatcagacttgtaccttttccccccattgtttccctcagactaatgctcccttttcgtaaatttgtgaaactacatcatgtgccaagatctgcctatggccaagttcgttagtttctttctagaagtagaactgctataggtataagcttcaactcaagcataatgatcagagattcagagctaagatgagatgtgttaaaaatgtatttttcatcataaagtatcaaattgtgagcagttgcccataatagcaattttcacctggtttatatttc

SEQ ID NO: 13919 - DNA, 793 bp, Glycine max
ctattttccctttctctgcatccctgttggcggagctctaagccatctcttgtctctctcgagaggggaaagagagagagagagagagagtgtttcggtgtcacaacgcaaacccagaaagtagcaaatgccaaatggtagtgcggtattagcattgtagcgtagtgttagagagagaaagagaagaaagaaaaaaggcactaccgtcaccacaaccaactaggcctcggtcggaaagttgctacaaaaaaggtttcgccttctgggtcactctttacttttctgggatctccatttctgaactaaagtctgaatttttgaaggaatttgatcgtggggtttctggttgcttattctgggggtgtcaccaagttcccttaatcaactgaatatcgagccttatctgggtatttggcctctgattcctgttgggtatttccttttttttttttttacttttaatctgtgtggaatctgagtgattttgatcttggagggtaccctgaatcggtgaattggcgttgttgttttggtttaaagatggttgctgatgctagttgtggcttaaggtgatttagggaagtttttagataacggtataataaggatggcagcacagtcaaacgctggatttcacaatgaagatatagattctattttgaacaggcatgcaatatcatttcaacctggtggtgctattaacccgttgtctgagatggttccaatgggaaattattttgggctaagtagttcgtctgggatgatatattctgggaattcaagcatcattaac

SEQ ID NO: 13920 - DNA, 623 bp, Glycine max
  unsure (1)..(623): unsure at all n locations
atcctgaatcaacatattcccctgcacagaaggctgttgtgcttgttttctccaagtctgttgaggctggtgttgagaaggggctagacttgggatcaaaaaaggagccatatgttactgcacgacttgtagtcccatcaaaccaagtgggttgtttgttagggaaaggaggggcaatagtctcagaaatgcggaaagccacaggggctaacataagagtaattgggaatgatcaggttccaatgtgtgtatcagataatgaccaattggtacagatatcaggagtgttttcaaatgttcaagctgcaatacataatgcaactggtagactgcgagatcatctttttgtcagtacgcaaaacagtggtggagcaaggagcctttcctctgttctagctggaggccaaccaactcttgctatttctcatagtctcaatagacattctttgccaggattacaggcaccacagacagtggctgggataaattccagaggcaccaatggtgttagtcggggattgatttctcgaaaaggtggcttagaacttatcagtgggagtaaaactgccattgttactaatacaactgtgcaaatngtggttcctgatgatgttattggctct

SEQ ID NO: 13921 - DNA, 859 bp, Glycine max
tcggtttttgactcagggaaaacttaaaaatgctcaactgagaacgaacacaagagataactttgaacataagtgacagccagagggctacacctataagtacagaaaacttactatcgagagttaataataattccgggtctaatgatagaactgtggaggatgagaatggtttttgcgaaaataaaccaaactctggtgcaaagctgcatcaactactggacacaagtcctagagctgatgctgtggcagctggttgatacagaaaaccagtaattgtactggctgatcagaggtagttttggcatatttttaaacccaagcccaaaattactactaacaatttcctgagggatggatcacctgaattttagtatctaaatccatcaaaatcagaactaattcattgtttacttaggccaaaactctgtattctattagatttgccaaaaatggatgcccaagtttgtaaaatgaagagaactagagatttcagtttggatgggtttgttgaaccgttacataattgcgtatgtattaacgattgctgtggactttctaatgggatctgagataagtaaaaaaaaaaaaaaaaaaaaaacataatactagaaaaaaaaataaagactaacaaaatgctatacaataattcatattatcagtatatctggcaagaagttaatgttaaataactcgtacaacaatgacacaaatggaaaaagaagttttttgcgtatttgaatactgcttggaaataactaagaatcaactttttgaaaaataacaaattggccctaaccgaaaagccataaaaaaaaaatgggcaaccaaaatagaaaaatgagacaacaacctaaaa

SEQ ID NO: 13922 - DNA, 451 bp, Glycine max
atttttcttttatgcgagggcaaggcttggtgcaatggtaaattgttgccttgtggtttggaggtcatgggctcaaatcctggaaataacctctgcttgtaggggccttgataagggttttgtggatactggttattatctcaaatcaattacaatatatccaataaaatcctgtggaggtttcagtgcaagcagttggcctcttagcaacaatggcttgacacatgatcgcgagtggattctcaaaagcctaactggtgaaatacttacacagaaaaaggttcctgaaatgggctttataagcacctttatagacctcagtcaaggaatgttgtttgtagaatctccacgttgtgaagaaagattgcaaattcggcttgagtcagatgtttatggtgttatagaggagattgaactatatggacagaggtacgaagtatatagttatgac

SEQ ID NO: 13923 - DNA, 511 bp, Glycine max
  unsure (1)..(511): unsure at all n locations
cagaatgaaggtcatcatcatcaattcatcatactcactgtcccaaattcctcttaggtcccaacccagtaactatgattccatcggaaaccgttaattttgctcgaaatttcgcagctatggtcagagttcgtggccctttctggtggaacaactctttcagcttctgggatgctcgtacctgataccctttgtgatgctcaagtagctgggtgtctctatggtgataactgtgaggatagggtgttggttgtgacggttgcttcagttgttgagccttttctgtcacctcaacagagagacaatattcctcagggtaggccagacttgatttctggtgttcggattgatgttatgacagaggaagccaatgaaaaatccaatcagggaactccttgttggcttgcggcagagcttttgtcattagttgatattcctgcttcatccaattgtctccagtcacttattgaagcatctttgngtttgccagagcatgaatgggaggaaagat

SEQ ID NO: 13924 - DNA, 475 bp, Glycine max
cactcgagccgattcggctcgacaggtcccaaccaggaaaaatggttctgtcggatgccgttaattttgctcggaatttcgcagttatggtcagagttcgtggccctgacccaaaagggttgaagatgagaaatcacgcttttcatcaataccgttctggtgaaacaaccctttcagcttcgggggtacttgtacctgatactctttgtgattctcaagtagctacgcgtcttaatggtgataactgtgaggatagggtattggttgtaacggttgcttcagttgttgagccttttctgtcacctcaacagagagacaatattcctcagggtaggccagacttttgccggtgttcagattgatgttatgaccgaggaaaccaatgaaaaatccaatcggggaactccttggtggcttttggcacagcttttgtcattagttgatattcctgcttcatcgaattgtctccagtcac

SEQ ID NO: 13925 - DNA, 418 bp, Glycine max
  unsure (1)..(418): unsure at all n locations
tgtgatctccacgcgttcggcagcaccttttgtccctctcctccttgccaccacactttttaaaatgttgttgttggcagactcagtcacccagccttggcggtgggtaactttaataacacccaccacaaagaggtaattttgatgatttggaattggtcatggccaaagtcagaggtggacctctctcccccgcggcgcacgttagcccccctcccaagcggtgctcccctcctcatccacccacgtcacttattcagccgcactttaacatgatcaacaagtccaccaccacaccctaacctaaaaaccctttcttttctctctccacccatggcctccccttcttcccccaccgactccaaccctccctcgaagctcccccttccgagtgtgngcctccctccacctcctcccg

SEQ ID NO: 13926 - DNA, 489 bp, Glycine max
aaattctatatatagcttataagctctatgacttgtgcctgtgttagacttcaacattggaggtagaggcttacccagctttagatgaattgacctctcagcttagcacactcaatcttgaacgtgttagacagatcaagagtcgtttggttgaactctccggtcgtgtgcagaaggtatgtaatattcatcgcccaacacctgtcaccatgcacatatgattttacataagaattttggaaaataaatgaaatgaatacactctatgataatattctgtagtactcagcagtgttcaaattgatttgagcattagcaactaaccgtaccctttcattcttcttacatggatgccaacatgtagcaacactaaacaagtctttaagctgttcaatcgatcttaaagaacttaattgtaacattttgcctttcaccgtggctatgtgcaacttctggtcgttttggattgcattttgcaaacacacctgt

SEQ ID NO: 13927 - DNA, 438 bp, Glycine max
gaaaagaatgtagaaaatatatagttatcagttacaactttcagcttacagaaattgctggtacttgttggtgttgattttttagtgagatcagagtaaaactccaagtaattagcaaatagaaaagtacaacattataggagcaactaagattaaaccaagattaaaccagtagttgtaaaagtttacactaacagtgaatcaagattaaaccagtagttgtaaaagtttgatctatgattgtaagtatgtttattttaactaaggtttctctagcatgaaacttgaaatttagttctgatgcttccgtggtcattatcaagttttagatctaatatctgatggtgacaccccgagagctctccctcttcataaaaaaccttatattgtgcatgtataggaagatttattttatttttttcataaaaaaagaagagg

SEQ ID NO: 13928 - DNA, 466 bp, Glycine max
caactacatcgcttttgcttcccctgaactggcgtaaaccaaagccctctggctttgggccttcgctagggttcggggattcaccatttccaatgatcttcttctctcggttctacacttctcaacttcggagggaaattacaatgcagctgtttctgaggagtttcaagtgatttctgtggttctggttcggtttattgaggatcttgagggggcttttgcagaaggctgtgactctgtgacaatgccttctacagaaaatcagggcttttcgttgtccttttcctcgtttggccgttccatatttggtgtcgggcaggagcaggttcattctgtggaagcaagtaatgaatctgattcctgtaattatatacagctcgggtcattccaaaagcgtgttaccgatcgatttcaagacctttctgtagctagtgatgagcaatttctctcaattgattggattcag

SEQ ID NO: 13929 - DNA, 458 bp, Glycine max
aaccaaagccccctctggctttggtccttcgctagggttcggggattcaccatttcccatttcgtcgcttcttatttacccccagaaatcccatgatcctcttctctcgtttcgacacttctcaacttctgagggaaattcaatgcagctgtttctgaggggtctcatgtgatttctgtggttctggttcggtttatcgcggatcttgaggaggcttttgctgaggtctgtgactctgtgacaatgccttctacagaaaatcagggctcttcgtcgtcgttttcctcgtttggccgttccatatttggtgccaggcaggagcaggttcattctgtggaagcaagtaatgaatctgattcctgtaatttagagcttggattgttccagaagcatgttacagatcggtttcaagacctttctgcggctagtgatgaggaatttctctcaattggatggat

SEQ ID NO: 13930 - DNA, 374 bp, Glycine max
ctgaactggcgtaaaccaaagccctctggctttggtccttcgctagggttcggggattcaccatttccaatgatcttcttctctcggttctacacttctcaacttcgctgtttctgaggagtttcaagtgatttctgtggttctggttcggtttattgaggatcttgagggggcttttgcagaaggctgtgactctgtgacaatgccttctacagaaaatcagggcttttcgttgtccttttcctcgtttggccgttccatatttggtgtctgtcaggagcaggttcattctgtggaagcaagtaatgaatctgattcctgtaatttagagctcgggtcattccaaaagcgtgttaccgatctatttcaatacc

SEQ ID NO: 13931 - DNA, 734 bp, Glycine max
ggatttcatagaagatgcttacagggggagaaacaagtttgataggccacccccaccggactgggataatagagatcgtggaagagatggcttctctgatgaagggaaaggatttgaaaggaggccactgtcaccccctccacctcttttgccatcacttcctcaccatcgtggtggtcgatgggctcgagatgttagacagagaagccgctctccaataagaggtggcccaccaccaaaagaatatcgccgggatacgttcatgcatcgtgcaacagatgataggcatgataggcatggaatgggacgagatagaattggaggaatgtattagctgcggatgtttaatgtactttgcgaatgtattagcttcattagttgggatgaagaatttgagagattagttgctgaatcttcagaattggtcccaatgcattggaaaactttttgactttgtgcgcactcaaattgcgtggttatatgattttatcggtttgtttcactccgcttaatcgtcgcttcagatttgtcaatatgtttagtacgtggttttttactccaaatctttgagggggaatattactaggcttttattcttttgtccctctgactgcgagatgaaattaggacacccacctataggctatagcctagaatattaaacaacacagcaattattcttttcggctctgcatctacttggaagtaggaaatatggtttatttatgccctca

SEQ ID NO: 13932 - DNA, 550 bp, Glycine max
cagtctagttgatgtttcgagtccaaacagacgcgtggagagcaatcctcaactttgggggaatggtgctgggaaaggtcatgtcaggtctttagttagaaatttatggtcaactatagcgggacgtggtagtttgaagagtcatattgttcactgtcaggttcttcaagcctgagatccaaactcctctgatgataatcttggttatacagttagggaaattgttggtattttgggaaaatcaaattgaaacaggtttatccactttcctgtgtgggaaagagattgtgcttcattgtaaagaagaggttaattgtatgattttggctatagaatgaggtcattcctttacaattatgaatagggggcagatattgtaaatgttgtttcactctaaggctgtgccttttcctttctttacagtatattaggtttgtaagacatgcatttccggtgtatatgatttattagaaaacatcaaaaaaacttttgtatttttggtcaagttgatttatttagtaaccagcccgaagagcctatcagatcccat

SEQ ID NO: 13933 - DNA, 760 bp, Glycine max
acgcgtacgtaagctcggaattcggctcgaggtgttccatcattttgaaagaagcaaatttcgctgccgttatgattactattgggcttcagtattcaaggtggaatataaagatcacttttctggtcagacacaagttgcatttgctgaggctcccaatgaggcccttcctctttattgcaggcctaattttggtgctgcatggttgacacaatataaatttaaggtcaacgagacttatgattgttggtacacatctggcatttccaaagttcgtttacatcaagatagtctttttggctgtgatgcccacgagcagtctactcttgagaagagtagacaatattctaccatggcaatggagatggtaatttcctgggtttcgagtagaggaaggaccaagcattggaggtgggaaactttagctggagttgtaactgggttcttaacttcattgatctccataacctttattaggttccttcaactacttctgccttcgctatatcaatctttcacaacatggatattttcttggcgctgtcaatgctgttctcatcaggcgcgcttgttttcttttggcatacttatcttttgtggcctggttagctatagaatatgggaagaggcttggtctcatggatatattcagacttcctaaatcatagcactggtttttgtgaagagcaatgcacttttccgtgaatccccatgtgatattataactgtagcaggtgatattcttgtcccgtgataaatg

SEQ ID NO: 13934 - DNA, 604 bp, Glycine max
cccacgcgtccgccattttggaacaagtatgtcaattatacaaatgattttggtaggaacggtcacatcttggattcatagtctgccatgagatgcactatggttagaaagaaaaagtgcatgaattcgaaagggacgagtaaatacatgtttcatctaaaattttgcggcttgagaaggaaatataaaattggttgagagggcaaagtgatcagtacatagtgggtggaaaatttgctgccaccccctaacatttttgcacacacaattgccatcctggcatggccttaagaatcaaacagtcttgtgacatacaaacacgtcctatatttttggttggtgaaaggatatactattattggtcttatgtggggctactatatcaaaaattccttagtgaatgttggagaataaactgaatgctgaagataaaaaagggtcatggtcatgcacctgtgtcatcaaactagttcgttgttgagaacacaagtgctactaagatagtttaatttgtgaggttcccccactagtgcagtgttttccccccatccttttttagtttgttaatttttgttagcatcaatttttacgttcaccctattgg

SEQ ID NO: 13935 - DNA, 410 bp, Glycine max
cggacgcgtgggttcgcaattcaatctctttctcttcctcttcctctctctctctgtctggccttgtcgtacctttccttcatcctcagggcgttttgtctcattttgttattcaagaatcaattaaaaaaaatgactcatatcctttgatatggaacattttcattttctgtattcttctttttcattctttcttttttaatggattgtactggaagttatatagtttaacactttgccttcattccaaacgagggatatgtcaataatttattttgccgcgttttttctcttttatttttttattctttttgggtgtgtttgtttgggttttggttctttgtgatgtggaatccgttgtttggacttaactgaagccaacgcggtaaccagagggaaacgagatcgtg

SEQ ID NO: 13936 - DNA, 508 bp, Glycine max
gttgatgtgcatactgcatacctatgctcattagtccattggcgattgaaaaaaaaatgggaaaagatgttggatgtgcaatacagctatataaaacaggtaaacagatttcatatggatatttcatggtgaaaaaaatggagcattctataaaccaggcaaataagggttgatttgaaagattatttggtaacatcctcaatctcattaaaatacttatttctgcatataaattgttgctcttggtcaaattctatcttcttttttgggaggatgctgttcttctcacctgtcaagcaggttattttgtgtgaattatttaatttaaatattgctgcttatttcataatttcatattcatccttctgggatgtgtgtatttagtagagttgttccagattttggctcgccttgtttcattgtttttctttagtgaaatgagctgatactcaaaagaagctatccgccttttgagataaagcacctactcttcataaaacagatatga

SEQ ID NO: 13937 - DNA, 550 bp, Glycine max
gtgcttatcaaataagcacttatgtatatgttataagccttattgaatgaaggaggaaagagggctaacttgttttcttataagttgtaagttattattaaaagctatattgaataacctattgaaataagctttcaagtttttttaaaaaaagttcatgaacatgtcaagctatttttataagctctgtcaaatatttatgcaagtgctcaggtcataaaaataactttaaacaagctctttcaagtactctaaagttactgctttcaccacttgcaacttgtgaaagctgttaatgtctttttctgtagaattacatgcttattagttgtttaccttaatgtagagcattaagaagtctgaatgtcccaaagagcttgaaccagcagataggaggactgctgtccatgtcaacctcacaaggcgggatgaagactaccctgtattcccttttttattttctagtctgctttggtttttttttttctttatctatcacccctatctaaggttttttaccttttctttttccttttgctaatatgtatgc

SEQ ID NO: 13938 - DNA, 726 bp, Glycine max
actgtcattttctggaggaatggattctctgtcaatgatggtcctctacggaggttggatgatccgcagaacgcaccgtttctggagagcattaagaagtctgaatgtcccaaagagcttgaaccagcagataggaggactgctgtccatgtcaacctcacaaggcgggatgaagactaccctgaaccagtgaagccacgccaacgtgcttttcagggcgttggaagaactttaggtagcaccagctccagcaatgatgaacctattcaaacaactggtgcttcaccaagtactgctccattgccaacaatgggtttaattgtagatgaggcacagtcagtgacatcaatccagctgaggttggctgatggcgcgcgcatggtttctcgcttcaatcaccatcatacaatccgagatgttcgagcattcattgatgcatcaagacccgggggtgtaagaagttaccaactgcagtcaatgggttttcctcccaaacaactcgctcatttggaccagactatagaacaagctggtatcgccaactcagttgtcatccaaaagttgtaggttgtttaccagattctattttcagtcgacttgaaattactatttttatgcttaaacattgattgatctacttatattttattagtgaatttgataaaatgttcgttgttaggatattccaaatcccgaatttgcttttataaaagaattgttgcgccc

SEQ ID NO: 13939 - DNA, 911 bp, Glycine max
ctagttctagatcgcgggcggccgctcgcgatctagattcaaatagtggaagccaatttacctattttttgactgctcctttgtcagcattttgccaaatgattggtctcacccccaatgaggctgatacagatgtctacaatgaagcagagaacattatcgctaatgctttcacggagtgggaaataattctttgctcatcaactaccatggatttagtatgggcgcaggttataagtgatccatttctaaggcggcttattctaagatttattttctgccgatccgtgatatcttttttctgcacacctgaggaaagtgaacagtaccttccactttgtttaccctatctaccctcttctgttgcaccaacgtctgaagccgtgcgttctgctgttgtgcaacttgccatgcactttgacgttgctgactcctttcactttactgaaacataagattttgggaccttaaaaagtaacaagtaaaaatgttaggcttacatgcaggctttggaagctaaggattctcagatcaaaggaatacaaaacattatgagttgacctttcgggcgacaggacaagagtatttattgtggggcctgggctgtctggtggaaaaagaaattgttgggaatggttgcctctgcctgttgtgttgcttaattccactccacatgcttcattgatctatatgctgcatttggtggtttgctctgtaatgttaaggttaggtcatgatgggtgcctggtgacttttcatgtgtttggtcgtggcaagataattttgtatttgtaacgtggcaagataattttgtatttgtaacgtgacaagatagttgttagtttaaaattagttgtatttgttcccccttcacagctttgaaaagaaaaaaaaaacagtaagtcattgtt

SEQ ID NO: 13940 - DNA, 293 bp, Glycine max
tggggcatgggctgtctggtggaaaaagagattgtttgcctctgcttgttgtgttgctttattcgaccccacctgcttcattgatctatatgctgtatttggtggtttgctctgtaatgttaaggttaggtcatgatgggtgcatggtgacttttcatgtgtttggtcgtggcaagataattttgtttttgtaacgtggcaagatagttgttagtttaaatatttgttcatacttcatagctttgaaaagggaaaaaaaaaaggaattcattgtcaattttacctttttttag

SEQ ID NO: 13941 - DNA, 406 bp, Glycine max
gttttccgtccacgctttgacaaatcgccattccctatatattccttctcatcctcttcctcaaactgtctaggccttccctcttcacacccacaaaactcataactcaccaacacacaatcaaagaggaaaaaaaaagcagcttcaaaatttcaatgcaatttgctgagaaaatgcaacccttgaaaatggggttccgtgagtacatcgaagctttggaggaagaaaggaaaaaaatccaagttttccctaaagagcttcctttgtcattagagcttgtcacacaagcaattgaggcgtgtagacagcaattgtgtggaacggttgcggagtacaatttgaatgcccaatcggagtgttcggagcagtcatcaacggatggacctgtttttgaggagttcattat

SEQ ID NO: 13942 - DNA, 460 bp, Glycine max
gtcaatttctttgactcagagagtgatgttacacaacatgagaagcccctaacaagcccagagaattcgtagggaagccttacctctgtcaatttttggtgatgagacaccagatactgatgaacatcctgtgtctcaagatttatctccctatacaccctcatccccaataaggaacagcttcactagccctggttccaacttttctatcaatgacatatggaatttatataatcaagctgaaaaccaaagttcttctaatgtgacaccaaaagcaagtgaaaatcagattcatgccccccctgaagtatcgggctccagtttggttaccggtaatgatgatttagatgatgacttctgggactataaggatgccgcaactgaaacaagatttaccaatgaatctgcacagaaaacttcttcaccacaagtcaatgagaatggggtgcagtctttccca

SEQ ID NO: 13943 - DNA, 426 bp, Glycine max
cccacgcgtccgaaggcggtgagcacgggggttatgagggcactggtggagctgatggtggacttggggttgagtatggaggacctggggttgagtatggtgtacttggtgagcgtggtggtggcggtggcggaggcgaaagggatttatgatttccaactacaagcccttgttgccgaagttcgggatcttagggacagagagcactctgccaccgagcaacaccaccttctagtccaggttttcgactcccttcaattaggtcaagtttcttcgtcgcggtaccgtagtgcttttttgtattttcttgttggtttagtttgccacgtttgagagtagaagctgaagcggaacgatgaagagtgcggcaaaaggatacaagaattgcaggacgagttggcttctgcaaaagaggacaccagaaac

SEQ ID NO: 13944 - DNA, 444 bp, Glycine max
ggtgactctacttctgaggatgaagatttggatatatcccctgttgagattgatgaggcattggtgattgaagatgatgatatttctgatgatgaagatgatgaccatgatgatgtactgagggatgattctcttcctgtctgttcacctgacaaagtacacgatgtgaaattgggcgacttagcggaggagagtaatgttgctcctgcaactagtgatggtggccaggctaatgctgcctcaggttctagtagcaaagctggtacagtcaggggatcagactctcactgattttaggagtggctatacctcaagctcaagacgtgcaatgtcatttgctgctgctgctatagctggacttggatctgccaatagcagaagtttcatgggtgagagagatcgactagggcgttcattgtttggtagttctaatgatccttcaaa

SEQ ID NO: 13945 - DNA, 383 bp, Glycine max
taaattagagggttagcaagagaaattcacaaacctagtccacattctcatactatggaacacggtggaagcttagttgcagaagagggatccaaaatagaagatacaacctcagagaaagttgagaaggtgaaagaagaagaagatattggcaaagaagagagtggtggtggccttatcaacaacttggtttccactttgatcacacccttgagtccaggcattgggaaagccactgaaaatgaaagtggtgctgatgctgatgaagatgaaggagagaatgaaggagggatcatcagcaaaatggtttctaatttcttccatcaaagtgaaggtgaaggtgtggtggaagctgaagaggacaaagaacaagaggaggaaat

SEQ ID NO: 13946 - DNA, 414 bp, Glycine max
gagactctgataaattcctgcaacgcctcagacagaggcggagaattcgccgccctagaaaaatcttcccaatcaaataaggcggcaagaaacgctttttcctttttctctttctctcactactttctctctctacaacctccgatgtcccctcccttctccattgcctccttccccgtcctctctctccggttgtggtagttggaaaaggaagggtttttttggcggcaatggagggggaaccgagccagctgaagcgtgccgcgattgatgcctctgctggagctatctccggtggcatttccaggacagtcacgtcacctctcgatgttattaagattaggttccaggtttcagttttactctctccatcgcacttcactttctaattcagcttcactcgtactcgcattt

SEQ ID NO: 13947 - DNA, 491 bp, Glycine max
  unsure (1)..(491): unsure at all n locations
gatattttaggattttgagatgtgatgatatttgagtgttaaaaaatagttgttttaaaatttgattgtatgagattaatttgaagtgagattggcacatggtgagaatagagagaggggaaaggaatccatcgaggtgaagatggtgtggaacagcatggtggtgttgagagtggcacgtgcctcagcggaagcgtggcaatgcattgcggagcctctgaacagtgagcagatattggatctggtttgctgtttccctctccatcaactcgctctctttctctattccttcttctgcactcctcaatccaatttttaccatttcccttctcactccgactctgaccatgacgattcttccgattaccaatcctcttcagactgaaaccaaaccaaactcaatagaataagatgacaccgaggactttagtagtgttcaagctatctncattgtttaaaagcatcttttacacttagatttttgtagttga

SEQ ID NO: 13948 - DNA, 618 bp, Glycine max
gtctaatgagaatgattcgggtgacgccacggtgagcgatgaccaggttcatgctactactgagagttccgaaggagtttctcaggaaatggtttggggagaaatgtctgcatggttcaatgctattcctgctgcttggggtcctggtagtcccatgtgggatgatttggatgccaccaataatcttctttgccaatcacacattcctttttccaatcccaatcaacaagaactcaatgatgctgagagacaagaacaaaacactggaccaggttacttgtggaaggatcaggattgaaatttgaagttaattttctatataccttgcttctttctcttcctggttgcatatccatgattatcatttatccatcatccactccttcattacattttaggacactttgatggttccttagttacttacttctcactcactggttgcagatattttcaccacacaacctgtgaaccttgcctactactactcctatattcatttcctttttaacttcttttctgaaaccttctgctgaactaaggctccgtgtatttcaaggcctcgcagcattttttttcttttacttgactattttacactatttttgcttttggttt

SEQ ID NO: 13949 - DNA, 570 bp, Glycine max
gccttctatgagggaagaacatgcataggttctggtgtgattttggagttcggggatgagcagagttttccagtatgtacaaaagctttagaaattgctaggatggaagataaatcgaagattgggaatccggtaaaaataaaagttaaaccagataacccgcaagtgtgtgattctgcagagttagcaagtaaaacatcataaaggaataagaaattcaagagttgctggcactaaacaaaacaggctgatgtgtcaggggaatgcaacttccatcttccctttcaattggccacaacaaagcattcgcaaatgtgggtatacacgtagattttctgatcttttgttctgtagcgtttttatatgcatgtttagggaaataagaagtattttatagagagaaggatagtctgtttaaggtgggtgagaaattagtagcttccattattctgtgtttccaattaaaatgtgtatataccttgtcatggtttgctttagactttactcagtttattcgctatgtcccctatgatgcaattattaaatgaagggtttcttattttggaaaaa

SEQ ID NO: 13950 - DNA, 536 bp, Glycine max
  unsure (1)..(536): unsure at all n locations
ccggaatgacccacgcgacccacgcatccgatggacataaccatcatttttaaattatacaaaacctctataatatttacagatggtatatgaggaaaatcttggaggcttcgctgtacgtggcggctaactaaacatttcagcaatagcaagcttgaatccgagattaatactggtgacttgcagttacggcgcatacaaagcggcatgtgcatcgtatatgtctggacggcaattcagctatgttgcgcaggcttactctcatttagaaaaagaacatgattaggacttgctcttgctcttggatagaccacaggggaaattcatttggaatttatcaaaaatttcccaagaaatctacacacataatatgatatggatctaaatcactaatcattatttgcttaaaatcttcatattaatttggacgactctcctcggttttaccttattcactctgttatttgtaggaattcatatgctcattgcttgtcaaattatcagctttatccagggaaggatttgccttttannat

SEQ ID NO: 13951 - DNA, 443 bp, Glycine max
agcgagggaaggacgaagttggcggcaagtttagaacttgcggcgccggcggcgggtggcaccggccaggagtgtcgtggttgtgtagcggagcttcgcgagatcagcaaaagcttctggagggagagaacaaagaatctctagtttgttaacaatggaagacgggaacaacagtggcggttccaccgcaaagaaattaaagcagcggcgaaagaggaaggattacttggtggacaaggatgggcaggtgggggagcgagagaagctggcaaaaagaatcttgttgtctctgacgagaccttcctatgttttgggattgggtcccaaacctcttacggtggagcaccgtgcgaggttgcgctacttgctccggaggctcgttaaccagcaccattgggttgcagccagtggtgttctcagtggctacttggagggaacacttg

SEQ ID NO: 13952 - DNA, 824 bp, Glycine max
  unsure (1)..(824): unsure at all n locations
attggaggtcaagttgacgaggctctaaatatgcttgagaagcaatgttgtaattcagcctctgtactcccaataagagtaagggctgctctcttggagcgttttgatcgaaacaactctctcctgcttcttagctgtttttgaggatatattgaagaaggatccaacatgtagtgacaccttagcaaaacttatcaagatgcaccaaaatggagactatagtcttgtatctctgctggaaatgattgctttacatttagatgctacagatgcagagtacaatacgtggaaggtgttctcttcatgtttcttgagactgtcttcctacgaagaagactgcatgtcttcatgccccattcaaaatgaagatggacataagcaacattttccccttaacaaaacccctaaaatatttacgggtggtatatcaggagagtcgtcgcggcttcgctgtagggggtggctcactagacatttcagcaatagcaagcttgaatcagagattgaagctggtgatttgcagttactcacatacaaagcggcatgtgcatcgtacatgtatggacgggaattcagctatgttgcgaaggcttattctcatttagaccgggaaaatgataaggagttgctattgttcttggatgagcacaggggaaattcatctggattttataaaaaaatccaaaagcaatttacgcacagagcataaaaatgacatttattactcagatagtaatcactcatctttatgtgcttacattcttgatattaatttggccgccttctatggtttcgactttnnnnnnnnnnnnnnnnnnnnnnnn

SEQ ID NO: 13953 - DNA, 273 bp, Glycine max
gcgagggaaggacgaagttggcggcaagtttagaacttgcggcgccggcggcaagtttagaacttgcggcgccggcggcgggtggcaccggccaggagtgtcgtggttgtgcagcggagttaccgagatcagcaaaagcttctggagccagagaacaaagaatctctagtttgtcctcaatggaagacgggaacaacagtggcggttccaccgcaaagaaaatgataaggagttgctattgttcttggatgagcacaggggaaattcatttgg

SEQ ID NO: 13954 - DNA, 838 bp, Glycine max
  unsure (1)..(838): unsure at all n locations
gtaattggaattgatgagatgaacactggaatatacagtgtgtctgagcattatcctaaacttagggctaagcaatggggagaggaacacgaccttcagctaaggatgatattcctaaagttctttgcaacagttttaagtggctatcgcaatttcctagaaaaaagtgctactcaggtcttcaactctcaagcttttttgaagaagcggtctcgatctactaaccaaccaccagagcccatgatagctcagttcctagactctcatggtttcttggattatttggaaagaagagtaggttctgatgaaaacaacaataatctgcttgataagctacaagatgcaattggaaggggtcaaaaccctatgtcaattcttnctttatcctcagtagaacctgagattttaacagtatcagattctgatattggaatatcaggatctggtgccaaatacacttatgatagatttcctgcaaatatcagaacagaagaacaagaagaaaagaggaaacagattcttgcagcagttagtaatgcttttgagtactcaggaaggcatactcctagtaaggatcctttagcagatagtcttagtccagacgagagagctgctgaaagggatcgcatggtgctagatattcaggttaagctgcagggtttatggctgcggcttcttaaactgggagcaacagatgatcctctctcatcctttgaatatggaacgatactcgctctgattgaatctgatgcagaggggattggcggtagtggatttgttgaatgtataagagagcatatacattcgggttgggactgtcatctcactgaagaacagt

SEQ ID NO: 13955 - DNA, 519 bp, Glycine max
caaaacaaggcacagcaacgcccaactgcgccgtgagtggggttccgaggacgggagagagagccaacgcgccggttttgacggcgttgggagtgggattccgtggcacaaactcttcttctcttgcgcgttcagttgcgcgaagcagcgtcaggctctgcaaatgtcaatggtggatttggagggcaaagaaggttacaggccttccacggagtacgtggaagacagcaacgaaacactcattaacttgactgactcaaccgagcttttgtttcttaagttgccttcttccaatgattttttatctgacatacatgggcagaaattgtttctcactcttcataatgatggtaaactagccagcttcaaggattcgtcaggtaaagtatatgattttgtaagctattctgctcaggagccagacgaaacagtttttgtttcctctacagaaccaaaaataggaaagatttcaaggcgagtttccactgtccattactctgatcctaaagaacttgaaaa

SEQ ID NO: 13956 - DNA, 385 bp, Glycine max
ctgttaagccctctccgtgtaggtttcgacccagcagaatcacatcgtggaatcgccccacaaaaacgtgggagccctgaatcgtgcgtgttttgcgattctgacttgtttttcatttttactttttgggcctttgaaagcttaaaaacctaaacgcccaagactcaaaacaaggcagaaccgctcaactgcgccgtgaaactcttcttctcattcacattcagttgcgcgaagaccatcaggtgtgttcagttgctctgttttatgcaactctgtttttttggttccgcctaggtaggtgttcatgtcttgtgttttggactttcggtactaagagtaggcactaagcattactgcagtattttaagttgttttgtctcctttt

SEQ ID NO: 13957 - DNA, 482 bp, Glycine max
cggctcgagatcgccccacaaaaacgtgggagccctgaatcgtgcgtgctttgcgattctgacttgtttttcatttctactttttgggcctttgaaagcttaaaaacctaaacgcccaagactcaaaacaaggcagaaccgctcaactgcgccgtgaaactcttcttctcattcacattcagttgcgcgaacaccatcaggctctgcaaatgccaatggtggatttggagggcacagaaggttacataccttccacagagtatgtggaagacagcaacgaaacactcattaacttgactgactcaactgagcttttgtttcttaagttgccttcttccaatgattttttatctgacatacatgggcagaaattgtttctcactcttcataatgatggtaaactagccagcttcgaggattcatcaggtaaagtatatgattttgtaagctattctgctcaggagccagacgaaacagttttt

SEQ ID NO: 13958 - DNA, 579 bp, Glycine max
cccacgcgtccgcccacgcgtccggaccactaatatcatttcagcttagtttactcattcataaacagaattccctcttgcaatttcaaatttcactactttgcttccttagaaagaggaactacaattgatagctagcctccaccaaaacatattttagctgaaacccaccaagaaaaccgagggaaggtaccaaaacacataccaattatggatttgatgtcatccatcttcaattgctttgttccatcttcatcaagtcaagtctctgactatgccaaaggatcatctcaattgaaatctccttcttcagagaaaccaaagagcaaaccaaaatcaaaaggagctccaatcgttgtttcctatttccctgtcaaccattatccgtcacgcttgtagttgatatatatattaatttgcatctgcatcgttacgtgatcagtgatatgtttgcatgtgcttcttggcggtggtggccttttacccttttcagggtgcttggtttacacagttgaaatttgcatgtattctatttgtaagaatgaagaaatatttcccactaagaaaaaaaaaaaaaaa

SEQ ID NO: 13959 - DNA, 732 bp, Glycine max
caaaatatgaatttggatttgatatttcagattgttacgttaaatgatttgtattttgaattagatcgtggtagcatcagagatggaaaaattggtatcaagtatatgattatgaaggaggtaacttattagtggaaaaccttgctcatagaacttgtttactttacagtaatatggatcaggtttgggaaaagtgacattgaaggtgttgtcatataaacttcctgcgctcttccacacatttttaattttcgtatccatgaggtggaaaagccctgtgtggtggaaaccttccctttggaatgtcaatctgattatatgacagttgcataatcacaatattattggattctattgtagattgcaatgctgaattttctctcacttcctgtaagtcacttattttcaaacttcactgtctatgttttcccaggatatagaattcgtgcaggttcttcatcgccagttcaccgaagagatgcagatcaccgttttggttctgattataataacatgccacgaagccgtggatatggtggtgggagagacccaggaagatatcgagacccttcaccctcgtatggtcgaggtagagtagggggcaggccaatgggtagagcttttgacgggcctggctttgcttctggacttgctagaggggaaggcaacaatcgaaataatgccaatgtgcgtcctagggagggagattggatttgtcctgatcccttgtgt

SEQ ID NO: 13960 - DNA, 525 bp, Glycine max
accgctgattccttccttctccgaattttgctgttgattaaaatcgtgcagggcaagaatatttcgttagccttattaaccaaagtagtattcatgaaccaaaagggtcatgagaagaaaattgaaaaaccagatgatgagtcagagagctatggtcggagttggaggctaacggttgaagcaaacaatgcgcgtccatggaggattgttccagacaactgctacaaccaccttcagaactacatgtctggtggacaataccagcttgaccttaacctcgtcgtccaacatatctggtcctatgcccatgagattcctcttgctgccgacggcatggatgcctgcattttggatgttgatgacacttgcatctccaacattgattattacaaaggaaggcgattcgggtgcgacccatttgactcagcgatattcaaggcatggattatgaaggggaagtgtaccgcaaatcctgccgtgctagaactgtttaacgccttgataaaagaaggaattaaagtgttc

SEQ ID NO: 13961 - DNA, 465 bp, Glycine max
aactcattcgtgcattggttcacctctacttttcctcttccaacacaaacactttccgtttcgtttttttttttcttcagattcaaaccaaaccagagcaaaccaaaaaaggaaaagaaaaatcccaaaatccacaacgttacttcctttccttattagcgagaggaaaaaaaattaatttaaaaggcttcttgttaatttccctggaaacttcattttattttcctcttttctcttcttcgcgctcgttcgttcgttcctctgattattattcatcgatcagaattgatgatggagtcctccttcgatccaacggtcaacggctcaccacacctatcccttttcaacggccacgattgaatcggcgagatccgtcggtcaacggtctcttctaaggcgcggttaggttaggaaagagaaagagaaagaaaatgaaggtggcaaaatcgcgtgtgtggcaaccac

SEQ ID NO: 13962 - DNA, 705 bp, Glycine max
tcgttcgttcgttcctctgattattattcatcgatcagaattgatgatggagtcctccttcgatccaacggtcaacggctcaccacacctatcccttttcaacggccacgattgaatcggcgagatccgtcggtcaacggtctcttctaaggcgcggttagagagagaaagagagaagagagagagagaaagggaagggagagagatgacgtcacgatcggggcaggggagcagcggcggagggagcagcaggacccgtgtggggaagtacgagctgggtcggacgctgggcgagggcaatttcgccaaggtgaaattcgcgaggcacgtggaaactagagagaacgtcgccatcaagattctcgacaagcagaaactactcaaacacaaaatgattgcgcagataaaacgagaaatatcaacaatgaaactgattagacacccaaatgtcatacgcatgtatgaggtaatggctagcaaaacaaagatatacattgtattggaatttgtgactggtggggagctgtttgataaaattgcacgcagtgggaggttgaaagaagatgaagcaagaaaatactttcaacagcttatatgtgctgtggattactgtcatagtagaggtgttttccatagagacttaaagcctgagaatttattgctggatgctaatggagtgcttaaagtatcagattttggattgag

SEQ ID NO: 13963 - DNA, 370 bp, Glycine max
cccacgcgtccggccgcagccacaaaggcaactggacagaccaagatacaatgatagagcaggggttgttcgacgcagagaaaacacaaaatgaaggagcaagcggataataagaggagggaggagagggatgttgaagatatggaagagtggattctgcactattattgtagtgtagcctttggatgcctactatttctggtggtacttgaatatgctagtagttaaactagtagtatatgaatatgttagtagttaaaccagtgttgatgttggctttattctttatcatcttttccatgggagagtgttgaacatatagcatataatatatctctatgcagtgttactgttttgtacactgcttctt

SEQ ID NO: 13964 - DNA, 1207 bp, Glycine max
cccacgcgtccgcccacgcgtccgccgctttcatcaagaagtgacaaatcttggcatgttcctgaggcaacttcaatgatgcattcttttgagcatccatcagatcagcaagtccatctgaatgacccttttttagaaaggactcaaagtgctaattccaatgccttaatccatgatcatttaaacagcatgcatatcactgaccaatacaacaatctaggaaatactgaaagaatgcctcttcggtctagatctggttcattacttgaagaacaatcactgttatctgctaataaggatactttacatcccaattacagaattccttttcagattggtaaatcatctatggaaaaagacttacttgagttagaagcaaataagggtcagagacatgactatatgggcacaatgagcaatttggttcctgggatgtcagacatgtcagagcaagtggaaagcatcatgaattccatggaactgcccacaattgcccatagtagacatagctcactgagcagtgcaggtggtgatggtggttcatttggtcgtgagatgggtttgaataattcacgtggagatgaggtttctggtgacaggatacctccttcaacaaaagggtttgataatgctttccataagcgcccccatgtaacgcgggttttatcctcacctgatgtccagtcagaccagccatccgtaccccatgtcaatcagaataatttaataaacctcacatctggtgaagggagaagagaaacgtctggaaattcgtcaatgagtagcatgacagaggcttctgggaaaaaggaggttcggtttagatcttcctccttcagtgaaggtgctgtgtcagagacatcatttatagatatgctcaaaaagcccgttcttcctgaggtggtggttgactcacatgccacccagtggaatcgggagcgagtcatccgatgcagcacaagcagggcgaagcgggaaaaagaaaggtaagaaaggaaaacagatagatccttctcttctcggtttcaaggtctccagtaaccggatcatgatgggtgagattcaacgccctgaagattaatggttagttgcatgtagattaggtgtaaaatttttgcattttcttttgggtgggtaaagggatgaatgatgtacagtccgctagagcatagcttataatatctcaatacatctgttttttacaaaa

SEQ ID NO: 13965 - DNA, 481 bp, Glycine max
atgatttttatcaaccgctgcgttttttgcatcgagtatccgagttaagcaaggttggccgccgtcaaagcgtttccgattctccaccaccgccgtagctgccgccgtcaaccgtcgccatcgatgtcgtcttcttccgccaacgatgccgaggctctccggcgcaaccgcatcctctccagcaagctctacttcgacgtgtctccgtccaaggttccgctaatctactccgcgtcttacgacatagagtttctcggcatagagaaactgcatccgtttgattcgtcgaagtggggacgcatttgtggattcctcgcttcgtttggtattcttgacaaaaaatgcgtcgttgagcctttggaaagcttccaaggatgatcttctagtggtacactctgaatcgtatttgaataccctgaagcagagttcaaaagttgctatgatagttgaggtccctcctgtggcattaattcccaattgt

SEQ ID NO: 13966 - DNA, 324 bp, Glycine max
cggctcgaggtggaacattccattttttcggtgccattcatgatttttatcaaccgctgcgttttttgcatcgagtatccgagttaagcaaggtgagttaagcttcgtcgattcacgaaattcccggaaatcgttactgagtcaactcggtatttcggtggctcgtccaatttgcatcaggttcgccgccgtcaaagcgtttccgattctccaccaccgccgtagctgccgccgtcaaccgtcgccatcgatgtcgtcttcttccgccaacgatgccgaggctctccggcgcaaccgcaccctcctccagcaagctctacttcg

SEQ ID NO: 13967 - DNA, 435 bp, Glycine max
cttatcttgccgtttctcattctgtcagaggtctgatcgatggcgctttgtagaactgggccgaacccaattccggggagttattcagctcaaaatttgtcgacaaaacttattgtacctgctcccctgcgttttaccagacaattctctaatttagtcaggagaaagcgcaagggagtgtgctgctcttcattaaggaatgctgcatctgcatcttctaaggagtcactggaagatgctccaactaccttgtcagtttgcttggaggaggaaacagatcatgttatacagttcaaaatgtcagactttaagattttagatactgttagtgttggccttggcgggaggccggatgaggtaatttttgaaagcatggtaaaagatagtgctctttgtgtaacacaagagttgtacttcgacagctttccagtgcac

SEQ ID NO: 13968 - DNA, 397 bp, Glycine max
cccacgcgtccgcaaatgcatacaattactacaatgttgtatctgcttctgcgtggtgctcactcaagttcttctctttcttcccttcttcctcgatctcaatcttcccaaccggattttgctctgtggggggaggggataccgtcggacaggtcggtgactccgggagctaaaccacttcttgtttgggatttgtagtagatttggcctaatatttgaattagaccgtgtagaattgcatctggcaataggttgttgagtagtacgcataacgcattgttttgtgttacaaatattcttaagcttttctggggaatttttttagtttgggggatacaatacaatttgtagctttggttagtgattctccaagatgtcaaaatttgagggtgttatt

SEQ ID NO: 13969 - DNA, 518 bp, Glycine max
gctttatctcattttacaaggctgtttcggcgtatcctaactgggcgttggagcctctcattgtggcgagagatgatgcttgccagagttagctgaagaacccgacttattttagtggagggaacccggttagtgcattcgattgggctgatattgatttcattaaaagaagggaaggtatttgaggaatctgtttgaggggatgggactgtttcaatttttgagcattagtatctattccgccatggcttcaaaatcctgaattctttaactgtatcagcaatatcaagacatatagcatctcttgccttgtatacgaggaaaatgctcttggccatgaggcatggcaatggatctagtgtctgcatcctctatggacaccataattcaatgaaactgtgtcatgaaatgggtccaataatttcattcaacttgaaacggcctgatggctcttggtatggataccgtgaagtggaaaagctggcatcactttcaggaattcagctaaggacaggatg

SEQ ID NO: 13970 - DNA, 510 bp, Glycine max
aattgagccattctatctccgaccaaagatcgaacctgtatattgtaaagtaccataggatgaacaaagacggaggttcaaaataagaactaaaaaaattgaatcacagtcacaattgatcacaataacgtactcaatgcaaaactaacaaggcataagacacaaaaaaatgtcaatgacaatactttactaaaggacggtgagctagtggggaaaaatgaggaagtacacctataggagtaaaataaaaaaaaaaggatgaaaaaaaaatgttcttgagatgtaacatctaaaaattcagatttttgtacacgttccattttgtaattgtactttgctaaatcctaggataattatttcttcttcattgataaaaacatgaaaaagtaatatgtaacattgcaagaaatgtttaaatgaaaataataaaaacttactatattggcttctttaattagtctagagcaaacaacacccgtggaattttcatcacgatcgaaccatgcaatt

SEQ ID NO: 13971 - DNA, 467 bp, Glycine max
  unsure (1)..(467): unsure at all n locations
agcggaggctacggtgctggtggcggcgataaaggaggaggaattggaggtgatgaaaaaggagacgatcatcatggagaaagaggaaaaggtgggaaagatagaggacacaaaggtggcgaaggaggatattgaattattattaaagaaggctatggcatatagaataaagggaaaggacgtgttggttggcatggaaccaaagtctagagttagacaactactacctagttctttcttcaacttaaatgtagctttagagatgatactcggtttcattgttcccttttcatgtaatactttacgttgatccatgaataaaaatttgacaatttacgtngaaaaaaaaaaaaaaaaaaaaaaaaaaaaaaaaaaaaaaaaaaaaaaaaaagaagggcggtctataaaaaagaaacaaaactggggcggccgttctagaggatccaagtttacttccgcgtgcatgc

SEQ ID NO: 13972 - DNA, 422 bp, Glycine max
ttggccaattgatgcaatagcttagttagaattactcatgatcttaattaatggctgagacgtctcagtctaagagattcaatttataacaataatgttatttcaatgagagaaaaaaaattatgcaataacagtataaaattttttatataatcgttcaattatataataagtttattaacttttaacataactatcttaaagtaattcaagtgatggagttggatgagtcggataagaaggaaaaatacatggccttaaccgtagaggagttcaatttaagattgaaattgaagaggaattttggaaagtagcttgaaaattggaatctcttttaagataaaagacaggaaccaagctatgagggagggtgatagtaatagaaagcactttcacttgactcttaaaaaaactagggacct

SEQ ID NO: 13973 - DNA, 663 bp, Glycine max
accgcccacgccgtccgattcaacatattatcgataattaaggcaagttcttgtagcctggttgggttacattacagcgtaggtagacatggcaaaatcaatagccagaagcagtgaagcgcattgatcctggtgcatcctcgcacaccctatcttatcattattcaattttgttgtctgaatgaaagggaagaaggggtgaatccgtaggggatgggggcctcgctgtcgaacctgggaagcaacggttcggccgccgctccgggcctcggcgacatcccggagaattgcgtcgctcgcgtctttctccacctcactcctccggagatttgcaacctcgcgcgcctcaaccgcgcctttcgcggcgccgcctccgcggattccgtgtggcagacgaagctgcctcgcaactaccaagatctgctcgatttaatgcctcccgagaggcaccggaatctctccaagaaggacatcttcgcgctgctctctcgcgcagtgccctttgatgacggcaacaagggagtgtggctggataggcttacccggagagtttgcatgtcaatttcggcgaaggcgatgtctattactggaattgatgaccgcagatactggacctggcttcctactgcagaatctgggtcaacactgtagcatatttgcagc

SEQ ID NO: 13974 - DNA, 229 bp, Glycine max
tgaaaacatatacgatgggaacttacgtgccccacataagacggttagcaccaaagctagagacaacttgggacaagagaggagacaaatccagatgagaaaactgccctcttgacaacctgaaaaggccactaaatttcacaaatacctgtcaaaaattcgaaatttagtattcctcaagctgaagcatttactaataaaaacatttaagcatgctcctcttaggagg

SEQ ID NO: 13975 - DNA, 416 bp, Glycine max
ctctttgtccctttctctctctatttcttttccctagatctatgctttgaaagtgagcagatggttctctgttccagatctaatatttctccaccgctctttgatggaaagcaatctgatctatgctttcgttctcactctctaaagttggtgggctttggcttcaaattgcacaacctaggtgaagggacacaggacttgtgaatcaatggtagttcttacttttactcgaggaactttgagaatcttttaaaagtggagtggttgtgcaaacactatgatgtctcgtagataatacatagaggcaacaccattatgggatgttatattccatacatgtttgcaatttaattgcatgcacttaagtggcccttctactctatatgcactccactcttgtaaagatttttgggatc

SEQ ID NO: 13976 - DNA, 989 bp, Glycine max
cccacgcgttcgcccacgcgttcgcccacgcgtccgcccacgcgtccgttaacctagagatgaagactccacaaaatgataccaaggagacggcagaaataaataccaatgatactgagaaacaggaagaggttccagcatctcacgccaaagagaaactagggattgaggatgacggcaaattcaatcaagaagaagcaaaagggattgaagaagcaacaaaagcacagttaccagaggaagaagtcaagacaacattgcccactgctgcctttgtccaaggcgatactgatcaaataccacagcagcaaacactgcaggatgatgattcagaagtgattgatattgcgaagaacatcgacactccagaaattgaaattggcggaaggtccactgttgttgaggaacctgaacaacccgaaaacatggacaacatcggcgtggtgaaagaagaacaagcagaccaccaatcggaagaatcgagcgtgtcgaatgtcagtacaaaacacacaacagcggaaggacacgacacatcagaaagcagcacttggaatactaatgatgttcaaaccattccttgttgaaaagaagaaaacacactcagatcagttacactgataccaatcaattttgttcaaggcatgtagcatcggagctgctgtctaatattggggacaatgatggtaactttgtcatcacggggaccaatgatgattgtagctaaattaatggcaccaattcaatatgtagcttgccataaaagaaacgtagaaacgtcacagaaaaaagaacaaaccaagctaatccaagtgaaaaaaagagtaccgaatattgtttttttaaaattgaaggtgatatcactatattccccttccccttcctggattgaatcccaactttgaacagtaacattgaaatcgttaaattgttagaggtttgtcatctttgatttgggaaaaaggaattattgctttgtgaaggaagaaact

SEQ ID NO: 13977 - DNA, 580 bp, Glycine max
caagtatgcaagcgaaattacagcagagaaagaaacagatgcaaatcaattgaccgatgtggagactccaaagacagcagccgaaggtgtgcatgtagatgaatccctccaaccaacacttggcgcagcatccatcggaaacgaaatagttgttgagagtagtcaagatgagagacagcaagaagaggaatttacagaaaagtttaatgaaaagttgaagactccacaaaatgataccgaggagactgcagaaacaaacaccaatgatactgagaaacaagggattgaggatgatggaaaattcgatcaagaaaaagcgaaagggattgaagaagcaacaaaagaacagtttcccagaggaagaagtcaagacagcattgccctctgctgcctttgtccaaggcgatactgatcaaataccacagcagctaacactgccggatgatgattcagaagtgattggtattgcgaagaacatcgacactccagaaattgaaattggcggaaggtccactgttgttgaggttaggccccagagaagtaaacaagtaaaacataacatataaattcacttgccaag

SEQ ID NO: 13978 - DNA, 420 bp, Glycine max
tgatgcattatattgattttatgatttgaaatatatataattaatgcgatccagggttcctacaagaatgacttgcttgggcttgagtttgatcctctgttacctggtgacccaaaattgagtgcagaatacgtcatcacacacatgttaggcattgaattaaaccattccaagtggtgggacttagcagctctatttgtgattctcatatgttacagacttctcttctttactgttctcaagttcaaggagagagcatccccattatttcagacactctatgccaagagaaccatccaacagcttgaaaaaagaccctctttcaggaagatgccatctttcccttcacagaggcatcaatccctccattcactttcttctcaagatggtcttgattctccactccactaaatcaatatc

SEQ ID NO: 13979 - DNA, 610 bp, Glycine max
gaaaaaatggcatttggcatatatgccgtgaattgcacggcaagcatcaattccactcttctccaataatcctttccttattcccttggtgactctcaccaacccactgtgtctgttctttctccctcgacccttctctttcaccatatggagacaactaccacttccgcacccaacactcgacgccgctctttccgctgctccttcgtcacacgctgctgtcgctgcttctgctgttgctactccttcccttaaactaaacaaatgcaccttcttttttttcaatcatcgctgctcaacacatgaaagcagaggaacaacagttacaaccttcgaagctttaccttttaggttctcggtcaaatccacgccatcaatggggagtgggaaaagcagagacatctcaaggttctctactgctgcaaagtttacgagtttattttaaaattagggtttttaactttggatttggggattttattgttttttagaattgttctattcaagcttggattacgattatcttgttaggatgttcagcttaaattgtggtcttgacgaattgtcttgtaaaattgttgattgaaaaaatggcatatatgtttgcccc

SEQ ID NO: 13980 - DNA, 541 bp, Glycine max
ggagtgtgaaacaatgctggaccaccttttccctgtgaatgatcctgctccagtttccactgagacaactccccaagctgaaggttttgatccttcaacttcaaccactaccaagagtgatggtttggtgattccgaaggaattagctgagatcgagtacatggagagcctttatatgaagagtactgtatcagcattgcatgttttgcaggaaattagaagtggaagctcaacagttagcatgttttcattgccaccgttgaagataagtggttcagaagaagaaacatggaagaaaatccctgttctggaacaagcagccaagtaacctgctgggttacgttgctgagtaatgtagagggatggctattttcccatctatttttcttctcttaaatcggacgcctctgttatgcacgccttagatactaacacagatgtaagatgctaaatgtaaagatggagttaattttatagaattataggttccatataataaaacctctggattttaaagaagttatgttttgacattttgctg

SEQ ID NO: 13981 - DNA, 682 bp, Glycine max
cttatcctccttcttcatgttcttaaagaattagaattgatggcagtcaacagttattcttcatcagctcaaatctcacttcagaaatatggttcatttatggaatatacaaacaaagagttgatgtccaaacgatgctgcgtcccacagaaaacggcaccggttggtccagtagtattgagaatcacatcatccatcatgaacaagatctatgaggaccaatctcagggcataatctgctatgaagatgaaagtggagaaataattcgtgaagggtacgatgaagggcctcgttatcaccgaatttctagtccaactcaacacccaagggatgttgaaatcatgaatcttcaacaacaacaaagttggcttcagattgttaaaggagaagaaatcaatcatttagctaaaggtgctcttcatctacaagaggatttaaactaccataaatggctttaactcattccaaaccaatcaggcttttgtcactctcaaaggctttaacagttacatgcagtgctaatatgtatcagaaaggaataatagcacaagaatatgcagtaattggtgaatcaaataggacatgtgctgtcttcagcacatttttcatgcaagttgtacaaattgacagtgcgtggtgatgcttttcttatatacttttcttttcaatctgcccatatag

SEQ ID NO: 13982 - DNA, 440 bp, Glycine max
gtgactgggtcttttctccaaacaccgcgccttcactgacgacggctctgtcgccgccggagccaccgcattcaccgtcatccaccgccttcgttcaaattcctctcacctctgccttccgttcactacccattgcacctgaaagcacgaggcttgctcgcaacacattcgtatacctcctccgtttacttaacgaagggtttgaaccttcggaatcataagccctctgcgggtgaattccttttttccgagtgtcgcgttgaggttacgtttgttcggtggcttttgcgaattctctgaactcatggccgcatggtcttctagaaagttactgagagacgttcttctcaaaagtgtagtctcgaatcagcttcctggcattagatgcttttcttctgcgccaaaaattgctcctaagatcggtcattattccaagaaag

SEQ ID NO: 13983 - DNA, 466 bp, Glycine max
gtgagaccgaggcctctcgttctctgaccttggattcaagtcagggagcatttcgtaaaatccctttccctggggctctgagaagttcagctatcatgacatctgagcacaaccgaacatcctctggcaggaacacatccaacataaagaatttggagacaactcttaggggtattgagagcctgcatttcaatgacgagagggtacattattagcagctaccactctcgatcacctttcttctttgtaaattctaaaaaggcttatactctttttgacgaactaaggagtggaatgttgtctatgcattgtgttgaagaaaagctgcaaacaagttgggaatatccctcataagtatacaataaaaatatatgtctaggcagcttcctaactaaactggccttgtaaaaggcttctgttcatacagtttgtgttatactgacaaatgttttgcttcacctttacg

SEQ ID NO: 13984 - DNA, 826 bp, Glycine max
gcaatattggtaaagatacaatttcagagaaaataaacagtgatgaagaccagcagaggcctaagaagaaacaagaagaggattgtccgtatattgatttggaggcaaatattgaaaatcaagaaacagttgctgcaagcaattttagtagggatcaaaattcagtaacaattgttgttgatgaagatcagcaaaggcccaagaggaaacagaaagatgatcattatattgacttggaggcaacacttgaagatcaagaaacaggtgctgtaaccaatatatgtgaggataaaacttcagaaaaaatggacgttgaggaagattggcgatggcttaagaggaaacagaaagctgatcactatattgacttggaggcaacttttcatgaagacccaagtgtagaagggatcaactgtgggctacctaatgataaagttcagcatgtagatctttctgacacaattatgcagggttctgctgtcagttgtcagaaaataccttggaatgagggaaatgccaagttagaagacagagaaagttctggcaagaagttaaagacaggtttcggtgggatttatggttctggaggtagagactcttttaatgacagttttacatctcttggaaataatcttggctcctgttcttcagttgaggacaaaggatgtgaggaagcttgtgatgagaaaatcatccgggaggacttgggaaccctggaaagaaccttctttccagttggcacacagaatattaccaactcgctatcagtgatggatagcatgtcaaccaaaggggttggtgagtatgatgaacgagttcaagatgg

SEQ ID NO: 13985 - DNA, 1145 bp, Glycine max
ggtaggggtttggagcctttggtccaggtgggcctggtccggctgccttttgttgaagggggcccctgcaaaggttttggttttgtgcagttggcacgcctggaaaatgcaagaaatgctcaaagcttgaatggtcaattaaagatgggtggtaggacaatcaaggtttcagctgttactgatcaatctggaatccaagaagttgggggaaatactggtgattttgatgatgatgaaggaggtggcttgtccttgaatgcatgttctcgagcaattctcatgcagaagttggatcgtagtggtactgcatcaagcatggttggttccatcggtaattctggtgtcaacaacacaggtcttaatctacctgcaacaggaaacatactcgcagctgcgcctgtgggtggattggcaggtggaggtctccaaattcccacggctacaattccttctattgatccaatcggtgttccaagtgaatgcttaatgttaaagaatatgtttgatcccatagatgagactgaaccagattttgatttggatattaaagaagatgttgaagccgaatgctctaagcttggaacgttaaaacacatatatgttgacaagaagagtgctggttttgtctacttacgatttgaagatacccaatctgcaataagtgcacagcaggccttgcacggaagatggtttgctgggaagatgatcactgcaagcttcatggtgcctcaatcatatgaggataaattcccagacagcagataaattcacggtttatgcgagatgaggaatctcgtggcagaaatagtcatccttagaattatataacggcttcttttgagatagatgtagctatgcacatttgtcttgggaagttaaaaggtgcttatttgtaaaagctgcagttactactttcataaaattttcgggggtgttggtttgatttaagcgtcctattatggtattactgttgtggtttggcagtgttattgattggaacaagggttttgtgatgcctagaaacatcgatgtaattcaaactttggctgatggcaatcacaaagttttgatgtatgatcaatgatgggaccatctttctttgtgagtcgattaataagcctgaaagggaatcagtagaggtggtt

SEQ ID NO: 13986 - DNA, 434 bp, Glycine max
  unsure (1)..(434): unsure at all n locations
gtttatctatccagatttttcgatttcttaacggtagcatgttctcacgccttcgtcaaccttctgcgttgtgccacactcattaatctataatcttgaggcttcgattcaccacagaccctgaattttgaattgctcttaaacttcaaacttcccactttgttgttgttgttttggtcgtttggatttggtgttttcaagatcatggggtggtacagaaggggaaagctcgctcttgatcattttcgtagattggcttcaagggttacccctcaaaatccaatttttcagcgtggtgcgaggatttgctcatctgggtatttggattcaggttctaaagtagctagctttaatgggttctcttctttttgttcaacttctcagagattaggcacacggngtgtttgtggagttaacaggaactttcacaattc

SEQ ID NO: 13987 - DNA, 454 bp, Glycine max
tcgcgcaagaggaagtgcaagtggaaagtattacttcgagagactaatgaaagaagtgagggaggggcaagaggagctacaaaagaagttcctggaagccatagagaaacgcgaggacgacagaatagcaagagaagaagcatggagagtacaagagatgaaaagaatcaatagggaaagagaaatcttagcacacgaaagatccatagccgcagccaaagacgcagccgttatgtcattccttcaaaaaatagccgaacaacaaaacctcggtcaagtatcgaccaacatcaacctcgtacaacaaccacaacctcaattacaaccgcagccaccactacaacaacaagtgacacaacctagtattgcagcagcacaacctcccgtacaacagccaccgcccgtggttgttacacagcccgtcctgctgccagtggtgtcacaagtgacgaat

SEQ ID NO: 13988 - DNA, 1060 bp, Glycine max
tttcgtccggtttaaaagtagtaatcctatctttaccccatcaaacaattgtcttctcaaaagaaaaatccagattctctgcattccacataacttgttagttcctttgcttccaagaccagtttcggattattgttcactcatctcattctcttgttaaattctcaacacatcttctctctctaaagtctaaaccatgcctgtagtgacagaacacatgaaatggagaagaccaagaaaccaattcaggcaccccatttcagaaactgatgatccaaacactcaaatcccttccataatccaatcctctcacagcaaatccaccttctcctctctcttgtcttctttctccacctccggtgaaaccacacatgccagagaccaaaacagaaccaacaacaacaacaaaagcaacagaaaattctctgcagcaaccttcagaggcttcggctgcactgccggtgcatcgcagaaggtgtcggtgccggtgcctgcggtgattcgctcctcggcggatagggaagggaagagtagcagaaaaaagaagcacagaaggaacagtaacagtggcaacagcacaagtgatgatgatgatgatgatgtttggtgtggccctggaattgggttctcaactgatgctgctgctgcatctgtggaatgtgttgtggctaggaagaatgtgtctgcaagaggaaaacttgatgtggtggaggacagggtaacacacagggagcgttcatcttattttggaaggcgcactgtaaagccagaaagcttctcctttctggaagatgaacctgacatttttgcagcacgccctggattagagccttttggaactgctagattctatcgccatgttccacatccttcccctgatggtcttgctgagataatgatacttcaaggaagaataatgatggggggacgatttgattcacacgaccaatttagagactggagacttgatgttgataactgtcatacgagcaattgcttgaactgggtgagagaatcggttatgccaacactgggctcaaagaagatgagatgggactca

SEQ ID NO: 13989 - DNA, 515 bp, Glycine max
atttcaggtcaattatgggaacttcatgcatgggctgatgagggagtatatccaactttaactgaaagtttctgtctgagtatatcacctatgaaggtcttcatgagcatcatcttcatcaagtggtcggggtctttgatcacagaggaaaagaacagaatgtccttctggcatcaccaacagggtagatggcaagcaagaaatagccgagttgcaggaaacaaggatatatactagggaacatttggcaagtttttagcttctaccttgctatcttgctgttcatagccaagcgggataaatataataatgcagaagaatgtgcccttggtgtggactgcaaactgagactacaacacatactgttccgatgtgtgatgaggtttgaagactatggttcgcatcacaatcaatgtaccatttcgtgttcatgctgacatatctattgctgattggattaaattgtgtctagatacagttgatgatggagctttagaatggattcttgttcttgc

SEQ ID NO: 13990 - DNA, 496 bp, Glycine max
ggaacaacaacatagttcatcctcttccttctttctccaccaaaccttaaaccttaaaccttaaactcgcatataacccaatcaaatttgcctttagattctcatttcccgtcaaactatctctctctctctctctctaggaatccaaaatattccaactaaacctttcttccttttcatggcagatcctacccgtctttcattcagttcaatctcatacctgtatgtgtatctctaatgcaatcagttgatgaatgagaagaggaatccaaaacgtcaaaaaccactgcctttcagcatgcctgtgacagactcaaatgatccgcagaattttgatgataacattcttttccctgttgaagagattgtacaatacccattgcctggatatgtgtcaccgacttcaataagttttagtcccgatgatagtttaatttcttatttatttagtcctgataactctttaaacagaaaggtttatgcatttgatctgaag

SEQ ID NO: 13991 - DNA, 381 bp, Glycine max
cttagtcatcctcttccttctttctccaccaaaccttaaaccttgaactctaaactcgcatataacccaatcaaatttgcctttagattctcatttcccatcaaactatatatatttctctctctctctctctctgtatccttggaatccaaaatattccaactaaacgtttcttcctttcatggcagatcctacccgtctttcattcagttcaatctcatacttgtcggtgtttctctaatgcaattagttgttgatgaatgagaagaggaacccaaagcgtcaaaaatcactgcctttcaacatgcctgtgacagactcaaataatccacagaattttgatgacaacattcttttccccggtggagagattgtacaata

SEQ ID NO: 13992 - DNA, 264 bp, Glycine max
ctccattgaaggtaatgagaaaaactgcacctctcctgatgcagttcacaaagtaaggcaaaagatttcagaacatatggacttgtggttatctgaatgcgtcgacacaggcagaagttttatatgattatttacataagatgtgaatgatgtacttttttttctaagttgttaatgatgtactataactccgcatgacttttggtatttctttccttcataagctaattatgacaccgcgaaatatatttagtgacttcgtat

SEQ ID NO: 13993 - DNA, 596 bp, Glycine max
gaatccggtcgaccacgcgtccaattatagtgattgtactttttgctttttaaaacaatattcccctttgtttcctttttctgacctgatttatttttgagatgggaggggtgaaaccgtgaaagaaaagatagtactctactatttagcaagaatggtaaaatgtgtgctgagctaaatataaatatattaagtgttccaatcaaaggctgttttagcatgatctgatatatttcttctgatggaattgttcctgactacaggaattagtgtggaattggtcatgcggattccttattctctttcaatagtttttttctattcttaataaattctttgtttatgagtagaagtagatcaattgaaatggaagaagatcaagatcagcagtcaaattgtacaaccgcgccaagcaagtagcggacattggagtctcattgttaatatcgtagactacatttccctcccccaacaatataggctgaaagatctaccattacttgttttctaattgtacacatgataggtttctgttgtgcacatcacattattgtattctggttcattctaattcaaaatgtttatctgtcagatta

SEQ ID NO: 13994 - DNA, 1074 bp, Glycine max
cccacgcgtccgcccacgcgtccgcccacgcgtccagtggctcactcaccccagtcacaccatggaggttgctacagcagcttctagcttcgcactcaacaagcccatgctggcattgccctcttcatctcgaactgtaaccccaatcagatgcatgaacacctccacctcccccgtcaggacctctctctctaccagcttcgtcgctccttacgccggaatctgcagcgcgtctagccctttctccggccacaagctccgtccctcctccctcaatccggcgtcgtttcttggctccaacgctaaacgaggcgtcgttaccatggttattccttttcaacgaggaagtgcatgggagcaacctccaccggacttagcttcttacttatacaaaaatcgaattgtttatttgggcatgtctcttgttccatctgttactgagttgatactagctgaatttctttaccttcaatatgaagatgatgataagcctatttacctatacataaactccactgggacaactaagggaggtgagaagttgggttatgacactgaggcctttgcaatttatgacgtgatgaggtatgtcaagcctcctatttttactctttgtgttggtaatgcttggggagaagcagcgttgcttttggctgctggtgcaaagggaaaccgttctgctttgccatcatcaacaataatgataagacagccaattgcaaggtttcaaggtcaagcaacagatgttaaccttgcaagaagagaagtcaataatgtgaagacagaattggttaaattgtatgcaaagcatatggaaaaaacacctgagcagattgaagctgatattcagcgtccaaagtattttagccctagcgaagtgtatgagtatggcatcatagataaggttatatacaatgataggggcagtgaagatcgtggagttgtttctgaccttaaaaaggcacggcttatttgacagttggaatttaaattgccattttcttggagttcaggtacatcttgagtcattattgtattaaacggttgttgcaacttcaaaattgatttaatgtt

SEQ ID NO: 13995 - DNA, 543 bp, Glycine max
gaagcttcagatctggaagatggctctgcaacaagtttctaacttttctggccatcatttccaacctgatgggtacgtacccttcctcacttactttattttaaattctttaattttgacttgtctaatcacactttaatgttcaattttaaagagatcaaattataatcatgtacaaccggtacactatttaaatttataatatgttctaatgtataaattaataagctgccaacaaaattttaattcatataaaatatttgaagtggtaatattactgacaattggacttaatgttatttatttgtgatagtttatttgaactttatgatatatttttttattaatataatttatcagttacactttaatcgatagatttattatcattttaagtttatttaaaaaataatattgtcttttgtacctagatataagactaaggaaagataataattattattgtttttaaaatattatttgttatttgatcttactaacgagccttttttaggacaaaattatattttctattactttttt

SEQ ID NO: 13996 - DNA, 506 bp, Glycine max
tcgtgaggggttggctgcttttgggcttttctcctctaaaatagcaaaacaaggcagaggggttgggttcttaagccgatactgcttacgttctttaacttccaagggcttttgtacgctaccccagtatgatcctgacaccaaaatgtgcaggatgcaactgatacccatatatggaacgcctcacttgtggatgaattcaccaagaaaaccatcgatgaaacatttagaatctcatcatctgatgatttacttagtacccaatgtggatctcaggctttggcggtcatcgtgaggcatcatgtcttggcccttacagacattattcaaggacgaaagtttcatgaggttgggaagcatttaaagagattatggtctggaacatttcgtgtaatggatgacataaaggaaactgttagaatttctggtgaaaaattatgccgtgctgtaacttccttgacaacaaggctctgtgatgtctctctaactgatatgtcagatgcgca

SEQ ID NO: 13997 - DNA, 539 bp, Glycine max
aaaaattccgtgtttaacaacaaagcacaagttcaccaaaatcgaacttgctcctcctattcctattcctactcttctcagagggatgtctgctacaggttctttctctctctttcattccgcttttctttccgtttttgctttttttaattgaaatatgagtgggcttctttccaaatgaaataaccgacagtaccatttttggtgtttcagtgattgaaaaacagtggctagttgattctcctttcatatatagtccatcacatgcttttgggttaatatttgtttcctttgatgcccctatagttttctcaacttatttaattactgtgtaaagtttatgtgaaattggaatcgtatctactggatcatggcctttacctgtgctttgtatggtttggttagacccataagttgaagggtaacgcactcagatgctatctaattcccattgatggccctgttttcatggatttgggttggttatattatatgttttagtgcccagggtattttgggttgagagtttgaaaaaaata

SEQ ID NO: 13998 - DNA, 588 bp, Glycine max
ctttctacttcaccattctctgtgtcacttcgttcttcaccggcttcgaacccctcagggttctatactctacttcgcagtccacgtatctgtgcctgcaggtgctgcagactctcgcttacgtcttctacttgctgctgcttctcatgtacctcgtgctcgtgttctccacggactgtgggctgggctccaagttcttgggcctggcccaggtcttcgtgggctttgccgttgggctgcattactacgtcacggtgttccacagggtggtgctgcagcaaccgcccaagacgaattggaagatccacgcgatttacgccacgtgttttctgctcatctgtgtgcttgctagagctgatagaaggaaaaagaattacgtggaggacggtggaggagaaggcaagaaaaattgattcagctacctttctatttatttattttattttcatttgattcaattcaataattaaagttataaaaaagtaaaattgcaagcttgttcaataaataaggctacatcatgacaacaacattttcatgcctcctgatttggatgaaaacatagttgttcttttcttaaaaaaaaaa

SEQ ID NO: 13999 - DNA, 568 bp, Glycine max
gtttcagtatttaaaaagtgagaaaagaaaggtatgtggccatatgttagtaattcgttggaagtaacgctagcttcagaagtcgatggtttgctttcttcgcaccgtgtccgcccgcctcttctcctcctcggtttgccactgaatgcagctgatatagtttacagaagttgtgaaggaccaacagagcacttaagagagtttaactgagagctgcagggatggctcatttggatgtttgtcatcaagtcaggttcattggtcagcttgaggaatatggaagtagactttcttccagtattcctacggtagaaggatcaaaagataaagaagaaatcgttgaagttaaacctatcttcatgccaaattttaagaaaagaaaacgccttagccttaatcgtcttagagagatcaaagcagatatgtgtgcaaggcaaagtagtggcacacctaaaacaaagtgtgaaagcatagacagatggtcagctaagaggtatgagttggctcagcaaagcatgtgggaagtcttaaagggcgaaggtgcaacttttgaaaatccaattacccg

SEQ ID NO: 14000 - DNA, 764 bp, Glycine max
tgcaaatattgtggttgttgactttggtgaacagattcttagtgttactattgacgttcctggccaagatgcctatcattatcaacctcgattgtttggaaagatcattcccaacaactgcagagttgaggtgttgtcaaccaaaattgaaatccgtcttgcaaaagctgaagctattaattggacatctctggaatatggcaagaatacacttcccccaataataaataggccgatagttcaatctgaaagggcttcatacccatcaccaaaaccaaggacaaaagattgggataagttggaagctcaagtgaaaaaagaggagaaagaagaaaagcttgatggtgatgctgctttgaataaattgttccgtgatatttaccaaaatgcagatgaggacatgaggagagcaatgagcaagtctttcttggagtcaaatggaacagtgctatcaactgattggaaagaagtgggatcaaagaaggtggaaggcagtcccccagaaggtatggagttgaaaaaatgggagtattgattcggtacttaaatattcatttgagctgatgcttgtgagagttcaagtttgtctcctcccaacctcctgccaaaaaagaaattctgtaatttcttgttattattttgtgttaagagaaattaattagctgggataatgacctaatttgcttttgctgtggaagtggattttattttatttgtatatgttgataatggtaaacatgatgaaaatccggtttttagttttt

SEQ ID NO: 14001 - DNA, 497 bp, Glycine max
gagaaagaagaaaagcttgatggtgatgctgctttgagtaaattgttccgtgatatttaccaaaatgcagatgaggacatgaggagagcaatgagcaagtctttcttggagtcaaatggaacagtgctatcaactgattggaaagaagtgggatcaaagaaggtggaaggcagtgctccagaaggtatggagttgaaaaaatgggagtattgattcggtacttaaatatgcatttaagcttatgcttgtgagagttcaagttcgtctcctcccaactcctgccaacaaataaatgcaaaaagaaaaagaaattctgtaaactcgttattattttgtgttggagaaagtaattagctgggagaatgacctaatttgcttttgctgtggaagtggattttattttgttggtgtatgttgataatgctaaacatgaggaaaatcgggtttttattttttgtgaatcacatattggaaatattaagtatgaagatcagctt

SEQ ID NO: 14002 - DNA, 406 bp, Glycine max
  unsure (1)..(406): unsure at all n locations
agcaaatgcagtgagcagaaaatgcagatggaggcactgcccccggctctccaacgcccgtttcagcctccactttctcttggattccctttcaaaccttcttttttaactccagccacacacgccccttcgcacttcaatacatattcacgttttcagcattcagttaagtttcgtcgctcttttgcaacggttacagcgaccaccgagaaggttgttattgacgacagcgacaccaccaacgacgaaccgggcttcgttaacattggctacatatcgagtgttcatggaattcagggcgagattcgcgtcaagccagccaccgattttcctcaactgcgcttttccactcctggaagaagatggttgaagagcaaggtntttggtagagaaagtgttcaagaag

SEQ ID NO: 14003 - DNA, 528 bp, Glycine max
ttatactcaaaattatcttattttttacgtttttttttcttcagctatttttttagctcagcaacactctatggctgggtcttcatattaatcaaagttattttttaatgtattttgttattataaatcataaaaattgaatttgattttcaatatgaaattcctttatcatttttgtgtgtcaaaatcccttaatctacactctttgtgctaatttcaatttgaaatcattttttttcacaaaaaatacatatgtctttttctatctttattttgcttattgaagtacctgaaatacgctagaaaatggttgaatagtgtgaaagataaaaacttagtctttcaaaaattattaaaagtttttttgaaacacgtatcaatgaatgaatgattttgtctaaagggtttgaaattactttgtgcttaaaaaatcaattcacaaaacttggatatgatagtgtagatgtgaattatagaaaagaatcaattatatagaagtagtaatgaaaatacaaaggttttttaatg

SEQ ID NO: 14004 - DNA, 1113 bp, Glycine max
aaatgcagtcacaaactttgacatgagtcgctcgaatgtaaagagcattgcaaatagcactcttccaattggaggtttatctggcaagaacaagaactccacagattctgcatctgagagcaagagccacgaggcaagccgatccgacgaacgagatccatcagcggcttcatccgtgacctttgccatcacagcaacagccttcgagctccaccttaagctttgccatacccattaagcaagacccttcagattactggtccatcctggggtaccataattctccccttgacaacactggcatcaggaacactactagtgttactgcaacttcttttccatcctccaacaatggcactactagtagtttgacacccttccacatggaattctcaaatgcccccacaagtaccggcagtgataacgatgccgcgtttttcagtggaggaggcatctttgttcagcaacaaagtggtcatggtaatggtcatggaagtggaagcagtggttcctcctcttcttctttaagctgttcaatcccattcgccacgcccatcttttctctaaatagcaatactagttatgagaacagtgctggttatggaaactggattggacctaccctgcacacattccaatcccatgcaaaaccaagtctctttcaaacgccaatatttggaatggaatgagctcatgcacgaggtgggatgagaatctgtgcatataatgatgaaaggggaagggcaatagtggtgatggtgttttagcatgcaaaagaagcaaggacgaactagtacctttagctgatgcagtatttgaatgagttggactgacagtcataatttcatgagaagcgtagctatacctagcagcagctgacactgtactaactcaaagttcctttgttatgttttggatgaattttcttttttttctttttcgccccctttttagctttttgtccctgttaatatactgacatcatttcaaatgagtataatgggaagaaaaaagaaaatccttttgtaatcccctttcatctcatttttgttagtattaaaaacttgctatatctatgcgaaaggcattcaatgcctatatatatattgctgt

SEQ ID NO: 14005 - DNA, 646 bp, Glycine max
  unsure (1)..(646): unsure at all n locations
gcttctggtccaaatactggtggtccttcaattgggcctcccccagtaattgcaagcaaggctcctgctcctgagcctgccaccaacgaagtctacttggtttgggatgatgaggcaatgtccatggaggaaagaagaatgtctttgccaaaatatcaggtgcatgatgaaagtagccagatgagctccattgatgcagccatagataagaggatacttgagagcaggctggctggtcgtatggcattttagatcaatctcatccacacattcttgtgaaatttcttcagtgatatgggctcaaaatggcattttaataaggctttgacagcgtgtggtcaagattcctttatttaaggtccagaaagtacctttgttattggtgcaattctttgccaaaatgggcaatgggccctacggtcatagtggaatcgaagaaagaatattgaaatggttctgatttcttcttaggaagttgcaatactttgtttatttctcaatttcattcccttttctccctttaatgtttgtagtcaacctttaggacatgatacttgaaagagtactatatattatttggtgtaatctagattattacatgttttgggtggnnnnnnnnnnnnnnnnnnnnnnnnnnnnnnnnnnn

SEQ ID NO: 14006 - DNA, 748 bp, Glycine max
  unsure (1)..(748): unsure at all n locations
gaatttcctgaggatgaggtaattgttgaggccaatatagactataatgcaagagaaggaaggagcacagcagaggtcagaggctctgcaaaggggaaggctgcctctacaaaatttacccggattagtactaatggaactcaaagtattgttttatgtgaaccaatcactggccgtactcatcagatacgcgttcatttacagtattcagggcacccaatagccaatgacatgctgtacatctcagaacaaactgttgatcgatctgttaaagggttgagtgctgatagatcagctcgcatttctggtgtttcactgacatcaaattttaatgaaaaagtgctcaatgagatgtgaagaaaattccaatggagactttggcatcgatcccatgtgtacaaattgtccaaatttggcacccaaaggatatgatagtgatgaagaaggtctgtggctacattgtattcgttactctggacctggatggacgtatgagtgtccatatcctgattgggcaaaacttggctagacaacttgatatatttttcatacgacatttcaaacaaatatacaacggcatgttatcttgagattaaaatttgagttttgatggttagtgaaagttatttaatcttttgctattattcagggacactggattgtaatgatcaatgataactattattgctattattatttggttcacttangggggaaagacgtagaataaacaacagatgtattctat

SEQ ID NO: 14007 - DNA, 506 bp, Glycine max
gtttcttaccgtctgtttgcaattccacgcttttcatttcccccaaattccgttccctcgggtaatcaatcacaatctcctcattttactccaatttgatgttattgcttttatctcatgaaaattggatgcacatgtttctttctctgcttcaattatttttcctattttgcattttattcgatttatacaagcaagataattgtgaattaatccaggaccatgcaattcatttcaattggaatagaatattatagtatacaatacacaaagaggggttgttgttgatttgttggttaaggccttaaaggggatagagataccactactagttctgtctgtagctttagtttccttgcaaattgcaactgtgacctgtttcttaatggatggcattgaggatgatgcaaggtatccccataacccatatggttatggttatcagaattctccatattcccccccagttgatactgaatatgcccatgatgataatgatgaaaatg

SEQ ID NO: 14008 - DNA, 523 bp, Glycine max
caaaaacaaacagcagttgcaacaacaaggcacatttcaacgtttatttatttttgttgaaagaagagaagcaacaaatcaatctcacacttagtgttgttacgatggaatcaccgttcaaaccagagattctgaaggggaaggttgctctaatcactggtggagcctccggaatcggattcgaaatttccacccaattcggtaaacatggagcctctgttgcgctcatgggtcgccgcaaacaagtccttcagtccgctgtctccgttctccaatccctcgtcattcccgctgttgggtttgagggggatgtacggaagcaagaggatgccgcaagggtggtggaatccacgttcaagcattttggaaggattgatatactcgtcaatgctgcagctgggaactttctcgtttctgcagaggatttgtcctcaaatggctttcgaacagttctggacattgattctgttggcacattcacaatgtgccatgaagcacttaaatttctcaagaaagggggaga

SEQ ID NO: 14009 - DNA, 332 bp, Glycine max
tgtatattcaagacatattaatattcaatcgagtgaaggagtacacaaacaacgattccaacaaagcaagttgttttttttttagagaagagaagcaataaatcaatcaatcaaatcattcttacattgttgttacgatggaatcaccgttcagaccagagattctgaagggaaaggttgctctaatcaccggtggagcctccggaatcggattcgaaatttccacccaattcggcaaacatggagcctcggtcgcgctcatgggccgccgcaagcaagttcttcagtccgctgtctccgttctccaatccctcgccattcccgcggttggg

SEQ ID NO: 14010 - DNA, 413 bp, Glycine max
cccacgcgtccggttgcgatcaaattcaacccgtgtcgaaattacaggactaccatgcacacagcctcttaataagcctataccacactgcctcttctataagatctcaacatatatagaaaaaattatgtttcactcaatcaaaacggttttaacctgtccacaagtttcattccctgcacggtctctctcttccaaccttggtcgggaaacttgcgcagttagattctgcactgacagtgctcgtaagatggacaagactcagaagcctagtactgaggaaaataaacaaggagatacgatgtctcattcatttggggaagggtacgctacgaggtctgatgaagaagggtttggtggagtttatggtggaaaccaatcgaagcctgagatggacccagcttatgacaaga

SEQ ID NO: 14011 - DNA, 425 bp, Glycine max
gaaggaagaaaaatcacagcaacgatgagaatcacgttggagccgagctcggagccaagcccaagcccaagcccaagccgttcccaaactccgaaagaagaagtcgaatgggtcccacttcccaagcaccctctcttcaccgcacacggcggagccaccaccgccgccgcttcccggaacctcctggcctgggacggagcctcgcgcctctacttctgggactcaaacaaacgctgcctccaccgcctctctctccgtctcggcgaccccgatccctcttccgttctcgccgcttccccctctaaggtgttgcaatcggacgcggtgctcgatttcgatgtccgcaaaatctccatcaacaggaaaggaacagcgatactccttttcggttccgagactctctctgttatgtacctctacggacg

SEQ ID NO: 14012 - DNA, 472 bp, Glycine max
aacaagttctggtcactaacatcatcagctgtgaactgaaattcatttccatctcccgctgagtccacttctatcggaattgctgtcataggatgatctctagagtgtggtggaggaagacgatctgcatctggtacttcatagcaagcctcacacaagtcaaaatcaggacaaacagtacaatgccatctccgcctttgtataggtactgtagagcaaccatcacaacaatattggacagatgaagtaatagtatcgtcctcaatcatgatttggttatttccagtacttgggtcagcagggccaggaactgacaccacactctcaacagcatcatctgtagccaacatggtttgctttggaaaagggacctgaagcaatcttgaagatatggccaaactggggaggaaatgtgtgaaaacgtgaatatcaaattcagagccaaaaaaaaaaagtaagctaaaatacctgc

SEQ ID NO: 14013 - DNA, 815 bp, Glycine max
ataccactctggagaattaatgtaccagagtttgtatttttctctgtaattctataattttttctcaagaatttgtgttaatttcgaagctttctgtgttctctgtaatggtgcagatttgagctcacatcactgcgattttctcggtggccaagctcaaactgatccaatttcatttctggggtttcatcttttcaccatttcagacaaaaaaattgtgtttttaaagattcctgtaagattgtaaaattttcctgcgcccaaatctgtctcttaaataaacttagcatttaccccctttaaaaaattcaattttttgtgtgatttttttggttgactgggtgtagaagtatctgaatcttcaatgggtagggtttaagtgaagttttgaggttttggagcatcttacttctttctttgatttgcataaaaatggagggaagagagaattttggtgttgtggtgggtgatgaggccccagagagcttccatgtggctcctagaattgagaacaacttggacttttcaagggccaccgtgccggcgccggcgccggcgacggaggggaagaagaagagagggaggccgaggaagtatgggccggatgggaagccggcgttgggggcggtgacagcgctttcgccgatgccgatttcttcgacgattccgttgaccggcgagttctctgcttggaagagtggtagagggaggcctgttgaatttatcaagaagtcatcgtttaagtttgaggttgaaagccctggaccagttgagggaatagcatactcagttggtgccaatttcacaccacatgt

SEQ ID NO: 14014 - DNA, 336 bp, Glycine max
ttccaaccttccctgttagatcgatgggtgatttaagagttaagaaaaagaaaggaagcaacaagaagaagcatgggtctgtgtctgtcaccgccatcaaatttcttcctaaggagttgcaagtggagatttttgccaaggtggccactcgctccgtatttgaccactgcatgattaaactatgttgcaaagaatttcttcgcgcagcggaggataattacgtgtaccgtcacgcctccatggcagaattttgcgttggtgccgctaccatggttcaaaggcaataataaagaattcccgtttctgaaacgttgcagggagagcggtaactcggag

SEQ ID NO: 14015 - DNA, 457 bp, Glycine max
cccacgcgtccgtggaattggaagaagcataagatgaagaatggtatactactagtagtgaatactcgttcaaaaataatgctggaaatggttgtaaggtgaggaggtggttgctcaaaaggggactctgtctgggaaggaagatcttagtggctggcttcttagcttctgctgccccggtggttgttccacctcttgtgagttgcttctgctgttggcattgttgtctctatgccttgtgctattttcttggctagccatgcttgcactcagagtttaatgagtaagttgctccctaggcctactcctcaggatactttgttgcgtgaagagatgtgttttcagccaggcaatgatgttatacacacatatgaagaggaacaagtccttgtatatgaaataaagagagacattgaaatggttggtgttcaatgtttgaagaatggggaaaatatga

SEQ ID NO: 14016 - DNA, 421 bp, Glycine max
ctcgttgtatctgtaaaataaaaaccccaactttcctgaaattttaactttctaatgcagaaccaaagctaacccacttggcgtagtagtaactgccgcttccatactcctttcctcgaatcttcctctcttcatatttgtcattggcttggtcctcttcttcttcttctttctctctttcatcttccaccgcaaccagtttcagtgttttcagtttccaagattagggagtttgtggtgcatgaaggaagcattcagtgagatttaagaggctggttttttctgcattgtgtttgaattgaagggtacaagtatgagtactacaccacaagagaagtttgttaggtttcaggattggaattcagagaaaggttctgagagtaattatcctgcaattaaaataacacactctgagagattt

SEQ ID NO: 14017 - DNA, 599 bp, Glycine max
gtttgattgcttcaggattaccatccaaactgcgattagaagagtcgacgcttaggtctaccatttggtaattggtgtcatcacctatggccgaaacagtgtcgtgaaaaagcaggctcatctagaaaaggtgtaaataaggaagaaatgaaaccaagacccattcttccaaaagttacaatggttggtctctctacagaagaagcaggccaaacgagcaaagctaatttaaagaagacaatggacgatttgacaagagagttggagaagacagaactagatattatgacagatggtggcagtaaagagtgcacagtagaagatagggatccactatttgtggcaaatgggggaaattactattctagtatgaggagaaaaccaggatctggtcgctagtttagagtaggatccaactaaaacctttttgtcacagaatttttcatttgcaggttgttgcggatatttattgatctccgaataaggttcagaatatcgggttatctattaacactcatgttatttagtgttggagctggaaataacctcatttgcggtgtataccgaaagtggatgaataaagctttagattattattt

SEQ ID NO: 14018 - DNA, 971 bp, Glycine max
tcactcacttgttccagtttgttccaaatgagaagcaggtcaaggcagccaataaactgctgaagacaatatcagagcatggtgacaagaaaaaggttgatggggtgcctgtgtttggtgcccagaacttagatattgcaatagcaactacagatggtattaaatggtacactccctacttctttgataaaaacatgcttgataatattcttgaagatgctgttgatcaacatttccataacttaatccaaactcgacacatgcagcggcggcgggatgtggttgatgacaacttagctgcagaagtgattgaggaaatgagcgataggttaggggagcctccagaggttcaggaattgctagacgaaatgggccaccctagtataccactaagtgttatttcaaaagctgcagagctccagtttcagtatactgtcgacaaagtatttctgggtaataggtggttgcggaaagcaacaggcattcaaccaatatttccatatatggttgactcatttgagagaagaagtgaagcttctcttctgagagctacagagtcaagcagctgccttgagaactctaaagtggaagatgataggcaaatttctgaatgcttagactcttctaattgcagtttggatggtaatactgaagcaatcaaacaacctagtccaagcttaagtctaccatttggtaattggtttcatcacctatggccgaaacagtgtcgtgaaaaagcaagctcatctagaaaaggtgtaaataaggaagaaatgaaaccaagacccattcttccaaaagttacaatggttggtctctctacagaagaagcaggccaaacgagcaaagctaatttaaagaagacaatggacgatttgacaagagagttggagaagacagaactagatattatgacagatggtggcagtaaagagtgcaaagtagaagatagggatccactatttgtggca

SEQ ID NO: 14019 - DNA, 433 bp, Glycine max
cctcgaatctcgtgcacgtgccgttgcagcaaaaaatgccagaaattcagttgggtatgcatactatcagatcacatggaactagagtggcaaggacacatatgcacgactggttgattcttttgcttcttgtgatcatcgatgctgtcttgaatttaatacagccatttcaccgttttgttggagaggggatgatgacagaccttagatacccattgaaagctaatacaattcccttttgggctgttccgataatagcaatattgttaccactggctgtttttctcgtttactatttcattcgtaaggatgtctatgacctccaccatgctatactgggccttctattttccgtactcattactgcggtgatgactgatgctatcaaggatgctgttggacggccaaggccagacttcttctggcggtgttt

SEQ ID NO: 14020 - DNA, 426 bp, Glycine max
cccacgcgtgcggcgagcctcgtgcagcagaaaaatgccagaagatcggttgaacggacgcacgatcagatcacatggagctaaagtggcaaggacacatatgcatgactggttgattcttttgcttcttgttatcattgatgggatcttgaatgtgatagaaccatttcaccgttttgttggagaggggatgatgtccgacttgagatacccgttgaaagataatactatacccttttgggctgttccaattgtagcaatattggtgccaatagcaatcattcttgttgactatctcatccgaaaggatgtgtatgacttccaccatgctatcttgggccttttattctctgtactcattactgcggtgataacggatgctatcaaagatggtgttggacggtcacgcccagatttcttctggcg

SEQ ID NO: 14021 - DNA, 645 bp, Glycine max
gcttcctctctctttctctttctttttctcaattgctgcgaaagaaaaaagaagcggaagcgcattaccaaagacgaaaacgaaagaaagaaacgatgatgcagctgcagcaacaccatcaagaggtggaagaagcagaagaagaggcttcgaattcttcttctcatcatcacaacaaggcatcgccttctcccagtttcagcagctactcatcggagacactcgccgagatcgccgccagggtaatcgaggagctccgccgcgaccctagttcactctccgtcgacgacgacgacgacgcacttttcccgccatgggaaaaccaaaacgacagcttcgtcccccaaaacgacaagccggcagaacaaaacgacgacgacgacgatgatttcgaattcgcgttcgtttcgcgagacttcacttctccagtctccgcggacgacatttttcacaacggccggatcaaggcgatgtacccaatcttcggcgttgtcgttccctcaaacgacgccgtttcgagcgttgttccgaataataataataataatattgcgaacagtactccgcggcgtcgtcttcctttaaggaagctaatgtcgaggagggagaaacggcgtcgtgctcgtcgtcaacggaagagagcgt

SEQ ID NO: 14022 - DNA, 667 bp, Glycine max
  unsure (1)..(667): unsure at all n locations
gggttcgggtcgtaacaatatgacaagctttcgggtcggattcaaacccgggaaatctgggtgcgacgcgtgatgctaaacaaagagcgattcagatttgagacataactcttcagatccggcataacaggaagcttagcttagctcaataattgaagttgataacttcaaaaaaataaaaataaaaacagaaattgaagtgagagagagatagagataaagttaaagagaatgagatatggcggaggtagaaagaggcgaatgctgttgcaaccgtttttggttttgtgtgcgacggtgacaggtttgggattgtttatgttggcgctgaggccgttggatcctccgatcacggttgattttccgaaaaaaatcgagctcggagattcgaacagctcgagtttgaacggcggcggagagaagccgtgcgcggcggtggaggagatggggacggatttcgtaactggtgttgtctggaaggagacgctgagtgtgaggagaattatcgaggaccacttcgatctgaacggtgcttcaagattcagggattagccctcagatcagatctgcagtcatggatgtgttcttggaaagactgattatgcttgctntggcaatgaaatgtacaaggtcttaactgctgcatcactgaatgtaatgctaaacc

SEQ ID NO: 14023 - DNA, 562 bp, Glycine max
agactctccatttttatggagtttgtctgatggagaagcatgtatgaagcgttctgaccgcctacaaagacaagctgtttacctcttattagcttgttctttcagtctgatctgtaaaagaggagaaaatgcaaaccactgtaataattcaactctgtgctccagttttaccactaacccagattcagagcatgattacttctgcagaaaaaagggatcactagaacttttcaagtggattctaggacatcttccaactgcaatctctatcaaacatgaaaagtacatgcagatgtgtatgaacttcatatcatctttccttcagctatatcttcgtgaggatgatctattgtttgaagtgcttttgctattggttagcatatcatcttctctccaggaacagtctgaaaagtaaggatgctgcgtatcatgatgtaatgaaagattttccttttgagctgtcagacatttttaattctgtgcacctttttcatcttgttctttcagagatacattatgatcaccaagtgcttcttgattacctcatttcaaaagatactgg

SEQ ID NO: 14024 - DNA, 612 bp, Glycine max
atgaaatagaaatgggtaggtggaggccgagcacgttggttttcactattctctctgcgccaataataataataatagcattgctctcctccggaggaaccaccacggtggaagacgtcgacaatgatcacacaatggctgtgacgggtctgcttcacacggattcccgatggatcctcaaccaagatgggcaaagggtgaagcttgcatgtgtgaattgggtatcccatttggaagctgcggtggccgaagggctcagcaaaaagcccgtggatgccatttcagagggaataaagtccatgggcttcaactgtgtcaggctcacttggcctatagttttggtcactaatgactctcttgcttctctcaccgttagaagctcctttcagaaccttgccctccttgaatccattgctggggtccaaaccaacaacccctccattatcgatcttcccctcatacaagcttttcaagcagtggtgaaaagtctcggtgacaacgatgtgatggtgatattggacaaccacataacccagccagggtggtgctgcagtaacttcgacggcaatggcttcttcggtgacaaattttttgacccaaaccagtggatat

SEQ ID NO: 14025 - DNA, 1114 bp, Glycine max
acgagtaaaagaaaatgtacagtcatttcttcctgacacacgcattcgtggaattgctgtaggcaatgaagttttgggtgggacagactattctttgtggggagttcttctgggcgctgttacaaatatttacaatgctaccaagaaacttcatctagatcaactggttcagatttctacggcaaactcatttgcggtttttgcagtttcttaccctccctcctctggtaaattctgataataatgttaatcagtatatgaagccactactggagttcttccaacagattggctctcctttctgtttgaatgcttaccctttcctagcctatgcgggtgatcctgaacatattgatataaattatgcactttttgaaccaacaaagggaatttatgatccaatgtatcatctgcattatgataacatgcttgatgctcagattgatgcagcctatgccgctttggaggatgctggatttgacaaaatggaagtcatagttactgagacgggctgggcctctaatggagatcaaactgaagctggagcaaatgcaactaatgcaaggacatataattataacctgcgtagaaggcttgcgaagaggaaaggaacccctcatagacctaaaaatgttgtgaaggcatacatttttgcattattcaacgagaacgagaagcctgggcattcatctgagaagaactatggactgttcaaggctgatggaagtatatcatatgacattggctttcacggacttaatgctggacattcatctctgttgtctcttaagaatatcaatactcaagggttgtcccagtcatacgtgatggtattctttttatcttctttgacaccgctgattttctggagttagtgatccttatgatatcagcctgctcggcaaaccagttcctggcaatgaaatgagtttgacttggctccacttcatgtctcactatagatcaaattataccattgattgtcatatttcataaagcaatatctagaaatgttgatgtttcagcaaatgtgtaattatttcacttgagaaaggattttccttcgaagagtattagaatttttcagtttttcctaataccttcccaattttgg

SEQ ID NO: 14026 - DNA, 424 bp, Glycine max
  unsure (1)..(424): unsure at all n locations
cttagtttaataaataagtttaaagaaattgacccattgacttgtggcacactggctggatggatagtgttatatgatcctcagctggtttaattggtttctagagcaaaactcaatctggtcctttggtcgctgaaaaattgcgcattggttttgaaaaaagtcacccaataatatttcaacattacaacggttgaacgattaagcgacttattctttcaattatttttcttttatttttagtacttaaattagtctttaaaaaagtaaatcatatatgaatttagtgcctgatggaatactattctaaattttcccttgttgaaaatattaactgaagcggatggaaaaagttagtgtcttcactgtcttgcgtttgtaattntgaacaattatttgttgattctttcttttaagattaaat

SEQ ID NO: 14027 - DNA, 452 bp, Glycine max
gggttctgaacttctctctctcagagagatcccctttttttgttctggcgtctgctcattcgatcttctcgatcaggttctccgacattctcgcgcccaagtctttaactttctttgaccctcttcgcgtgtctctccacgaaattcggcctcgcgctctcgcttcttcgttcgctctgttgttctcggaatttcaattcgggattagggtttatggggtgtctcgcgcgtttggcctcgtcgagtgtaattttcctttctggggttctacaagttacgattttaacatcattcgcggcttcaatttaatgcgggtatcgtgatttgttccccgcagcgcgaaccatgattatcaaacggaatttgaaatcccaaatgccgagtctgaaacgggtcaaactcggtgactcggtgggcgaggatgatgagtattcttatgctcgtaagaagag

SEQ ID NO: 14028 - DNA, 1174 bp, Glycine max
tcttcctcggaaaatggacagggtccggctccagatcgcaatgctggcatcccttcaactagtggggttgattctgatttaacttctgaagatgaagttgtccgtttgttgaactgctctgatcattatgcagcactgggattcacgcggtatcaaaatatagatgtttcaatactaaagcgggaatataggaaaaaggcaatgttggtacatcctgataaaaatatgggtaatgagaaggctgcagaagcctttaagaaacttcaaaatgcatatgagattctaatggattcgttgaagcgaaaagcttatgatgatgagctaaggagagaggagattttgagtgtatttcgtagatttcatgatgcttctcgtaagaatggtaggcatggattctttccttcaggatttgcacgatctgatgcagatggcaaggatccatttggtgattcaaggcgaatagcctgcaaaagatgtgctggctttcatgtctggatacacaccaagaaacaaaagtctcgggcaagatggtgccaggtttcttcttaatctttgttgttctcaatgaagcctaggtggcatgcttaactgacagttggctaagtatattaataattgcaaaatatttgccagtattctgtctctcccagcatgaagagagtatttttcatacatatcatggcactagtgttttatggtgggtttttttgttttaaaggattgccaagattttcatcaagctaaggatggtgatggatgggttgaacaatcttcccaaccatttctttttggcttattgcagaaggttgatgctccttcagcatatgtgtgtgctggtagcaggatatatgatgccaccgaatggtatatctgtcagggcatgagatgtccagcgagtactcataagccaagttttcacgtgaacacaaatttaatgtccaagcataattctggcaaaggaactagttcaggtcaaagaggtgggcatatgccaacacctaatattgaagaaaccatgactgaggaagaattatttgagtggttacagaatgcagtacatgcgggtgcatttgacaattttagtagcactgcaacagagagcccatctcccaaatctggaaatggaatgaaaagtcctggcagtagtagcgccggtgccagtgctggtgctggt

SEQ ID NO: 14029 - DNA, 597 bp, Glycine max
  unsure (1)..(597): unsure at all n locations
ggatacttatctatgggaagatgatgatgacaggtaattttaaattttcctgttttgtgatgcattcatctctaaacaacagctttcattttctctgttaggaatctggccaccaatgtaataagcaacatcaaagattttatgctaattatatataaacatataaatatacacaacatttgtagctttgaatgtaattagcatctatagctgtatttttagcttttacttaggtagctctgatcagatttctctactttctttaatacatgtgtgtgaaacctagaaaattaaaaaatgacaaattatatgcattgcacttgtattctgttaagggcaaaccagcaaaggaaagatttgtacctgtttttttctccttggataaaatttttcttctttcattttaaaattgccatcatcattcaatgatatagttagatattgatgaaaaatgatcaacgcctctttacaaatttcgtgcatattttgtatctaaaattcatgttaacgtatctaaactttatcatatcttgatttttaagaatttccatngntcttgtatctgggtggcaaacgaaaaatgtgtacctgtttttt

SEQ ID NO: 14030 - DNA, 600 bp, Glycine max
cttctctgctgaaagccacagatgtgaaatgaagcatgtgctgttggtcgcaaaataaacggactctcgaattttaagacctgctgggcatgctatcattcgagagtccgtttattttgtggatgccattgctactattggcaagggtatgagatgggtatgtcgcaaagaaaacaccgagtatggagttgacaaagagaagattctgatatgccagaaaaagctatggcactcatccaacaacggttcaagatgacaaactctggaacctgtgcagtggtgagagggggtggctacaattgtacgagcagaagcagaagcaaagggaaatggattcagagccaccatcaactaaacattgattcattctataatatagaagccaagaatcggtcgagttcaaatttatcaaatgaagaattggtaactcaataatctgattttgttaagttatgtagaaaattttcatatagatactattctttatatggcatcaattgtatcagctaccactctcctctatctattttttgttgttgttgttgttgtgtaatatctaagtgaattcatgtgaagaaatgaaagttttaattccgacag

SEQ ID NO: 14031 - DNA, 728 bp, Glycine max
tgtctctatggtttgtgcctctgtttttgttgtcttcactcatctaccatctgctacaagcacaaagcttttgccctgggtatttgctctacttgtagctctctttcctgttacttatcttttggagggccagctgagaattaaaaatattcttgaagatagtgagataggaaatttgggtgaggaggagaagaagcttacaacattgctggcaatagagggtgcccggacatcccttcttggtctatatgcagcaatcttcatgcttatagccttggagataaagtataaacttgcttcaattttgcgggagaaggttattgattcaggtggaattaggcaaaatcattccggtcaaagtgcatcggctagtttcctgccggggatgaggtttatgcagcatcgtcgggctactacagcaccctcctttacagttaagaggatggctgctgatggaacctggatgcctgctgttgtcaatgatgccacagtattgagctttgccatatgtctagtcctgaatgtttaccttactggtggctcaatcctctctatatctcacctggctcctattctactgctgcttaatcaagaatcggattttgtgactggttttggagacaaacatatatattatcctgttactgacgtcatctatgactacttcgatataactgccctctacataacatggctagatgtttggcaaggaaatagtggatggggtc

SEQ ID NO: 14032 - DNA, 415 bp, Glycine max
atttacaccaaggaggcctaccctgttagtgtaaatgattcagttctgaaggatgagaaaaaggggtaggcctccttggtgtccctccatggcggatcaactctgaacccattggccacttcatacaaacttaggtccaacagtttcggtggtggtggcgagagagtggactccgtataacttgaatcatcatgactgcctctatacatcccttctgccttggctccattgttgagctttcatgcatagacataacaaagtcaaatgctaaaggctcacccagcaagcgagacatatattgaaaaggctttgatggaggaagaagctgatccatcattaaaggagaaacacacggtaaattgaatgacggatgtagtctacgaatatgaatttcttgattaaccaattacatatc

SEQ ID NO: 14033 - DNA, 719 bp, Glycine max
cccacgcgtccgatgaaaatgaagatgtctcgtactcttggatacgcgagtatcattgggatgttcggggtgatgatgcagatgatcccgcaacattcttagttgcatttgatgagtcagaagcacgctacttgcctcttccaactaaacttgttttaagaaaaaagagggcaaaagagggaagatcaggtgatgaggttgagcaatgtccagtacctgcaagagtgactgtaaggcgaaggtctagtgttgctgcgattgagcggaaggattctggggtatatacaagttcaaagggaaattcctttaagagagttggcttagaaatggatgatggtctcgaagaccaacatagaggtgcaccacaccaggacaattatcagtctagtggagcagaagattacatgtctgattgattatttgatgcaaatgctgctgtcttgaagcaaattgatccaacgaaatggtggttggattggctgcaaatagctgaatttgttgcagcctttgtgcttcagtgcttcaatgaagaataaccaatgacaactcccatatttttgtatgcccattttaacttaatgcacatactttcagattgtagccagctgttaaatcaatatagattttctttccaataccattatattagaaaagattgaaaaataatgaattgtaagaagcatgtcagactaaatggaatcctgtcattgctctgaatg

SEQ ID NO: 14034 - DNA, 501 bp, Glycine max
agggctcaggaagaggggttgttaaagcagatacttattcaggttctacatctgttgcatcatctatgccaagtttatctacagcaaatgctgatgcacagacagttgctactccctttagaacagatgtatctgccctgggttcatatacaccatctgcgactgttggaagtggtcgaagaaggttttcggaaatgcctcattctgcttcaactcacaaggtacaacctcaaacaacttaccgggaccgtgcagctgagaggaggagtttgtatggctcatcatcttcagttggaaatgatttagctgaccttgaaattggggattcaagtaagactacttaatttatattgggtttcattgcttgagttaaagtacttttggaaaaccgctgaggtgaaagaaagtgtttgcttgacagtaattaattactaatttcaaaacacttgtctgtatctgatgaaaaagctctttgagtagaggaaagcttagtttttggta

SEQ ID NO: 14035 - DNA, 515 bp, Glycine max
gtagatgtaaatggaaatggaatgaaatttgtatgcctccctagaggcacagcctgtgctgcggtcgttcgttgcagtcggagaagacgccacatctcaatcatttcaacctcgccctcgccgggaatatatatataaaacatattctattcactttttttttcgctttcctttaattcttccaaatctgcgaattcagacacacaataatcgaattccctctttctccgcaattcatcctctcttccacgaaatcccttactaaccgactcaatctacttcaatggatcagttcgaatcgtttttcaggagagcagatttggacggagatggcagaatcagtggagccgaagctgtctctttctttcagggatccaatttgcccaaacaagtcctcgctcaggtgtgggcgtatgctgatcaggccaaaacgggattccttggccgcgcagagttttttaatgctctgaggttagtcactgtggctcagagtaagcgagatttaacgcctgata

SEQ ID NO: 14036 - DNA, 619 bp, Glycine max
tattagatgtaaatgtaaatggaatcggaatgaaatttgtattcctccgaagaggcacagcctgtgcagcagtcggagaagatgccacatctcaatcatttcagcatcgccctcgccggaaataaataaaaaccatattccattcactttttttttcgctttcccttaattcttccgaatctgcgaattcagacgcacaataatcgaattccctctttctccgcaattcatcctctcttccacgaatcaaaaacaaatccctaactaaccgattcgatccacttcaatggcgggacccaacatggatcagttcgaagcgtttttcaggagagcagatttggacggagatggcagaatcagtggagccgaagccgtctcattctttcagggatccaatttgcccaaacaagtcctcgctcaggtgtgggcgtatgctgatcaggccaaaacgggtttccttgggcgcgcggagttttttaatgctctaaggttagtcactgtggctcagagtaagcgagatttaacgcctgatattgtgaaggcagctttgtatggtcctgctgctgctaaaatccctgccccacagattaatcttgctgctgtgcctcaaccacgcccg

SEQ ID NO: 14037 - DNA, 431 bp, Glycine max
gttgaattctgaagttcttaataatttgtacgcatacttcagaacctgaatttgcttctcgcttctcttaccaggtttgtgagctggatttaatttttaattttcataaggtaattcattttttctcatactgtattctctccaattattagtaaatttgaatatgaaatccccacactaatagtgcacacagttcatctatagtctatgtggtaaatgagactaggatcccgtgcagtctactttgtgataaatcatattgtctgttttttaatataaatttcaaagtcctatataagtaagaatgctaatgatttaagggaagaaaaataatctaccatttactcttcagagttaatcttaatctgtggctaaaaatgagcttgatcttggcaggcatattttatattggatgaaaatttgttggctgg

SEQ ID NO: 14038 - DNA, 411 bp, Glycine max
gaggaggaggaggaggaggaggaggagaaggaggaacccaccaacccacctcgtaattcgttccgttttccttgatccttccttcctcctcgtaatttctcttcacttccctctctctaaaacctctgcaatttgtcaatgatcttgagtcctcgctttcccattcgtttttgaattattcctcttttccgtactctcctctttggtcttttaccttaacacgcgcacacacacacacacacgaaaaaaaaaaatacataacataattgtctgtagtagttttgtaccttgtgaattactattagatcacgcacttcgcaccaaaaaccacacctatttccttcaatttagcctcgattcttccgccctttgttcaaaggagaatattctatttatttatttatttatttt

SEQ ID NO: 14039 - DNA, 307 bp, Glycine max
atttaggcttagttcatggacaggatctagctgaccacatacgtgctgattctgaaattcttcatcaagacaatgtagattctccagattcagattatcaaatggcttctgaaaagtcacatctatcagataatgaatctgtggaggaatctgcactgcccaatgcagaatcaagatttgataatgcaaatatgtctacgccagtccaagatgcagatgaaatgtttgattctgcagcttctgatgcccaccatatttcttctaatggttcatctatgcctgcaccacgggattttcagctttcacc

SEQ ID NO: 14040 - DNA, 440 bp, Glycine max
gtttccgtctatctacctccctctctgccctcacttcttcccctgtcccccacgccacgctcgcgagtaagaggacttgctacttcaattcaagggttccacaaacaacaacaagccttttttttttttttcatgtttaaacaatgaaaagcaagcttagacgatattattcactctgactccgagctatacaccaccgagaccgagcagtgtttcactctcatttcacttttctcctccctattcccaaactcgcgcttaatcacgtcgagggcaaacaaacctcgaatttgaataaaaaaaatgaggtttgacgagaacgctatgaattggattggcgctaccgttggtgacctcgtgggcacagtgggtgcaatattatcactaaaagataccaaagtggcgattccgtttaccttcgctgcaaacaatagtagctt

SEQ ID NO: 14041 - DNA, 904 bp, Glycine max
cccacgcgtccgcatacatgggggagggacagagagtcacggcgctacactatatggaatcatcatgcatcaatatcatcactagagaatagagatataaagagagagaaagtgtgagagaaagagagaaagagagaaagtgtgagagaaagagagaaagtggagtcttttgactgagcctagcctgcaaaagccgtctaaggttgttgtctggttgatgataatgtttctttttaatgtctgaatacgcgttgaactttcaaacgtaccaccaccacactatttttttagttagccttctgatccattttcacccttaaccttaatcccaattcaaaggtccacttagtctttttccttttatttttttaaatgatggtttataaattgcattagtctccgagtgtttttattgcttgaatttcctctcctttatggagcaatgattcctttatgacagtttgcgatttttgtcggagggttatgaaatgtgggtttgattcaagtttgcttctttggaattgggtcgggttggaatcttccagtattggagttttggtatctgattttgaattgggtatgtgcgtatgaaggaaagttttcatctttgcttttgaatagagaaaaaaaaaaaacaaaaaacaaagaaggtactgtgtggtgggtgagtttttagtttttatgagttttggtggagttggtagaagatgtgtttgctggtgaacggtgatcctactttttgaaggataatattgttgtatagttgatgtgatatctttgtgctccaacatgggttgcatatgttctaagagttcagctatagaggacagcaaggaaagtgtcactaagaaatttcaatcgtatagcacacggccttcagagttgaatgttttacggttgaatt

SEQ ID NO: 14042 - DNA, 1543 bp, Glycine max
  unsure (1)..(1543): unsure at all n locations
gtgtatttgtagagagaaacaaagttctcttctactttctgtctccagcaggctcagaatctttttgcaactattctctgaatttccattcattctatgtagtttcctcttttgttttctcttctttttccttgaagcaaagtgaacttgtggtgtatctttccaattgaagtgaaagagtaaggatgtcaagtgggacaacatactggtgttacacatgcaggcagccaatctggcttgaagggagggaagccatttgcccctactgtgacggaggctttgtgcaagaacttaatgagctgcgaggagttgcgcgccaacacggcttctcatcgcggatggaagatgctcatcaaatgcctgacattatggatgctgtaagagctgttatggagcaaagaggttctgaaccgagaattcgggttagagatgctgttgataactttatgaggcagagaatggctggaagatacacaaactttgatgttagaaggaggtctggttctggttctggttctggttctatccttattcctgatgagacttggggtgtctttagttctggtccttatttgatatttcatggtcaagcaccaggattcaccaattctaatggtagctcaagaggtggtcctaggcgtgttgattttggtgactactttctgggtcctagactagaaggactaattgaacaacacatttcaaatgaccggcttggtccaccccctgcatcgcactcttcgattgatgcaatgccaactattaagatcacacatgaacacctacagtctgattcacactgtccagtttgtaaggaacgatttgaactgggatccgaggccaggaagatgccatgtaaccacgtttaccactcagattgtattgttccatggttagttctgcataactcgtgtcctgtgtgccgtgttgagctgccaccgaaagaacatactagttctcgtggtagacgaatttggggtaatggcagtggtagtggtagtagcaatgatatctctaggggaagagagaatagacagatgaacaatggaaggagaaatctgctatcttatttgtggccattccggacctctagttcaagtacttagagtgtgtttgttttatcagaatcacactttccaaagcatgttgaacgtgatttctatgagattgattttgaaggtgattcaaagccaaaccaaaggcaaccttaatcattgtgctgagaccggggaatctactgttttatatctctttggccagaacaatgacagaagttaaaaagtttcctttcttcttcgagacaagtgtaattagctgtcaaaaaatgcttgtaatttaaatgacatgaagaaagtttctgtagattgtgctttgagcttgatctcatagatcatagaagtatgcgaatatctttgtaaatacaatattcttaaaaccaacttttgttttattnnnnnnnnnnnnnnnnnnnnnnnnnnnnnnnnnnnnnnnnnnnnnnnnnnnnnnnnnnnnnnnnnnnnnnnnnnnnnnnnnnnnnnnnnnn

SEQ ID NO: 14043 - DNA, 571 bp, Glycine max
actccatcaaatcaatcgtgtctttgtagagagaaacaaagttctcttttactttctctctcctgcaggctcagaatccttttgtaactattctctgaatttccattcattctatgtagtttcctcttttgttttctcttctttttccttggtaagttcactctgatcaattctgaatatttctccctctccttgaattcttccttctcggaattgtttggttgctttttaataatatttattcagtgaattgtatgagggtgtgaactctatgatctttggaataatgggtgtttgtttaactgagactccatttgaaagttacgtgctttgatgacaaacatgaagcaaagtgaacttgtggtgtatctttccaattgaagtgaaagagtaaggatgtcaagtgggacaacatactggtgttacacatgcatgcagccaatctggcttgaagggagggaagccatttgcccctactgtgacagaggctttgtgcaagaacttaatgagctgcgatgagttgctcgccaacactgcttcttattgcggattgaagatgcttatcaaatgc

SEQ ID NO: 14044 - DNA, 459 bp, Glycine max
  unsure (1)..(459): unsure at all n locations
cttcacatgaaccccctcactctttcagctgacaataccaagaaaacttacaggtttggactgaactcagaagcagatgagcacaacgtcttacagaaagatctgggaagtgtgaggtatcaaggttatgactttacctcagatgccatgtggtctcaaatgtctcacattccatcaaatactgtttcggaatcaagaatcggttctactatgctgggcaactgcttccagcatcaaacaatgcgagatgctgagctgttgaatctggaaacggcgaggaccaaagaccttgtctttagtggccagctaagttctgcagggggtatgaaacaggaattatcagtctccccagtctctcttcagtgactgggactggaagaaggatttaagttcctctgcccttgagtataggcccaacaaggattntaactgcaacccagatgtcaatgttgattaaaa

SEQ ID NO: 14045 - DNA, 575 bp, Glycine max
ctcgagccgtcagacttcagctgaagaagacgggttttcgggttatctttactctctcagtactttcaatgagagtaaagaaaaccctaaaaccctagaaattcagaattcagctgaagaagaaggaggaaccaatggacttcgacgagtacgaatacctggagaagacagtggaggaagacatagattcctccaagaagaagaaggacgtcaccgacaagagcgagaggagttaccgaaagccccgcgacgtcgacgacgatctcgacgccgatgacagaaagagcaagaggtctagggtcgacgacgagaacggcggttccaagagagatcgcgacagagacagagagagagaccgtgaccgcgaacgttcctctggtcgtcacaggagcgagagggagagagacggagagaggaaagacagggataaggatagagagaggagggataaggataaggataaggataggagagaccgtgatagggacagggatagggatagggatagggaaaaggagcgcgagagaagagagaaggatagggagcgagagagggaaagagcggagagggagaga

SEQ ID NO: 14046 - DNA, 405 bp, Glycine max
ctcagattgatgcttttctgagaagtgaccagaatcgttgtgctagcaacctacttgctgcctacacagatggagatgttgaagaaatcaaacgtattgctcagtcaagtgttatttcacatcttgaccatgtgatcattaagcttgcgaggaaacttccaacaggcgatgtgagttcattgaaggctaacaaggctgaagatgaagaggagccactcgatgaaaatgacctcacttaacctggctctttttctatctgtgtctatttagtaggaatgttgatgaacccatttcaatttaatgagtgaattgaattgatcagttatagattggtttttgtataaaaaaaacagttcttttgtgatacatgtgcaatgcaggtaataagaggagcgctgttgttta

SEQ ID NO: 14047 - DNA, 684 bp, Glycine max
acgagcaaccatctttgaaagaaaaaaaaaactccaaacaaacaatatttctttttctttctttctaatattattatgccacaggtggatttggaaacgttggtttccgcctgcgccggcggttgctccgaccagaaaatcgcctacgagcctcacgtcgacgacggagaccaccatccggactctccgccggcgtcgttctggctctctggcgacgccgagtacgactggtgggaccgcaacgccgtctaccagcggaacgaatcgacgaaaggaaactcaattatttcctcaacgaaccttaactcaaactccaacaacaattctcagcgattctcgaagaacttgaagtccaaagccgcgattatcggcttgccgaagccgcagaaggcttccttcgccgacgccagcagccgccgcaaccaccggccgccgggaaacgccaggctgttcccgaagcggagcgcgtcggtcggcggaaaattggaaggctccgtcgtcgaaccgtcgtcgccgaaggtctcgtgcatagggacagtgagatccaagcgtgacagaaatcggagactacgaactcgccagagatcaatctcctcctccacggccactgccgccaccaccggttcaatctcctccgccgtcacgaggcataaatcgacgcggagccagaggaagataaccggt

SEQ ID NO: 14048 - DNA, 458 bp, Glycine max
  unsure (1)..(458): unsure at all n locations
gttaaaaatttagtcttgaagacagaggtaatgccagattgaaatttgaaacaggagacactggtttgtgtcatatacttagattagattagatatctttggattaaatggaagatgatacaacaatgcctcaagatgatcaaagaaattctgatggtactagaggcattgggggtcttaatagatcttctaagaagtcaaagcagacaaaagtgccacaaaggggacttggtgtggcacagcttgaaaagataagactagaagaacaacaaaagagagatgtaggtgcaattttaccatctcctagtactttatcatcaaccaaaccaccctatctgcctctcccagttaagaattttcatgactccaacctatccccttccacaccacttttaccttgtgagccatcatctgaatntaggtcccctttgtcactgcaacagcaacaacaacaacaa

SEQ ID NO: 14049 - DNA, 515 bp, Glycine max
atagagtacacccattaacaccgacctcaatcacattcctatgtaccaccttcccttgcctcaaccatatcgctgtccctcgaaggtattgataatagatagtcttcgcatacttccgctaattctcctctgacaccgcctccttccgtcgtcgtgttttgtcgcaccatgcgcggaggcctcagccgcgaagtctgccagtggtgtcacaccatggaggcgcggagtgcgcgatatgtccagaggaattgcaagatggcgaaagatgaagatgattccatactgcaagcacgtgttccacccgcttctcttacccaaaccaaactttcaaccttgtggttcgaatcgcgatttgtgctatcgtggagttattcactgaaggaacaaatttgtgttgttcttctttgactcaattcgattgcgctattttgctctaattgttgctatggcttttctttggattttttatttgagagggctttgcttcgcctgattcggatttatttgatttgcat

SEQ ID NO: 14050 - DNA, 495 bp, Glycine max
cccacgcgtccgccctaatttaaccctgctggatttatcgtacacttttttggtcaatttgcagcctgtttttgagtcttgttcacagctaaaggtattaaagttgcaggcatgcaaatatctcactgactcatcacttgagcctctttacaaaggtgctttaccagcacttcaggagttggacttgtcttatggaacactgtgtcagtcggccatagaggagcttctttcttgctgcacacaccttacacgtgtgagcttgaatggctgtgccaatatgcatgatttaaactggggatgcagtcgtgcgcatactgctgaattgcctggtgtaaatgtcctacccattgcaagttcccctgaaaatgtcctcgagttaagtgagcaacccatccggttactgcagaacctaaactgtgtgggatgtccaaacattcggaaggttttcattccatcaacggcacattgttcacgtttattggttttaaacctttc

SEQ ID NO: 14051 - DNA, 413 bp, Glycine max
tcgtcaccgtcgtatccaaggatatcatctgcatgatatgaccatgaacacgggagtatgaatgtggatccatctagtataaatgaagacctgattcaaatattgggggcttatggacaggtcaaagagatcagggaaactcctcacaagaggcatcacaagtttattgaattctatgatgttagagcggccgaagcagcacttaaatcattaaacaggagtgacatagctggtaaacgcataaagcttgaaccaagtaggcctggaggagctcgtagaaatttgatgctccaattaaatcaagagcttgaccaagatgaatctcggagtttccgataccaagtgggttctgctgtagctaactatgctgcaggtgactggttacagttgatcaggcctgttgagcataattc

SEQ ID NO: 14052 - DNA, 1183 bp, Glycine max
tatttatcttgaactctttcatttcaagtgtgtgagcattaacccctttggttttttgtgaggaataattaaaatctgtttcattttatcacaaagtgacattgattctctataccctatagtgcctcaacctcacaaaactaaaaggccaaagagaaattttgttcaattggggtgctagctataatgggtaacacatttggtgcgaagaaaaccacaaaggttatgaaaattgatggtgagacattcaaattgaagacaccagtgaaagttggggaagtgcttaaggatcaccctggtcttgttttgctagattctgaggcggttaaacactatggcgtgagagcaaagccattggaagcacacaaggatttgcagcctaagaggctgtattttcttgtggagcttccgaaggagacgacgccgcgaagggttcgttccggcatcaacatgagtgccaaggatcgcctagagagccttgtgctcactagaaggtctgcctctgatctttcaatcatgaaacaaagcagcaacaccgataataaggagaatagtaataatggtggtggtgtgaggttgaaaatgaggcttccaaaagcagaagtggagaaattgattcaaggttgcaaggatgaggctgaggctgctgagaggatcatgaacctttataaggccaatggaagcagagaaaatgagggtggaactaaggaaaatggtgaaaagatggtggtgttggaccaacaaagtgttaaggagagtacaaagaaaagggtgagttttatgccaatcaacgaaggaggaattgaagtagctgtggcttcatacccactttcattacattaaccatgaagccgaatattgaatcccctgtgttgctgttagcttggggaatatgaatatctcccaaaccaaaggagctttgcttacacatagttgaataagagttatgttatttgaacaatgcttagaatttcaactggttacaattttataggtgtctgtatattagttttcatagaacagaagaatatatatttagtaagaactagtagttgctcttttttagcagacacctgttgtgactaattgtaaatctatgtattgtatatgtagcattactcctagagtgatgatgtgtacatattttgaggatgacttgataccccctttctacttttctctt

SEQ ID NO: 14053 - DNA, 294 bp, Glycine max
ggaatgcccaagtaacgatggttttcatttttctagttatggtttccattttattgtttatagcaagatggctaacggggtgataatatagtttttctttttattattatttttataggagttaccaatattcagtttccaggtacgatttttttttcctgaatttacataattattattctttaagaaaatagctgttaaatcaaatgtatactgttttaaagaaaattagccaaagggtctaagttgtgatgctgaaaggttaaaagggcacatttattgtgtcttcttacc

SEQ ID NO: 14054 - DNA, 419 bp, Glycine max
gcttcgcctcaatgttatgggggaaaaagtgattaaaggaaggttctgttttctttgggtaaagggtagttgcggaatcgaaatgacggcggcggaggcagcgatgttaaagaggaagggggtttaactttttctagagaagtcagctacagcaatggaaaatttgattgcttaaagaacatttttttcctgttgagatggtttttggcacaaaagataatactgaaatagaaacgtttgtgtggatcgatgcttacctgttatctatctgcacgttgttgaaactttaaagttctgtttgtctcttcttagtattgctattctgaagagctgaacttgccttggtgtcttggtttagttattagtaactaggaaattggaacttactatctcagtagctcgtgatgctgacatgtttt

SEQ ID NO: 14055 - DNA, 1766 bp, Glycine max
acctgattgcgattatagtgatgctgaccttgttgtcgagggaattccggttagtgttcatcgatgtattctggcctctaggagtaagtttttccatgaattattcaagagggagaaggagtcatcagaaaaagaagggaaattgaagtataacatgaatgatttgttgccttatggcaaggttggatatgaagccttcctcatattccttggctatgtatatactggtaaactcaagccctctccaatggaggtgtctacttgtgttgacaatgtttgtgctcatgatgcgtgtagacctgccattaactttgctgttgagttaatgtatgcctcttccatttttcaaataccagagttggtatcacttttccagagacgtctacttaactttataggaaaggcccttgtggaagatgtcatcccaatcctcactgttgctttccattgtcaatcaaatcaacttgtcaatcaatgtattgatagggtggccagatcagaccttgaccagatttcaattgaccaagagcttccgcatgaactctcacaaaaagttaaattgctccgccgcaaacctcagcaagatgttgaaaatgatgcttctgtagtggatgctttgtctctaaaaagaatcactagaatacacaaggcgttggactcagatgatgttgagcttgttaaacttcttttgaatgaatcagacattactttagatgaagccaatgctctccattatgctgcagcctactgtgatcccaaggttgtttctgaggtacttggtttgggactcgctaatgtcaatcttcgaaattctagggggtacacagtgcttcacattgctgccatgcgtaaagagccttccattatagtatccctacttacgaaaggggcttgtgcatcagatttgacttttgatggtcagagtgctgttagtatttgtaggaggttgacaaggccaaaggattatcatgcaaaaacagagcaggggaaagaaacaaacaaagatcggatatgcatcgatgttcttgaaagagaaatgtggaggaatccattggctggggatgcctgtatgtcttcccataccatggctgatgatctccacatgaaactactataccttgagaacagagtggcatttgcaagacttttcttcccttcagaagccaaactagccatggacattgcacatgctgagacaacatctgagtttgctggtctttctgcatcaaactcaaaaggttcaaatggaaacttaagggaggttgatctcaatgaaactcctatagttcaaagtaaaagacttttttctagaatggaagcccttatgaaaacagtggagatggggcggcgctacttcccgcattgctcggaagtgttggataagttcatggaggatgacttgcctgacttgttttaccttgaaaagggtactcatgaagagcagagaatcaaaaggacacgtttcatggagcttaaagatgacgtccacaaggctttcaacatggacaaggccgagtttagccgctctgggatttcatcttcatcatcctcatcatccctaagagattctgttgtacattacaaggctaggaaagtgtaataataaaagcatacatagcgttttttattttgacatacatattatatatagtgcaaatttgaaaggtgaagcctaccaactcatctgtaaaattgtgaaagcaggaaagttgatgttatagtaccttttgtaatcaacttgctcacgttgaaaaccaaaaaggtta

SEQ ID NO: 14056 - DNA, 453 bp, Glycine max
gtgctggacaagttcatggaggatgacctgcctgacttgttttaccttgaaaagggtactcatgaagagcagagaatcaaaaggacgcgtttcatggagcttaaagatgacgtccacaaggctttcaacaaggacaaggccgagtttagccgctctgggatttcatcttcatcatcctcatcatccctcagagattctgttgtacattacaaggctaggaaagtgtaattttaaaaccatacatagtgtttttgattttgacatacatattatatatagtgcaaattttaaaggtgaagcccaccaactcatctgtaaaattctcgaagcaggaaagttgatgtaaacaacctgcgcatatatttttgaaaatgttttcatatgctttttggtggagaaatttacggtaatttttttttgaagataaatatataagatgtacctttaatctcc

SEQ ID NO: 14057 - DNA, 364 bp, Glycine max
ccgttgctaaagacaacaagaacaagaagacggcccctcttaccggccgcccttttttttttcatcttcatcatcctcatcatccctaagagattctgttgtacattacaaggctaggaaagtgtaataataaaagcatacatagcgttttttattttgacatacatattatatatagtgcaaatttgaaaggtgaagcctaccaactcatctgtaaaattgtgaaagcaggaaagttgatgttatagtaccttttgtaatcaacttgctcagtattttgaaaatattttcatatgtttggtggagaaatttacggcattttttttgaagataacagaacaatcaaaaaaaaaagggggggccg

SEQ ID NO: 14058 - DNA, 650 bp, Glycine max
catcattgatgttaattttgtttgagtatgtttgagttttctttgtgaacataaggagtgagaatttgccaaagaagaagaagaagaaacatggtggaaggttagagagtgagagagtgtgaagcatggaagtgggtatgcttccaatctcagcttcaaagagaggaaaactcttggctgctggttacaccactctcgatgccattgctcgtgcctcccccacccaccttgttcgaggttttcctttccagtttcaattctcaacccttctttcattttccaattgggtatgcatatatgttaaaaagttcctctttttttcacctacccattatctcactttgacagatattgatgtttctgagagtgaagccacggaaattctgaatcttgcaagcaaacctagtgctttggagagaccgaatgggtctcacactgctgttgttggtggtggtcagactgcctgggatatgctcaatgatgaaaagttttcttcttacattaccacatcttgtgcagatctggataacatccttggtggaggaattaagtgcaaagaagtcactgaaataggattcaacttgcggtaaatgttcagattccacaagaatatggtggcctaggtgggaaggcaatatacatcgacacag

SEQ ID NO: 14059 - DNA, 393 bp, Glycine max
gtgagaatttgccaaagaagaagaagaagaaacatggtggaaggttagagagtgagagagtgtgaagcatggaagtgggtatgcctccaatctcagcttcaaagagaggaaaactcttggctgctggttacaccactctcgatgccattgctcgtgcctcccccacccaccttgttcgagatattgatgtttctgagagtgaagccacggaaattctgaatcttgcaagcaaacctagtgctttggagagaccgaatgggtctcacactgctgttgttggtgatctggataacatccttggtggaggaattaagtgcaaagaagtcactgaaataagtggagttccaggcattggtaaaacacaaattgggattcaacttgcggtaaatgttc

SEQ ID NO: 14060 - DNA, 465 bp, Glycine max
cggaaaccgcgctcgacatcctcgaagacctcgcccctgtctctgacgcgcaacgccgcgcgtactgcgcgggcgccgtggagtgcaccgtcaagtacctcgctgcgtgccccgacgttatcgatggtgagtacgccggcgctgtacggcggatctggcgcggacgcgtggcggcgctgcaggcgcgccggagcgggctggtctctggggagttggtgcggtggcgcgatgagatagagaacgcgcttggggaggattccagggcggctcgcgagaggctggcggggttgaatagtcggagggacgcgatgaatgaggtgagggtgtatttgaaggaagcgtgggaaatgatggggccttcgtttttggaaacggttgcggcaacggagaagaagaacgatgaaggtgcctgtgataatggtagtggtaatggtaatgatgatgatcatgatgatggtgcatgca

SEQ ID NO: 14061 - DNA, 1154 bp, Glycine max
gtatctatttgtcattatacccattttaacttatgccaacatggagaactttatagaagctacagtcaaggttcagatactgctgctgtagaggtagcaacacctattctaattcctagaagtgatggtcataggcatcggaagggaagccatggtgatgttatcttcttgacaaatcgtggagagattacatcatactcccctggcttgcatggtcatgatgctatttggcagtggcaacaatcaactggtgttacatggtcaaacctaccctccccatcaggaatgatggaaggtggtctggtgattcccacactaaagcctctttccttacggttgcatgataatcaagaaatgatccttgctgccggggaacaagaagccgtgataatatcacctggaggtagtttattggccacaattgaactacctggtccaccaacacatgtcttgatcactgaggacttttcaaatgatgggctccctgaccttattcttgtcacctctcatggagtatatggctttgttcagaccaggcaaccgggtgctctcttcttcagcatgctggttggctgtctcatagtcgtgatgggggttatatttgtcacccagcacttgaattccacaaaggggaagcctcgtccctcatctggtccacggtgaaaagccgaaattgaaatcatactcgcctaactttgctggcactattgaagaaacggaaaacagtgagctctgcgcaaccagtggagagtcaaaagtattcaaaatgcgtagaatttaaggaaattatgaggaggtgctgaacagtcttagactgttgattgtaaaatttggacagaatgtaggaaatttgatgttataatattataaggaaatttatgctggccgcttcagggatttttgactgccgttatgaggaaagctatactgtacacacttgttacctgttcaaaattagttgatgcacaagagaaactcaccagccggtctttcctcccaaggattttcttgctttaaaggtggtatatatttcaccgtcccaaaactcctctccatgtttaggccaactgcccaagttccttatatataaatctgaatgagaataagatgttatatacagttcttgaaaaatgagtaaatgatggtttgttgag

SEQ ID NO: 14062 - DNA, 564 bp, Glycine max
tccgtgaacccacatcggagaattctcattctgctgtagagaaataatatgattgttctccttgtactgagagtttataacatcatcatatccaatggttgtactagtaggcgcagcaggtgggttcaatgggtaatttcctccgggaatgctcgtggaacttccaaaaccatatccagatgcaacagcagcagcagcagcagactgaggtaagctactgacagaaatgctatttttatattgtggaagcatggctgccagagattggtggtatgtgctatttccaggaaaagcctgctgaaatgctgatggcatgtaggtatagctctgaggcaagaatggatagctaatcatattagcaaaatgtcccagaggaagagtaggctgcgaatagggatgcacagcaaggtgttgaggaagtgcaggtccagtggcaacattcctctgacacggttatggtggaactaccaatgctactatattttgtacgcatcgattgttttccccggaatggtaagtatacaatatctcgtctagctgttataactgacaataacaacctat

SEQ ID NO: 14063 - DNA, 244 bp, Glycine max
ggacagttgtagaactttaatttggagaattctatgcagaacctggggaacatgtccctgtgtgtctgcaccatgggaaaacagtgttgtacattattatgtatggctgaactagatgctgatccatgttttgggtaactgtatcactttctgtacaatagtgtggatggttgcctaatagattatttacatagctatattaagtatgtatattttctttgaattattagatattttttccttt

SEQ ID NO: 14064 - DNA, 470 bp, Glycine max
ggagaatagaaaacccagaatctcgacaagacgattcttttcttttgtccccgaagagaaagagagatcttatctcctcttcctacaatgcccattccggtaactctctctttcaatctcacccctgccccttttcatcgattcctattcttattatttattattcttgcttaggtaccccaaaaagtttttattcgctcgattggaattagggttttctttctctctctggctattcccgtttcccgctatctactcagcttctttcttttacttgattttctagggtttccttggatcgtaccctctcgggggattgcatgaaatgagcatgagctctgatctcttcataccttccaattttgtgcttcagcatttctacttggagatttctcattcttaagtttcacatgagcatggaagaggattgtctatattaattcattctttactcagtcgcaggctggctc

SEQ ID NO: 14065 - DNA, 433 bp, Glycine max
acgaaatcgaagccaaaaaagaacaatcataatgagcatcggaacaacactttcaacggcaccaaaccactctttccactccaacacccgaaccagtttactcaacaccgtttccccaatccaattcctctccttccgcaatcacactcacaatctcagagtcctctgtttctcttcgaatccgtcgcagcagctgccgccggttgtggtggttggctccgcgaacgccgacatctacgtggagatcgaccgtctcccacgcgaaggcgagactctcgcggcgaagtccggccagaccctcgccggcggcaagggccgccaaccaagccacgtgctccgtcatgctctcctacccgacctacttcggcgggcaggtcggcgacgacgcctacggcacccttctctccgacgcgctccgtggcgggggtgttcg

SEQ ID NO: 14066 - DNA, 500 bp, Glycine max
agcaaagctctcaactttactttacgatttcgctacttccagttccatcagtggcactcttgtttcttcttttgaggaagttaagttcactggttcaagtattttgggatccacaaggtggggacgtaaaggattgggatttcgatggagactgacagacctgacggccggactcccaatcaactgagacccctggcctgctcctgctctatcctgcatcgcgcccatggctcggccagttgggctcaaggagaaaccaaagtgcttgctgccgtttatggacccaaggcggggaccaagaagaatgaaaaccccgaaaaagcatctattgaagttatttggaaacccaagactggacaaattggaaaattggagaacgagtatgagatgatattgaagagaactttggagagcatttgcattcgaacgatatatcccaacaccaccacttcggatatagtccacgttgtacacgatgatggtgctcttcttccatgtgc

SEQ ID NO: 14067 - DNA, 493 bp, Glycine max
tttcagaagccccgatagtttcaccccctttctccaacttccattaacattctcatcttctccgtgggcgctctctgtatcacctccgtcggcactgttcttcgagctaaagttgttcaaccacagcagtggcagattgacagtgcaaccctcctattgtttcttcttttgagtaagttaagttcactggttcaagtattttggcacccccaaggtgggacctaaaggattaggatttccatggagactgacagacctgacggccggactcctaatcaactgagacccctggcctactcgtgttccatcctgcatcgcgcccatggttcggccagttgggctcaaggagaaaccaaagtgcttgctgctgtttatggacccaaagccggaaccaagaagaatgaaaaccccgaaaaagcatccattgaagttatttggaaaccgaagactggacaaattggttggagcaatactatactgtactcaactcaac

SEQ ID NO: 14068 - DNA, 438 bp, Glycine max
gttgcactcgctcgcagcaaagctctcaactttactttacgatttcgcgtccgcccgcgcgtccggtcgcagattgacagtgcagccttcctcttgtttcttcttttgagcaagttaagttcactgtttcaagtatttggggatccacaaggtggggacgtaaaggattgggtttccgatggagactgacagacctgacggccggactcccaatcaactgagacccctggtctgctcctgctccatcctacatcgatcccatggctcggccagttgggctcaaggtgaaactaaagtgcttgctgcagtatatgggcccaaagctggaaccaagaagagcgaaaaccccgaaaaagcatccattgaagttttttggaaaccgaagactggacaaattggaaaagtggagaaggagtatgagatgatattgaagagaac

SEQ ID NO: 14069 - DNA, 438 bp, Glycine max
gctacactacttacattccccagcacagttgtatttatcaatcaaacaatagcgctcacggagaaatgaacaagataaaaagagaaggcactattgtaaaataaaatacattgagatgggaaaaaaattactgatcatgaatatcacacaaccttgacagtaaaatttctgtaaacatacatctaatagtgcaagttatgaataaaatttataaactaaactcaatttcagaaactaatgtgagaaaaataagcagattgccatctgagtcaacaagtctgtaagtactttcttcaagcgtcacctttaaatttggtttcatacatctgaggtagcatatagatagcagatatcattctgcctgcaaaccaccttgtgtgcattgcacgttgagcagcacttgctgcttccactgtttcaaactgcaaatacacaaaa

SEQ ID NO: 14070 - DNA, 830 bp, Glycine max
gtgcccacagacaataaccctttataataaataaaaaaatctcggtctgttttttttctcttctttttctctctctctctcacaaatttctttcccttgggttcactcaaaagagcagaaagggacaagatcccggaaaggcgtgccagcgtcagagagactcatcagttctcactcgtacggcgcttttgctttgctttgcttcatttctttcatcgtcatcataaagttcgttcctttctcagttttcacccatacccagatgagtaacagcaccatctcggatctgtgtccctcctttgagtgaaaaaggttcaatctttggtctctggggctgttggggttccgtcattgaagaagaagaagaagaagggtattattgttattataatcatgtacccgaggctcatacacccccacgatgggattgtgacgcaggatgagttgcagggtggtgctgcttccaacctctctcacgctcacaagggtgacccttgtctcgttttaacggctgatcccaagcctcgtcttcgttggactcaggacttgcatgaacggttcgttgatgcggtaacgcagcttgggggagcaagtaaagctacaccaaaagcaatcatgcggaccatgaatgtcaagggtttgactctgtttcatttgaagagtcatcttcagaaatacaggcttggtaagcaatctgggaaggatgtgggtgaaggatgcaaagatggtatgattgttattcccctctgtggatcaattacgttcccgtcgtcaacacagcttgctctgtccaatgtgttctgtagtgtctttcacttttcccgttccac

SEQ ID NO: 14071 - DNA, 1520 bp, Glycine max
ctcgagcgctatttttttccttttcttttctttctctctcaaatttctttcccttctgttcactcaaaagagcagaaagagacaagatcccggaaaggcgtgccggcgtcagagactcatcagttctcactcgtacggcgttgtgctttgctttctcaccttcttcttcatttctttcatcatcatcatcatcacaatataaagttcgctcctttctcagttttcacccatacccagatgggtaacagcaccatctcggatctgtgtccctcctttaagtgaaaaaggttcaatctttggtctctgaggctgttggggatgagttgcatggtggtgctgcttccaacctctctcacgctcacaagggtgacccttgtctcgttttaacggctgatcccaagcctcgtcttcgttggactcatgacttgcatgaacgcttcgttgatgcggtcacgcaacttggtggagctagtagttctggatgttatctgcataagctacaccaaaagcaatcattctgactatgaatgtcaagggtttgactctgtttcatttgaagagtcatcttcagaaatacaggcttggtaagcaatctgggaaggatgtgggcgaaggatgcaaagatggttcatatcttttagaaagccctggcgctgataactcatctccaaagttgccaactcctgatacaaatgagggttatgaaatcaaggaggcattgagagcacagatggaagtgcaaagtaaattacatttgcaagtggaggcagagaagcacttgcagattcgccaggatgcagagaggagatacatggccatgctcgaaagagcttgcaagatgctggctgatcaatttattggtgccacagtcatagacacagacagccaaaagtttcaaggaattggaagcaaagcacctagaggcaccttggttgatcctcttggtttttactccatgccatccactgaggtggctggagtgaatgtcccagaagaagaaataccgctgagtctcccaccccaaagggctgattgttcaaccgaaagttgtttaacctcacatgagagttctggaggattggctttagaaggatctcctggcgagggaaaaaggaggatgcttggcatggactcgatggcagcacctttgatatggagtgaagctaagatgagaactcaagccatcaatgtagcccaaggtaatcttcctcaaggaataactaggtatggcatgtagggatggaaggtctacttgatggtttatcccggcatgatatataaacctttgggctttcattcattcctttttttataggtacttgaactcttcatgtcttgtaagttagtgagacataggtggaatcaattttacccctttgtaaattcaatctactctgtgactttaaaaattgcaaaaaactagctttgactatacaaaatttgtgtgttttggtgacttctatggattccttattgttcattgattcatgctgaataaagggtgtgacgtcctttccttc

SEQ ID NO: 14072 - DNA, 510 bp, Glycine max
ctctctcaaatttctttcccttctgttcactcaaaagagcagaaagagacaagatcccggaaaggcgtgccggcgtcagagactcatcagttctcactcgtacggcgttgtgctttgctttctcaccttcttcttcatttctttcatcatcatcatcatcacaatataaagttcgctcctttctcagttttcacccatacccagatgggtaacagcaccatctcggatctgtgtccctcctttaagtgaaaaaggttcaatctttggtctctgaggctgttgggtgttcgtcatggtggtggaagaagggtattattatcatgtactcgaggctcatacacccccacgatgggattgtgacgcaggatgacttgcagggtgctgcttccaatctctctcacgctcacaagggagatccttgtctcgttctgacggctgatcccaagcctcgtcttcgttggactcaggacttgcatgaacggttcgttgatgcggtaacgcagcttgggg

SEQ ID NO: 14073 - DNA, 416 bp, Glycine max
gacatttgtgaataatggccagcctaagttgggcgagaaattgatgagggacatggatgatagacttattacaatcacaaaggacatatacatggcattgctccgttcttattctcaacttggtgatgttgcaggcgctgaacgaatttcaacaactatgcaatttgcaggaatccagcagagtacggataaggagacatgcaccctgcttgttgaggcatatgcacttgcccttgtaaccctgatcaggcaagaagccattttgactgcatgataaaattggggcataagcctgatgataggtgcaccgctagcatgatttcggcttacgagaagaaaaacgacttggacaatgctttaaatcttcttttggagttagaaaaggatgggtttgagcctggggttgccacttattc

SEQ ID NO: 14074 - DNA, 540 bp, Glycine max
tcgcccctttctctctctctacactttctctctctctccaacaccaccttttatttttttttgccgttgagacaaaaacagaagtaaagaaagaggtttatttttatttgggtctttttttattagcgaaaaaagggataaaagaaaaagatgacgggaatgtccgaggccaaaagacccggcgatcaagctcttcgggaagacgatcccggtgccggagattctgccgggatccaacggagctccggcttcgtcttccggtgatgttgttgttgatgacagtgttgacgcttcttccaccaactcttcaagggagtctcataccaacacagatgcacaagagaaagattttgataaggacacattgggagaaaaaccaactgatgacaagaaggaagatggagcccccgcccaatcatcagaagaggtcgccaatccagatactgcctctggaacctgtgaagaatccatcatccagtccaccgagagggaggctactacattgaaaactacaaagactgaagaagaacagggcgagac

SEQ ID NO: 14075 - DNA, 381 bp, Glycine max
gaaagatgcaactcactgtcaacagtcaaatgaggatgctttactaaagataatagcaggtcatatggaagtttcccaaaagacttgctatgctttgcccacataaaatttcttgctagatagcccatacataagtgcaggataaagtcactagcacaatcagagccaaattcccaaatttggatcaagtcctccatttgtatttgagtagattgaaaccttttgggtgagagtaactcagaaagccacgtctcacacttcaagagaagtgtctccactccaaaataaagcgcaccctcataaagaggaaggaaattatccagcgtaatatccaatacgcagccatacatatgcttaagaatttgcataaattccctcacc

SEQ ID NO: 14076 - DNA, 742 bp, Glycine max
cccacgcgtccggaaagagtagtgaacatgaggaaactggcccccccaaaacatgaagaccatcattcttctcgtgacaattcttatggaaaatcttcttctggtagctctggatttggaactacactttcaaagaagtctttggatatggcaatgagacatatggacataaggcgaagcatccaaggtaatctgcggcctcttgtgacaagcattccagcttcctctatgtacagtgtgagatcaggtagttcctcaaagagcaggacagtgagtgcttctgattctccacttgccacaagcagcactaccagctctgaaccaagtgttaataccaactccatgtcttatgatggaagtggggttgaagaaaatgattttgcatgtgagaggggaaactcttgatgggagtcatcaatccatgatgggcaaagcatgatcatcatcactgctcttgccactttatttggtatgtggtacaacaaacagcacacgcacacacacacggggggtggtgtatatatatatattcatgtgataccatgtttccaaatagatgtgctagtgaagaaagtttgtagtatagtggtgcattagtctctggtgcctactagagttgtgatacaatagaagtgtgcctcgagacatattatgagctttatttaagcgtgtttgtgtcacgaggattgtttggtaccgaactcttaaactaccaattgacaatctcgttcaatttttgctt

SEQ ID NO: 14077 - DNA, 419 bp, Glycine max
gtgaaccgtgccactccttttttcctcttcttctcgtgcttcagtggaaatcggcgtagctccacgaccgacataagagctcaatggcaccaacaaggaaatctagaagtgtaaataagcggatgtcaagttcaaatgacaattcccctgagaaagatggagttaattcaaataaaagcaagcaacggaagaaaaagttgactgataaattgggatctcagtggagcaaggaggaacttgagcgattttatgaagcatataggaagtatgggaaagattggaagaaggtggctgctggtgtacgcaatagatccactgaaatggttgaagctctttacagtatgaatcgggcatacctctctctgccagaggggacggcttctgttgttggccttatagcgatgatgacggatcattac

SEQ ID NO: 14078 - DNA, 855 bp, Glycine max
ttcatttctctctctcttttctctcagaatccaaaccctaggaaatttccccttcagacgaaaccctagatttcctctcacaaatctctctcagcttccccattctcgggattcggcgtccagatcacagatcccgttcaattttttttccgcatcccccgatcgggtttggattctgaagaaagttcaattccgcacaaattcgagacaattgctgctgtcgaggctcgcgttgcgcatgggtaagattctgagagaaaccgcgaggccgttctcgaattgttcgtcgtcgtcggcgtctccgttgtcggcgccgccggcaacgacgtcgtcgacgtcgttgacggacacggtgagggggtcgcaccggttcaagatcacggggtattcgctgtcgaaggggattgggattgggaagtacatagcgtcggatatattctcggtgggagggtacgattgggcgatctatttttaccccgatgggaagagcgtggaggacaatgcaacgtacgtttcgctcttcatcgcgctcgctagcgaagggaccgatgttagggcgctttttgagttgacgcttttggatcagagtgggaaggagaggcacaaggtgcatagccattttgagaggaccctcgagagtggaccctacacgttaaaataccgtggtagcatgtggggttacaagcggttttttaagagaacagcactagagacatcagattaccttaaagatgattgccttagtgttaattgtagtgttggtgttgtgaagtcacacacagagggccctaaaatatataaaatcccaattccgtcttctaacatgggtcagcaatttggggaggctactaggaa

SEQ ID NO: 14079 - DNA, 901 bp, Glycine max
cgtttctgcccctttctttctctgaatcgaaaccctagaacttcgtcgtcttgtcttccagaatctgacaactttcctcatccgaacctaaattctctcatcaaaccctcacttatccaatccccacccaaattccccgcatcgacctcactcccctaaattcccccatcgccggctctctcacggccgaattcatcgcatcgccggttccgctacggtggctatcgcatgggtaagattctccgagaaaacgcgaagccgtcggcaaattcctcatcggcgtacccctctgcggcgcccgccaccacttcgtcgacatcggtgacggagacggtgagggggtcacaccagttcaagatcacggggtactcgctctcgaaggggatcgggattgggaagtacatggcctccgacgtgttttctgtcggagggtacaattgggcgatttatttctaccccgatgggaagagcgtggaggacaatgcgacctacgtgtcgctcttcatcgcgctggccagcgaaggcaccgacgttagggcacttttcgagttgacccttctggatcagagtgggaaggagaggcacaaggtgcatagccatttcgagaggactcttgagagcgggccttacaccttgaagtaccgtggtagtatgtggtttccgtggagtgattcgagcggtgaaatctttcatcccttgctagttgctcctcccacaaacgctgtggaaaaagggatgagggggaaataataatttggaggtggggggatgtcatgccttttgattggggttcaagcggtttttcaagagacagctctagagacatcgactaccttaaagaagattgtctgcctgtgaattggagttgtgtgttgtgaggcacccacggaggtccgaaaat

SEQ ID NO: 14080 - DNA, 529 bp, Glycine max
gtttctcaaacaatcattttttttttcttctgccccctttctctctctgaagcgaaaccctagaaattcatcatctttcagaatctgacaagtttcctcaaccgaacctaaattctctcaccaaatcctcacttatccaaattcgatactccaatccccacccaaattccccgcatcgactcccctccccaaaattcccccatcgccggcgtctcccgcggccgaacgcatcacatcgccgattcggctacggcgctaacagtggctatcgtatgggtaagattctccaagaaaccgcgaaccgtcggcgaattccacatcggcgtacccctctgcggcgcccggcaccacgtcgtcgatgtcggtgacggagacggtgagggggtcgcaccagttcaagattacggggtactcgctctcgaaggggatcgggattgggaagtacatggcctgcgacgtgttttccgtcggagggtacaattgggcgatttatttctaccctgatgggaagagcgtggaggacaatgcg

SEQ ID NO: 14081 - DNA, 419 bp, Glycine max
tcgcccacgcgttcgccacgcgtccgctttcctcgttttacactctttaaagaagtaaacacccctctctgagtctctcacctcaccaccacccacctgaacaatttccctgcacccaacacggtttcaaatatcactcccctataaaacatccttaaaaacggttaaacacccaaaaggggttttcaatttcacgcaattccttccattcccacacccaccaaaaaaaaaaaaaaaaccatcacacatattactacattataattgctttagattatgaagaaattggagaattactaaattgccctgccggaccaacacaccggggaacccaaagtggtggttccaactggcaatgggttccttcctttcctttttcttccttttcctcgctaccctaacctccccggagggcaccc

SEQ ID NO: 14082 - DNA, 850 bp, Glycine max
gactatcattccatccatcctgtgctagaagagctggtttgtacatgaatgtgaggcctactggtggcaaggctcaacacaaagcttactgtgaaaaacatagtttggagcagaaggcaaaggctgaaactcaaaaacatggaattgaagagttaaaaagtatcaggcagattagggttgaactagagagattacgtctcctttgtgaaagaattgtcaaacgtgaaaaaataaagagggaattggtaatatcttcacatgacatactggcctttaaaagagatcatgttgctaggtccgtgctggctcgtagccctttcatccttccggatggtagttcagaatcagctacaacgtcccttaaagggaacacagagggatacagatcatgcagtgaaccacttcaaagatcagatgatgttactgtggacagttcagtttctgctaagcgccgtgtcagagtcgccatatctatggacacagactcaaaattggacgatgactgctcaacctctcaaagtcgatacaaccacaggattccagatagattgcaattttctggcaagaaggttcctcatagaactgctgcatcacgtaatatttcagatgaaggtggatggagatccaaatctagaaagcattccgagacattcggaaaagagcttgttatgacgtcagatgaagcatctatgaagaattcaatgctacctaaaggatatgcatatgttcctgctgattgcttgtcaaatgagaagcactctaacgaggacgtatatgctagtgaaccagtggagcatgataggtagagtgttggatctcagcctggttctttatttttccttcgaggctg

SEQ ID NO: 14083 - DNA, 588 bp, Glycine max
tatcttctttggaaatgtgggttgaagaagcatcattcaccattagatgactaaagtttttttgtcccaggtcaagtatttgaccgaaaatatccagattgtgttagatgctgttcgaacctcatctgttgttgaagttcacggtgacaaaataaggagaagaaatgattggaggagatggatcatgcctggtggtcaggttcctaatgttagaggttctcaaaccgttggacagctggctgaacgagttcaaaacattactctggagagaactaacaataacgatgctggagtattagatgtttcacagaatagacctttttggggatttgaatagtcaatatctccattccactagcgagggtactgctcaagtcggtattcaagtttcagatcattctatttctgcaagaaattagagctgcagatgttctttaaaacatttttttgaagaatattcttcagagggaagcaagaagcaggagggatcatggtctcaatttttacatattgcacagtgggacatgttttctcgtgaggtatctaggaaaacatgattgagaaatgggaggaaaataccttttttat

SEQ ID NO: 14084 - DNA, 556 bp, Glycine max
aggcattatctgatccttacttcactggcttggcgaacatggaccgtgaaccatccactcaacccatttcaaaacttgagtttgaatttgagagaaggaaattgaccaaagatgatgttagagagttgatttatcgagaggtgtgatcatagtacatttatgttgttcctgcttcaatttattgtcttctttgtcctgtggtaagaattatgtaaatatttcaagtgaacagattttggagtatcatccccagatgctccaggagtatcttcgtggtggagatcaaactagcttcatgtatccaagtggggttgatcggttcaagcgacagtttgcacatcttgaggagcattatggcaaaggtgaacgaagcactccaccattgcagagacagcatgcctccttacctagagagcgagtttgtgctcccaaggatgaaagtaaacaaaacaacgattcttaaaagccaaagggatcaaatcttcagcagagtcctccaagttctgatgagacaagtgctcaaaatggaacctccaaaccaaactacagtgcacgt

SEQ ID NO: 14085 - DNA, 310 bp, Glycine max
tcggctcgatgaagaggcactaagagatccttatttccatggtttgtcaaatgtggaccgtgaaccgtcgtccactcagcccatttcaaagcttgagtttgagtttgagaggaggaagttggccaaagatgatgttagagagttgatttatcgagagattttggagtatcatccccagatgctccaggaatatcttcgtggtggagatcaaactagcttcatgtatccaagtggggtcgaccggttcaagcgacagtttgcacatcttgaggagcattatggccaaggtgaacgaagcactccaccattg

SEQ ID NO: 14086 - DNA, 745 bp, Glycine max
  unsure (1)..(745): unsure at all n locations
cttttcaaagaaaaatcatttttttcaaatacaaacaatagtattttcatatctgagagtggacaaaatggatgaactgacccaaccgtgtccactagattagacctaatggcctaccaatactctacctggatcatattttttaaagtcgagttagatttaatgaccgtcatgttaattcattttagcccattttatttttttgtctaaatgactagcaaaatgaacggaccaatccaacccaatccatcagatcaagtgtgaaaaatgggttaggtcgagcctacccatactttatgttgatcttatattttaaagttcaattaggtctagaggaccatcagcttgattcatattaactcattttatttttttgtatgaatttatataaattcaaaagaaaaaataaaagttaaaaaacattggaccaaaataagtttgactgaattggaacccatgttttttgagtccaacctagtccaatgggtcaatccaaataggtacaattttatttgggtcaatattttttcagttcaattcaacggactagcttgacaagcttggttcattttatcatctctcttaaaaaataaaanctatatatatatatatatatatataaaagaaaaattagacccatcaagccaaaaagaaattcttaaaaaattgttccatttagctaaaaaaaactagctaattttcttttaattatctatatttttcaaaatacaaaataatgtaataa

SEQ ID NO: 14087 - DNA, 696 bp, Glycine max
ttttaatgcaagtgaattaaaaaacacatcaataagctccgatcaaataaaaacactcacgaatatcaaaaacctaggctggtttcatgagaggttttcccctataaactttattcattttctctccttctctctctatatcatatatcctccctcctatcatgtcatatcatgcattgcaagtagcaccctaagtctttaaccccttcacctcacacacacgacatttgtttctctacgccagctcattcattatattcattcaaccccatcaccaacccaacccttctctctctctctctctctctctctctctctcaaacatttagacgttttctctgtcagatctcaaggcttaacgtggtgttgggtcttcctcggcatcgcgttacccacatagttttctgggcaaaaacagagtcttttggtggggaaaatggcgaacgggttagagagagaaagtgggttgacgacgttgttcagcgaggaggagctgagagaggtgagtggggttaagcgtgttggggactgtgtcgaagtcacgtgcgggtgcacgagccatagatacggtgacgctgtgggaagacttagggttttcgttaatgggtaccttgaaatcacttgcgaatgcacccctggttgccaagaagacaagttgactccttctgcatttgagaaacactctggaagagagac

SEQ ID NO: 14088 - DNA, 498 bp, Glycine max
caacgatgatgagtcttcagagtcatcatcaccatctttggcaccaaagttggttcctttctttaacagatcagtcatcagaaccccaagggagttgggacttaacttccctgccaatgggaccgaggccttaaccaaattgttccccactggaaacagcgacgggagatgcttgaagctcctacctttccctccaagactcgaggatcaggttcgagcctcgttcgcgctcacaggagcagatttggagaagctaaggaaaagggtgttgtccaaatgggacatcgttgatagaggagcagaatcagagccacctaggttgtcatctttcgttctcacatgtgcttatgcgctagcttgcattgctaaggccattcatggagttgaaaaggagaaagagaaatttgcttttgcgttcacagtggattgcaaggcgaggttggagcctccaatccatgataattattttggcaaattgggtgtggggcatgttgtgga

SEQ ID NO: 14089 - DNA, 320 bp, Glycine max
gccacccctcccggaaaaggacccacttggtttcttggacctaaatggttaaaggcagggggcccaaaatgattgtgaaggttcatcaaaagatgccagacattcagatagtagtgctgaacaatatttaaagggccttaaaactcttgcagggccaagtctgcaaagaaaaatcaacttcattgaaaccattaaacttgagattgaacgccttaagttgaatctttctgctgctgaaagggacagagccctgctatctgttggaatggatcctgcaaccttaaatcctaatacactgctcgatgaagcttacacgggaa

SEQ ID NO: 14090 - DNA, 547 bp, Glycine max
cccacgcgtccgcccacgcgttcgcccacgcgtgcgcccacgcgtccgcatctccaaaaggccccagccccaacctcgatctgctcacgccgcatctggagcactttacgatggtaattcgaacgtagtaattgcttctgatgtggactatgaagactatcacaaaggctagggagtgtcgatgcattgagtacttatcttcattgccgagaagtttttccttttcctctgcctcttcctcccattctcgtcactctcaatttcgcattgataatcggaatcattctgaaccccaaagaccttgtcagcgaggattacatatttgaacaagccgctgatggtttatgtcagcaaaagcgcgtcaaggaagcgggtgaattgctccatcgtactgatcatcgaccctccgcgcgcgtgtactccaccctcattgccgcttgcgttcgtcaccgcgctcttgaactgggtaggagggtccatgcccacactaaagcttttaactttgttccaggggttttcatttttaaccgtttgcttgatatgtatg

SEQ ID NO: 14091 - DNA, 424 bp, Glycine max
aatttgtacaactagtcaattgttgtatagtttggtaaaaagttgtgcagcttgtgactatcaattttttaaatgtatgaacaataaaaaaatgtaactgggcaattccatgtactctgtctagttgatgccaatgctggatgttatgagtttgattacagaattcaatgatcctaaacgcagagcagcagaggtatttgataacttagagagattaacatagctatagggaattggggatgagtataaaagaaagctatatgttgctaggtgcatggttgcaactttcaagtaaatcatggatcagtcaaaaatctatttttcttgcaattagtgtgctactgggcctcaattgtcaaattcctaggatggaaaatgttttttttttttttcagaataagacaaccactgatgcccgatggat

SEQ ID NO: 14092 - DNA, 112 bp, Glycine max
tgagaatagaaggttttcttttgttaaatacatgttatttgtaaggtgtttattcattatcagatgtgatcatattattcataaggtatttatggatgtgattttgcttaaa

SEQ ID NO: 14093 - DNA, 506 bp, Glycine max
cccacgcgtccgctgcaattcatctctctcatttcctttttctttatctgtttcttgttgctcaggctaagttgctggaagctgggccacgtttttctctctctctctctctctctcaagtatggcttatttagacactgtttggaataagcttctctataagtattagtaggagaagtaaataagaaaagaatacatgaagtaagtttatttttataagctaaaattagcttatgtaaaaattaagatcagttcttgaaagagtttattaatatcattaagcttctagaaaaagctgatgcataaactaattttatgtttatggaagaactttatttcatctaaagagaccctagtgaagccagctatttatgactaaagtactattttgttcttgaatttgtaacgctctaatcggttagtccttcaaattaggtaaatttgaaaagaaaaaagaagtttaaaaacttttcccggactgggatactcgatcatgtaaaggacac

SEQ ID NO: 14094 - DNA, 793 bp, Glycine max
ctcagccattaccacctcttcactctttctctctcttcccaaactaaacataaacatacattacacatttctagggttctctcacacaccaagattctcctagctgcagctgaaggactgtgaagatgttggagaaagttgaagaatttaacacggagaggatgatggaggaatttgagagggtgacaaaggatgctgagaggattcaaagggaaaccctgaagaggattttggaagataatgcttctgctgagtacttgctgaatttgggcttgaatgggaggacggatcctgagagtttcaaggcctttgttccacttgttactcataaagatttggagccttatatcaatagaataattgatggtgatttttcttctgttctcactggcaaacccatcacaaccatgtctttgagttctggcactactcagggaaagccaaaatatgtaccatggaatgatgaattgtttgacaccacattgcagatatatcacacctcttttgccttcagaaacagggaatttcccataaacaatggcaaggccttgggctttatctacagcagcaagcagttcaaaaccaaagggggtgtgctagcaggaactgccacaaccaatgtgttccgtaacccggggttccagcatgcgatgaaggcgattcagtccccactttgcagccctgatgaagtcatatttggtcctgattttcaccaatccttgtactgccacctcttgtgtggcctaatcttcagggaagaagttcagttggtgtattccatatttccacacaa

SEQ ID NO: 14095 - DNA, 370 bp, Glycine max
gagctttatgatatggcttcagttctggttcccagagttgtgttctggttcaatgatctctctctctctctctatggtctctaatccaattcagttagcgtctcgttcacgtgcaaagggacttgagaggatgttggagaaagttgaagaatttaacatagagagggtgatggaggaatctgagagggtgacaaacgatgctgagaggattcaaatggaaaccctgaagaggattttggtagataatgcttgtgctgagtacttgctgaatttggggttgaatgggatgactgattctgacagctttaaggcctttggtccacttgatactcacaaagatttagagccttatatcaattgaatacttgat

SEQ ID NO: 14096 - DNA, 405 bp, Glycine max
gaaaaaaaaacttgtatgactttggcatactatactagtctcgggggccattcacattcaggggaacatagcagaagcatagagatataccataccatattatatataacaccgaattgaattcttgctttgtttctctacctttgatcatgatcatggattctcttctctccatcctcttctttcttctcactctatcttctctcaacccttcctttgcttcacaaccctcttaccaagaccactgtggctccatagttccagagtcaactcccaatgaaaacactcacaattcttccccttttgatgatcatcagagaagttacttcacaggtggtgatagcatcatcgatggtggaacttgcttaaaccaatactttgacctccaaccaatgtacatacgtg

SEQ ID NO: 14097 - DNA, 554 bp, Glycine max
gcgcaacgctcggggaaaggcgcgtggggtggtttaatagtatcgaacggccatgcatgcggaatcctgctacactcactcacacacacaccaccctctctctctctctctctctcaaataaaatcgtatcacacactttctttctttcttccttctctcacactgacatcaccaaagttttcctttcgttatcgatttcattctctcgccagcgagaagaagaagaatcccctgcagccgagctctctctctctctctctctctctctactcctactccgatgatcatcatcatcatccatggcggttcctccgtcggtcgccgccgctccggcgtcgctctacgtcggcgacctccaccccaacgtctccgacaaccacctcgtcgacgcattctccgacttcgagagcctcgcgtctgttcgcgtctgcaaagactcctccaccggcaaatccctctgttacggttacgtcaacttcgtttcccctcaagacgcaattcgtgcaatcgagctgaaaaataactccacgctgaatgggaaagcgatgagggt

SEQ ID NO: 14098 - DNA, 1250 bp, Glycine max
tctcgagccgaatcggatcgagcggctcgagcggctggcggtgagttggagctttgaccagtttgagcacacgagaattcagtgggcatgtcaatggcaaaaaaacctgtgaaatactctctggttgacgcgtttactgagtcagtgttcaaaggaaaccctgcagcagtgtgtttcttagaagagaagagggacaaaaagtggttgcaaggagtagctgcagagttcaatctatctgtgacatgttacttaactcgcatcaccgagtcccatggaacaacctcttatcctcgttttgatctcagatggttcactcctgttagtgagattaacctttgtggacatgcgaccttagctgctgcgcacacaatattttcatctggtttggtggacaccgatgttgtcgaatttgtggctatatctggaatattaactgccaaaaagatcccagcgatcaatatcactagtgcctcagacttgcaaaagggtgaagctcacgatgggttttatgttgaattgaatttccctgctgatcctgttgtagaattcaattttgatgagacttcacaaatttctggggcattgaacggtgcttccataattgatataaagaggacacaagatggaggcgacttagttgttgtggtcacttccggaagagttgtcgaggaactacaaccacaacttgatgcaatagttaaatgtcctggaagggggttaattgttacggggattgctcctccaggctcagaatttgacttctgtagtcgattcttctgcccaaaacttggagtcaatgaggatcctgtttgtgggggtgcacattgtgcattggcaccctactggagcaagaagctagggaagtgtgatttcaaagcttatcaggcatcagccagagggggagttctcaatgttcatcttgatgagcagaaccaaagggtgcttttgcgtgggaaggctgttaaagtgatggaagggtgtgttctggtctagtcctgttcttagcattgcagattatattattgcatcaaagtatgtttcagatgactagaattgtaactgaaattctgaagtgttacgacactttattttatcacataaaataggcaacctccgagcattatgtgtttcagtgtttgatgtccacaaacatggtataataataatacttgttgatttgaataagatggtcaggtcagtgctttagtttgcaggccctgcgtctggtctcatcagttcaaatcaatgcc

SEQ ID NO: 14099 - DNA, 322 bp, Glycine max
gcacacgagaattcagtgggcatgtcaatggcaaaaaaacctgtgaaatactctctggtatgtttgtgagtgaactgaattgttctgttcggtaatacatactacatagtaaatatgaattagacaatatgcgctgaattcgagttagataagcaggttgacgcgtttactgagtcagtgttcaaaggaaaccctgcagcagtgtgtttcttagaagagaagagggacaaaaagtggttgcaaggagtagctgcagagttcaatctatctgtgaccatgttacttaactcgcatcaccgagtcccatggaacaacctgtatc

SEQ ID NO: 14100 - DNA, 378 bp, Glycine max
gggaataataaaaaattgaggaaaacaaatagacatgctaagaagggaaagaaaagaaactgagcagaagaggctagtgggttggcctaaaaggctgccggagtactgacggttggtcagaaacacataagagagctgtgggttatacagtttgtgtcgaataaaagagctgtggggaaattgcggaattatctcaaaaagattggatgaacaacagacaatcaggtggcacagaaggttctttaacccccttgttaccaatcaaggtcactaatactatagctgctaattggtatgatttggggtatgaggtgctccacaaaatcacaacgtgatgtctttcgtatagtggacccaagccatgatgcacaatgatgc

SEQ ID NO: 14101 - DNA, 453 bp, Glycine max
  unsure (1)..(453): unsure at all n locations
cccacgcgtccggatccaagtcctcattttttttctccgcattcatctggcatttttattgattgtataaagtataaactttcccgtgcagagactggatatgttattggatcatttaattggctggaacctcctaagagtatatagttgaaatgtttgataaccttggctgtgcacttgtgttgttcttcagttgatggaattatatatggtattttttttaatcttgtattgtccatagaattttgtgttgatgaccgcatatgtgctcagtttaagtttaggtttcttaatgtacgacagttattgtcagatcgattgttctatnntgcattatttagtgtcaaatagaaggtgaaaatattgatgttgtagcttgtntattttatttccgattagaattattctataacgttctcgtaacagtgtgccagcaatggttcaaagtctaca

SEQ ID NO: 14102 - DNA, 987 bp, Glycine max
ggtgagtgatgctgaacactcatttggtgctctggcgtgtgaagctgaacactggatgggggcagtggagtgtgaagctcagccttttgttgatgtgtctcagaagaaaactgacacaattgagggtgaagctgaactttcagtgaaaggtgggctttctgttgaaggtgaaggtagcaatcaaggagatgaagattcaagacctgcctcggatgctttggatggacagaatgtgggtgcagaggtagtgaaaaagccattctactatttgatcagggttcccagatatgatgatgatggaaacatgaaagagaagataaaaaatgctcttcaccaagtagaggagaagtctaaaattcgagatgctattcgagctgaaagccagactataaaggccagttgtaaggatttcgaccaagagtttagggctgcaattgcagctcatagagctgctcgggacttgctcaagtccaaacgccaggttatggattcagttcaatccacaatgaacagattaaacaatgcaatttctgttggggatatagatggcaagataagaagcatggaacacatgatcgagcatgaaactttacctctaaataaagaaaagcaattgatacgcgagatcaaacaattgaagcagaatcgtgaggagttgtcttctaatatgaaaaggcaggatcaatcacaacaatctctagagaacaaggatgacaatattgaagagcactttaagcatttacagcttttgaagaaggaaatggaagtgcttagaaataatgttctgaagtcagatacagaaactaaagccgcaaagaagaaatataatgatgaatgtgataaactgaatgagttgctagctcgatttagggccgctgatgattctcgtcaagaggcatatgctaagttactggctttgaaaaaacaattgcatgagaagagcaaaaatttctgggaatacagagatgctgcaaataaagcacagga

SEQ ID NO: 14103 - DNA, 577 bp, Glycine max
gcgtcactggcaacctcaagcgcaggagcgactctgccggttcccaacgtgaggactttctctgcttaagatcgagaaagaatttagaacagggtaatgataaggcaaatgaagatgactcagtgaagataaatgatgacgtggctgcggcggttgttgattgcgatgtgataacaccggaatccaaagcggaaaactcaggattcaatttaaaccttatagcagttaactctgactccgactccgcttttagggtttccaccggcaaccggaagcgcaagattcactcaaccggttccggatgcgagggttttctcaacaaaagaccggggaagaaggctgtcaagagagcaatgacaaacgattcagaagaacaaagtaataataacgcagatgatgatgatgataatgacgtggcggtggcggttgatgaaaatgtgatgataccagagaacactggtggtgcaaacgttgtagcggataatagtgtacctttgcgtgttcgagaacgtcctagaaattccaatgcaagagagcgtggttccggttatgggaggaacgattacatggaaacgat

SEQ ID NO: 14104 - DNA, 633 bp, Glycine max
ccgttaatgcagttagaggcttctattaactcactcatctgtctatctccttccccaccaaaactcaacacaacaacatcactcttacagcttccgaaccctccatcatggccttgtcaagtccacacatacaaagattcctcttatgcaagcttcatagccgctccaccgccaagaacagacacagaaacagcttcaccgccacaaccaccaccaggagcagttgctgctctgccatagccattgatgctccatcgtctttgaccgaggtgcccggcataagatgggggtccatagccttgcagggtctccgtgaagagatggaagatgatattattggtcggcctgagggccttcaaggcttcacttttgcagctgtgtttgatggccatggagggttttcttctgtcgagttcctcagtgccaactacagggatgagctgtacaaggagtgtgttgaagctttacaaggtgggttactattagtcgagaaagatttcaaagccattaaaagggcattacaggaggcatttctcaaggctgacgcgaggttattaaaacggcttgaaatgaatggagaggaggatgaatcaggtgctacatcaactgccgtgttcattggagatgatgagc

SEQ ID NO: 14105 - DNA, 563 bp, Glycine max
actcgagccgattcggctcgagggttaaaacgttacgtttaaacctctctgcattgcattcgcatatgatccgttaacgttagcaacaacgatggatgattcgaagcagcagcagcaacgaaaaaaaaactaccgaaagagaagcgctccaacagacgaagatgaacttcctcaatctcaaagtaacaatgaatccgacgacgaacgagaaagaagaatggcattggaggaaattaagctcctccagaagcagcgggaaaggaaatcgggaattccagcaaaccctagtttgcaggtgcagagtggaaccggcggcggtttagctgctaaagccgccgaaaagaacgatggcgatggcggcgacaaggacgagctcgttcttcaagacaccttcgctcaagagaccgctgttatggatgaagaccccaatatggtgaattatatcgagcacgagttagcgaagaagaggggaaggaatattgatgcagcggatcaagctgagaatgagctgaaacgtgctgaagatgaactatataagatccctgagcatgttaaagtaaaaa

SEQ ID NO: 14106 - DNA, 863 bp, Glycine max
aaaactgttcatgtgctttttttacccaatggcttaagctttcgtgatggttggttgatagtagactttattattgacccaagggaatttgtttttcaattaatagcttccatatcatgtatagaagttctctttcttgtatagtatctgatgtttttgtaaaaaatggtttccttggagcaccggtgtgatgatcgaattcagaagattcaaacaattaaaatgatggaaggaatcctcatttgtgcggctcctcattgtctcaagtctttcttgaagaaagctgattttgaatctcatatccaagacagccacggaaaccttcttcgacccaatgcagataaagaagatggaaatgagtcggaggcacagagtgttaggcaatcaacggcttcagattccactgctcgcggtccccaaagaccagttttttctcctggttcaaattcccagcaacatgatctggaagacaaatctcgtagacagacacctagagagcaaccaccttcaaggcaaacccagcagccaaagccaccatattatggtcaacaacaacacccttcagataccatgtctgcctctgttggtggtggacaacagggctttcatcaacaaatttttgacatgcagcatcccccacaagatccttcccagtttgctgacagacaacaggcagttggtccagaggccccatttcccgagtatcctgcaatgcaccctgcacaaccttccaatgttcccttgctggttacttcaaacccaatgctgaacccacccatgacatttggctatcccccatacctaaacgaacgagctcagccattttacggtgctccctatgatatgcctaggcaggactcagg

SEQ ID NO: 14107 - DNA, 439 bp, Glycine max
  unsure (1)..(439): unsure at all n locations
cttctttgtttggcttttgaagtttgaacagtatttgcctatttggtttgccgctccgaatccggatacactcactgttggtgactcataaaggcaccgtctttggattctcttccacttcgtctctgcgacgcanaaatgggtcgaaaacgagcttccaaaaacagcgacagggttcaagcgttgcctactgttgtggaaccacagccttccaatggaaacatacaactgccaagggcactagaatctcagcttgaaatcccactccctgggcttacctcaccgaagcatccaaatttgttggtgggtagagcggaaatgcgtcatgcaaaaaagcccggcgcaggagcaagtgaaccaagaccatgggcatcaaaagaagcctcctacacctgctaagaaaaaaatcaaattctgtggtgcatctgtgaggcgatca

SEQ ID NO: 14108 - DNA, 455 bp, Glycine max
cgcagagcccgattccagattgcgaaattccgatggataaaacggtgaaagacaactcagcgtggagcgacatcgttttgcagggggtcatggttctggtgatggtcctctcctacttcttcatgcacgacgtgcccaagaagctgtgggccaagctccgtctaagcaaccgcgccgacatccaagccaagcgccacttcgtccaaggggcccagctcctggcccgggcccgcgcctgcaagtccaaggccctcgccaaggaggcccaggcccaggctcagcgcgccatcgccctcgacccgagcgacgccgcgccgcacctcctcaaggccctcgccttagacttcctgggcctccgctccgctgcgctggactcgctcgacgaggcgctctcccccgccgccgcgaagtccctctcggactcggagcgcggcgacgcgctcctcaagcgcgcc

SEQ ID NO: 14109 - DNA, 606 bp, Glycine max
cttgaagggtaagtggcatattgctgatagaaggaattaaaacataaaaactgcagtaaccaaaaaccaaacttataaaacatagggaccaaaaggtccaaaaccaaatttgagtagactatagggataaaaaatgtatttaaagtttaaacctataatttatattcacctctctatattttagaagtatgtgggtgtatgttagaaaactattggcctgtttgttttaaagttgggtagaattataggcgttaacatactcagcataattgggatatgtattcaaattactgtcacaaatttttgcgcttggaacatgtgcagtgtgggaaattgattcttgggtgtaaaacaagtgggtgtatttagcaatccccacccctctccctctccccccaaaatgctaaaacacaaactactaaatctttcagtgtgttcaaatataacatctttttttattttctggtaatgtaaaaagttgtacattgaccatggatccagtttggccgtatatggcttagtaaaaaatttcttggccgctttactttgcaaagtatcctcatttttttaatcattgagtttgaaatggatggttgtgtctgagcg

SEQ ID NO: 14110 - DNA, 446 bp, Glycine max
gcattccaatgtcctggttttcaaaataagaattggagtttttctttttgacactagtatgggggtgttctgtttgtcctctagagtctagacgtaggttggttttcttgagattgacaatacttggttatctaataggatgcatcgtaagaatggacagtttgcatcattgaaggaagactacaaatctcctgctgaaaattgggattcaagcaatggtactccttgcccagactctactgagcgtagatgccagcattgtggaattagtgagaagtctactccacctatgcgatccaggaccagcaggtccaagatctctgcgcaatgcctgtgggctcatgtgggcaaatgagggaactctgagagatctcagcaaagcaggaaggattgcttttgaacaaaatgcactggatacttcagctgatataaagccttcaacaaca

SEQ ID NO: 14111 - DNA, 452 bp, Glycine max
tagttgttacttgccacgacccgcgacggcggtggtgtacgaagagagcgagagcaggaggtgagcggcgactctctccgactacagatatcttcaccacaacagataaaatgaggtacatgaagcccttgccattgtttcatgatttgaagaatacaactcctcagcgcggaaggttgcttggtttggatgtcggggataaatatgttggccttgctctttctgactttgataacaatattgcttcacctttcaacgttctcgtcaggaagaagacaaatattagtttaatggcttctgatttagagagtctgattgctaaatattccttgaagggctttgttattggcatcccttttgacaaacatcaagtgtcttctgatgctatgcaagtgaaggtcttcattgataacctctgtagaacaaaaatgcttgaaggtgtaaagtataca

SEQ ID NO: 14112 - DNA, 721 bp, Glycine max
agaagaggtgaggctgaggatgaagaacttgaaggtgtttggggaggttccctcgggactctcccttgactctaacgaggaaactatagggttttgcagcttcgacatcgaacgcaaccgcatcttcttcctctcttcccacaatctcatttacacttcccatctctcctctttccacgagaacgccgtttggagccctaacgcctcgctctcctcctccgatgctgttaccgtcgatctcgaacccggagacgccgttacctccttcgactacctcatggagaaagaagcgcttcttctcggaacctccaacgggcttctcttgctccacaacgtcgacgacgcctccgacgcgacgcaagtcgttggcaagctcgacggcggcgtcaatgcagtttccctcagccctgacggagaactcgtccccgtaaccaccggtttcgggcaccttttggtcatgactcacgattgcgacgtgttgtacgaaacatcactccacgatgatgatgttcccgtaagtgaaggggagtttcttcccgtgtcttggcgaggagatgggaaatactttgctacgatgagtgatgcgtgtggttctggttcggtgcttaagaaaattaagggttgggatcgagattcaggggatttgcttgctttttcggagctgagaaagttttgctggggcagttttggagtggatgcccaatggtgcttaaattgcagc

SEQ ID NO: 14113 - DNA, 934 bp, Glycine max
gtgagaaaacagctagccaagatcaaatgtcctctacttgtgatattcagggaggtagagatatgcactgtcagaattccattagcaatgctggccatcagctccctattactgggaatttatcagaccacgttgatgctgttagcattctccagggatatccctttcaagttcctttgaagaaagaaatgaatggcgatatgaattgcagcagttcagcaactgaattgccttttctgccccataagattgaacaggatgatgatcatatcaaaacattccagtcgtcagattcagataaaacatccagaaatggtgatgtgaaactgtttgggaagatactaaccaatccttcaaccacacagaaacctaatgtgggtgctaaagggagtgaagaaaatggcacccatcatcctaagttaagcagcaagtcttctaatctgaaatttactggccatcatagtgctgatggaaatttgaaaattttgaagtttgaccataatgattatgttggccttgaaaatgttcttgaaaatgttcccatgaggagttatggttattgggatgggaaccgaatacagactggtctctcgacattgcctgattctgccatcttgctagcaaagtatcccgctgccttcagtaattatctcacgtcttctgccaaattggagcaaccgtcattgcagacatattccaagaataatgaacggctcctgaatggtgcatccacttttacgactagagacatcaatggcagcaatgctttgatcgattatcagatgtttagaagggatggtccaaaagtgcaaccatttatggtagatgtcaagcactgccaagatgtattctctgagatgcagagaagaaatggtttcgaagcaatctcaagtttacagcagcagagcaggggaatgaatggtgttggaagacc

SEQ ID NO: 14114 - DNA, 500 bp, Glycine max
actcgagcgaatcggctcgagttggaagtgatctaagttgactgaaagtgagcaatgtcgttcgcagtggcattgtgtacaacgtcgtcgttcttcccttcccgttttgaaattcgcaatccaaagcagcttcagcttccacctctcctttcaatgtcactgtcgtcgaagctaccgttgcatttctccggcaatgccatattcaaccgcaaccacccaaccatgttcaaaattcgagcctcaaactcttcatccaaactcgtcttattgagctccactatcgtcgtcacaacagcggtagcgaatcgcgtgctctacaaattggcccttgttcccatgaaagagtaccccttttttctcgctcagttcataacttttgggtatgttgttatatatttctcgatcttgtatttccggtaccgggcgagaattgtgaccgatgagatgctggcaattccgaaattgcgttttgtggccattgggtttctagaagccttggg

SEQ ID NO: 14115 - DNA, 383 bp, Glycine max
agataaattgaagaatgtatcgtcttcatctgaaaatacgaatcgctgcacagaggattctgccttgtcaagtgacaagtctgcaccttcactctctggcagcaccaaagtggtttctgactcaagtaacacgtattcaactgcagtagaacgggtcgttgtttactcacgcaagaccaatgtggaaattgaagatggtggcactatattgccgattagcgatgacaggtgggttgcttactcatattctcattgagatagttggaacagttgcaggctctcctgtgtcatattttgcgtctctctccgaattgatttgtatagaaggatttgactcccggtaaatttagaaaacaaaacgtggaacttgtaacctattgatt

SEQ ID NO: 14116 - DNA, 504 bp, Glycine max
catgatgatgaatttcccttgatctttggtaagccagaaaacgaggttgtgacatagttcttgaggaagcattattgcagtatgagacgctgatgagagattgttctcactgagattactattttatagtggagagttctcagaatcgtgctaatgtttatggtttgagcatgtccatgggtgaccctaatcaggtatagttgtattgtatgatatataataaactttctggtaggttagtttttatgagatcttattatttgtttcactgtttcttgaaagcaaaggcaatctctaatgatgtccaaaatgtttggaatatgcttaggatttgaatcctcaaactatatatatgtcctcaagtcaaaaaaattgggcatctacttgtgctctgtaaagacatctcctcatgatgttttattcatttagatctaattgttggaaagaatgaagcatttaatttctgtataaataaataaataaaaaaagctaggtaagcatttg

SEQ ID NO: 14117 - DNA, 567 bp, Glycine max
gtgaaatgaaaggatgatatggtgatgtgtatggtctctgaattcgaagacagaggaagaagggaaataagataggaagggtatagaccaaattctcattaaaatttgtcaatcaatacatggccaaatatatctcagtcacatgctcactattctaactaactgcccaaaggaatctaagaattgatcccctctaacagaatacatgataagagccttctagaataagctgagtcactctccctattattacaatatcagatatctaaaagctaatgataaagcacgtaatccttcatctttttcggtgtaagaataatccttttgggcctcaactctgcttcagtggcaatccgtccactctcctcaatggcctgtacttgacaaatgggctcagtcatagcatgtggaaaaaatataatctatagattctaatcaatttaaaaagaaaataagaaataagcagtagaagtgtttcttctagccatttttccttagcaatgagaggcaacaaatgaatgggaagatcattattcatataatatcaaaaggctattcatgtggatg

SEQ ID NO: 14118 - DNA, 539 bp, Glycine max
  unsure (1)..(539): unsure at all n locations
cccacgcgtccgcccacgcgtccgcttattttgtttttagtatttggtttttgtattttataaccctagttttgccatcagagacatttgaatatgttaggattgatgatttttcttgaatcctgattgggaacatcaacactgttgcgccttgagtcgattcgcgtctctttttttttttttttcattttttgtgttaatttgtggctgatttattttgcgttaatatctaattggatgctttgaattgataatttgtcgtacgaatttccttaaattgatctcggatctttgttttccacattatataacctttggtaattagattttagaaatttgcaaattaaatagaggaagtggagaaattctattagtaattgtcttttagatcagttatggcggtaagagaaatgaaacaacacactctttggttgaaaatgattaaaattgtgtgggtcccacacttttttcaatgaactctacacatgattntgtaattttcaatcaattttaacaaataagaaagtatgttatttata

SEQ ID NO: 14119 - DNA, 440 bp, Glycine max
cccacgcgtccgctctagtaagtaaggttattgcttaatgaggaatacttttgctttcctttttgatggaaagaaatcttacttctagggaataagtctacttttatttttcgacaaatattaatatttctagcatgatgagagattatttggttattatgaagacattataatttttatttatagtctattcctagtttaaatggaaaacagagtttgcgtttacatggtaggtaatttacagtttacaattgcatatagttgtatgtgaatgctaaatcataaaacgcttatttcttgattcatgggggttttcacacttggtgtttgatggagttgtatgtagcagtgatactttctggattattgacagattaggaggaaagatagacttattcgtattacagagtaaaaggaaaactcatactgaaaggctgatt

SEQ ID NO: 14120 - DNA, 717 bp, Glycine max
aggtttttcccacactctgcacggctgcaaaagaatggatcatatcgaactgttaaacattcacagactgttcacatacatcctagtttggggctggcacaggttcttcccagatgggttgtataccatgaactagtactctcaaccaaggagtctatgagacaatcgacggagttgaagccagagtggttggtggagatagccccccactattaccagcttaaggatgttgaagactcatattcgaagaaaatgcctcgtggagcaggacttccatcgtaggacagattgttggcatctttacatatgctttgggaggagaaagtacttttatcaagtcattttggggggataaaaaagtgtcattcttaaacatgggagacgtattgtaaatattttttcgccgtaatttatactatagcatgcatattatatcttgttgaaattagcttagcctgtagtaaccctcacttgctatagtagctctcccttggtgagtggtgatatcatttacatacaaattttgtcatctaagtttcagtttcattttttttgtaacaagtgccatctataattcaattttgttagtattgctagtttaatattgtatacatttcttaaagggcactgttttaacccagaaatattcagagcggcatgtatttacttctgatgattgtacagatttcatttgatctggcaaatgccttttcaatt

SEQ ID NO: 14121 - DNA, 734 bp, Glycine max
gagaaagtgtaaagaagaggaattatctgcatcaatcaaccatcatcataatcatgtcttgctgtttatcttgctgcgcgtctttgacctgtggtctctgcacctccactgcatcttgcatctcccaaaaatccgctagaatcggttactgtggtctcttcggtgtctctctcgtcgtttcgtggatcctcagagaagttggagcacccctcttggagaaattcccatggataggtggcacatccgataccaacacaacggaatggtatcaagcacaagcggttcttcgagtgagcttgagaaatttcttgttctttggtatcttagcccttattatgattggtgtgaaggaccagaatgatagacgcgattcatggcatcatggtggttggactgcaaaaattgcgatctggcttttgcttgtggtccttgcattcttccttccagatgccataatattagtatatggattcatagcaaaaattggggctggcttgtttttattgattcaagtgataattttacttgactttactcacacttggaatgatgcgtgggttgagaaagatgaacaaaaatggtatattgctttacttgctgtatcagtcggatgcttcattgcagcatttacagtgtcaggaatccttttcatttggttcaacccttccggatatgattgtagcctcaatatcttcttccttgtcatgaccatgattcttgcttttgtgtttgca

SEQ ID NO: 14122 - DNA, 280 bp, Glycine max
gctcagtgctcctgtcaacatcctcaatcacgagcagaacgcccaatccaggaaattaggcaagtctgagaataagggtttgaaacaattggagttgaattctttaacctcaagtaatcagaataataatggtctggttgcgaagtttacaagtaatgcttctacagctaatgctcctgcagtagagtccaagcccagagagatggtgccaaagaacatgttcaaacatgccgatactaatggagttattagtggaaaagttgctaatggaaaagtcacg

SEQ ID NO: 14123 - DNA, 565 bp, Glycine max
gtcccaatacttaaggcatataagccttgaatttgatgcaattgtcagagaagggagggataatgccgaagcagctgaggctcaaaggaatgaagaaactagatctgtttcttcacatttgggttcaactccagaagggctttcatcacccgcatccttggcagaagttttacgttctaccagacaaatgattgatcaacaagccggcgaatgcctacttcaactatcagggcagctggagaatcaagcaaatgtaacggatcccttgttgcggtcaagcattcagtctagggctttgagaactggagttttgttttataaccttggtgcctttttgcttgagcttggtcgcacaaccatgacactgcgtttgggtcaaacatcgtctgaagctgtagttaatggtgggcctgcagtttttatatccccaaatggtcctaaccatatcatggttcagccccttccttttcaacctggggcaagctttggtgctgtccctgtgggagctgcacagtctaactcaagttaggtagtggacttgttcaagctttttcccaagcgtata

SEQ ID NO: 14124 - DNA, 669 bp, Glycine max
tggaggtacagctcaagcctttaatggaccaactcagtcgggtaaaagacttgcctgtccctgaatttggcagtcttcaagcatgggaagctagagctagtgctgctgtccgtgcagctaatggagatatcaatgctggtgattctaaaatttcgcagccaggatataatggagtgccttacagtggagacactaaggttgtagttgacttcaatactgaaggcaaaggagagggtgttaagtctgaaactgacagtacatctttaaaggttttgcctccatggatgattacatcaggtatgaatcttacaaaggaacaacgtggagaggtgaagcaagaaacaaagatggatgggacttcaacttccacagcagcacagtacacagatgacaagaagtcaacaattggacatgacaacaatcaaaatatacaggatgagtatattaaggcttattatgctgctttacttaaacaacaacacgaattggaagaagctgcaaaaaaacaattgccaaatacacttgctgctgctgatccttctagcagtacttccattcgccaggttggcatgaaatcaaaacgtgaggacgacgatgatggtactgaatgggaggaagctccaattgcaggcaatggaaatggaggttacacggttgatttgaatgttg

SEQ ID NO: 14125 - DNA, 445 bp, Glycine max
cccacgcgttcgctcacgcgttcgcccactcgtccggcttggcttgcgataccataagagggactgcctattatacagtgagtgagtgagtgaccctttgatttgaagaagatgggagatatgggtcagaaggcccaagaagctaaggagaacacgaaaggggcggcccattctgcaaaccagaaagcccaagaaaagagtggtcaaactaaagaaaaggcctctgagataggccagtccaccaaggaagcggcccatggtgctactgaggctgtgaagacaaagactactactacccaacccagcatcgcatagaatacaatactagttaatttcttcaatatatagtttaaacactctatgttgttcaataagttgtggcttcgctcttatgtgcccaaaagagagcgtggaatgtactctactgtagagtttctattatcta

SEQ ID NO: 14126 - DNA, 427 bp, Glycine max
caattctcaatcttatgaagaacaacaaaatagagggtaattttccaccttcttcgctacagaccataccataagggccccctttcaacgcatgctttccctcccaaattcttcacctttctcccctctttcccttcatttttctattttcttacatgttgttgcatccgtgccaaaaggggtttgttcctgcacaattaaattcaaccccttaggctataaaaaaaaaagatttttcattttcatttctttggaaggtttcaataataagaagcccttgattctagaagaaaaacattgcctccatgtccacgattccaattcacagacctgaattttgtaccttattcttcaatgggtcttcaagcccttataaatgccccagaattactggctcatggatcattgccatggaattcaaattttc

SEQ ID NO: 14127 - DNA, 594 bp, Glycine max
cccacgcgtccgctctgtctctgtttttgttttcgcatacataaaggagtcctgcttcggacacacgaacaacaacaacgtaggttttgttagttccgtggataacaacaatggagccagtgttggacaaactcaacgcgtttgcgaaatccggccaggattttttcgacggacttttccgtcgccgcaatccggtatttgctatctctctctttctagcgtcttggggtttatgtgagttcttcagcctttttcttttactcgtaaatttcaggttgaaatccttaaacggttgcagagagaagcgttctctgatctcatgaaactgagagagcgtcaagataaggttgagcgggtgctttctttctaccagtcctcgaaagtgggtccctttcaagagaccaccactcacgtgagaggacaagtggatttcttaggtgctttgttggtgctgggtaacttagatgctgtagataagttgggaatcagaacaggggttgattcgaggttcatttttgaaacaaccatgggggacaaggctaccggtgctgctgagtttgtggccagtcattgaaggagggaggaacattgtga

SEQ ID NO: 14128 - DNA, 299 bp, Glycine max
cataaaggagtcctgcttcgtacacacgaacaacaacaacgtaggttttgttagttccgtggataacaacaatggagccagtgttggacaaactcaacgcgtttgcgaaatccggccaggattttttcgacggacttttccgtcgccgcaatccggttgaaatccttaaacggttgcagagagaagcgtctctgatctcatgaaactgagagagcgtcaagataaggttgagcgggtgctttctttctaccagtcctcgaaagtgggtccctttcaagagaccaccactcacgtgagag

SEQ ID NO: 14129 - DNA, 333 bp, Glycine max
cccacgcgtacgcaacaagttccctcaaaacaatgcatcagttcttctctgctgtcttccgcttgctcctccttacactgggccgcaacgctcggacagcacgacaagcgaacaacacgggcttcacgtgcaacttcacacgcacgtgcacgtgctacgccttctaccgggccaccgcccccaacttcaccgacctggcctccatcggcgacctcttctcggggagccgcctcatgatatcaaccccatccaacatctcctcttcttccctcaacacccctttactcccaaatacacccctcttggtccccttaacctgctcctgcaaccccg

SEQ ID NO: 14130 - DNA, 421 bp, Glycine max
  unsure (1)..(421): unsure at all n locations
cccacgcgttcggtgaatgtatacaaccttatatcatcagtataacttccatggaagcgagtcatgtgcttgaagcagtggtagatgcatgagggtcacatgttattgaggcttttctatgttcgggagcttctgggaaacagaagcgcagattggttacaaaactacaagggcattttggagaggttgctctcacctcatctggtgcttttaccattgaaaagtgcttcactgccagtaatctgtcactaagagaggctatagtgtctgagatgttggctgtgcgaagtgatctttccaaggcatagcagggctcttacctattgaggagactagatattgacggatatgctgcgaatcctgatcattggaggtcaaaacaagcattcaaagaatctacttatanagattttataccatg

SEQ ID NO: 14131 - DNA, 395 bp, Glycine max
cccacgcgtccgcccacgcgtccgcttcattataaagctgcagatagaagttttaatttggaaaagttgccactacttcttacatggaaattggattcaccttagcacctgctgtttagttttaacattcctttaggaacttccttccagccttagtacagaataattgccagttgcataggctaaatcagcattgcttgctcgaacgtcagtcagattcaacagataatataatgcagactcaggaatattttctcccggataagatggtacttcctttggcagatgaggccattgatcctcatatgccgtgctccacttgcttctgcctttgatgcatatttacctccaggtgtgaggcagataacacccttcgaaagatttaatgtgcaacc

SEQ ID NO: 14132 - DNA, 645 bp, Glycine max
ccaccacgcagcacttgatggaaagtcttcaactttgttcatgaaatcgtgggcgcatatttgttcttacctcaatacctcaccggaagaaccgttgctgttttcactaccgaagcatctaacaccttcgtttgatagatctgtcataagagaccctttggggatcggtgagatttacgcgaagtcgtggacgagcttcggtggagccaccaatgaccgaagcttgaacgtgtgggataccctcggtggaaatcaaacagatttggttaaaggattgtttgagttgacaccgttggatatcaagaagctgaagaagttagcggagtccaagtttgttgtcggagacaacaagaagaatgttagggtgacatcatttacggtcacgtgcgcttaggtgttgtgatgcgcggtgaaagctgagcaacccaactgcgaaagagtgccttatgtattcaacgtggactgtatggcgcgtttggaccctaccaattccggaaacgtacttcgggaactgcgtcatggctttgttggcttcggccaagcgagaagagcttttgctggaagaagcgtttctcaaaagcgttatacggataagccaggagttgaactggttagacggtgacgtgtcgaacggctcggacaaat

SEQ ID NO: 14133 - DNA, 548 bp, Glycine max
ggctttgtttatcacacaagataaggcctaatgtgttaggataactaatcttggggttgggagtgcataacagagagcagaacactatctggtcatgtactctcatcaggtgatttctgtatgatacccctactataacccttgtacacctcttctgctttaggactgttgccttattttgttacccgtaagcttacatccctctttagagaccatagttgtcactatcatcaatcttggaatactttttattgagaacataccatctctaacttctgtgatgctttctacgcttctgatggatttattcttaatcttatacaaatttcaatggatctgcatatttttccaaaaaaaaataaataggtgctagttttaggctaactaagaccatcatctttaaattatccagtgaacacccgcaagacccaactgtttgatagtgtcttgctaaacagtctagtaatgctgatttcttttgatcccatgagaaaaatattactctttcctttattttcctcttttttatgatttcttaatccatatct

SEQ ID NO: 14134 - DNA, 817 bp, Glycine max
gcggccacagaggcgagcgcggcaacagagtagagaagagtgggcaagaatggcgacggagatggaagaactcgtctcctttctttcttccacgtcgcctcagatcacaaaagccgccgttgacatagtccgcggcttaaccggctccatggagggcttgcagtccctggcaaattactcaaacgccctcttacccgctttgtctcgcctcttaacgttacccaaggaggtttcggaggctgctgcggaggcgctggtgaacctgtcgcagaattcgagcctcgcggaagcgatggttggaattggtctggtcaaaacgacgatggatgttctgtacaagcccgagtgtagcattgctcgcttgcttgtcatgctgttggtcaacctcactcaactcgaagctggtgctgcttccttgcttcagactgaagatgagaaggtgcatggtttatatgttatgaagcttgtgagatcattttgtagaacctcccatgagagtaatgatgatgcttttgaacatgttggttcaatacttgttaacatctcaaaacagcggaaagggagggagcttctacttgaccctaaacggggtctcttaaagcagataatcagacagtttgattccaacagttcattgagaaagaaaggggtctctggaactattcgcaattgttgttttgaagctgagaatcagctacaaaatttgcttttggtatcagagtttctctggcctgcattacttcttcctgtagctagcaacaagatctacagggagcaagacagattgaaaatgccacttgaacttgggactgcactc

SEQ ID NO: 14135 - DNA, 446 bp, Glycine max
attaaaagagaaagagagagaaaaattgtcttcttgaaacaaaagttcaaaattttcctgtctggcattttctctttaattcaactttcaaatttttatcttttctcttattttctttccaccttaacaaatggatcctttattacttccctcaattttcttttaccataccaaaacatacgattaggttctttcaatactattctaaatagacgtaagaaactgcatattgtaaaagaagaaaaaagggaaattgagaattgagaattgagaagctaacacgtggaagagatgagggagagagcttcggatcggcgccaacaagactggacccagaaatcggagacggagaaggatttgagagcgtcagaaacagagggaagccactctctgatgaagtttatgtcggtgaagtagaaatcgtcggcctcgtcctccacgtcttc

SEQ ID NO: 14136 - DNA, 1090 bp, Glycine max
gtgaggtccacgtagtagtaacggcaaagaaaccaaactccacgcctcctcctttgaaagtaatcaatccatcatcgatcgatgccgttgcaacacccgtcactccaaagccgcgtgtcgttctagagcgaaacggcagcgtttcgagcaggtgattttattgcagtgcctcaactcgattagatcaactcacctggatgctgggtgggaacagaagagaaaaaccgaaatagaaacataaaaagtagctgccaatttcacgttctcattctccgaattaaaacctcattcctcaatccgcaagtttctcgtgacccttctcatcatcatcctcctcctcgtcgtcgtcttcgtgccctaatcggttctcacgttgcgggtgcagatgattgatcgattgattgggctataaaacgctgccaccgaccatgatcaaccattcataatccaaaaagaaaaaaaaattcttgttgtgtggtgggtttttttttttttggattgttttgttttttgcatttcccgatgacgtattacgagactgatggtggtggtcggagagaagaggtcgtgccggacgttaccctcacaatccaatccgatgatggcaatggggactatgtgaaactgagggccaacgccgacgacggttctcctccgggtgcggcggcggagctttctccgccgacgctaagagccgccgtgtggtattgggtgaaattggtggtgttgtttctattcctggggtttttggctgtggttgtgctcgtctgggtcggaccctatttcatagacaaggagatttttccgattataaattgggagacagagactttcagtactccagtgttaactgttttggtgtttgcatctgtggcaatattcccaaccctacttttgccatctacaccttccatgtgggtggctggaatgacatttggttatggctttgggttcttgctaattatatctgcagcagctattggtgtatcactcccttttgtcatcggcaaactcttccaccatatgattggaggctggctggagaagtatccgaaaaaggcttctattctaagatctgctggtggaggga

SEQ ID NO: 14137 - DNA, 425 bp, Glycine max
gagcaaccaaacgcctcgcctcctcctttgaaagcaatccatcgatcgatgccgttgcaacacccgtcactccaaagccgcgtgtcgttgtagagcgaaacggcgccgttttgagcaagtgggttttattgctgtgcctcctcagctcgattagatcaactcacctgggtgctgcgtgtgaagaaaagaaaagagagaaaaaccgaaacagaaacataaaaagtagctgccaatttcacgttctcattcttccaaattgaaacctcattcctcaatccacgagtttctcgtgacccttctctcatcatcgtcatcttcgtgccctaatcgattatctcgtggcgggtgctgatgattgattgattgggctataaaacgctgccaccgaccatgatcaaccattcataaacaaagagagaaaaaaa

SEQ ID NO: 14138 - DNA, 506 bp, Glycine max
gcaggaactatggtgacttatggtggaatgtctaaaaaacctgtctctgtgtcaacatcgtccttcagtatttaaggatatttccttgaggggattttggctgcagaagtggttgagcacagataaagctgaagagagcagaggaatgatagacagacttttgagtcttgtacaagaaggaaagttaaaatacaagatggatttggctccatttgaggatttcaacacagcattggataaagctctgggaaaacttgggagccaacctaagcaagtgatcaaattctagacgtgttggtgttgtttatacaattttctgttagataaaaaattgttctggaatttccaagaaaaagcaatctgggaaggaaaatgacttttcagagggatctatagatttgtagtgcaagatataagaattagatttaattttgttatgctgtcaacgtaaagatttttacgctgttaattaataaaaactcgtgtgcccctattactgagcattt

SEQ ID NO: 14139 - DNA, 486 bp, Glycine max
tgttctagtaagagttgaagtagccgacaatagattcagagattccattttgaaagaggggggtgatatccaaaatcgtctgaaatcagttaaaaataaatgtgaagaggctggttgttctcttttaaactcatcaaaacatgacgaggaagatttttgggaggagggtaatgttgtatctatggaaatctcatctagtgcaaccaacaataaaaataaacatcttgacgtggcatcaacttcccataaaatgagtaatgataatcttggtttgcacaataaagagtctaatgattctggtacggacaccctgcttcatcgaggacgtgaagttgagccaaactctccaaggagtaaacttcaagccgaagctcctgtggtacgatggagttcttacctggataactggggttcaaacagggtttttatggctaaccagcggggtttggagcttgaaagtcactggggtagggtggacaatgatgc

SEQ ID NO: 14140 - DNA, 562 bp, Glycine max
  unsure (1)..(562): unsure at all n locations
cccacgcgtccgcccacgcgtccgcaaaactcgctcgtggattgccccgttacgaaccaggctgtgacgtggttagcgtctcaggtttcgattctttacggtgcggctaacggaaaggcttttgctcttaatttcgcgaaaaaatgcattctggttggtgcttcggttctgttgctgtttcctttaggggacaatgctgcttcaaagcaagagtcccaaaatttaggtaccgagagtggagaccccaaagaagccaaacctggtgctcagtgtggagaaaagaaaaattggataccgaatagaaagagttctgtgtgcccaagttgcagcggcggttgcggcactgcacgcacgatctctgcttgagcacaaaatttaggggttttgggtttctcagcagccgcgtgactatcagctggttgctgagtattcttatttgtctgaaaaagcaaatgaagagcggacaaagcgtnctgattatagacctctaattgatcatgatagcattcatcttccgcaatcatccaaccaggaaacatcaagagaaaagacacgagaggag

SEQ ID NO: 14141 - DNA, 1512 bp, Glycine max
tgcaattcttccttcagctcttgtttagtccaaaaccgctcttcttcccttccttccacagaccacagtattagcctcaacacacgctctatctattataaaatccaccctcttcttcccttgtctgcaacaacaataacaatcttcatcatgcacaagagctcttcagattccacgttgggcccgggtggcctggacctctcccaggccttcttcaggcccataaacaacgccgcccctccctccccgaccaagcgccacaacaagatctccgtcatcggcgccggcaacgtgggaatggccatcgcgcagaccatcctcactcaggacctcaccgacgagctcgtcctcgtcgacaccaactccgacaagctccgcggcgagatgctcgacctccagcacgccgccgccttcctcccccgcaccaagatccacgcctccgccgactcctccgtcaccgccggctccgacctctgcatcgtcaccgccggcgcccgccagatctccggcgagtcacgcctcaacctcctccagaggaacctctccctcttccgcgccattattccccctctcgtccgttactcccccgacacaactctcctcatcgtttccaaccccgtcgacgtcctcacctacgtcgcgtggaagctctccggcttcccctccaaccgcgtcatcggctccggcaccaacttggactcttcccgcttccgtttcctcatcgccgatcaccttgacgtcaacgcccaggacgtacaggcatatatagtaggggagcatggggatagttcggtggcgttatggtctagcattagcattgggggtgttccggttctgagctttttggagaatcaacagattgtgtatgagaaagagacgttggagaacatacacaagtcagtgatagacagtgcgtatgaagtgatcaagctgaaagggtacacttcatgggccattgggtactctgtggctaacctggcccggtcctttatcaggaaccagaggaagattcaccctgtgtctgttctggctaaaggcttttatgggatcgatggagaagtgttcctgagtttgcctgcaatgattggtagaggagggatactgggtgtgaccaatgtgcacttgaatgaagaggagacacagaggcttagagattcggccaagaccattctcgaagtacagactcagttgggtatttgaattttctgtgatgggtactgaccttttttttttcctttaattttcttttgttcttccccccagcatgatgtggtttggcctaaattattagtagtacttgctcctgttagtgttagttcctgccctcttcttgcagtgcaagtgtttttgttgcgtcaagtgctggctggatctcgtgagatgtgttttgtttcctgtatggttttaattagccaagtaaaatttcatatttctgtagttgccgtgttttgtgcctctattcagtcaattacggaaaaagatcttcatttctttttctttccatttctatga

SEQ ID NO: 14142 - DNA, 775 bp, Glycine max
ccctctcgtccggtcctcacctacgtcgcgtggaagctctccggcttcccctccaaccgcgtcatcggctccggcaccaacttggactcttcccgcttccgtttcctcatcgccgatcaccttgacgtcaacgcccaggacgtacaggtcaatcaatgtcacttcccctttttccttttctttaaattataaaatgtggactaatatattaaattagtattttagtattaaaattaaaaattctatgggattgatacaaattgtttagtgcatgtttgcttattatgtttgaggcaaaaaaaaaaattcttccaactatcaaaatcttgattttgcattcattttgtttttatattggaatgcgtattgtagtattttcaacttcaatctaaacatgcaattaagcttaagagtgctatatttttagcattattgcctcacttgttaattatgaaattcttaattcaaatcatgaaccaggaattctagcctaattagttcaaaaatgcgagtgaattattataaaattttgtatcttcaaattagggattaatattagtattggtattcaaattatgaaattacgatagacaagtaggatctgaattaattaattggtacgtgggtatgggttcttcttacttaatcagtcttaatttcattgctggtccaacattatggtttgaacagaattttctcctgtcaaatatgtatatgtttgagaaaccgttaggggtggtcgaaacggcgtttcccaatggatcaagaacctatc

SEQ ID NO: 14143 - DNA, 347 bp, Glycine max
gatggagaagtgttcctgagtttgcctgcacttgttggtagaggaggggttctgagtgtgaccaatgtgcacttgaatgaagaggagacacagaggcttaaggactctgccaagaccatccacgaggtgcagactcaattgggtatttgaattttctgtgatggtcacgtggatatccggttactgcttttttgtccttaagttttcttttgttcttctccccatgatgatatggtttgacctaaattattagtacttgctgctgttagtgttagtccctgcccccttctggcagtgcaagtgtttttgtgcgtcaaatagaaaaaaataaaggggggggtgtaaaa

SEQ ID NO: 14144 - DNA, 673 bp, Glycine max
ggctctggctgcagtatgaaactcgtacagatgacattacagtcatcattgtgcatgtagatggactaactgaatctgctgttggtcagtcagcaagttatggtgatgttttgcgaaaccctgtgcctcaagttgtagaggtgacaggttcagaatccccttccacctttggttggagcgctagaaaccatcgtgtaaggcatgacttgtcaagggcacgccttcgagcacttgaaaattccctagaaaatggtcaatcctgggttcctccatcttcagcccataggaagacatgggaagaagaagcacacatagagcaggcgttgcatgatcattttctcttccgaaaacttactgattctcagtgccatggtttattggattgcatgcaaagagtggaggtccaacctggggatattatagtcaaacagggtggtgaaggtgactgtttttatgttgttggtagtggagaatttgaggtcttggcgactcaggaagaaaaagatggggaggtacctagggttttgcagcgctacacagctgaaaaactttcatgctttggagaacttgctctaatgtataataaacccctccaggcttctgtacgtgctgtaacaaaaggaactctttgggctttaaaacgagaagattttcgagggattttaatgtcaga

SEQ ID NO: 14145 - DNA, 1214 bp, Glycine max
gaaaatttgcaagaaccattcacattcttccagaatcatcaaagccatcaacgggcttgacttggcaactagctggaagatgaagcaagcaactcttttcttcttctcactcttcctactcctttcctccaccaccatggccatttcaccagcacctgcagcagcaccaaaagccacagcaaaaactcctcctaccccaaaggcaacagcaccatcaccaaaaccattagttcccacaatacctcagtctccagactctcctgactcggtccccgacgacatcaccagaatcctgaaaaaggccaaaatgttctcagtcctaatccgcctcctcaaaaccaccgaaatcatgaacaacatcaactcacagctcataacagccaagagtggcggcataaccatccttgcaccagatgattctgccttttccaacctcaaagcaggcttcctcaactccctaaacgaaggccagaaaatcgaacttgtgcagttccacatattgcccgagtttgtgtccagctcaaactttgattctctaagcaaccctgtgcagacagtggccggtaaagatcccgcaaggcttccattgaacgtgaatgcattaggaaacagtgtcaacatttcaaccgggggtcgtcaatgccaccgttctcggggtagtatactcagataacaaacttgggatttatcacgtggacaaggtgcttcttcctctagatttctttataaccaataaggctccagcttcagctccatcaactcttgcaaagtctcccaaagctgctaaggataactcttctgatgacgatcaagaagaaacaaatcagcatcagaataaatctggggcagtgagtgtggttagcattggtggagcaacgttgatgtcgcttgtgatagctttggttgcaaccatgttgagttgatccatttggcagctgcactttcaattttatttgtcaaacacgccgttagtttctttcttttttccttttttgtttaaattttgctatctgtttctggtttcttgtgtgttggtgttatgagaaggacgtgaatacttcaatgattaatgattcagttgttaaaccaataatctttaaaaagacaaaattttaaatatataaaaaaaatgttataataaatttgattaaaatttttaacgttctatgctctactacagatatatgatatttattgcatttatctctaattat

SEQ ID NO: 14146 - DNA, 524 bp, Glycine max
gggtagtcaatgccaccattctcggagtagtctactcggataacaagcttggcatttatcatgtggacaaggttcttcttcctctagatttctttctaaccaataaggctccagctttggctccaacaactcttgcaaaggctcctaaagctgccaagcaaaactcttctgaggatgatcaagaagaaacagaccaaaatcacaataaatccggggcagtgagtttggttagccttggtggagcaatgttgatgtcgattgggatagctttggtcacagtggcaaccatgtggagttgatccatatggcagctgcattttgagttttctttgtcgttaatttctttttttctgctttttatttttgtttaaatttttgcatcttttgtggtttcttgtgtgttaatgttatgaaagggaagggaaagaatccttgaatggttaacgattatgctgttaaaccataattgtttgtttctaacattatggtttatatgaaaggctaggaatgatttcatctttgac

SEQ ID NO: 14147 - DNA, 814 bp, Glycine max
gggaggtggaaagaggaagaggcaaaagagagaaacagaagtttgcagaagaaaaggaaaataaaaatactaacaaaagagagaaaagaagatgcagtgagtcacagtcatagaatagaaacagaggcaccatttccgttttccaacaacctctaccctaacgccgttataacggttcgtgcttccgcgacgcgacgcttcaactgtgaaacggacgcgacgtagtttatataaagcgccgtccctttccgtttgtgcgttaatcaatcagcaagacgatgacctgtgccaaattattttccctcttttctctcagtttctaatttccgagaagaagtaagttactgattcttgctggaaattgaggtggcttttgacttttctattgtgattttctgttatcatgggatcagcttgttgtgttgctgcaaaggatcctaatcttcctaacagaactggaggtgaaagtttgcatagagatgttgtgtgttcaccatcggggagctttcaatgggatagccgggggcgttttgctggtgaaattgagaatccttcttatcacacctcccatgtggacagtagaaatgtcagcatggagctaaaaggttcgttaagttctgaaagaggtaatttatcagatggtggaagcattgttgagaattctgtaacacctacttttctgaagtcccctggtgatgaggcattggttgcaaatctgatgacccccacttctgatctgtccatgtcaagcaatttttctacagtggtgaagaacccagcagaatcttcaataccaaatctttctttttcaata

SEQ ID NO: 14148 - DNA, 643 bp, Glycine max
cgacgtcctcgcttcgccgcatggagatgagacgctcaaggaactcgtgctggacacgctcatggagttcgtaaaggtctccaatggcggcgccttccactcttctctgtaccacaagcttctttgtagtattgtttactcttctagcccccctacgtttttggtggatttactggcgtcgaagtatgtcaagtatatcgatgtccgctattttacgtttataagtctaaaaaagctcgctagtactttggagggaaaagatgtctcagatgataaaattgcaagtgctgatggctccagtgaaagtcaattgagctcaaatatggaatgtgtcatccacaacatgtattacactatatcacatgttcccccacataaaggctcggataatacatctgatttggaaatgtggagcagctcagaaagtgaccataagcaactctctggagataagggtgctgatgataagccgcagaagtcccagaagcctaacaaaaatgtattgtcagcagccaaaattgcgaagaagatgaagttaaaatttactaaagcatggattgcatatcttagattgcctcttccacatgatgtttacaaagaggttcttgtttgtcttcaccaagcagttattcctcatctatct

SEQ ID NO: 14149 - DNA, 673 bp, Glycine max
  unsure (1)..(673): unsure at all n locations
gcatggggcacttcaatgatattgacttatgagtatctgaaacgtgtatgctcaaaaggtgaatagatgcaattagtctgaaagcttgtatttaactgatcgatttaccacgattaggatgatgatgttgggtttgcacctttagcattggagttgctgttcaacatttatcactctgactcaagggttaaacttttagcagtacagctatgctgacagattatatgaaaacactcggctggatatgaatatggcagacttccttctagaaaataaattgcatcattatttttttataattctattggatttggcgcattcttttgtagcattgctatggatactgtattatcatgtaagggaagggaatagattgctattaaatgcattgtaaagagatgtgaagaataaatttgaaattctaaatcttatctcttttgttccaaaaagggaaagttattgcnnaaaaaaaaaaaaaaaaaaaaaaaaaaaaaaaaaaaaaaaaaaaaaaaaaaaaagaaaaaaaaaaaaaaaaaaaaaaaaaaaaaaagggggcggccgttttaaaggatccaagtttacgtccccgtgcatgcaacgtaatagtttttttatagggccccctaaattaaattcactggccggcgtttaacaacgtcgggactggaaaaac

SEQ ID NO: 14150 - DNA, 870 bp, Glycine max
atcactttgtcccttttcatacattcacaattcatttccacaccttaattcaaagcaaggcacccggccatatttaaatttttgttttggttagtcgtcatgaagagagaaagagaggttgatagcttaaccatggcaaattgtttgatgttgctttctcgtggaggtgatcaatttgaggccacctactcatcaagcacttcaatgaacaaccgtgtctttgagtgcaaaacatgtaataggcaattcccttcatttcaggcacttggtggccacagggctagtcataaaaagcctaggttgatggctggagataatattgaaggccaattgcttcatgattcacccccaaagcctaagactcatgagtgttccatttgtgggttggagtttgctatagggcaagccttgggaggccacatgaggaggcatagagctgcgaatttgaatggaaacaacgtgtacaattctgctacggctacgagtagtagtagtggcggtagtagttttgattcatcacccaagaagaaagctgacaacaagagagttttggttttggatttgaatctgacaccctttgagaatgatttggagtttttgaagattggaaagccaactacttttgttgattatttgtattgattgatctgttgagtgtactgttaattaaacttagggaggtatagtttgtgtatcatagataggtgaatgttttgttcttttttaatctaccgtctataatatttgtttatcattctgtctgaaaaattgctcacttcttgggcaaaattagaacctcatcgtgatattctgagtcactcggaaacaatacttacaacgtaacacaaaccaagccattttcaatccgct

SEQ ID NO: 14151 - DNA, 529 bp, Glycine max
  unsure (1)..(529): unsure at all n locations
atcctgtagcatggagtttgtatggattggtggcttcccaatatgcagatataaagcaaagcatggaatccagcgacgggagaacgacagtggaaggctttgtaagaagctactttggtttcaagcatgattttctgggagtggttgcagctgtgattgttgcattcccagtagtctttgcattggtctttgccatatcagtgaagatgttcaatttccaacggcgttaagatcgaacgtgttcaagtagtttgtacagggtgtttcatgtaatgtaacatgttgagagaagatatccacatagcttttttttattcttttatttaccaattaaattaaacttatcatagtcgaaatccactaggatctgtcaacagtagtggagaaatttagttagttttcatgagatcatagatttaaatctcattggcatatcactgtaaaaaaaagtgtatcatatttgatgatattaatatatgtaacacttgatatagttagtannnnnnnnnnnnnnnnnnnnnnnnnnnnn

SEQ ID NO: 14152 - DNA, 1133 bp, Glycine max
ctcgagcgatcaacaagcagcacaataaatgccattgagcaggtccgttcaagacgaccaatgagtaggatggaggttccatctgctatttcttcgaaagatgaacattgtgacatgaggagaagtgcggcaatatttccccatcatcatcatcaatgataagctttgaattgtcaaatggtgatccctttgggtcccatgttccagccacattggaagatgatcagtatgtagaatatcaactagatgaccttgcaggttttccatctactgcagaggaggaagaaagaatgttcatggaagcagtgatggagtcactgaaggacctggaagtacgaaatccaaatgcagaacaaccaacaagtagtgttagttctgtgtatgtagatgctgtagagccgtctgataaagatgcttcttcaggagagatttcgagaccggtggagacagaatcttcctcactcaaacacaccacagagtcaaaattcaaaaccacttcctcgacatcagaagaatttgagccattgaacggtgagtcaaattccatttcagtgaaacattcccaaaatgtggtgtcggagccaagtccagtaccaagtgtttcattagaaggaccagcacatctgcagctgcagccaccaccatcggcacctactgacacatcatcagtaactgagtccagcaatacaagtggttctgctagtagcgatagttctgctagtttacaaagttcatcagagactgatgtatcacataacacgaaagccacagtaactgttgttaggaatcccgcaggccatgtcatggatggcttaatgcgtcgatgggatttcaattttttcaagaacaaatagtcacaaccgatgatcagatgagagattctcatgtatacattgtttttgtaactacaagaaaacaaaaatcatagtttgtaccaaagaaaataggttgctcgtgtgtaaattttgtatgtttagattctcaactaacaaatcatccaatattctttgactgtaagtgagaattgtcatattttgttgtttttatgaacgatgtctacaccattgtacgcatcatttgaacaaaggccctcgtctttcgttccctttatttgccgaagatcaagcttatat

SEQ ID NO: 14153 - DNA, 171 bp, Glycine max
  unsure (1)..(171): unsure at all n locations
atttcggccagcatcgaattggatttatcaaactttcatagttactgatacagcaaatgccaaggtttgtactttttacatgaaatggcttgaatgagactttgatgatcgaattacttagtaaaacagttctttgtaggtgtnaaaaaaaaaaaaagaaataataaaaat

SEQ ID NO: 14154 - DNA, 500 bp, Glycine max
ttgaatccccaaaccgccatttcctttgggtttatggagtgagcgtggaagaggaaagagcaagcagcaacagctcgtggcggttccgattatttattaagatcaatgttgcatgcagtatctgcccctagcttttgtttaagctatcccgggaaccttcattatcctccttcttcagttcaaaaaacatgtttttctgttcgttgttcggtttcacagacaaaaaatggagctaaagtggaatatactccttggctcattattggcttgggcaatcctggtaacaaataccatggcacaaggcacaatgtatttcttccgttcttgaatacacttcctatttgtattttgtactgaaccttaatcttattaatttcctctctattattacgttggatttgaaataattgatagcctttctcgagcataaaggattcatatgaacactatacattcaaaggttcttattggaatatgttctatagttgaattaccttttt

SEQ ID NO: 14155 - DNA, 409 bp, Glycine max
ccaaattccaatccttcaattcaataatttagtaaaaatgttgtcttctctgctgaacccttccttcaccaccacccttccaatccattcaattttcatccctaataaccgccgcgcctccaccgtagtatcatgcacctcctcacacctcaccaccaacaaccactcccatgtttcttcgccgccgaacatcaaggacgaggcccgccgccgccccgcggcggagaacgacttcacggcgaagtacgtccccttcaacgccggcttcgactcgccggaaacctactcgctcgacgaaatcgtgtaccgcagccgttccggcggactcctcgacgtgcagcatgacatggaggctttagggcgcttcgacggcgcgtactggcgcgcgctgttcgactcgcgcgtgggg

SEQ ID NO: 14156 - DNA, 880 bp, Glycine max
tcgtttcccatcctggatttggctgttggctctctggtgttgacatcaatacacagcagagttttgaggctttgaatcagcgtgcagtggctgtggttgtagatccaatacaaagtgttaaaggcaaagtggtgattgatgcttttcgattgatcaatccgcagacaatgatgcttggtcaagaaccaaggcagacaacatccaatctgggacatctgaataaaccatccattcaagcattgatccatgggttgaaccggcattactattccatagccattaattacaggaagaatgaacttgaggagaagatgttgcttaatcttcacaagaagaaatggactgatggtttgacacttcggcattttgatacacattccaaaactaatgaacagactgtacaggaaatgctgaacttagctgtcaaatataacaaggctgttcaagaggaagatgagctgcctccagagaagcttgcaatagcaaatgtgggaagacaagatgcaaagaaacatctcgaagagcatatctcaaatttgatgtcttccaacatcgttcaaactctcggaatgatgcttgatactgttgtcttctagagtcattattttggaccttctggtttctgtagctgtgctaaggagacaatttgagttattacaatcactgtttccttattcttctcaaactatatttgaagacactagacatatattatttggacgggctgaaaaggtcaagaaagtaaatctcagcacatagtttgtgtggtgtctccctcagtattactggatatcttttaatgttatttctggattttctcttctacaaaatttctatcacaacaaaatgtcagttatgttttaaaataccataagaaaac

SEQ ID NO: 14157 - DNA, 620 bp, Glycine max
cccacgcgtccgcccacagcagttttctgtttaatacgctccgtgcttttggaaatgattgccacccagatatatccggtgaaatatgcacacactttgctaattgtgagctgcgttcaatcgtcatcattgatagacgtatgattggatcaagtgaatcaactaccaactatcctggcaagattcctcgtggccccgatgttcccagtgaagctgctgactaaaaccattcagggattatccttaccaaataatagctcctctttgtgatcattggtcgtatattggaattttcattggtataatagggttatttcttaattgcatttacaggcaagtgttcaatattttgttttacccgaacaaactaatccgtaggagcagtttcaaaattcctttttagtggcttaaagtagattggtaacatatgtaggtgccaatttttaagatgatgaaaaggatgtcaacattgattataccaagtttttttaaaggctacttgcacattcatgtatgaacaattgacactggctttccattttatccaagtatattataagcatgtactttctatgtttgccaaattaatggtacagtggatttaatcaaaatcataaaaa

SEQ ID NO: 14158 - DNA, 959 bp, Glycine max
tggaaatgcaatagcctgtaaattccttttttatacccccaaaagcccaaaatggcgataacaaactgagcccaaaagcctaatcccagatgcagcactgcaggtgattgaaggcacaaagttcacagaagagagcgcgctgaatagtgtgcatcggttcagacttcagagcatatgaaatactgcaaattttccctcgtctgtgacgctaaggaaaaatcgacctagatttattttattggggaatagagggtacatatcccttccactctgtcgaaaacacatctccccaaatttgaaaagcatgatgcccatcacatgtgaaagctcaattggttcccctcttctcctgtcacgagtatgtcaggctaagacggacccaacaagagcccttctgttagggaataaattctcaacaatggcagtaactgccttgccgaagacaagttgtatccaatgcacgattgtccgatccaaatttagccacaaaagtggtggtcccatggagaaaaaagggaagaagacaacaggaaagaaagagcaccacttgtggaaaagtagagattctgctcagtctggccaaaaggcacttgctcttgttagaactattatggaggtgcagatgaatgtggagaagctggtaatatcgggtttataaactccctaatgagaaagaggctgtttatggggcgttagacaaatggacagcttgggaaacagagttccctgtgattgcagtgtctaaggctttaaaaatcttaaggaaaaggggtcactgggttcgtgtaattcaagtagctaagtggatgttaagcaaaggtcaaggagcaacgatgggaacatatgacacccttcttctggcatttgatatggacaagagggtagacgaggcagaatcgttgtggaatatgatcatacatgcccacatgcgctctgtctcaaaaagattgttttctagg

SEQ ID NO: 14159 - DNA, 515 bp, Glycine max
tgctaataagattgcacaatcattgggttatgcaagcaccccttgatcctggtccctcctcgcacagctcaatgtgttacagccattcactttcaaatggcaattcctctacttctaagccttatcaggctgtgaagttggagctcccttcactccaatatccagaactcgatttaggtagctggcgctcatcccccccaccttctttgctcgactcagttgatgatttccttcagtctcctacaccaatcagtacactggagtcagattgttcttctccacacaatagtggcctgctggatgctttactttatcaggcaaagactatgagcagttcaaagaaccattgttctgacaagagttcaaattcttctactgcaacccctggtgacagagctgacagctctgctttgaatgtgtacgagacagaatgggaagattatgctgatcctgtatctccctttggtgcaacttcaatattgaatgagtgcactggtcttagagccaatatgaat

SEQ ID NO: 14160 - DNA, 854 bp, Glycine max
ggtccttctcctttggcccaaaacgttgtgttccgggatttgccgctccgtgatgtattatttgtttccgagagaaaagtgataggtgtgggatttgactgtaacccaatggtttttgccgcagatgaaaggggaatttggagttttgtaagatatttgggagaacgaaaagcagcatcttctggaccaagatattttaatcagttctctgaagcatttggaaagttttatggccaatcgaagcatggagtgagcaatgatacagttgaaacttcaagaactcgtggaactgttcacgaaaactgtataaagtatatatctcctttcatgacctccgtactttttccaaatgttattggttatgttacatatttctaaaatgctgagattttcaattatatggtagcggtttccattgttcggctcaatttattatgctcctacccacaacacaatggatggatattccattaacagtgggattcaggcaacttaaagttcatataaactgttaatggctggttgattttttggcttgtagttgtattatgcctcttggggatcatggcacattgctaaggcgtttcagcacatcaggattggatggaagaattgttgtatgggatttggaaaatgagcaagacctgttggaattataagctcatcttcgtggtaaagtgtctgaaactgattgtctcatgcagcattataccttgtaaattaatttggttatgagtgattgaagtgatctctaatcattataatcaaggcttgaaagtgtcagatatcagccccttgaatgtttataaactgtacctggatattaatgttaatgtattctctttctctaaaaa

SEQ ID NO: 14161 - DNA, 419 bp, Glycine max
cccacgcgttcgagaaagaacaagaaagaacaaaagtcaaaagttcaatttagggtaacaaaatggaaaatcaagcctcatcatcgatgcagttcctcatcctcgaacaagttcagttcttgaaggtgaacgacgattccctcttgcagtgggaactcgtcgacgtcgttgacgccgaagaggagatagatggctttggttcttcggattcttccgtttcttggttcgaatccgattcttctccctgcgatgccccaattgaagaaattcgacaccttcttcttcatcccgatgttggtttacaagatcgacatgatggtgttgatgaatcggagcaagattcgggtttggaaaatcatcatcactaccattatcaccatgatgatgatgatatgggcggtgatgataatgatgaggat

SEQ ID NO: 14162 - DNA, 357 bp, Glycine max
caccaacgcaactaagaaagaaaccaaaagaaaaacaagaacaagtcaatttttcaattttcaatggaaaaccaaacctcatcgatgcagtttctcatcctcgaacaagttcagttcttgaaggtgaacgacgattccctcttgcagtgggaactcgtcgacgttgttgacgccgaagaggagatcgatgggttcggttcttcatcggattcttcttccgtttcttggttcgaatccgattcttctcccatcgatgcctcaattgaagaaattcgccaacttcttcttcatcccgatgtgggtgtacaagatcctcgggaatcggaacactgaattgttttagaaaatcaccactac

SEQ ID NO: 14163 - DNA, 659 bp, Glycine max
ttcctgcgaaatctgaatgctaaacggtgttttgcgcctcttcttccattgcgtcgtgcgctgtcgtcgccgctgcccctctccaccacttccctttcactgttccacgacttcggtgaggatgaagaaatttgttcctgtactttctagagacaaagctacttctttagtaaatctagaagcatcagaaactcaacatccaagtgagagtattaaagttgttgattatgaattgttggaaacatatccaggaattaggcctccaatttcaagctaccatcctgacatccaaaatgagatgtgccggaagtgatggtgcgacatcagcttcagaattatgttagaaatgttcgatgtgattccaaatttgcaaaattaaaagtgcaaagcttgtggaaacaaaaaagtgcaacacatttgatatagtttataggcttctgaagttggctttagtcttgccggtagcagctgcaagcgtggaatatgttttttcagctatgaagtttgtgaagagtagctatgtaacaaaataaatgattaatggttaaatgattctcttgtaacctttatagaaagagatgttctttgaacaatcaacaatgatgttattttagctcattttcaaaaaatgggtaataaacgatttatattgtaaataa

SEQ ID NO: 14164 - DNA, 535 bp, Glycine max
actatcaagacattccacaactttggattgcccgttaggctttaattaagagaatgccatgtttatgttggtattgaataaccatgtaaatgccatggttatgttggtgttgaatagccatgtaactactattttgggatcgtttattcagccacgatgccttccatgtatgagaactttagccacttatccattaaggctttgcctggtaaaggtggaaatttacaacggtgtgttatggccttagaatccaatgtaagtggctcaaaatgtgggaagacggaatttgaagcctttgcctctgcttatatgatgatcattgctaaatccatgttgagtctcaaggctctcgaaatgttctagaaatttgtacacttaacacttgtgatatgcctctagtttaatgtggttctagtggtgaagtcaggccacagaccacacgagaatcttaatctctttttctcacattctcacattgtgattagatgatttatacagcaggtacaaattaataaaatgaaattgtcatttattc

SEQ ID NO: 14165 - DNA, 1137 bp, Glycine max
aatttttcatatcaggtctagcaggggatgacataatactcaactgtgttttggaagcactatacaggcgtattttgcaagcccacaaagatcagaaagattttagagttataattgtgatgcccctcttgcctggtttccagggtggtctggatgatggtggtgctgctactgtaagagccttaacacactggcagtatcgaacaatttctagagaaaatcactccatattagacaatcttgaagctatacttggtcctaagacacaagattatatttctttctatggtctacgatctcatggcagactttatgaaaatggccctgtggctacaagtcaggtatatgtgcacagtaaattgatgataattgatgaccgtatagcttttattggatcatctaatataaatgaccgtagtttgcttggattaagagactctgagattggagtgcttatagaagacaaagaatatgttgactcgttgatgaatggaaaaccatggaaggctgggaaattttcctacagcctccgctgctccctatggtctgagcaccttggtcttcatgccggagagatcagtaaaatcagtgatccggtggcagatacaacctacaaggacttgtggtcagcaactgcaaaggaaaatactaggatataccatgaggtctttgcttgcattcccaacaatcagatacactcaagagctgcacttcggcaaagcatggttcactggaaagaaaaacttggtcataccaccatagatatgggaatagccccagataagttggtctgtcatgagaatggagaaatcaaaataatagaccctatagataggttgaagtctgtgaagggacatcttgtttcctttcccttggagttcatgcgtgaggaagatcttagaccagctgttattgagagcgagttttatgtcgctcctcaagtatatcattaagtaaatatgttgctttgcgggcactctttagaagggaaatgtggaagataagcttggagacaaaggattgaacacaatggaaaagaaagctgaaggagaaaggatacacaatatggttataaattagttatggctcttagctacagtttagaaaggaagtggttatgcagaatccttcttgctt

SEQ ID NO: 14166 - DNA, 547 bp, Glycine max
cccacgcgtccggttgctgaccacaagtccttgtaggttgtatctgcaaaggttagactttgtcttactggtttgtgcatttcctctttgatattgtgtgatttaagactttaagcattatttatcaacaacatcgtagccgatcaagatgttaaaaattgcaatcttcctttaggaccccatatttaataattgagctcaattttttccttgaacacataatggctgatataagatatttgaaatatataaggcagaataaaaaaaatatatttttcttaaacaagcatgatacagtcacatgttgactttattttttgatgaacacacgttatttgactatgtaatgatgtaaacttcgatacgtttgacaggaaaatactaggatataccatgaggtctttgcttgcattcccaacaatcagatacactcaagagctgcacttcggcaaagcatggttcactggaaaagaaaacttggtcataccaccatagatatgggaatagccccagataaagtggtctgtcatgagaatggagaaatcaa

SEQ ID NO: 14167 - DNA, 323 bp, Glycine max
agttggatctagttatgatttaggtatctcaatttgccgctcttccgctgcgccgcccccttatcgtcaccacaaaacctaagacactcaatagatcttaacttggtaaccactttctcacggcaagggctgtttgcactttgaaccgccgccgtcaaccgtctgccactgccagagttcatttggacaaaagacaatgggggagtagaggattctataaaccttgggagctgtcatctatacagggattatagtgctacttgcattattcatttacttagataacaagacacataggatggaacccagtagagagcaaagaa

SEQ ID NO: 14168 - DNA, 942 bp, Glycine max
  unsure (1)..(942): unsure at all n locations
ctcatccccccttcctcaaagccccgccnctcgncctcnctccacgtctgncnctccctcctctcctccctcgaccccaacggcgtcgttcgctgcgccgtctgcaaagaccaaattaccccccacgccgaagccaaacaattaccctgcaaacacttataccactccgattgcatcacgccgtggctcgaactccacgcctcgtgtccgctatgcaggtttcggttggaagaagaggaggaagaaggcggtgacggcgttatgacgaagatcaggagggagattattgccaggctgacggtgctgacggaagaggatttctacgggctgaggaccacgctcaaccacattgcctcgcgccacgcgctcatccaagagaacgagaatcgcggcgcccagattggggaaactcaaggtggcgattcggcttgctgatcatattggttcataaggtatatagtttattaaataatgttgaagttgtatcaccatagatcgtcttttcaagtgtaaatctgcaccgacgattatgctgcttttgttcttttccctccttttttgggaatctccaactagctaggtctagtgctatagctaaaaaatacaataaattgatggagtgcacgggtaatgtgcacttctctacccatcttccactctctctatgttggtccttgtaactggatttccttagccaaatttcttgtgtaaaacttagctttcttttatgttgtgtctgaattgcccaagtggatgatggatccttcccactgaatcatttcgttcccaaatttttttgctttggctttacagtatatgaatattttcagacaaagttgcgtagttacggtatgaaatattgagattgttgagggattgaatcattagagagatgatgtcaccatggaagagccttaaaatgcataatatattgtggtgtgt

SEQ ID NO: 14169 - DNA, 801 bp, Glycine max
  unsure (1)..(801): unsure at all n locations
aataaaactgtaagtaaggttttttcaaccgcactcaaagtatgtgtcttctaactttgaagtatgtcgaatgcatttgatgtagcaacttttaaccatttcctatttgctgcaggatagtcattactaataatgctttttgctctagcaactttaaccattttctattttgaaagagtctcaattgttgcttatgaactaatgttgctgttcggaaatgtgattgcaggtatatagtttattaaataatgttgaagttgtatcaccatagatcgtcttatcaagtgtaaatctgcaccgacgattatgctgcttttgttcttttccctccttttttgggaatctccaactagctagttgtagtgctatagccaaaaatacaataaatttgatggagtgcacgagtaatgtgcatttctcctccattttccactctatatatgttggtcacttggtcttggaactgtatttccttacccaaatttcccttccaatttaggcaataaaatcttgtgtaaaacttggctttcttttgtgctgtgtttgaattgtacaagtggatgatggatcctttccactgaatcattttgttcacaattttgttttttgttatggatttacagtagatgatattttttcccgccaatattgctgtagttatggtatgagattgtttagagattgaatcatttgagtgtggatgtcaactcccgaaaagccttaaaatgcatattttgctgtagtgccnaaaaaaaaaaaaaaaaaaaaaaaaccacgcggccgctctagaggatccnagct

SEQ ID NO: 14170 - DNA, 463 bp, Glycine max
cccacgcgtccggtcgaagggagatgtttttggaattaaaataagctggaactgcaatgcccccatttgcattccttgcaatcaaagatcattaaataaaaatgacaaccttgtctgcttcaaggttgttggtatggaaccttcagatgagccggttttccgtgtcaataacaccttaactgctcttgtgctggtagggagttctccatccgcactccctccagatttgttgattggtggacaagcagaaggacctgtgcctttgcaaggggacactgtgaacatcttggcttcaatacttacaccaactttttgtccgtcagtgctttcttccaagtttagagtttcagttctattgtatggcttggcagggtgtgggaaaaggactgttgttagatatgttgctcgtcaactgggcgtgcatgtggtggaatataactgtcatgatctaatggtgtctgat

SEQ ID NO: 14171 - DNA, 549 bp, Glycine max
  unsure (1)..(549): unsure at all n locations
gaaaagatgaataagatttttgcaatgtctgaagaagaaattatgtcagaccaagcagaggtcattatgaagaaatctactaacttttgttggccaagtattcaggacctgaatgcagctgcccacaaagaaaaatgtgggtggtgctttacttgcaaaggtgaaaatgaagacagggattgcttgtttaattctgtggtgaagcctatttgggaagtgcctaataatactttagttgggcttcaacccaggaagatccagaatggacgtcttagagatatcatatgtcttatcttctctcttgaggttcgattacgtgggcttttgttgggtccatggttgaatctgcatcaaactgatctttggcataaggatcttttgaaggcatctgattttcttcctgttaaacgattatggcttcttttagaatccaatttgcggcttcttgcactttcagcagatnggttaaagcatgtggattctgttgctacaatgggatctgctactcatattgtggtcagttcatcacgcacatcttcaaggcatggt

SEQ ID NO: 14172 - DNA, 544 bp, Glycine max
cgcacccatttattaccaacacttcaccatcatattcctctgcgtcactctcttctaaacaagtaaattctgtcttcctttttcttctttctttccacacaacagacgacatgagttctgctaccacagtactgtaggtagagaaacagaaaccaccttgtttcggaattctgttgcaaaattaagaagaaagaaacatactccattaatgggtggtgttagatggggtcgtccagagtcatcttcatccatgaaactcttgctgttcatggtgcctctcgtacttgttgctgggcttgtttttatattgggtcctaacccttctagttgggtttcttttgcaaacgcacctgtgttatatttggagggctctgttacttcctcttcctcaactagtagtggtgctgtgactgtgaccaatccttccgaggtgaagcagatagaacggttagtggtgatggtcgtgtagaatcgtggtggatagaaagttatctccgatgacactgacttcaatcactcttctacacctacatgttctgttcag

SEQ ID NO: 14173 - DNA, 467 bp, Glycine max
atcaacaccaactccaaacagttggaatcgacgaaacgcaaaggcatattgacattggcatggctacctcgctgtgtacacccagctacagagtcacactgaaactgtacggaacagattcccataagttaaacgcaaagccctcagttcgttataggcgtcgttttggcaccaccaccagaatatgctgcacctctaataattacaacgacaacaacatccaacgacgaccccaatccgaagctattcaagtttactcgcaaatcgagagattacttacagattctgttagacaatcacaggatggttggtggggttccccagactggagtgaagttgagggagcttggattctcaaaccgaaaagctctgaacccaattatgtagtgcattttatcggacgtatatttgttggagctgctcctcagcttacctaccggaggtttcttgagcgtctctcagaaaag

SEQ ID NO: 14174 - DNA, 433 bp, Glycine max
cagagaatacctgctgtgcctttgagatcatatggcggggtaacctcttcaaggatcgcaaaggcagagaatacctgctgtgcaatatgtttgcaggatattgaagtaggggaaattgcaagaagcttacctcgctgtcaccatacatttcacttgatatgtgtggacaaatggcttgtcaagaatgattcttgtcctgtctgcagacagaatgtataacttgttccttgggcaatttgagattatctttatgggcggatgtatatgttgtataattcgtttctttacatacaaactgagattaccattaagttttgtatagttgacattggcatcttgctctattctgcgatgtaatcgttaaatgatactatttgggatggaagccaatgcccaataacagatgttttgggagaatgagactaacgcgttc

SEQ ID NO: 14175 - DNA, 1162 bp, Glycine max
  unsure (1)..(1162): unsure at all n locations
atttggacttgtccttatccgagctcgccgcactcgacatgtgccagaagagagccatcttcaagccaatgacaactgaacaacgccaagatttgaagctaaggtgtggaggttcatggaaactggcgctgaggtacttgatggctggagaggcatgttgcaggagggagaagtctcaggctatagcaggtcctggtcacagcattgctgtgacatcaaaaggggttgtttattcatttggttccaacagttctggacaacttggacatggcaccactgacgaggaatggcgacctcgaccgataagaactttgcaaggcattcgaattatacaagctgccgctggggctgggaggacaatgttggtaagtgattctggtcaggtttatgcatttggggaagctgagtatgggagttcaaggttctaaaactgttgcagctccacagatagtggagtctttgaaaaacatatttgttgtccaagctgcaattggtaactttttcacagctgtgttatcaagagaaggcagggtttatacattttcttggggcagtgatgaaaaacttggtcatcacactgatcaaagtgatgtggaacctcatcccttgttaggtgctcttgaaaacataccagtggtgcaaattgctgctggatattgctatctactttgtctggcttgtcaacccagtggaatgtcggtgtattctgttgggtgtggcttggggggcaagcttggacatggctcgagaactgatgaagagtaccctcgtttgatcgaacagtttgggctgctgaacctncaacccatggttgttgcagctggtgcttggcatgctgctgtggtggngcgggatggccgtgtttgtacgtggngatggngccgatatggttgcttggggcatgggaatgaagaatgtgaatcagtacctaaggtggtggaagcattgagcaatgtcaaagctgttcatgttgcaacaggagattacacaacctttgtcgtgtctgatgatggtgatgtgtattcatttggctgtggagaatctgctagtcttgggcataatgctgctggaaatgatgagcagggcaacagacatgcaaatgtgttaagtccagagcttgtcacttcactgaagcagatcaatgaacgggtggtacagatta

SEQ ID NO: 14176 - DNA, 414 bp, Glycine max
gaagacgacagaaggggttgggtgtggcttggggggcaagcttggacatggttcaagaactgatgacgagtaccctctcgtttgatcgaacagttcggactgctgaatctccaacctatggtgcttggcatgctgttgtggtgggacgggatgactgtgtttgcacgtggggatgagggcgatatggttgcttggggcatgggagtgatgaatgtgactcagtacctaaggcggtggaagcattgagcaatgtcaaagctattcatgttgtagcaggagattacacaacctttgtagtgtttgatgatggtgatgtgtattcatttggttgtggacaatccgctagtcttgggcataatgctgttggaaatgatgagtaagtctggtttgcttcctgcctttttccatgttttg

SEQ ID NO: 14177 - DNA, 440 bp, Glycine max
  unsure (1)..(440): unsure at all n locations
ctgattggaactagaaagtagaagctgaaaagagaagaggttgcgaccaactttgcaatcgcacctcgaatcaatcgacactcagcggaaaccctagaaagtagaaactgaaataataataataataataataaaaataatagaatgcgaatttagagattttgcaaatggcgaacattcggtggcaatggcgaagaagcggtggccgataatgttggcggcattcttgtccgtctcaacagtgacggtgctcttaatgagatccaacaactccgattcctgcaacaccaaccattttactgttgcacaagataatcagattcgttcccctgtccaactcacaaatgcggcttccagtcccctaattntcatgaagtccaagctagttctcatggtttcgcacgagctttctctttcaagcgggcctttgctgctgatgg

SEQ ID NO: 14178 - DNA, 419 bp, Glycine max
gggggactagaaagtagaaacacaaagagaagacgagtcctcgagattcctaaaccaactttgcaatcgcacctcgaatcaatcgacactcagcggaaaccctagaaagtaataataataataataacaatagaatgcgaatttattagagattgcaaaaggtgggaagaggaatggcgaagcattcggtggcaatggcgaagaagcggtggctgataatgttggcggcattcctgtccgtctcaacagtgacggtgctcttaatgagatccaacaactccgattcctgcaacaccaaccattttactattgcacaagataataaccagattcgttcccctgtccaactcactaatgccgctttcagcccccttaatttcatgaagtccaagctaggtctcatgggttcgcacgagctt

SEQ ID NO: 14179 - DNA, 541 bp, Glycine max
aaaataatcacattccggccgttgcttgcagactatcccaaaccagggccaatgctcagaatataaagagcaaataacctctgattctccctttattttctgaattgcccctcttaagtctcaaccttctttgtctcctctctctctctttctctccttcctctctggccatgattggaagtaaagatcgttctgctgactttgaaggtgagaactccaggagcaagctttcaaggcacaattttgaggccaacaaggagtacccagatgaaaaaggtgttgaatttctgagggattcatcagaagtgggtggttgtggtggcagctcagggttgcaagagttgaccctcagctacctttgtgacaacccaaaattcaatcttgctgagaaagagattcctggtaaaagcttgttggagaaaatgagccacaaaggtaaagaggttgtggtatgtgagaattcatatcaagatgggaaatgggtggaaagagatttcctcagcctgagtgagccaagagaagattcttcaaagagatccct

SEQ ID NO: 14180 - DNA, 357 bp, Glycine max
ggtccggaattcccgggtcgaccgcacgcgttcgtccacgcgttcgtccacaccataaccaatgttcagaacgtaacaaacaaaagaaaaaacctctggttctccctttgttttctcaattgcccctcctattctcagccttttctgtctctccttcctcttgccatgattggaagtaaagatcgtgttgttgactctgaaggtgaaaactccaggagcaagctctcaaggcacaattttgaggccaacaaggagtacccagatgaaaaaggtgttgaatttctgagagattcaaaagtgggtggtggtggtgttgatgggggttttcactcacaacccaccaacgttgttgctgct

SEQ ID NO: 14181 - DNA, 773 bp, Glycine max
atttgactttaatagaagttgatacctttgaggggatgaaccgaggatttgcactctcggaggcctcttctcgttcagatgctaaggaagcctataagcgactgcagaagagagatgttgcatttggagttgatatgcctgcataggtttcctttgccgactctcttattgatctgggtgatgaaattatggcacaggttaaaactgtatttattgattcgctgcctccttcatggaatgaagattatgtccgagatcttcttaagaaatatggagagattgaaaaagttgagcttgctaaggacatgccagctgctcggaggaagaattatggatttgttacatttagtacacatgttgctgctgtggaatgtgctgatagcattactagtgcagggttaggtgaaggtgacaaaaaggcaaaagttagggctagattgtcacggcctctttcaaaacctcttcagagaggccgtggaaaacatgttaatcatggggacttccgctctggccgcaattctggaagattggtaaggtcttcacggagtcaacctgcaccacgtagtcttcctgcccatgtggtgagaggagttggaagtcgtgttccgccagttagacctattagtgtgagaaatagacgtcctgtcacacccatgctagtaagagccaggccagtggctcctccagctagaagctatgacaggagattggctgctcctgcttatcccaaaagtggcatgaaaagagattatagtcgacgtgtggatctacca

SEQ ID NO: 14182 - DNA, 760 bp, Glycine max
gtggaattagcttcaaagacgaatttacattcagctctgccctcaagcatggctacatatcctcgcatgtcacaccatatggaccaaagtcaacagatacaatatgatggtatttgtagccctttgaagcaactcatggagcagaatgctcaagcgttcaatcaaatcactgccaatttgtctacttacaagttgcaggataatatcgacctcttctgccacacaaggcacaatattaataccatggttaataatatgagtgagatgcctggcattatgagccaaatgccgccactgcaagttaccattaacgaggatcttgcaagtagtattctgcctaatagaacatagcgggcaaagtgctgactccatcaatatttccaacacaaatctaagtgcatcagtgtagagaggttcgcgttcttagctgcaactgttttggtgctagctacatgacattgaggagctagggagtatctcaggactttccagagtttctaatccatctttgatcttattgctccctgctgaaggaaaccttggaacggaaaccttggaactcctattgtataaacaaaacattttccttgcaaaaaaaaaaaaaaagaaaaaggagaaaataggaagcgattaatataacaatggtttgagctgaatgcaccttattgatttcagagtgcaggtgtttttctcatgccataggaactattgtagatctatttatgctagtttgtcatcgacttcaaatttaaaaaaaaaa

SEQ ID NO: 14183 - DNA, 594 bp, Glycine max
aaatcccgggtcgacccacgccttcggccacgccttcggccaccccttcggccacgccttccaccgcttgcaaaaaaccaccgaagggcgaagaagagagtgaaagagaatatctgagactctgattctgagagtcgagacgagtgagtgagtgctgcttcttcttctgaatcaaatcattcatcactctctggttctgatttttctgacaccaaaatggtgaatcctcgaattccacgttcaaggatcccaactttcacacttttcacttctgctatctccatcgttctgtgcattttcttcgttctctcttttctcttcactgcccattcttattcctcccatcaacaccacaacgcgggttctgacggtggtgttgcacatggatttgagtcgattaggagatccgtcctagctctgaaaacagatcctctcaagcctcggttggaccagattcgtaaactaaccgatgatcatcgctctttggctcttgtgtattcttcctatgcacgcaagctcaagcttgagagctcaaagcttgttaggatttttgcggactatcgcgcaacttctcagatctaatgaacaaaccac

SEQ ID NO: 14184 - DNA, 340 bp, Glycine max
  unsure (1)..(340): unsure at all n locations
cccacgcgtccggcagggttctttctcatggcattaattagatgaggatatcgtggaaggctgaaacaatgttctcgacacatacaccaaaataaaaggaatatatgttttgcatctaagatttattaaataaagccgaatgttggttcttgtatcattaagattttttttttaattgtcgaagactttatgtattcatattcaccttgacttctacggtcaaatttttcataagtggaataaaagcaacttgttatgccagtttttttttttnnnnnnnnnnnnnnnnnnnnnnnnnnnnnnnnnnnnnnnnnnnnnnnnnnnnnnnnnnnnnnnnnnn

SEQ ID NO: 14185 - DNA, 433 bp, Glycine max
aagggagaaatcagtctgcatttgcattgatagatgattcaccttccaaggagcctggccaggtgcagcttcctccacctcctccacctagtcaggtgccacccaaggctggtgctatccagtctgatggtgctgtgctttctactgagaataagaattcactgtcaagccaggagatcccaaaaatggttgccgggcatcctcctccaaggcaacaaccccctgttccaggacccaccttaatcccaagtttacagcctgatgtattactccctggaatatctcgtttccctccacccccgccaccacccgatatgagaccttctttgtccgtcacagggctacatgctcaggcaccacctcctggaatgatggtccccctaatgccaaggccaccatatggtcctccacctggtcctcctccaatgatgag

SEQ ID NO: 14186 - DNA, 676 bp, Glycine max
aatttgcactgagggcattggctagcacacttaatgaagaagagttggctgatataaaagatcaatttgatgctatagatgtagacaaaaatggttcgattagcctggaagagatgagacaggctcttgccaaagatcttccttggaaattgaaagaatcacgtgtactagagatattgcaagcgatagacaacaacactgatggtctagtggatttccgggagtttgtagcggctacattacacgtgcatcaattggaggaagactctgacaagtggcagcaactgtcacaggctgcttttgagaaatttgacctagataaagatggctatattactccggaagaacttagaatgcatacatgcttgagaggctccgttgatcctttgctagaggaagctgatattgacaaagatggaaaaataagcctaccagagtttcggagacttcttagaactgcaagcatgggttctcaaaatgtttcaagcccatctgttcatcggcggcggaggttctagattagaggtgcttcagaggctgagataagtttggagatacgagtggtggagttcctctataagtatcttattgtgtgattgtgctgagtctcttaagactatcttctattatgcagattttagccactcatccatgctgacaatctatgaaactcaaa

SEQ ID NO: 14187 - DNA, 427 bp, Glycine max
gaggagcggtgcgttatggaggaatgatcggagtagcagccatgcccagtggatgtagcatcagagcaatatggattctcaacaaccttgacggcgtcgttttttcccggaggtttccggtggtagagaagcgttggcgagctgcttgcaactcaaacgcccacaatgatacccatcaaatcttcccttccttacccactgactccgacctcgctgatgcttttctcgaccgaaagcatagggagggatctgcacgaggatttggcatacgaaagagtaactcaactctgggatcggattcttgggtggatgatcccattactcgccatatcatcggtctttacattagcagagaaggggaggaaaataagaatctattgtggcctttaatcttgcacacaaagggcctttacagtattcttattct

SEQ ID NO: 14188 - DNA, 447 bp, Glycine max
gaagaaaatacagcactctgaacaaaaagcaacggaaccaaccaaaaaggattcaaagggcaacaaacaagaaggcacagactcagagtcagagcaataccaaaacgaagaaaatcaactccacacgctttcggaaccatcaccatccttctctctccgttcccgcaaatccccttcgccaccactccactccctctctgactcccccatctccgatgcccacctctcccctgcgccgcagaagccgccgcccgattcctcgccggactcctcgatctccgacggccacttcacgatcggtgaacagcgcctctccccggcgccgccgaccgtggtgacggctcatcggttgaaggtggagcccgcggtgttgaccagggtcgatcccggcgccgaagagggtttcgtgaaagacgtcgaacaagccaccggcagcgccggtagtcg

SEQ ID NO: 14189 - DNA, 525 bp, Glycine max
gggtctgcgtaatttgatttccttccttcgtatcaaaattctatttgggacatctcttctcaaaccaaacagggccttatttgtgtagtgtgaatgtgtgatggcgagtcgttccttcttaaaaaattggaaaatccttgattttgcttcgttactactgggagagtttacgagaagtatcaaacccataaaagacgtttcttcaacatcattgaccttcgttgaatttaattcgttcaaaacggcgttgtgtttccggcaataccacgacggaaggcccagaggccccctttggaaaggaaaaaagctcattggcaaagaagcgctttttgtcatatcggggtttaagaggtttaacgatgacgaggataagcttcacaagttcatcaaaactcacgttctcagactcttgaagatggacatgatcgctgttctcactgaacttgagcgccaagaacaagtttctctcgctctcatgatgtgtaaggtgatgcaaaagcaagattggtacaagccggatgcata

SEQ ID NO: 14190 - DNA, 422 bp, Glycine max
aaaaacactggcattccatttttcaccggctcccgcactccaccacaacgatggacaacgaccgcgtctcccgccgcaccgaggtcctcaccaaccacctcctccgccgcacatcccccaccctccggcccttctccacccccacccctgccttagctactcccccccggagctctccaacaccatctccttcgacacgcgtgagatgcgaaaactaatggattgccacaatctggaggagcgcgactggatcttctctctcatcctccagagccccctcttcaacccccgccaccgcgccggaagggtgttcgtctcccccgactacaaccagcccatggaacaccagcgccaggccaccatgaagcgcatcggttatctcctccaaaaaggggtcttccgaggatggctcacgggaaatg

SEQ ID NO: 14191 - DNA, 573 bp, Glycine max
  unsure (1)..(573): unsure at all n locations
cccacgcgtccgcaattgtctttttctgttgtttctttaaaataaatacttattccaggtagttactattttcagcatcctaaatcagaaatagctggagccaagttttgcagttctgacttggatgatggtagttctgagttgagtttaggaagcacagaaggtaataatgaagattattctagaaaaacaattcattggagtggtagagaaaatactggaagaggaaggaataaagaaaagaaaataaaaaaagacaggaagaatttagagacaggagagaatttaaacaagcatttgaatgacataaaggaagcctccagtggaacagatgatggtaaaaatcttagttttatcaaatcaaattttgtcacagattttgcagatgcaaaaaattcaaggtcctcttacaagggttccaggatgaaaagtacaaagctactgttagagaaaggtatttggtaattgctttaataccccttcctcataaaggtgggtgtcctctttataactggtatctttacatggctttctatttctaaactgaactttgtgcttancttaatttttttt

SEQ ID NO: 14192 - DNA, 390 bp, Glycine max
cggacgcgtgggtgggaagttcaattccgcttcaccaaaccctgaaagcccttaaaccccaacccaaatctccatcaacaacagcaagagttccatggtcgttgaatcccaacaatgaaagctctgagaaccctaagaagaaccctctattccccaacacccgcaaccgtttttcgcgccttcttctccgcacaaccacagccgcaccacgatgaccccaccgactcctccgtcttcgatagttcccactacgcccttgaggccgagcccacgctcaagcccgagccaaagcccacgtgggacgagaagtaccgggccagggcggaccgggtggtgttcggggaagagggccccaaggggaagctgcgggtgaaggaagaagaggatgag

SEQ ID NO: 14193 - DNA, 474 bp, Glycine max
cccacgcgtccgaatttggtttactcaatcgatcttaggttttggtcgagaagatttcggttatgaatttttttattttatttaaaatttagcgtttagaatattacattgcttccgaatttgtaggtcggtcagctgccgaggaagtgttgaatgggtctatactcaggtacgggaagggaatttcaaatttggtacgaactaaagggctttgaaacctgaaatctaatagtgatcggattaagtaattcacgtttttttaatggtattcaatgaaaatatgcgtttcgtcgtgtgttattaggatgatttgcgtgtgtgagatctggagagtatatgtttttctcttctcggtcttcttgtaacagagagattcaattcatggtgaaactaactgtgtatggttttgattcattgaacacataaatcgttgttgtaactatcgaggacacagtcatcctggaaaggagagag

SEQ ID NO: 14194 - DNA, 880 bp, Glycine max
aacacgcgtacgttttagaagaaaataaaattgcattgagggagtttgtgggttgtcttgccttgcttcgttgtcgtttcgccggccaaagacacaacctttgttgccgttttagtgtctgctttggacacctctctctctctccctcagtttgatttgataattcgagatgaacgaccttctcactgattcatttgttggcgaggctagtaatggccagccttctagacaaagtgatattgaaatgggacaggttccgagaagcaactccgatatgggaatggaagcttttaataaacagatccatgaggctgataaacaaatcgataagctttccgtgctacttcaaaagctaaaggaagctaatgaggaatccaaagctgtcacaaaagcatcttccatgaaagctatcaagaagaggatggagaaagatattgatgaagttggaaagattgcacatggggtcaaaacaaaaatagaggctataagcagagataacctatccaatagacaaaagcctggatgtgagaagggaacaggtgttgacagagcaagaatgaatatgacaaatgccttgactaaaaaattcaaggatctcatgacagagttccagactcttagacaaagaatacaagacgaatatcgtgaggttgtggagagaagagttattacagttacgggaactaggccagatgatgagacaattgatcgcctgatagaaactggaaacagtgagcaaatcttccagagagcaattctagaagcaggccgaggacaggtagtaaacacagtagaagaaattcaggagagacatgatgctgtaaaagaaattgagaaaaaacttcttgatttacaccagatttaccttgacatggcagtc

SEQ ID NO: 14195 - DNA, 647 bp, Glycine max
ggtaaataatgttggttggaaatttaagtagaagtaccgattggacgggaggagcagtgacggaggtcaactcgctctaaccttttccttccgttcactcgccgccttgctcatcctcgccgtcacagtcacctcaaccgatcatgttctagacttctctctctcagctggagatgattcaacaaagtatagcttctaaattttgtgagtatagtctgggcaattgtaaaatggacttgcctaatcgtgataaacaactgactgttgctgtgaagaagacagcattgagagatctgcaaaatgataataaaatcatggtgccaacctctgttggaagctcttcatttttcaaggataaggatcttggtactgattctagtagagtttctggcaccaagagacccttgtctgactacccattgaatcaccatctccaacaatctccaagcaataatgctgcaaatggacatcttgtgtatgtccgtagaaaatctgaagcagaattgagcaagggcattgcttatgaaaatccaagtattaatgcttattgttcacattctaggcaactttgttgtgaagaggagactgctctaccaaaatctcagataaaggagccacctcagttaaaggaacctaaggcttcttgc

SEQ ID NO: 14196 - DNA, 621 bp, Glycine max
  unsure (1)..(621): unsure at all n locations
aggtgggatgcanataacgcaactccccgcctcctctaactcacttaagggaaaggaggggcggctggcnggaccggaccggaaattccggggcggaccctcccttccggaagcagggacggaggtcaactcgctctaaacttttccttccgttcactcgcctcgctcatcctcgccgtcacagtcacctccaccgatcatgttctagacttctctctctctctcaggtcctctctctctcagctggagatgattcaacaaggtatagattctaaattttgtgagtatagtctgggcaattgtaaaatggacttgcctaatcgtgataaacaactgactgttgctgtgaagacagcattgagagatctgcaaaatgataataaaatcatggtgccaacctctgttggaagctcttcatttttaaaggataaggatcctggtactgattctaatagagtttctggcaccaagagacccttgtctgactacccattgaatcaccagctccaacaatctccaagcaataatgctgcaaatggacatcttgtgtatgtccgtagaaaatcagaagcagaattgagcaagggcattgcttatgaaaatccaagtattaatgcttat

SEQ ID NO: 14197 - DNA, 695 bp, Glycine max
tggaacttctgatgcagttagttacagaacctttggcgtggcatggactcggaacccagccttctctgagatcctgttttccatctggtaaaaagaaaaagaacagcggatcagcttatcagtctagcgcgaatctggctcatgcaatcacagattctgtcgtgcatttatctcacgtgttagaggttgttttgacatggataactgaatggaacaaaagacctgaagatgagcatttggagaatattcttttacttcttcggagagacgggcataatgatggaccgggggaggtctttcacattttagaaacattcatttcctctgtgaatgatgcggaactcggtgaccgcatctcccaatctctcaagtcttggagtcctgctgacgttgccaggaaaatgatgactgggaagctaaaagtactgacggaattttctgccatctgtgggtcaaaattgaagctatttaagtctatgaaacagcagatagctcaactgtgaagaatcatccatcatttactagtgctgaagttttatttcagcttgacaaacggctcttcaatttcaacagatatatatcttcaatgcaaggggttgagcaaatgtgcttctgctctgctgttattttcatcttcaacaataccttgtcggatttagaacagtcatcacagtttgttgctaggttattgttgg

SEQ ID NO: 14198 - DNA, 535 bp, Glycine max
cccacgcgtccgcccacgcgtccggcaaatatggtgactcatgttagcaagggaatcatccattgactatgctattcccactttgtttaatcctatgcctacctgtattttgcagtttattattaatgatatgagttaagtttgtcttaaaaaaaaaaaacatcttatgcatagtacaattcacatgtctccctatatccacattgatcttggctatattaattaacacagtgcaacgaggaagcacaagaatcaaggtgctaaggttgaacaaacttgttctcgtcatgtatatgattattgtgccaatgccccctaattagtagttccacaattttatgcttcgactaaggacctatattagctgtcaagtaactagacctagctcgcgtataaaaaaaactagacctagctccaaatcattagaaaagaacgtagctctccaattgaaaataacaagatgactaatccacacaatagaaactacaagatgtcaagcatgcaatttcttcgacatccctatatataatgatga

SEQ ID NO: 14199 - DNA, 331 bp, Glycine max
gttagaagaaacttccaactgtggcatgcatcttatatcttgtgacatgtcatatattggtggcctattagaattattatgttccagtttgagacttccatttttgcaggcaattcttagtctggtttagttggtttgaataaaagtagtaaggagcatttcttgtggtatatgtaactcttggagttattgcatatatcggcagaaggggatggtagagaaatttaaagtggttttacttaatggttcactactcaagtaagaaagaagggtgagggcttgaagagaaattaaggggattaaacttatggttcactactcaaggtagaaa

SEQ ID NO: 14200 - DNA, 1662 bp, Glycine max
ctcgcgtgcgtagcagtcagaaaaacactgcgagaaagagaagaagaatcagagagagaaaatagagagagaaacgaaaaccccttttgaccattgcgcctcgattccatttgccccattgattattctcccaccaaaacctcttctgtattttttttccttcttcttgtgatcattcctctcatttgggggcacggttctgtttgtgatcaacctcaaaattctgatctttttcccttcctgattcggattcggataccctgttgcgtttttctttctgggtgtgttttatttcggccaaagtttctgttttgcatagtgggaagtttaaaaagggattaattctatgtgggcatcgttcatattggcaaatcaatgttaactctatcatcagtgtggttatgaagtaatatggaagtgctccttgcgcgcatagctcatcaacgacaacatcaaggacaatagcatgtcgttttacattggtcgcgaggcttccaagctatggaagagattttgtgcagagacgactaccgagctcaacctccttgcggagaattggaagtaccttctcgctggtcttgtttgtcagtacatacatggtttggctgcacgaggagttcattatttacataggcctggccctacactacaggatcttggattcatccttcttccggagcttgggcaagagaaggcttacattagtgaaacactgtttaccttttctttttatcctttgtcctttggacatttcatccctttatattcaagagcaaaaagatctacacagctctaatatggtgcagggttctagctttcttagttgcttcccaagctctacgcatagtgacattttatgctacgcagcttcctggtccaaactatcattgccgggaggggtctaaacttgctacactgcctcgtccggatagtgtctttgaagtcctcttgattaattttccacaagacgcgatatatggatgcggtgatttgatattttcatcacacatgatctttactctagtctttgttaatacatatcatagatacggcacacgaagatgtataaagcagctagggtggacacttgcagtgtgtcagtctcttttgataatagcatcacgcaaacattacacggttgatatagttgttgcctggtatacggtgaatttggtggtatttttcgttgagaagaaattaaaagaattgccagaccggacaaatgctgctgcagcactgctgctaccattaagcaccaaggacaacaaagatggcaggaccaaagaagagaaccacaagttgttgaatgggaattctggtgttgaccctgcggattggaggcagagaactcaagcaaatggcaagattctggaagatggccatgcacaccatgttgacactgcaatgaatggtgcatagatacatgagcctattactatgctgcacaaatgttgagatctgctgcaacatggccttttggaaagttacaacaacctacatacgattagatttttgttagcctgatttgtgtttattgtaactgggttgtgtgctttgtaacatattgcagccctgatccatttgttctcattgtgaaaaatgatctagcatcagcagtgctatagaaaaatttccaattcacattgcctctttttttaaaaa

SEQ ID NO: 14201 - DNA, 756 bp, Glycine max
gcgacttgctttttatataaatatatcggttattctccctctcttctcaatcgtcttctccgcgttcaactcgcgtgcattgcagccagaccaagcgagaaagggaagagaattcgagagagaaacttcagagagaaagagagagagagagaaactagagagagaaagcaaagcccaaacaccccttttaaccattgcaattctcgttcggtttcagagaaccccttttgaatttttttgaattttctgggaaacagggcgttttgtgaacatcatctgggttctctcgatctccatcttttttttctgggtttccgttttttctcctcagatcctcttctgtttttgttttctccgtttttgaatcggattttcgaagttgtctcgcaattctgcctcgtgggtgtgtgtttttccaaggaaaagattcagtttttcatagcgtgaaagtgggaaaaggattgattcctatctgggttttttttatgcaattgttggtttaaattttgagggcaatgatgttgacctttaaagtttcgttatgaagtaatatgaaagtggtccttatacggttacaacagcatcaacaacatcattagcaacaaaagcaaaaacaccaccaccaccaactagaacaaaaagaagaacatgtcgttttacattggtcgcgaggcttccaagctgtggaagagattttatgcagagacaacaaccgagctcaacctccttgcggagaattggaagtaccttctcgct

SEQ ID NO: 14202 - DNA, 485 bp, Glycine max
  unsure (1)..(485): unsure at all n locations
cgaatccgttaaccaaccccacagcttaaccacaccacaccacacaccccaacaacagtgggctctctctctctgtctctcgctgtcgcttccgccaccgtctccgccgcgaatgccaccgtctccggccactgctctccagcatcttcactctccagaagtcaatcagatgttgcaaggatcatgagtcctaccttgggtgatcagatagaggataagctgattgtttctgactcaatgagagctacaaattagaaaataaatggaacacccatcaagatgctcatagaccaagaaatgtccaaagaagttgtttccaagcacaacccaccaccaaatgtagttgcaaaattaatggggcttgaagccctcccacagggtgagctatctgtggagaagagccatagaggagattattctcaacatatgtgtggtcattcagggacaccnnatcaccactggaacctggaagataggtttatgga

SEQ ID NO: 14203 - DNA, 451 bp, Glycine max
ttcacggagtcggcgaacgacgcgcacagctaaaccacaccacaccacacacaccaacaacatttctctctctctctctttctctcgctgtcgcttccgccaccgtctccgccgcgaatgccaccgtctccggccactgctctccagctgttgaaatgaatggagtgcagaacagaagggttcacaatgttgagaaaccttttccaggatgcctgggaagagtggtgaatctctttgatttgaccgggggtgtaaatggaaacaagctactcacagacaggcctcatcgcgatgcatcttcactctccagaagtcaatcagatgttgcaaggatcatgagtcctaccttgggtgatcagatagaggataagctgattgtttctgactcaatgagagctacaaataagaaaataaatggaacacccatcaagatgctcatagaccaagaaat

SEQ ID NO: 14204 - DNA, 555 bp, Glycine max
cttttatttacaccacatagccccaccctcaccctcttacagaatgggaaggactccggtcaggtttgagagggtagcggcggcctttgacgctgacgtggcgcgtgtgaggctctgcaatagcagcgagaatgagcagcactcgccggaggactcggctgatttgtcagatctggtgaaatcgttcatggagagagggggagagggagaagatgcggttggtgttcgttcggatgatggggttgagaattttgattctgagaagagggagattttggagggaatatttgatgatgacgacggggatgccaaagaaaagattagaagagaagttcaacttgcatgggggcttgttgccgaaaaggataactcatcaccccaattcaaacaacaggtggtgtctctcctacggtacagaggttttgatgctgggctctgcaaatgcaagtgggaaaaaaatacaagattcccagctggtgactatgagtacatcgacgtaaattttgcaagaaatcgctacattgttgaaatttcccttgtcacaaaattcgaaat

SEQ ID NO: 14205 - DNA, 397 bp, Glycine max
caggagtggccattgtgtccaagaaaattctaagggtctctcatgtggcaagtgacagaggggttagaattttagcctctatttgtaggtattccgccaatgctagagtgcttcatgaaatgttgcaggttggggcagtgtccaagttgtgcttggtgcttcaagtgaattgcagtttaaagactaaggagagggcaaaggaaatactccaattgcattctgtggtttggaagaattctccatgtattcctgtacctttgttatcttcctatccatgatctaattctttcataattagtaagttctttttgtgtacatgcaatgaaagtgtatggtgttagagatttttgaattatacaaatgaatcttaataatcaagagcgaaaattttttctta

SEQ ID NO: 14206 - DNA, 702 bp, Glycine max
  unsure (1)..(702): unsure at all n locations
tcggcaaggtacaaggtgctggagtcattgtggccacccctactggaagcactgcctatttctacagctgctggaggttccatggtccatccaaacgttcccctgcatgctgtttaccccaatctgtccacattcactctcatttagaccagttatacttccagattctgctcaacttgaattaaagattccagaggatgcaagaagcaacgcctgggtttcatttgatggaaagagaagacagcaactttcaagaggagattcagtacgaatatctatgagtcagcatccacttccaacagttaacaagtttgaccaaactggtgattggtttcatagcttgattcgctgcctaaattggaatgaaaggcttgatcaaaaggccctataaagcgtatgaaagtgaagaactgagatgccctattctcctgtgctgattatccattaagatggcagaactttgctattgctatagtatattagttataaccaaattctaacattggtttcccaagagaagatagggtttgccaatgtgttttcagtgttattgtggcaagaggctgttgtatatattgacatttaaagctgtaaattgttgatctcagaagcagctattggtgctctcnnnnnnnnnnnnnnnnnnnnnnnnnnnnnnnnnnnnnnnnnnnnnnnnnnnnnnnnnnnnnnnnnnnnnnnnnn

SEQ ID NO: 14207 - DNA, 513 bp, Glycine max
gggaatgtgaaacttattaccagcagcaaaatccacattatgatcagaatcattatccctagctttattctacaagcattagaaacatgaaacttcagggattctcttttcaaccaccgtcatcagcgatcggattcggattcggactccgtctcgggaaaattcgagaagatttttcgaatttttcaccactgctttgtgcgcagcgatcggtttcggattcgggctccgattttcgcctctcgcgaagagcttgggttcatttgcactaatggaggggaaggaggtttgcgcgtcggagtcggcggttgatggaagccgcgacgtttggagttcggagccctcgctcgcttcctccgcggatcacctcgttgtaatggtgaacggaattctcggacgtgagacggattggaaatatgctgcggagaaatttgtcaaggagttgccagataaagtgtttgttcactgtagcgaacgaaatgtgtctatgcatacactagatggtgtggatgt

SEQ ID NO: 14208 - DNA, 875 bp, Glycine max
gaggaatcatcctctgttgctattgtcgggagtgggaactaacgccgttggatatgacctttctcctgagtcatcatttgcacgttacatgtctggtcagggatttgaaacttggattcttgaagtacgaggagctgggttgagtattcagggttcaaattccaaggatattgaacagtctgccaatgcaatgtctgagaagatgaaagctcgcttcagaaagtgctattgctaccaatggagcagtggcttcaaacaaagaattgaataacgtctctttttgtgcggtatctgaacctgagatttctgcccctaatggagtagaaactgaaaatgtggcaatccaaggtgatctaactaggttaggtactgtttgggatgaatcaaagttggtggcaagattgaccgagactttaatgtttttgtcagaaagagtctctgggtttctgagtgaaagtcaatcaagggtgatgtttgccaaatttctagatcagatttcaaaacttttggtggattctccattatatgaacaatacaacgaggtaagggaaaagctttcgactttgtttgaaacaaagcaaaatgctggtattactagtcaaataactgatctgagtcaaaaactagtaaatattattgaggaaggtcagctatctgtttctcctcaattatttgatctacaagcccgctttacttctacaatcgaagattttcagaagcaacttgacttgatggtgaagtatgattgggacttcgatcattacatggaagaagatgttccagcagcggtgagatagaatacataatgaaacaaagcatgcctaaagatggaaaattacttgcaattggacactccatgggtggtatcctgcttt

SEQ ID NO: 14209 - DNA, 601 bp, Glycine max
caaacggaattttaattactaactaattccaagttccaaccctttaattaaattatgtatcgcgcttaccgcaagaattcacagcttgtgcttttatgctgttttcgtaacaaaaataataaatagaagcatcttctgttcttttatttcaccgtcattcattcattgacatatagggcttgcgttcttcttcttcttcctttctctgcttgcagttgcagaggtaggaggggggcggtgattgtgttgtgtgctttagaggatgaaagatttcaattcggatctattcgacccgggaacggtgatggactcttcctcctccgattactctcgcagtgcttcctcttccgacgccgatttcgggttcgctttcaatgacagtaatttctccgacaggatcctccgaatcgagatcatgggggaccccgtcgaggcccgacccgattccgacggttgcaccactatcgccgactgggctcgccaccgcaagaggaggcgcgaggatatcaagaaggataacgttgttgatcttactttattgcctgacgagcaaattttgaacgggaatcagcctgatatggatgattttgtaccctccgag

SEQ ID NO: 14210 - DNA, 326 bp, Glycine max
gcatctttctgttcttttatttcaccgccattcatttcatggacgtatagggcttgcgtatcattgttgctgttcttcttcctttctctgcttgcagttgttgcagttgttgcagttgcagaggtaggagggcggcgctgattgtgttgtgtggtttagaggatgaaggatttcaattcggatctatttgacccgggaatggtgatggattcttcctcctccgattactctcgcagtgcttcctcttccgacgccgatttcgggttcgctttcaatgacagtaatttcttcgacaggatcctccgaatcgagatcatgggggaccc

SEQ ID NO: 14211 - DNA, 1281 bp, Glycine max
cgggtttctgcttcagactcggtgagagttacgccatggacgattcctctcaactcctccaagcagcttctgattttgttcactacccagggcctcacagcgatgattcctccagggactttctcaatcgtttccctctcccagtcatcatcaatgcattacagactcagttagatgtgcctggcctagaaaatactcttgttgcatgccttgaaaggttattcaatacgaagttgggtgcttctctgatcccacagtatatgccttttgttcaagttggtctgcaggcagattctcaagcagtcagatccttagcttgcaaaacagttacatcccttctggagaatctagacaatgatcacaaagttgctgctagtgcttgtctaattaaagacttcaacatatatcctcttttgcttgattgtcttataaatggcaatgaacaagtggcagctgtggcaacagatgcaataaaaaagttagctggttttcctgaaggcatggaaattatctttccatctgacaaaggagatgatacagacctggagattatagcatcacaatgttcatcactgggccgagttcgggtactggcattagtggtgaagcttttctcagtatctaggtcagcagcgtctaccatttatagtttaaatctacttcaattgttggaagcagaaatcagaaatgcagatgatacccttgtaactctaagtgttttggagcttatatatgagttagcagagattgaacatggtacagaatttttgtcaaagactagcatctttcaattgctttcgtcaatgatcagccacaattctatggaatcaattttaagatcaagagcaatgatgataagtggaaggctactgtccaaggatattatatactccttcacggatgaaccttgtgttaaaagctgtatttcgtctattgatggtagacttcagtcattggaagcttcagatagagatgaatgtgaaactgcactagaatcattgagtcatatgggatcatctatccagggagctacattactactctcagggtcatcacctgctgctcgacatgttataaatgctgcttttgaacgacaaggaccaacagggcatggtaaacagctggcagcattgcatgctctaggaaacatctcgggagaaaccagatctgagaacaacatcatactcaatgccgaagaagaagaaaacctgcgacgcttaatttatgaaacagcatccgaagctcaaagctgactccatcgggtctttttctgtcagtatt

SEQ ID NO: 14212 - DNA, 555 bp, Glycine max
acgagaagttctcttgctccatccatcatctcttggcactgctccaacctctgcaaacaacaaaccaactccaccacttccccgaacttaaaccctcccaacctctccttaaactcactcaccctcacgcgcacctcaacttccacgacaccccaatcctcacgcgccagcttcacaatctcctccactaacccgttgttcccgtagacgttgttgggctcgggcctcttgcaaatcccttcaaccagagccaccaaggagtcaaactcggtcaacaagtccgcgttgaccagacccgacaccctgtcttctctgtcggtcggggttccgaggaagaatcccaggatcctggaagtgcacaggagctgctcgatgtgcttcgcgaaccatcggacccaggacgagagttcccatgatgtggggtcggcgttgtgtcggaagttggagaggttgaggtagtttctgccgcctgcggaggggtacacggagagctggtcctggaggatgaagctgccgtggtggatgatgtggtggacggcgatcaggcacttcagg

SEQ ID NO: 14213 - DNA, 692 bp, Glycine max
cagccatcttcagaataagcggcgtaaggagaatagcggtagcagtattagcagtgcacttcaggcacagtttccggatcctagtgtccagaacaaccagaatacacaaagtggttcattttcacctgaatcaaacgcttgtttcaacaaccagacaccgtggttgagtcctcaaacttttgcaacagatcaggctcctctcatggtgcctccacagcaatttcaacaacccatggttgggtatgtgggtgacccttacactagtggtgctgcttcaaataacatcacaacttctcataatcataacagcaacaacccctatcaacctggtgcagaacaatatcacatgttggagtcggcacattcatggcctcattctcagttcaatgttgcttgtcactatagccagtcttttggggacaataatgttattttcccacaggggggttttggtggtggctatggcaataaccagtacccttaccagttttttcatggccctggtgatacgttgatgaggttggggccctcggcgacgaaggaagcgaggaagaagagaatggcgaggcagagaaggtttctgtctcatcacaggcatcataatggtaatcaccagaattcagggtcagacccacatgcaagattggggggtggtgataattgcaccactggtttggctgcacctcatcatg

SEQ ID NO: 14214 - DNA, 818 bp, Glycine max
gtatggcactgcgaaatatgtaatcgcaagcctggccgtggatttgaagcaactgttgaggttcttccacggcttttcaagataaagtatgaaagtggtactttggaagaactactttatgttgacatgcctcgtgaatatcataattcctctggccagattgttctagattatgcaaaagcaatacaagaaagcgtttttgagcaacttcgtgttgttcgtgatggtcaacttcgaatagttttctctccagacctgaagatatgctcttgggaattttgtgctcgacgccatgaagagctcatccccagaagattgttaatacctcaggttagtcaacttggagtagttgctcaaaaataccaggcatttactcaaaatgcaacacccaatttatccgttccagagttacaaaataattgcaatctgtttgttgcatcagcccgtcagttggcaaaagctttagaagttccattggttaatgatttaggatatacaaagagatacgtgcgctgcctacagatatcagaagtggtaaatagtatgaaagacttgatagattacagcagagaaactgggactggacctatggagagcttagcaaaattccctcggagaacaagtggttcatctggacctcgtggtcaagcacaacagcatgaagaacaattacaacagcagcaacaacaacagatggtggcccataactcaaatggtgatcaaaactcagtacgagctgctgccatgcaaattgcttctagcaatggtatggttagtgtaaataactctgtcaacccagcatccacatcaacaaccac

SEQ ID NO: 14215 - DNA, 703 bp, Glycine max
ctcgagccgttcagcgagcagtacttcttattcctctgaagataacgaaagtagtactgtcactggtcttgattcccctgtcactaaggtttgggatggaaaaagtaatagaaaccaggctgtttcttatgtgcatcacccacttgaaaattttgacaatcacagtgcaaagaaaaggaataagagccattctcggtatccaagattatccagagcccaatctggcagtaaaggtcttggccaggtggtcaaaaaatacaaacgtggcaggaagttgagagaacaagctttttatctggagatggtcaagacatacttaattcttcaaaatcacatataaattctgaggagtccagtgatgatgctgatatggaaagtttgggtagactttatagtggagcagctgcctcctcttctgcctactctatttctaaatcagaatcttgtagtttgtctgttggtcccctgaaaaattcctctgctgtagattccttttacaagttgagatgtgaggtcttgggtgcaaatattgtgaagagtggctcaaaaacctttgctgtttactccatatctgttacagatgtaaatcacaacagttggtcaattaaaagaaggtttcgccattttgaggagctacatcgacgcctgaacgagttcgccgagtataatcttcatttgccaccaaagcattttctgtcaactg

SEQ ID NO: 14216 - DNA, 1308 bp, Glycine max
gaaaatattattcccttaatatcagcttctactttcgccggcactcatttcactcgcgggcgctccccactcacaatgcaagcccttcaccgtctcgcatcctccacgcaccgcgtggccgcgtcgtcgctccgtcacggcagcctcctctcccgaaccacttccagaatcctctcattctccaccgattcgcccgccgggggaggctccttcgacgcagcatgggagagctcctcctcgtggtcgacgggccttgccggcgaccacttcaacggccagtccccctcggaggtcctctcaaacctccaggacacggaggacaggctcttccagctggaggcggagaaccgcagagggaaagcctactgtgacagctggaggagtcgcttggaggagacgacggtgctgctgaagcaggttcaggagcccggcgcgcgaggctcgtatctcaaggattcccagaaggcagagatttatcgactgcacaagaagaaccccgaggtctacacagtggaaaaactcgctagggattacagaatcatgcggcagagggttcacgcgatcctctggctcaaggagatcgaggaggatgaggagaagaagctcggccgcccgctcgacgattccgtcgagcaattgctcgattcttgccccgagttttttaattcgcatgatagggagtttcatgtggcgtctctgccgtacaagccggacttcaaggtcatgccggaggggtgggatggcattaccaaggatgtggatgaggtgcattatgagatctccatgaaggaggatgagatgctctatcgggagtttgtcgagaagatgaacttcaataaaaagaaaatggctggagaggtaaaatgccacaagtatagtcgacgacgcccttccgatggatggacttttacagtagagaaattgggacatcagggaaagcgtggaggtggtggtggctggaagtttgctagcatgccagatggatcaagccgaccactgaatgatatggagaaaatgtatgtgaagcgagagactccacgccggcgacgcaggatccttccttgattacttgatttttttttttggaagttttgattagctgttaaaattagattttttacccattgtattcaatggtttgggatgtgtagtgtcaattgttgtcttttttcttttggatgagttattgtattagaagatttacttagaagagttgtgcatgtgttttgttgattgagaaaattagaactatatgtgatctcttgcatttgactttaggcattaaatatatccataatctattttttt

SEQ ID NO: 14217 - DNA, 620 bp, Glycine max
ctgaccctgtacctctggaagaaaatcatagtgaatcaccctgggaagctatggcaggctaggcacgacatttgttgtcagaatattccaataaaaaacatgcatatgcaatttgtgctgaggtcttcagagttgtttatgctgccatccaaaaggctggtgaccaaggattaagcatgggagaaatttcccaggttattaacttgccaggagcagagatagatgtcttgattgttgatgctcttcaagcatttgggcaagccttaaaggttaatgcttatgatactgtccgtgttgttgatgtcttataccgtcacaagtactttttgacacctatgtctgattttcatcttcgtgttgtacaaccttcctcatcaaaaaccatcgagaaaagtgatcatacatgtgagctttatgaatcggaggaaagggatactacttctgttgatacttcgaggtaaagaaacgccgctattgataccgtgcagacattgacaattctcaatcttccacatggggatgtggatcctgaaaatcaagcttgtgataggaatgaaggctgtaagcaaaacagacttggcttatccagagtcaatcataagaaagaaactctcgaattt

SEQ ID NO: 14218 - DNA, 502 bp, Glycine max
gtgaagggaatggtgccttgggaattagaatggctctccttggatcaaacataacaagcgaggttggactccgtttgctcctttgtcctcttggttccaacgttgtaattagaacagcatgctgtactgtgggagttgctttgcctgtgtactctacgttcaaggcaatagaaagtaaagatcaagatgctcagcataagtgtcttctctactgggcagcctatggttcattcagtctcgctgaagtgttcacggacaagcttatttcttggtgtcctatctactatcacctgaagtttgcatttcttgtttggcttcaacttccatctaccagtggtgcaaaacaaatatatgcaaaccacttgcgccccttcttgttgaggcatcaagcacgagttgatcaagtcttgggttttgcatattgtgaagtgataaaactcgtgagttcataccaagcagagatccagtttgtcaggagcatggtagtaaagataactggatc

SEQ ID NO: 14219 - DNA, 574 bp, Glycine max
tatttgttcatgtctcaaagtccaaggataatatggagcactggcgagacattttccttactgaaattatacttgctcttaaagaggctaataaaaaaaccaggaacagggcttatgatattctcgtcgaaattgcccgtgcatttgcggatgaagagagtggtgggaacagagaaagcttgaataatttttttcagatggttgctggacactttactggggaaactccacatatgataagtgcagcagccaaagggttagcccgtttggcttatgagttctctgatcttgttttaacttccttcaaattgctccctggcacacttactctcctgaggagtgataacaaagagataatcaaggccaatcttggttttttgaaggtattagtagccaaatcacaagcagaagggttgcaaatgcacttgaaaagcatggtggagggtttgctgaagtggcaagacaactcaagaaatcattttaaggctaaggttaaacttcttttgggaatgcttgtcacgaagtgtgggctcgaggctgttaaagccgtcatgcctgaagaacacatgaaact

SEQ ID NO: 14220 - DNA, 248 bp, Glycine max
caagacatcattttaaggctaaggttgttttgcttgtctcatgatccttgtgtctggatacctttgcattgatttgtagtgggtgacagctgtttcagcattgaagctactactcctattgtaaacagtgagattcaatttttttcaggttaaacttcttttgggaatgcttgtcacgagtgtgggctcgaggctgttaaagccgtcatgcctgaagaacacatgaaacttctttccaacatacgcaa

SEQ ID NO: 14221 - DNA, 559 bp, Glycine max
cagcatataaacttggattacccattttggtggctgtccctgtgtcattggagccatggaaattgttgatttgagtgtctaaggcaaggccgaggtatgagtgcagcctatgctgtatctgctttgtaactcaagatttacggaccatggaagccaatggaatcactcatgacagtagcctaggagcggggagaagggataagagagaggtgggagacaaaacgatggaagatttaagtaaatacgtacacagccctgctcacttggcagttgccaggcgcgaccatgctgccctaaggcgcattgtttccgccctgcctaggcttgctaaggctggtgaggtccccacagaagcagaatctattgctgctgaacttcaagctgatgaggtctctactgttattgattgccgtgacgttcctggtagggagactcctcttcaccttgctgtgcgtctccgggatccagtctctgctgagattttgatggctgctggtgcggattggagtctgcagaatgaacatggttggagtgctctccaagaagcagtgtgcaccaa

SEQ ID NO: 14222 - DNA, 746 bp, Glycine max
  unsure (1)..(746): unsure at all n locations
attggacccaaatgatttcagaccagtaaatggtcgttatgatgcacagatttcagtatttggacacaaattgcagaagaaattagaggattctaaagtgtttgttgttggatctggtgctttgggatgcgaatttttaaaaaatcttgctctcatgggagtttcttgtggaagtcaggggaagctcactattactgatgatgatgtgatagagaagagtaacttaagcagacagttccttttccgtgattggaatattggacaggccaagtccacagttgctgcttcagctgctgcagctataaatcctagttttaatattgaagctctacaaaatcgggttggttctgaaactgagaatgtgtttaatgataccttctgggaaaacttgagtgtcgttgtaaatgcactggacaatgttaatgcaagactatatgttgatcagagatgcttgtatttccaaaagcctcttcttgagtctggaactctgggagccaaatgcaatacgcagatggtaattccccacctgacagaaaactatggtgcattcaagagatccacctgagaagcaggcaccaatgtgcactgtacactcatttccacacaacatagtcctgtgcttgacatgggcgcgatctgagtttgagggtttgcttgagaaaactccagccgaagtaaatgcatattttactaaccccaagtgaataattaantntgcaaatgaaaaaatagctggtgatgctcaa

SEQ ID NO: 14223 - DNA, 481 bp, Glycine max
aggaattgtagagttccttcagaatgaagttggcgtagatcttaaggtcactgatcctgttggtggttcagatgaacagataattatcattacttcagaggagggtcctgacgatgagctgttcccagctcaggaagctttgttacatgtacaaactcgcattgttgatcttgttctagataaggacaatactataaccaccaggcttgttggcccatcgggcgggatcgaatgcttagatggaaaagatgtttctctatcgcaaataaggaggttgactggtgctaatattccaattttgcctagagacgagctacctctctgtgatgcagaaactgatgaactggtaccgatcgctagagagattaaagcaagccgagatgctgttgttgatgtgacttcaagattaaggagttacttgtacagggattactctcacagggacacaggaccactaccagctcccttacctggtgcggcg

SEQ ID NO: 14224 - DNA, 381 bp, Glycine max
cttcaattctttcgttttgttagtgaatatggaaggtggtttggaacgatttaaaggcaccgtttttgtcaagtaatagtggtgagctcagtgaagtcactcgtctcaaatgcgattttttctccaaattgcctgataaagttcggtgtggtctcgatcctgatctctcttttcacattgactactcaaaggcaactggcttaacagaaggggagaaagagtattacgaaaggcaattttccaccctaaggtctttcgaggaggttgattcaactgaatcttccaatgtcattgaggatggctcagtgcacgcggaacaagtgcaatctgacagggcaatgaaaatatccaatttggcaaacgttcttttactcgctttta

SEQ ID NO: 14225 - DNA, 850 bp, Glycine max
ctcttgttggttttttcactaccagctctgacttttaattaacatgcagatcaacgcctcaatgatgttgttggcagtgcttactatgttgcacctgaagtgctccatagatcttatagtgttgaaggagacttatggaagtattggggttatatcatacatattgttatgtggaagtagaccattttgggcacgcacggaatcaggaattttccgatctgtcttaagagcaaatcctaactttgatgattcaccttggccatcaatatcacccgaagctaaagactttgtgaagagacttctgaacaaggaccacaggaaaaggatgactgctgctcaagctttagctcacccatggttgagaaacgaaaaaaatgctattcctttagatattttgatatacaagttagtaaagtcatatgtgcgtgcctcacctttgagacgtgcagcattgaagtctctcgcaaaagcattgaatgaagacgagctaatataccttagagcgcagtttaacctcttggagcctaaagatggctgcatctcacttgagaattttagagttgctctcatgaaaaatacaactgatgccatgaaggagtcaagggtccctgaaattttaaatttgatggagccactctcctataaaaaattggacttcgaagagttttgcgctgctgcaatcagtgtgtaccagcttgaagttcatcaagaatgggatagaatcgctaccacagctttcgagtattttgaggaaacaggaaaccgggtcatttcagttgaggagttggctcaggagatgaatttggttccatcagcctactctttaatgggtgattggatcagaaaatct

SEQ ID NO: 14226 - DNA, 872 bp, Glycine max
cagaaagcaacacggttttgccgacactcaaagcaaacagtaccacacgacatgtgttaaatgcccaaacagataagggcacaagccagacccacatatcttgcaccacacaaattccacagatatttctttcacaaaatctcacccccactctataaatatataacacagaacagtagatgcagaagcttcaataagtaagtatcaatggcttccgaagaatcccagaacaagccccccagcgagcagtccactaccgaactcatcacgagcgcgaagctggtggcggaggcggcgcagtcggctctgaagagcgacagcgacaaagtggacaaggccaaggtggctgacgctgccggcgatcttctcgacgcggcggggaagtatggaaaacttgatgacaaacaaggcatagggcaatatgttgacaaggctgctgattatctgcataattaccagggtgataataccactgctccttcacagcctgcagagtctaaaggtgaagaaagtggtggtgggttaggtggtcttgcaaacttggctggaggcttcttcaaaaagtagttacaaagcaactaaataagaccttaattgagtccttattctcggtctagtagtggggtttgggtaatatgcaccagatcatagatttaaatcttgttattgtaaaaaaagaaaatggaaaaaaaaaagtcttgaatttctcacttctagttctagtattgttgttgttgttgttatatgatgtatggttgaataaatgtgatttggtgtttgtactttgtagagttaattagtgacttctgtgtctgttctcttaattctaattccaaacaagagtacttccggccggcttctttttagctatc

SEQ ID NO: 14227 - DNA, 671 bp, Glycine max
cttcatcatctgcttcttcttttgatcataatatctgttgagtgatctttcatagagagagagagagagagatggagaggtgtgacaaggtgatgaaccaacgcaacatgcatgattgtcctaaaacaggtcctggctatccttcacccctggcagccatgtctggtcccaaagagactctcctttatgtcactgctatctactcaggaacaggaagggataagcctgactttctggccacagtggatgtggatccaagctctccaacgtattcaaaagttatccataggttacctgtaccttatttaggtgatgaactgcaccattttgggtggaattcatgcagctcttgctatggagatccatcagcagttcggcgatatctgattttgccttcactggcatcacgccgcatttatgtggttgacacaaaagcaaatccaaggtctccatctctgcacaaagttgttgagccagaagacattataagtatgactggattagctcatgcacacacatctcattgccctgcttctggtgacgtgtcgatctcatgtcttgcagacatcgatggacaagcacacggcagtggatctcttctgcttgatcatgtacttaatttgtaatgaatgtggcagaaacctgcgcacagtgcatcatgtgggtatgac

SEQ ID NO: 14228 - DNA, 270 bp, Glycine max
cttcttcttcttttcaagataacatctctgaagtgatctttcatggagagagagattgaacattgtgacaaggtgctgagccaaagcagcatggatgcttgtcccaaatcagggcctggttatgcttcaccactagcagccatttctggtcccagagagactctcctttatgtcactgctatctactcaggaacaggaagggataagcctgactttctggccacagtggatgtggatccaagctctccaacgtattcaaaagttatccat

SEQ ID NO: 14229 - DNA, 435 bp, Glycine max
acaatttatctctatcagaaaaggagaaaaactgcgtctaatagttttagattctgaagaggaagagaaagatacgttgtaactagcaaaggatacgccctgtttggcgtaatccttaaacgtagcattagtgttaacgttgtaggttgtgaagccaaccttgtgatccccttctgcgcctttagcatagcctttgaaagtatccgaaccagggttaaaagaattcccgtagtttttgaaatccagtttggtcctttctttggtgttcttagcataagattgatacgagtcatcagctatgttagcctggtctctgtaattagcaaaactctcagtgctagcgtgagttctaacagcgtagctcttgaaagtcacttctggaacgttcatctcaacgccataatttatgaaagccaacgtggcaacgttggagtt

SEQ ID NO: 14230 - DNA, 382 bp, Glycine max
cagcgcttggtctcacccatgcttggcaccctctcgcactcccccaaagagtccattatcatcttctccatggaggagttatcagaaaccttgaagaggcgcttcaactcgtgaaccttggaagacgagaagggcaatttggtcagaatggagcggggcaaaatcgaccttttgggcattttatctcttatatcgggcatgggcataagagtcccatccttaagcatgctctcccgaaagaacttacccggttcaacccacctttttaccaaactgccactaacagttttggatgctctcccaggagagaaagatacgttgtaactagcaaaggatacgccctgtttggcgtaatccttaaacgtagcattagtgtaagcgc

SEQ ID NO: 14231 - DNA, 753 bp, Glycine max
aaaaaccaagagcagcctcttgtctctgccaaatcaacagaagaaacagtgcctaacaagcgggttgagatgcaaaaattggaaacctcaaagaatagtgtacagaaaacaagaaaagttaaacctcagaaggatcacattggcgcacagagtttggaaatgctaaaagttagagcttccctcgaggaaaaactgaaaaacaagggtctgtacagctccattgctccaaaacctagtaatgcattaaaacgtttgaaaccagttaatggcctgctcgaaacatatgatgatttgaatgatgataccatggatgccaacggggaagctagattgattaatggttctggctccaaaagagtttcacagttccttaatgcaaatatgaagaagcccaaggtggtttctggtgatgatgatttaccaaagagagatgatattggtgaaaggcgaaggaaacacgagcttcgggtgttggctggtgctggaattaggactgaggatgatgatggtgatgatcagatggctgatcttggacctaatgaggttaccgatgaagaggaggatggtggaagtggggactcagaaaatgaattttacaaacaagtggaacaactgcgagctgcaaaactggcagcaaaagctgagacttactcaaggaactcttcagtctcttcattgccagagactgtagaaggaaagcgccatatttcttctcagatcgagaagaataggggactaacccgcaatcgcaac

SEQ ID NO: 14232 - DNA, 570 bp, Glycine max
ggagcagctcatgtggtggttgagattccaagcaatacgacggagagcaatacaaacgagaagaaaaatgagttatccgcttcctttgagattggaagagcctgaagtaaggcgtggccaagggcactgtaagctttgtgacaacagaatttcttgcagaactgcagtaggcaggtctttggtatacagacctgcaatgctctcaatggtggcaatagccgctgtctgtgtctgtgtggcccttctgtttaaaagctcccccgaagttatatgtatgttccgacccttcaggtgggagaatttggactttggaacaagctaaggttcattaacttgcaactcaataaaacttgataggcaatgtaaggatgcgttcatagactgaatgaccgagatttcctctagggactggttctttgtattagctaaactgtgcaatattatttacgtatttgttatccttaatggccatccttgtacaatgtatgtagatgcaactctacttaaaactttatttggcaggatattatattttagtgtaatacttgtgtgaactcttacattcttgtt

SEQ ID NO: 14233 - DNA, 691 bp, Glycine max
caggatgtgaaaatttattttgtctctccaaacgtggttaaaatgaaggatgacataaaagactatctgacatcaaagggagtagagtgggaagaaagtgctgatttgttggaagttgcttctaagtgcgatgtggtttatcaaactcgcattcagaaagaaagatttagagagaaaattgaactttatgaggaggcaagaggcaagtatattgtaaatcaagatgttctagatgcgatgcaaaaacatgctgtggttatgcacccacttccaagacttgacgagatcacagtggaagttgatagagatccaagagctgcttactttaggcaggcaaagaatggtctatatattaggatggctctcttaaaggtattgcttcttggttggtaaggatgcattcacttttcgaagtgaatctgatgatctaatgtcaaaaaatttcagttgttttctttgtttcctttccttgccttttagcatgtttggtatcatgttgacgtaatttcacagttagatcagagctggtaggtattgcttctgcatcttctggtaaatggacgtggttgcccatgtatctactgtgtttccaaacatagttaggcgtcacaaatacagtgagagggagaaataaaattttctttttacatgagtaaaatttccttgaaaaaaaaaaaaaaaaagggcggcc

SEQ ID NO: 14234 - DNA, 816 bp, Glycine max
cttggtggttgattcatcttggtatgaaaaattagtccattgtggtagatccatttgatatttggttaaattattgctctggctatataaggcacacataatgcaagaaacattctcctcagggtgaatatccactacacgcaaagcaaaacacacctccacattcacccttagtcctcactcaacaaacaaattagccatgagcaccaaggagtgctgccaccacgacgaggagcggcgtcagctcccccgccgcgtattcgccgcgatcctcggcttcatcctcctcatcctcctggtgatcttcctcatctggatcatcctccgccccaccaaaccccgcttcatcctccaagacgccaccgtctacgccttcaacctctcctccaccggcgacaccccttcccccattaccccaacccccaacaccctcaccctcaccatgcaggtcaccctcgccgccttcaaccccaaccaccgcatcggagtttactacaccaaactcgacgcctacgccgcctaccgcggccagcaggtctccgtcgccacctccctccccgccacctaccagggccaccgcgacacctccgtctggtcccctacctctacgccaccgccgtccccgtctcccccttcacgctccagatcctccagcaggacaaaacctccggaggaattctggtcaacgtaaaagtcaacggtagagtcaagtggaaggtcggaacttgggtttccggaatttaccatattaatgtcaactgtccggcgtacctcaggctcgccggcgaccgggacgacgccatcggatttgccggt

SEQ ID NO: 14235 - DNA, 995 bp, Glycine max
ctcagagtctttactctctctctctctctctctctctctctctctcttcgtaaatcgcgtcttccaccaatcagatggcaatgccggagacaatccctcccactactcccagtgctcaagttgtcggcaatgcctttgtggagcaatattatcacattctgcatcaatccccagaattggtgcacagattttatcaggattcaagtttcttaaccagatcagacagcaatggtgtgatgacaactgtgacaactgtacaagaaatccatgaaaagattatttccctgaaatatgaagattatacagcagaaataaaaactgcagacgctcaggagtcacataagggaggtgtgatagttttagtaactggatgcttaactgggaaggataatgtgagaaggaagttctcacagacattctttctggctccacaagaaaaaggatattatgtcttaaatgacgtctttaggttcattgaggagaatgacacacctcagataaattcttcctcagtaagtgtcatcaatgaaaatgctgaagcagtgcatgagccagaatcagaggatctgcatgctcccaaacatctcgtggaagacaatgcaactttggcagagggtgagaaccttaataatggtgctgaagtttatcatcctcaggatgaggaagaaggatcagttattgatgaagaggttgctgaaccccctacagatttaagtcagaatgatattgttactgttgatgattcaacttctgctgtcctggatgatgcaccaaggagatcatatgcagccattgtcatgaaaagtcatgtagcatctggtcatgtctatgttcccagccgagctgcaagaatagcatctgctaaatccagtgaacaatggcctactactgccaaatcaacccctgtgcctgaggcattagctcctagtagtgatagtgcacctgggagcagtgatgttcatgaagaagctgaaggtcactccatatacatccgg

SEQ ID NO: 14236 - DNA, 958 bp, Glycine max
accagagcacttagttgctcaacgttcctcctgattgaagaagccaattcgtgtattcttcttctgctttggaacatggctgatagtattgttacctccagcaattcttctacggcctcgctgaaccctactcggataatctgtcacgtatgtcagaagcagttttcccagtacacgtgtcctcgatgcaattcgcgatactgctccctccaatgttacaaatcccatagtctccgttgcactgaatccttcatgaaaagaaaatgtagttcaggaacttcaccaaatgcagcccgatgaacaaactaaaaataagatgttggacatactgaaaagatttcattcacaagaggaaatggatgagaattcttttgcagattcaactttatccgaggagacaatggaaaattttttgtctggacaggaaatcagctttgatgatttatcacttgaagaaaagaaacggtttcacagagcaattgcttatggggaactgagcaagatgatcaaaccatgggatccatggtggtcaaagccttctgccagaaacatctgtctcagtaaggaaggaactcagcttgttcaacctcttccagatcaggaattgctagatgatgatattggaagtgatgaattcagcaaagttcctcttgggcctgaaactccacttcctcctctaagcaggcttagttccaaggagccatcaccccttttaacagttcacctagttgacattctgtatagctactgcttcactcttcgtctctacaatggagattggaagtcagatgccttagggtcagtcatggttgtattgagcgtgtccttggtgttgggtcaaggtgcacagccggagacagtactagaagcactttctcattgcttggagcaggtatgctgtccagtttacagacacatgggaggattgcaatttggtttgggtgtcattgatgatgtg

SEQ ID NO: 14237 - DNA, 410 bp, Glycine max
actagttagagcttcttcccacttcctccgccgccaccgccaccaccaccgatggcggatccgaaagcctactggtgccacgagtgcgacatgagcgtgtccctgacgctcccaccctcccctctcctctgcccgcactgccacacccacttcctcgagctcatggactccccaaccctctcccaaaacgacaccgaatcctccctcttcgacgtcgttttccaagacgctctcttactcctcaaccccccttcctcaaaaccccgccccctcccctgcccttcacgtcaccccctacgttctatactccctcgaccccaacggcggagctcgctgcgccgtctgcaaagaccaaattacccgccacgccgaaaccaaacaattaccctgtcaacacttataccactccg

SEQ ID NO: 14238 - DNA, 485 bp, Glycine max
caagagcagaaaacggtgcgtttcacacgcgttaagctggtgcggcctaatgagactctcaaccttggccatgcttacaggcttatcaccactcaagaggtcatgaaggtgttgaaagctaagaagcatgcaaagacaaagaagccactggctgaggccgccgagaagccgcatagggtgcagtcggagaagcagagttcagctagtgaggcacacacagcaggagagtctacacatcagggaatgagagcagagagacacaggccaaggacggcttcagcaaatcctgctgtagtgaggtcaaaatcctggcgcccttccttacagagcatttctgagtcagcaagttgatttattggtgcaaactgcaaagttgtgacatgtatagtggctcatagaatattatatgattagcctctatgatgtcacatgttcctactagatgattcctgttacatgggcatcgagattcaacagatgattaa

SEQ ID NO: 14239 - DNA, 464 bp, Glycine max
tataattagtatgccattattagactcaacttcaaatattgcaccagatgaactgtcaagtcctagatgatctttgaacaatgaaacgtttagcaaagtaagagacgctttgtaaaaacaaatatgtttccctcaaagctccaaaatgttggtttattaatgccccgtataattagtatgccatgcagtggtgataacagcttgtgtctaaatattccttagtctttgatcactgttacttcactgcatgttcaatgagtgttactacaacactttgaatacattctccatgaaccacgtagataccaggttatattggtgccatattttttacgtgtaaactgacactgatcattgcaccctatccctagtgatttatggtccccccagttacaaggaaaaaggctataatgatgacaccaatagacatccatggactaccggtgtctatggtatagacacaa

SEQ ID NO: 14240 - DNA, 1381 bp, Glycine max
ggggaagtggtaaccgacacagcagaaatgatatgatgggttgtggcggtgcattctcagtgtggctgccagtgtttgtgtcttgttttacagcaatagcattggctgggactgggtgcgataaggcaccggtggtgttcgtgttcggcgattcgaactcggacacgggtggactcgcttccggtctgggtttccctatcaatcttcccaatggccgcaatttctttcacagatccactggccgcttgtccgatggacgcctcgtcatcgacctactctgccaaagtttgaatgcaagtttgttggtaccatatttggacgccttgtctggaacctcattcacaaatggagcaaactttgcagtggtggggtcctctactctcccaaaatatgttcctttctccctcaatatacaggtcatgcagttccggcgtttcaaagctcgctcccttgaacttgttaccgcagtgcaagaaatttgatcaatgatgaaggcttccgtgatgcactctacttgattgatattggacaaaatgaccttgctgattcatttgccaaaaatctgtcatatgcgcaagtcatcaagaaaatcccagcagttataactgaaattgagaatgctgttaagaatttatataatgatggtgccaggaagttttgggttcacaatactgggccgttgggctgtcttccaaaaatactcgcactggctcagaacgaaggatctagattcattgggatgtctttctagttataactctgcagcaagattgtttaatgaagccctgcttcattcaactcagaaactaagatctgaactgaaagatgctactttagtctatgttgatatttataccattaagtatgacctcatcacaaatgccgcgaaatatggtttctcgaatccgttgatggtatgttgcggctatggagggcctccttacaattttgacgtaagggtgacatgtggtcaacctggttatcgggtttgtgatgaaggggctcggtatgtgagttgggatggaattcatcaaactgaggctgcaaatacattgatagcttctaagatactttccatggcttattccacaccacggacaccttttgatttcttctgccaccaatgattatgcacactgagtgtgcaaaacagtgaatccactgttagttcattagttgttgatttaccatcaatatagttctccaagaacagagtttgttatgtagtaacgcccacgttgaagttttaaaagattagggtcttgcaattgggctgtaactagtggcctatgttaccagaaattgtatttttctttgccaaattggatgtatgctgtattatgtaaacaattgatgactaaaacgatttttggcctgtttt

SEQ ID NO: 14241 - DNA, 440 bp, Glycine max
actcgagccgaatcggctcgagcagtatgatgggttgtggcggtgcaatctcagtgtcactgctgctgctgcttctctcttgttttacagaaatagccttggctggctgcgataaggctccagtgctgttcgtcttcggcgattccaactcggacacgggtggactcgcctccggactcggtttccctataaatcctcccaatggccgcaatttctttcacagatccactggccgcttgtccgatggtcgcctcctcatcgacctactctgcctgagtttgaatgcaagtttgttggtaccatacttggacgccttgtctggaacctcattcacaaatggagcaaactttgcagcggtggggtcctctactctcccaaaatatgttcctttctccctcaatatacaagtcatgcaattccggcgtttcaaagctcgctcc

SEQ ID NO: 14242 - DNA, 460 bp, Glycine max
atgacatcacacggacgcatacataagcttggaattcagatcttgtgactctgtttacgtatatatgatgtattcacatgcgtgagtgtttctgaacttttgggaagtctacaacttttgattttgggacctgataagttgtatatgatgtattcttggggcttaaaatagacattgacataagtgattttaccatggtccagtcccttagatcttatgtataaaggaccctgaatctggctgaaaacccccagattttttacttcttttgaatagtattttgctagagagaacccaatgatcttcaatagtagaagtactcaagaacttttgtgaaaatttctgcactataatgtgttctctatttagcatatagtttatattaactgctctaaactatccatcctaatagttcatattgactgctctaaaccatccatcctaatagttcatattgact

SEQ ID NO: 14243 - DNA, 840 bp, Glycine max
ggctaaagagagtgtgaagatgctaaagacataaacataagaaagagcacaaaacaaaacaaaaaaaaggcagtgcgagtggagtgaagtgaagtgagtgagagaagcgcaaacaagtagaagagaaaatcatggcagtttctgtaaccattttagttctcatcatcgctctgcatctcatagccttcgtctttgccattggggccgaacgacgtcgtagcgaggccaaagtggtccccgacgagtacgacgaccgaaccttctgcgtttacaccaccgacgcttcctccgtctacggcctcgccgccgtcgccctcctgctcctcagccacaccgtccttaacggcgtcacccgatgcctttgctgcggtaaaggcctcgtctccggttgctccgccacttgcgccgtcttctccttcatcctctcatggattagttttttggcggcagaggcgtgtctgttagcagggtctgcaaggaatgcataccacacaaagtacagagggtattttgtgaatcacgatttgtcttgtgctaccctacgcaagggtgtgtttgctgctggagctgccttgaccttgttgtccatgttgaccgccattttgtactattgggcacactccaaggctgacactggtttctgggagaagcaccacaatgaaggacttggattggccacgcaacaccaccaccaaggtcctgactctgataaggcctgaatggtttatttcttggttttaaactcaattttggtggtcctcttattgcttttggataatggatgaatatatagtatttatgctgtaataggagaatgcctgaaatcggacgcgagggcga

SEQ ID NO: 14244 - DNA, 504 bp, Glycine max
gagcacaaaacaaaacagaaaaaaggcagtgcgagtggagtgaagtgaagtgagtgagagaagcgcaaacaagtagaagagaaaatcatggcagcttctgtaaccattttagttctcatcatcgctctgcatctcatagccttcgtctttgccattggggccgaacgacgtcgtagcgaggtaaccctaccccgtctctttctctctcctctcgctttggtttccgcaattgacctctgaaatctgattccctttcaggccaaagtggtccccgacgagtacgacgaccgaaccttctgcgtttacaccaccgacgcttcctccgtctacggcctcgccgccgtcgccctcctgctcctcagccacaccgtccttaacggcgtcacccgatgcctttggctgcggtaaaggcctcgtctccggttgctccgccacttgcgccgtcttctccttgcatcctctcatggtaaccctccactaacctcaccctcttttagttacgca

SEQ ID NO: 14245 - DNA, 277 bp, Glycine max
gaatttaggaaaaagaagttgaaatgtaggaataaaagaaaaaggaagaattaggctgaggaaaagccggagctaaagagagtgtgaagatgctaaagacataacaacataagcacaaaaaaggcagtgagtggagtgagagaacgagagaaatcatggcagtttctgtaaccattttagtcctcatcatcgctctgcatctcatagccttcgtcttcgccgttggcgccgaacgacgtcgtagcgaggccaaagtggtccccgacgagtacgacga

SEQ ID NO: 14246 - DNA, 473 bp, Glycine max
ctagtcctcatctctctgaaactacactccactccatctccatggaggaacacaaaaaagaagggttttttttgcccacaccagttgcaaaactaatatcctttcaaacggatttgatctacaatggcctggtttctctcttttcccctatccactctcttttctccgtggcttctgagtcctaccaccgtgctgaggagaccaaagacagtgttgaatcagcagtgcaacgtgctctttctcatcaaatcactcatggcagcgcactcttgctgaagaaactgggactttgcttcctgagtgttgcgtatgtgtgcatggttatgattttggctctcattctggctgctgtggtgggtgttgctttggttcggttgtgggtggaggaacccgtgtctgtcaaggaaaatctgcattttgattacactgaagctcaccctacggctgtgtttttattcaatggagttagaagc

SEQ ID NO: 14247 - DNA, 545 bp, Glycine max
aatgttacacggtggctctggcggcgctacaagaccccgctccagtggctgctatgtttcccccttgggacgcgtccctctggtcgtgttttcttctggtcctacgttttctacctctcgcgtttccttcacatgttgagaaccgtcctcgtcgtcctacgacgtcgtaagctcgttttctttcagctcttctaccacgcgatttccaccttcatgtctttcctgtggctcgagttctcgcaatctttccaagttctggcgatcctcttcaccacgctcgcgttctccgttatgtacggctaccgcttctggacatcagtggcggcgcgtggcgcgtgcctgccactcgtgctcaactgccagattgcgctgcttgggtgcaacttggtttgccacgtagcagtgctcttgttgcattttctaacaggagggtgtaacgggattggcgcgtgggtcttcaattccgtgctcaacggtgctattttgttgctgtttcttaatttttacgtgaggatgtatttagcaaggaggaggagcgtaagggt

SEQ ID NO: 14248 - DNA, 658 bp, Glycine max
  unsure (1)..(658): unsure at all n locations
atagaactcgtttcatatgtctcattcttctctggttttgttttttggcaaaatcattcggattaattcaatttctctgtgtaaatactttaacgtttccaattctcaccttcgcccagtgatttgtagtcagcttttttcttgttcaaagatgcactagtagaagagggaattaccaagtttccaagctttcctttagagtagaagcaaagaggtaaagtgtcataaaaagctgtaggcttccttcaatgggtgctcctaagcagaaatggactgcggaagaagaagcggcactgaaagctggtgtactcaagcatggggcaggaaaatggcgcaccatacttacagatcctgagttcagtgccattttgcatatgcgttcgaatgtagatcttaaggataaatggaggaatataaacgtgacagcgatatggggatcccggcagaaggcaaagcttgctcttaaaaggaacctgccagcccccaaaattgacaataaccatatggccttgagtaccgtagttcgacatgatgaagttcttgatactaaacccttggcagtttctggtggaccattgcaatctaccaatttgaaagaacanatatctaggttggtggataatcatatattagaggcaattgtctacatgaaggagca

SEQ ID NO: 14249 - DNA, 399 bp, Glycine max
  unsure (1)..(399): unsure at all n locations
tcctcatgcacttttgcactcttatttatcgctaaatatcaatatcaattatcttcctctttaagtcaaaccataactattccatttctttccacccccacagtttttctgaattctgggtgttgagtttccttttcttcattttttttccctcccttggatgtgttgttattttcaatccaaaaggccatgcaaaactatttggtcttgtgataactttgtgttggtgtgaggcttgttattgttcatagaagagagtttgttttgttattggtgtaagtgtgtcggtggaaatggaggcaacaagtttggtggagaggggtagagagagagttggacatgttaacaaggttagttatgtgagaagggtcattgcanagaagaagaaacaactttatc

SEQ ID NO: 14250 - DNA, 1599 bp, Glycine max
ctttctctctatccatatgctatgcatatgcttattctctctctctctctctcactattgatctgattactcgttgtgtactataaccaaattggagcaaccccttttgcatctgatcctagaatcacaagcctagctacccgttttctaccttctcatgaccttaggtgtttggttgtgaaaaatgacgagggtgactcgtgattttggtgatacgatgcaaagagaggctgtgcctgcggtttcttctgatgtggtgtttgcttctgctcggtttcctaattacaaaattggagcaaataatcagataatggagacaaaggatgacccaaaagtgctatcaatgaaggaggttgttgcacgtgagactgcacagctgttggaacaacataatcgtctctccgttcgtgaccttgctagtaaattcgagaagggtttggcggcggcagctaagttgtctgaagaggctagacttagagaggcagcatcattggaaaaacatgttcttttgaaaaagcttagagatgcacttgaatccttaaaagggcgtgtggcaggcagaaacaaggatgatgtggaagaagctattgctatggttgaagctctagcagttcagttgactcagagggaaggggaactaatacaagagaaggcagaggtgaagaagcttgcaaattttcttaagcaggcttctgaagatgctaagaaacttgttgatgaggaaagagcttttgctcgtgctgaaatagaggatgccagagcagcagttcaacgagtggaagaggcacttcaagagcatgagagaatgtctcaagcttcagggaagcaggatctggaacagttaatgaaggaagttcaagaggcccgaagaattaaaatgctgcatcagccaagcaaggtcatggatatggaacatgagcttcgagcattgagggctcaacttgcagagaagtctagactttatcttcgtctacaaaaggagttagcaagagcaaagaaaggagaggaaaatgctcccaatttatatgaactagaagggactgaaacgttaggttcttatttgcaaattcaaccttgctctgataatgcccctgaagtttcaaaatgttcaattcagtggtatcgtgtatcatctgatggtgccaaaaaagaacttatctcaggagcaacaaaatcagtttatgcccctgaaccttttgatgttggacgcatattgcaagttgatattatttcagaaagcgagcacgtcacactttcaaccgctggtccaatagatccagctgctggtttgggaacctatgtagaggcactagtgcgcaaacatgacactgaattcaacgtggtagtaacacagatgaatggttcacatcatccaactgaatctattcatgtgcttcatgttggaaagatgaggattaaactttgtaagggaaagacaacaattgccaaagaatactattcaagttcaatgcagctttgtggagttcgcggaggtggaaatgccgctgcacaagcactattttggcagccaaagcaggggcattcttttgtattagcttttgaatcagagagagaaaggaatgctgccatcatgcttgc

SEQ ID NO: 14251 - DNA, 192 bp, Glycine max
accggttttatcccaggggggttttagtgtgatttgaagaaccttgacgggctgccctactagtaagggttttgggtcacagtccatgatttagccagttgtgatgatatggtattcacaaagatcgctgtatcctcgttacgtgtaatataaccagaattagaatcaaaagttgtaaagccagccgatttc

SEQ ID NO: 14252 - DNA, 704 bp, Glycine max
cactctcaatcttgggggtccttcattgcgaaacatgggtactggaattggaaccaattctaataacaaggatccctttagttctttgtctggtattggatccaagcaatctgctactcttaattcagctcccaaaggaccaaaggttgatttgggggacgatggttttggtgattttcaaaatgcttccaaacccagctccactgcgtttccattcactgcttctcctggaattgatatcaattttactggatcaggtgatagtggtgatccaatggacatgttttttacggcaacttcctcctcggcctctggtggaggtgctgctgcggcctctgatggatttggaacacaggatgattggggtttggattcggagtttggtgggggaggccatgatgtaggtggcaccactactgagcttgaggggctgcctcctcctccttccggggtgtcaggttccactgccaaaggcaaagggatggacaattacaagcaggggcagtttgccgatgctattaagtggctttcgtgggccgtcatccttctacagaaagctggggatagtgcggccactgtcgaggttttgtcgtgcacggcttcgcgttacaaagaattggggagtataaaaaggcagttgcagattgtacaaaggttcttgaaaatgatgaaaccaatgtatctgtcctggtacagcgtgctct

SEQ ID NO: 14253 - DNA, 1232 bp, Glycine max
cacagctacactcgcatgaatttcttctataccatcaaatgtagcggtaaagaaatcgttaaatagagtctgtctttgtcccttttctgcagattaaagcatacacacacatggtgggtagtagcagatggattaattgttgtgcatggtggggttcagaagcatcttctacaatgaggctcttcttgttcatggtgcctctcttagtgcttgcgggctttgcttctataaagggttcaactgtttataacggaagagattttattgcaaaacgttatgcctcgtggagctctctaattactccttcaaattcctcgtcacaaacacttcttgatcctccttcaaattcctctttacaaacacttcatcaatctaatgaaactgaagttttcaatgtctccaaacccgggttcaatttagctcctgcaaatgaatctgatgaatctcacccaagacagaagcggaaaagaaaattcagtttcttagataaaactgaagctgttctagcacaagctcgagctgcaatcagagaagctgaaaattggaatcaaacacaagattcagattatgttccagtaggtccaatgtattggaatcctaaggaatttcacaggagctacttagaaatggagaaacaattcaaagtatttgtctatgaagagggggaacttccagttttccatgaaggaccatgcgccagcatatactccacggaggggagcttcatccatgctattgaaatgaatgagcattttagaacaagagatcccaagaaagcacatgtgtttttccttccttttagcgtagtaatgatggttcgatacgtgtacataagggactcacacgattttggccccataaaaagaacagtcagggactatatcaatgtcattgctgcaagatacccttattggaatcgaagccttggagctgatcacttcatgctctcttgccatgattgggggccagaggcttcaaaattctcaccttacttgcgtaagaactctattcgtgtactttgcaatgccaacacctttgaaggattcgaccctagaaaggatgttttcatttccagaaattaatctccaacgtggtccaatagatggtttacttggtgggccatctgcatctcaacgttcaattttggcattctttgctggaggcattcatggccccattaggccaattcttcttgagcattgggaaaaaaaggatgaagatattcaagttca

SEQ ID NO: 14254 - DNA, 629 bp, Glycine max
gtttgattccttagccctctcaatttctctctctagtgtttaatttggtaacaaaaagagacaaaaccaaaccgctacatgcatgaatttctggaaccatcaaatgaaactgtagttaaagaaactcaccagccagctgtgccaaggagtgatgaaaagtgtgagtcatgcttgttaaatagagttgagttgtcccaattctgcaaaattaagcttacttggaatatcacaaatgggtagtagcagatggaattggtgggcttgttggggttcagaagtattttcaaaaatgaagctcttgttgttcttggtgcctctcgtactagttgctggctttgcttctgtaaagggtccaagcctttgcagatggggtttcattgcggactgttctatctcatttactcctcttcctgcttcttcaaattcctcctcacaaacacttcatcaatctaatgaaactaaagttttcaatgtctccaagcccgggttcaatttagctgctgcaaatgaatcggatgaatctcacccacgacagaagcagaaaagaaaactcagtttcatagatagaaatgaagttgttctagcacaagctcgagctgcaatcagagaagccaaaaatgagaatcaaa

SEQ ID NO: 14255 - DNA, 249 bp, Glycine max
ttacccctctcaatttctctctctactgttttggtagcaaaaagagacaaaacagctacatgcatgaattctgcagctatcaaatgtaactgtagttaaagaaactcaccagccagctgtgccaagagtagtgatgccacgtgtgatgctttgttaaatagagtcttgagttgtcccaattaattcttcacaaattctcaatatgggttgtagtagcagatggaattgctgtgcatggtggggttcaga

SEQ ID NO: 14256 - DNA, 846 bp, Glycine max
gtctcggggagagagagagagagaaaacaacaacaaacctcatcaccacacagagtagtagagagagagagagaaaaaaaaagagagtccgttagttaatttcagtttatttattttatatttttaaaaagaagagaaaaagcaatggtgacagaggaagaaatatctgaagcggttcagtctctgctgcgggaatcaaaccctagtagattcacgacgctaaaccaggtggtggaggagctccaggccaagctcggccacgacctcactcacaaaatcgatttcatcaccgcgcagatcaacctcctcttcggatcccgacaaccgcaacaaccgccgcaaaacccgcataggcagttacaacagcctaaggaccattttgcccctccgccaaaccctaattttcactctgcccctgtcagtgttggctttcagttgcagaatttctcttcttctaacgctgttgtcgctgctgctactgctgctgatgcttcgcgcattgaagctccttccgctcctgttgttgttgaaggcaaccaggttcccaaggaaagtactcaaactaaggtgaagagacgaggtggcccaggaggtctcaccaaaatctgtggtgtttcgcctgaacttcaggtcattgttggccagccagcattgtcgaggactgagattgtgaagcaactgtgggcttacataaggaagaacaatctccaagatcccagcaacaaaaggaaaataatttgcaatgatgaactgcgtgtggtgtttgagacggattgtactgatatgttcaagatgaataagttgctatctaagcacattatcccccttgaaccaaccaaaaagcct

SEQ ID NO: 14257 - DNA, 623 bp, Glycine max
gagaaaggagtgaaccaagattgctgcatggtgtgggaggaatttggatgccaagaggacatgatattttgtgggatatttgatgggcatggaccatggggtcactttgtggccaaaagaataagagagtcaatgccaccatctttgctatgcaactggcaggagacattagcccaaacttcaattgatcatgttgattttgatgtagagacagagaaaaaacaacaccggtttaacatgtggaagcattcatacttgaagacttgtgctgccattgatcgcgaactagagcagaatcgcaagatagattcattttacagtggaacaactgccttgtcaattgttagacagggtgaactcattatcattgcaaacgttggtgactctcgtgctgtgttagctacaacatcagatgatggaagtttggtaccagttcagctgacagtagatttcaagcccaatttacctcaggaagcagagagaatacttgagtccaatggacgagttttctgcttagacgacgagcccggggtgcacagggtgtggttgccggatgaggagtttccaggacttgccatgtcaatggcttttggagactactgcgtcaaaaagtatggccttat

SEQ ID NO: 14258 - DNA, 459 bp, Glycine max
aggagcagtatttggctgtttagttgaagcacctctgagatcatccagcaagaaaaaataccagggaacaaacaatacgtttgttttcacaaatatctctggtcatcctgttatatatcgtccaacaggagtaaaccgctttttcacactttgcaacactgactacatagcaattggtggaggaggtcattttgcgctttatttggatggtgatcttctactggaagattgaatggttcaagttcagtctcggaaacgtatgggaatccatgccttgcaaattctcaagactttgaagtgaaggaagtagagttatggggctttgtatatgcttcaaaatatgaggcagtacttgcaatgagcaaaacagaagcacctgggatctgccgattctgaatatttacctgatgtgtgaatcaaatggcttgcagttggcatttcattgaatggtcacttttc

SEQ ID NO: 14259 - DNA, 476 bp, Glycine max
acactgtgcaacactgactacatagcaattggtggaggaggtcattttgcgctttatttggatggtgatctgtaaggatgctctactttcatgatgatattttttttttttcgttttaagaatgttataattctgaatctataccataactatatataaatgatcaagattaaaagttagtagtcatatgaactcttgaaaggaatcattgttatttatcttttaatcttgattattgatctaatgatctatatttatcattcttagttctcataataattatgtgttcttatatggtttactgcttatatttataggcttccttccatcaataatatcatcagcttgagttttgtttatggttttggttcttaaccccttctgcatttgtgacatctactggaagattgaatggttcaagttcagtctcggaaacgtatgggaatccatgccttgcaaattctcaagactttgaa

SEQ ID NO: 14260 - DNA, 329 bp, Glycine max
gcagcatcataagccatagcagcttcatggctctgatgccaaactgcaatttaccagaactctctatcaaatctcaatctcagtgtccaccaccatcaccaccaccaccttcttctgttaccaacaacactcaaatggaaaacctgcagcagattcaaaacaattacatagacatggctacgtgttctaatttcaacaacatcaataatccagaagtttccatggcctctcagcaggttggagttggaccaatttacaccagtgactccatcgtgtctcttcccttggacaccaatcccaagcctgtggagaatgaggtcgagtttcgt

SEQ ID NO: 14261 - DNA, 1104 bp, Glycine max
aaaggcaagagaagatttgttactggagatggtgaagaaatgtcactaattcctggtaccagtgttgaagaagcatacaataaattgactgttgaactagaaaagtgtgttccaacattggttggcatagaatgtcccaaagatgaaaaacttccccgtcgcaaaatttttgataaacccaagacgcgctgcttcaccatacttcctatggaatttaatctagtggtgcgtcaaaaattcttgaattttgtgcgattcattatgaagaaaagggacaaattgagttgccaggttggaatcaatccatattctatggagtggactggtttggcaaatagactgttgagcaagggaaatgacattttgtgttgtgactatgctagttttgatggtctgataactaagcaagtcatgagcaagatggcagaaatgataaacagtctttgtggtggagatgagaaactgatgcgtgagagaacgcatcttctgttagcttgttgctccaggatggcaatctgcaaaaaagatgtttggagggttgagtgtggtatcccttctggatttccactcactgttatctgcaatagcattttcaatgagatgcttatcagatatagttatgaaaagttgttgcgtcaagctaaggctcctagtatgtttctccagtcttttaaaaattttatttctttgtgtgtttatggagatgataatttaattagtgttcatgagtatgttaagccatattttagtggttctaaattgaaaagtttcctagctagtcataacatcaccattactgatggaattgacaaaactagtgcaactttacagtttagaaagttgtcagagtgtgattttcttaaaagaaattttaagcaaatgtccaatgttttgtgggtagctcctgaagacaaagctagtttgtggtcacaattacactatgtttcatgtaacaatttggaaatgcaagaagcttatcttgttaacctggttaatgtgttgcgtgagttgtacctgcacagtccagaagaagctcgtcaattgagaagaaaggctctctctcgtattgagtggttgcaaaaagctgatgtgcccaccatagca

SEQ ID NO: 14262 - DNA, 367 bp, Glycine max
ctctagggttcccaaaattcgtgagagatctctctcgccgcaccgctccgctggaaccatgatctctgcacaggacgactaccaccgccactaccacttccagccgcagcttcccaactctattgacacctctcggtagcagttcaccgcggatcgcttcgagctcttcttgtaaagtaggaacccgcgtccttcactcttttgccattacatgatcatgattctagtgaagccttttctcccttccctgccattgttccttttagttggtaaagcttgcctttgttacgggaatatggccaatgcatggaagcacaaaatatagaaatgctttccgcatgctgggtgatcagttagctcttgcttc

SEQ ID NO: 14263 - DNA, 603 bp, Glycine max
gcgcgtgttgggataatccaatataatctagagggtgcagagtagagtaaaaaaagataaagatgatcgatatgaaattgatgatgatgttgctgatgtggggctctgaatcccaaggccgattactgtctatcccaacaaaacctaacccagatgatgctcctgcctctgctcgttggctcgtctccctcaatttctggggagtcttgaatactatctcatctgatttgggtggagctccctttgggaatgtggtatcatatagtgatggactacctaacgaaagcactggaatcccatacttttacttgacaactctagacccgacagcaagaaatgcactgcaagatgataaagcttcattcacggtcagtgaataccctcttgggacctgtggcaggagagacccaatgaaccctacttgttccaaaatttctctaactggaaagctgaaattggttgatgaaaagtccaaggaagccgaatttgctcgaaatgccttgttttccaagcatccagagatgaaagactggcctgaggatcacaactttcaagtcttcaaattagaaattgaaaatatatttctaattaattggtttggtg

SEQ ID NO: 14264 - DNA, 604 bp, Glycine max
ctgagaaaagatcatctacaagtcacaaggtttcaaaatctagtgcaagtgctgcagacggatctcggggatcaaaggctgcggttgtacccaatgaagtagctgtggaaaaagcaattcatcaaccacctcctgctgatttgcttgacttggatgaaccaactgtcactacggctcctccttctgtggacccattcaaggaattggaaggacttcttgacccaagcactaagtctgcaacaaatcataatgtagctgctgctacaaatgcccctgatattatgtcactctatgccgagactactgccagtggtggttattctatacccgtgagtggggggtatgatgaaatcttttatctgaattgtcacatgcagcagcaaaagctactagtggagaaacaattgtgacgtctttgccacaatctattatgggtcgaaatgctaaagattctttggagaaggatgctttagtgaggcagatgggtgtgaatccctcgagtcagaatcctaacttgttcagtgacttgcttggctaatcttttttctaagccaattctagatcatgatgcttgaagatagattgcctagcgactttgctgctt

SEQ ID NO: 14265 - DNA, 445 bp, Glycine max
tcgcacgcacgcgtatgcagctccagaataaaagaaagcacgttgaagattgtaacttgtaacaacaactatggctagcgatggcagcgaagagttcaggctagtgtcaccggcgttcaaaaacggggggaagttaccgaggcactacaccgacgatggtcagggtacgaagaagaacatatcccctccattggagtggtataacctcccggaggggacgaagactcttgccctcgtggtggaggatattgatgcgaccgattctggtgggcccatggtgccatggactcactgggtcgtcgcaaacatcttggccacggtgaagggcttgccggagggattttccggcaagtcggccgagatggggggcgactacgcggcgatcaaggaggggaacaatgacctgaaggtgcctgggtggaatgggcccaggctgcccacgcct

SEQ ID NO: 14266 - DNA, 1328 bp, Glycine max
gacgttccagtggacattatgcgcttgttacgcaacaaccacttagaggaagggccaagcagggaggacaacgggtaggcgaaatggaggtttgggccttggaaggatttggtgttgctcatattttacaagagatgcttacttataaatctgatcatattaaaactcgccaagaagtactcgggactacgatcattggaggaacaatacctaaacctacagatgctccagaatcttttagattgctagttcgagaattacgatctttagctatggaactgaatcatttccttgtatccgagaagaacttccggattcataggaaggaagcttaattggactgaatcagaatttttattctatgattgatcagtataaacatcaacaactccgaattggatcagtttctcctcaacaaataagtgcttgggcaaaaaaaatcctacctaatggagagatagtgggggaggtaacaaaaccctatacttttcattacaaaaccaataaacccgaaaaagatggattattttgtgaaagaatttttgggcctataaaaagtgggatttgtgcttgtggaaattatcgagtaatcagagataaaaaggacgacccaaaattttgtgaacaatgcggagtagaatttattgattctcggatacgtagatatcaaatgggctatataaaactggcatgcctagtaactcatgtgtggtatttgaaacgtcttcctagttatatcgcaaatcttttagataaatctctaaaggaattagaaagtctagtatactgcgatgtgtgatttgataaaaatttttattgtacagattccgaatgagaaactgtcattccatttaatttaattgggatgccctgaatctgacatgtctcttggaatgagtaacatgaaactcagaattatggatgtattgaatactccctaataaaaagggaattggtctatggtcaattcagtaacaaaaaatatgaaattataaatataaatttctaactgtacgtacctcgtgaaaaaaaaaatattttttcttgtagaattagcgattccatcttttttagaaagaactgaaattatgttcaaataagcaaatatatcgtggttgcagaagtctatacatcgcatataggcttaaggacatcctgacagaaccatcgaggcgacgtttggacctaaaagatcgaatggaatgatacatagacaaataaatctcttatgaatttcgggatactcttttatttaattaatttaattaatccatttttgaagattccgcattcgaaggggagtagactactcaagaactttacttttc

SEQ ID NO: 14267 - DNA, 1196 bp, Glycine max
gtcatctcgtcgagtattggctagtttggataagaaacccgaaaccaccgatgttttatcagcctcaaatgaatcccatttttatgttctcatcactttggaggcagtcgtggacaagcttggtggatttttaaatccatatctcacaaatatcatggagcttctggtgctttatcctgaatatgtttcaggagtagatgcaaaagtggagtctagagctcatggagtacgaaagcttcttgctgaaaaaattcctgttcgacttgccctgccacctttgttaaaattatacccagctgccattgaggctggggataaaagcttaacaattgtatttgatatgttgggaaccataattggtacaatggacagatcatctattgtggcattccatggaaaggtatttgacctttgtttggttgctcttgatctgcgccgtcaaagtcctccttcagttcaaaacattgatgtagtggaaaaagctgtgcttaacacaatgactgttctgaccctaaaacttactgagagcatgttcaagcctcttctcataaagagtattgagtgggcagaatctgaagtggatgaaactgcctctagcggaagcattgatagggtcatatcgttctatggcatggtaaataagcttacagagagccatcggtcattgtttgttccttacttcaaacacttgcttggtagttgtgttcatcatcttagtgaaggtggagatgtgaaagtgtctagagtgaatcagaagaaaaaggccaggattctggatgatggcaatataaaagaaataggcagtgtgtctatcaatgcctggcatctcagggcactagtcttgtcatccttacataagtgtttcctgtacgacactgggaccttgaagtttcttgactcctcaaattttcagatgttgttgagacctattgtttcacaacttgttgtagatccaccagcactgttggatgacagcattaatataccaagtgtgaaggaagttgatgacctactggttgtatgcattggtcaaatggcagtgactgctggatcagaccttttgtggaaacctttgaatcatgaggttttgatgcagacacggagtgaaaaattgcgagctaaaatattgggcctcagaattgttaaatattttgtggagaacttgaaagaagaatatctagtgttcatagctgaaa

SEQ ID NO: 14268 - DNA, 517 bp, Glycine max
  unsure (1)..(517): unsure at all n locations
acgagctccactcctcctccatcgcccctctcctcttcttcaccatcgcctctgtcctctcctacgtgacctccacgcgcccctctctcaccaccaccaccaccaccaccaccaacaacaacaacaacaccaccaccaccaattccaacaacaataatccttcctcggacgactccgtctccgccttccgcgccctctcaacagaacacatctggtccctcgaagcccctctccgcgacgcccactggcgctccctctacggcctctcctaccctgtcttcaccaccgtcgtcgacaagctgaaaccccacatcgccctctccaacctttccctcccttccgactacgcccgggttcgctatggtcctctcccgcctcgcccacggcctctccgccaaaaccctcgcctcccgctactccctcgacccttacctcgtctacaagatcaccaacatggtcactcgcctnctcgccaccaagctctaccctgaattcatcaagatccccgtcgggcggc

SEQ ID NO: 14269 - DNA, 552 bp, Glycine max
tatggcgcgatccttacctcttgacaagcataccttggtaacccgtttgaggaatatgtttggtgaggttgtttctgtgactggtgatggaaccaatgaggctcctgcactgcctgagtcagacattgggcttgctatgggcatagctggaactgacgttgccaaagaaaatgctgatgtcattataatggatgataacttcactactattgtcaatgtgggccagatggggacgggccatatacataaacattcaaaaatttgtgcagtttcagttaacagtcaatattgttgctctgattattaactttgtttctgcatgcatcacaggatctgctcccctcacagctgttcagttgctttgggtcaacctgattatggacactctgggtgctttggccttggccactgaacctcccaatgatggacttatgctaagacccccagttggaaggacaacaaattttatcaccaaacccatgtggaggaatatttttggtcaaagtttatatcaactaattgtcctgcggtcctcacttttgatgggaagag

SEQ ID NO: 14270 - DNA, 390 bp, Glycine max
gaacaaagactatgaaagtatctatgaaattatgcagcaaaggaggctggaagaaggcgtcacttgaagttcttgatgaggaaagtaaaccaagttcatttcctaaagaactccagtcagacaatgctggattggtggaaaccgcatctgatggcaatgcaactgtggtcaataaaccatgtgacagtgggacagatacaattgatggccaatcaaatcaactggagattgctagccagacaagtgaggctgctgatttttcatgtgcagatgatgatgatagtgaccaaagttgggtggttaggtctttgtctgaatcaagtgtagcctgtataacttgtgacttttctatgcataatgttcttttactaattggtttactcttgctgg

SEQ ID NO: 14271 - DNA, 302 bp, Glycine max
cacgatccatctacacggtcaaaaagaaaatcgttttccttgagaaaatacggacacagagacagagagagggagagagagaaggaaatgggaagcacaaagtttctattgttggtgatggtgtttctcgcagtgtgcgtggggacatgcaggccttggggtgatgatgtagttgaagatggagaggaggccaaacattttgcagcaaaagccgtgcatgatgtcgaggaagagacccgctcttgggctgattgggctcaagacaagttctccaaaagtttcggggccgaagaggatctgaa

SEQ ID NO: 14272 - DNA, 710 bp, Glycine max
  unsure (1)..(710): unsure at all n locations
gggagacgcatggttctgaactaattgttataaataatacctaaaattttgagttgtcctaaacattggggtttaaacaaatccaatctctcaatataaaacccaatgatctcaccctcactctgtttctgatttctcactcttcgtttctcgttcggttcatcagcgtgtgtctcagccatggcgtttccctacatggaagccgttgtcggatttatgatattaatgtacatttttgaaacttacttggatgtgcgacaacatagggccctcaaacttcctactcttccaaagactttagaaggtgttatcagccaagagaaatttgagaaatctagagcctatagtcttgataaaagccacttccattttgttcacgagtttgtgacaatagtgacagactctacaattttgtactttggggtattgccctggttttggaagaaatcaggagattttatgacaatagctggtctcaatgctgagaatgaaatactgcatacccttgcctttttagctggggtgatgatttggtcacagataactgatttgcccttttctctgtactcaacttttgtgattgaggcccgtcatggttttaacaagcaaacaccatggttattctttagggacatgattaaaggaattttcctttctgtaataattggcccactatagtggctgcaataattgtaatagtacaganagga

SEQ ID NO: 14273 - DNA, 261 bp, Glycine max
cggctcgaggatgcatcttaatactcactgttgctgagatttagcccctgaaaatttgaaaatagaatataggatttaactgttccatgttttcttctgatctattttcaggatttatgatattaatgtacatttttgaaacttacttggatgtgcgacaacatagggccctcaaacttcctactcttccaaagactttagaaggtgttatcagccaagagaaatttgagaaatctagagcctatagtcttgataaaaggt

SEQ ID NO: 14274 - DNA, 952 bp, Glycine max
tgaagcagtaatgcttgaagcggcaatgtttggtggaattgcagaggggactgggtatcactatggttatgcaccacatgagtttatgcaaaataggggtttcaatccccggccccaatatcgtcctccttcaccatcactggcagctcaacgcttgataagggaacagcaggatgatgaatatcttgcatcgttacaagcagacagagaaaaagaattgaaggccatggaggaagctgaggctgctcgtgaagaggaaagacagagagcagaagactctcgcaggaaattacaggaagaacaggaattggaaaccggattagccgccaaagaagtctcactaccaccagaaccatcctcacatgatgataatgccgtgaacttgatggtaaaaatgccagatggcaatcgtcgtggacgtcgattcctaagatctgataggcgacagtcgctgtttgactacatagatagtggtagggtggtgaaaccaggcaattacagactggtgagaccatatcctaggcgtgcttttagtgatggagaaagtgctgcgacattggatgaacttggcctaaccaacaagcaagaagctttgtttttagagttaatctgatgccttgatgcagtttgctacaaaacaagctattgaagtttttagtttattaaaattaaaatatgaatcacaatacacagacggatgtggcattttagttttaatctgggtttctactgtttgggtgatgcaatttataaatttacagatccttaaagatcaacatacagtaccgtcagagctttacttgtggtgactaaatccttatggcgaatgttttgtatattttgcggtaggattgaaataattcatgattattgattaatgaaattgcaactatcattccctttcaaaaaaaaaaaaaaaaaaaaaaaaaagggcggccgctcgcgataaaga

SEQ ID NO: 14275 - DNA, 561 bp, Glycine max
attaaaatagcctctttcttttagatttgatcaacaaaagcccctccccggacccaattggcagaaaaaccacaaaaattggaacaaagattcggcgaaggctaaaggaagatgagaagaagaccaggaattggagggttgcagacgcacgccgctgcaagagatcaattccgtttgcttggtgaaaatgtcgcaaagatcagaactgatttgatgaaggagcagcttgccacctttcgctctcagctcgaagatttcgctcgcaaacacaagaatgacatccgcaagaacccttcattcagatcacagtttcatgagatgtgtgctaaagttggagtagaccccttggcctcaaacaagggtttctggtcagagctgttaggacttggtgacttctattatgaactcggagtttaaataagtgattattggcttggccactagagcccacaatggaggactgatcgacctgcacgaactctgcagtctccttcgccagagacgaaaaagtgatcgtgaagttgtttctgaggatgattgtctgcgtgctattaagaagct

SEQ ID NO: 14276 - DNA, 261 bp, Glycine max
ctgtaagtgacgattgcgtaaaacaaagtatacatttccagttcccaatcaccatacatatgtgtacactagataaacatacaatacaaaaattggaacaaagattcggcgaaggctaaaggaagatgagaagaagaccaggaattggagggttgcagacgcacgccgctgcaagagatcaattccgtttgcttggtgaaaatgtcgcaaagatcagacctcctttgatgaaggagcagcttgccacctttcgctctcagc

SEQ ID NO: 14277 - DNA, 399 bp, Glycine max
gcgatagaaaagaaaaacaacccaccaatacccttccctggggcgggcccttcatcagggtggctgcgcatccctccgtttctcctaccgactccggggaaggaaggaaggagtgaacaacaaacccaaccaatacccattgcaataggtcttggtgttctaagtttctttgggtctgtttttggtgatctcactgaatcaatgattaaacgagatgcgggagttaaagactctggcacactaatacctggtcatggtggagtactagacagagcggacagttatgtgttcacgggtgctctagcatacaactttatcaaaaccgttttaccactgtatggagtatgacctgaaacaatgttaggtggtatctgcatagtattgtcactgacagctttg

SEQ ID NO: 14278 - DNA, 786 bp, Glycine max
ggaagagttatcttgcttcctgatgctgagctacagacttcaggtgcaaaggctgctgcatgtggtcacttatcatcattgtctgcagtttctgataaagtttacagtgatcagggagtgcctgcttcttttcgagttccttctggggcagttttaccatttggatccatggaattggagctagagaagagcaattcgactgaagcattcaggtctatcctggaaaagatagaaacagccaagctggagggtggtgaacttgatgttctatgccatcaactccaggaattaatttcttccctgaagccatcaaaagacataattcaaagcattgggagaatattcccaagcaatgcacgtttaattgttcgatccagtgccaatgttgaggacttagctggaatgtcagcagctggactttatgaatcaatacccaacgttagtccttccaatccaacagtttttggaaatgcagttagccaagtatgggcttcactgtacactcggagagcagttttgagccgccgtgctgctggtgttcctcagaaggaagcttcgatggcaatactgatccaagaaatgctttcaccggatttatcatttgtactacataccgtgagcccaacaaaccaggataataattgtgtggaggctgaaattgcttctggccttggtgaaactctagcttctggaacccggggtacaccatggcgtatatcatctgggaaatttgacgggcaagtgcaaacattggcttttgcaaacttcagtgaggaattgctggta

SEQ ID NO: 14279 - DNA, 574 bp, Glycine max
gacttccgttcacttttgaacccaaagagcgggtagctgagatcggagaaccctctctttcttctccttcttcagcagttgaaaataaaaaatggcagatggtgaggatattcaaccactcgtctgcgataatgggacaggaatggtgaaagctggatttgctggggatgatgctccgagggctgtgtttcccagcattgttggtcgtccccgtcacacgggagtgatggttggcatgggccaaaaagatgcatatgttggggatgaagctcagtccaagagaggtatattaactctcaaatatcccattgagcatggtattgtgagtaactgggatgacatggagaagatctggcatcacaccttctacaatgaactccgtgtcgctcctgaggagcacccagttctgctaaccgaagcacctctcaacccaaaggctaatcgtgagaaaatgacccaaattatgtttgagaccttcaatacccctgccatgtatgttgccatccaggctgctctatccttgtatgccagtggccgtacaactggtatcgatctagactctggagatggtgtg

SEQ ID NO: 14280 - DNA, 407 bp, Glycine max
cgcgtgacgaacaacatgaatgtcgttcatagaaccggacgttgttgagttgaggtaatgtcgtgtggacgtgaacgaacactttcatttaaaaatccaaacaccattgaatgttcagttttttttgaaagataatggcagacaccgaggacattcaaccactcgtctgcgataatgggacaggaatggttaaggctggttttgctggagatgatgctccaagggcagtgtttcctagcattgttggtcggccacgtcacaccggtgtgatggttgggatggggcaaaaggatgcatatgttggggatgaggctcagtccaagcgtggtatactaactcttaaataatcccattgaccttggtattgtgagtaactgggatgacatggagaagatctggcatcacac

SEQ ID NO: 14281 - DNA, 514 bp, Glycine max
tctcaactccctctttcaggtgctttttctctttccctatcactgatttttcaatttctttcagccctatcaacgaatacccataatgtttaaattcccaattttgtttcttttttcataatttcatcgattcacgcttcgttctgcttctgggtctattcaatttccctccaatcagcaaaaggacgctttcactcgagcaaaattgaatgcaatttctgaaaggctcgcacttgaagactccaacagtgaaacgtggaccccactatctgtgcttttcaagccccatcacaatgtgttgactgggaactatgatataaatgttctaattgcggctttggaagagaagggaaagagtgtactgtggcatgatcatagaaagggggcatcttccattgatgttgatgcacctgaggatgttttgatgggggttgtgatcaatgtggcattgaaaatgtttgctgggatctggagaagtagcactggattgcattgaggaagaattattgggttt

SEQ ID NO: 14282 - DNA, 615 bp, Glycine max
atcgcgaacatcccaatgaccaaaaatcctccaatatatatatataacttccccgttctctcatactcaacagaaaattgaaaaccaacataacaatgtcgttgattccaagtttcttcggcaccgggcgaagaaccaacgtcttcgaccccttctccctcgacgtgtgggacccattccatggcttccccggcaccaccgccctctccgctccgcgctccgagacggcggccttcgccaacacgcgcatcgactggaaggagacggcggaggcgcacgtgttcaaggcagacctgccggggctgaagaaggaagaggtgaaggtggagatcgaggaggagggaagggtgctgcagataagcggacagagaacaaaggagaaggaggacaagaacgacacgtggcaccgcctcgaacgctccagcggcagctttctccgccgcttccgcctgccggagaacgcgaaactcgatcagcgtgaaggccggcatggagaacggagtgctcactgtcactgttcccaaggtggatgtcaagaagcccgatgtcaagcccgttcagatcactgaaggctaagttgtgttctcaatcaatcaaaattcatgtgtctcaata

SEQ ID NO: 14283 - DNA, 404 bp, Glycine max
acatgcttttgttcatcatagtagtagtggagaggtctttcattattcagttggatttagcaccaccaagatgaaggttcaagaaacgaggtcgcatgttcatgcacttggggaagaagagaaggtgatgacaaggaagcagaaggctgagtccaaggcacatgaagtggaacattctccaaagaaggccaaggtggaaaaagaagatggccacatcaacgggaaatctgaaactggcgttgcagaagaatatgatgagttctgcaaagccacaaccgagcaccttcctttggaacaaatgagagacattctggaggccaatggccttgattcttctggctctgatcttgaaattacaagaagatgccaagacttgctgttttatggtgcatttggacaaatgc

SEQ ID NO: 14284 - DNA, 1734 bp, Glycine max
ctcattcccgttttcctttactggtaagttgtaaccctataagccgttgctcccaccgccgccgcgcagatctccgtttcaacttgggttatctctaaggtcctaaacaatcctctttcaaaaacataccgagaaaagtgtggaaatgacgacaccatcattggtagagtctctagttcttcaactccatgagatctcagctgtcaaatttggcaacttcaagctcaaatctggcatcttctcaccaatctacatagacctccgcctcatcatatcttacccttctctcctccaacagatctctcaaacccttatttcttcagtctcttccacttcctttgacctcgtatgcggtgtcccttacactgccttacccattgctacatgtgtctctcttgctcagaacattcccatggtcatgcgccgcaaagaaatcaaagattatggcactgctaaagctattgaaggcgatttcaagcctggccaaagttgcttaatcattgaggatttggttaccagtggcacgtcagttttggaaactgcggcgccattgcgtgctgtgggattaaagatcagtgatgctgttgtgttgatcgatagagagcaaggtggcagagaaaacttggaggagaatggcatcaagctgcatgcaattattaaattgactgaaatggtgaaaattttgggcaatcacgggaagcttgatgaagagatggtaggggttgttacgaagttcttagaggataatcgtaaggttgctgctttggcaaaggtggagaagcctgtaactaaggtcaaagctttgccatttggggagagggctaagctgtcgaagaatccaatgggaaagaggttgtttgagataatggctgagaaggagagtaatctatgtttggctgctgatgttggaactgcagctgaattgcttgaaattgctgagaaggttggacctgagatatgcttgctgaagactcatgtggatatttttccagattttactgctgattttggctctaagcttctctcgattgcagaaaaacataacttcttaatctttgaggatcgtaaatttgctgatattggcaacacagtgaccatgcaatatgaaggaggggtttttcgtatattggattgggctcatatagtaaatgctcacataatctcaggtcctggaattgttgatggattaaaattgaagggtttacctcgtggtaggggtctattactgcttgctgaaatgagctcagctggtaaccttgccaagggagattatacaacttctgcagtaaaaattgctgaggatcattctgactttgtaattggcttcatctcagtcaatcctgcatcatggccaggggcaccaataaatccttctttcattcaggcaacccctggagttcaaatggtaactggtggcgatgctttagggcagcaatataacactccatattctgtgatccatgataggggcagtgacatcatcatcgtgggacgtggcatcatcaaagcagcaaaccctgctgagatagctcgtgaatatcgtcttcaaggatggaatgcatatttggctaaatgtaattgatgcctgcattcctagaataaaattatgagcttaaattatgttttaatgggacatctgatctcactgtaacccagatgaataaggtcttggggtacaatatgaagacatttttcggttggaatattgaagtggatttttcattttctctgagg

SEQ ID NO: 14285 - DNA, 391 bp, Glycine max
atggatgcaaagtctttgttgtgaacagagactttgaccacaagcgagtggtgagttccatggtggagcaagtagatcacgttgacgatgcacgactgaagttggtctcagtccctgatggtttaggacctgatgatgatagacccgatttgcgcaagttatgtgattcgttgctgagcaacatgcctgccatgcatgggaagcgcagagatgatattcacttaccacgtgccaatagaggcagccttagtgttgcggatgtgtgcctgggatgggcgttggatgttgggagtacattgggaatctaaggagccctgtattgcccctcagcagcagcttttatgtgctctgctgttcatcgtcgtgaggcctattgatgatgggatcatgg

SEQ ID NO: 14286 - DNA, 738 bp, Glycine max
cccacgcgtccgcccacgcgttcggaagcgcatctggtttggtcccatatgatggccaggttcatctccaacaagacgaagacccacttactccgtcactccgaatcggcgaagggggtgatagtgtgccatcgccaccaatcctcggaagcaacgaaggcgaagtgggtggagatcgatggagtgaagctgttggaggagcacgtccagcgtgttatggtgaagaaggccacacccgattggcttcccttcctccccggttcctccttctgggtcccacctcctccttccccctttcttcacaagttctccatcccctctcatcccttcttccttcaagatgacgaatctgggaattctattgccacccctcgagggacagaggttactgtgcaactcaaggttatgacacccgctgaacacgtgtctctctctgaagatgaggatggatgatcatcatgggttgcaaactaagatcaatgagagggaactaagctatttgaagatcaagaagacagtgcatgaaaatgggaattcctgcacaggtgaactactgcttgctttcggattaacccgtctcacgttttttggtcttaatgttatttgtgtatactttggttggtgaccaaagcactttgaaaatataaccaaatgtgcgtagaatattgtcatgttgaaccttttacactgggtgatgtatgtatttgtgtaactaacaaaccaagagcttctttgagc

SEQ ID NO: 14287 - DNA, 504 bp, Glycine max
gagaaggacgaggaggttgaggatttgagtttcgatggctccgggttgaactatgattctgatgacttgactgagagcaattataataatgtttctgagggtaatactgggaagaatggtggggttagttccaacgccaacagcaccgtcatcaccggtttggatcagaaagggaagaagaagggaatgcctgctaagaatttgatggccgaacgacgccgccggaagaagctcaatgacagactctacatgctgaggtccgttgttcccaagattagcaaaatggacagggcttcaattcttggggatgcaattgagtatctgaaggagcttctgcaaaggatcaatgatctgcataacgaattggagtcgacgccggtgggttcttcgctcactccagtctcaagtttccatcctttgacgcctactcctcctacgctgccgtgccgaatcaaggaagaactgtgccccagctcattgccaagccccaatggccaacctgct

SEQ ID NO: 14288 - DNA, 510 bp, Glycine max
cttctttccagatccacagtatgaaaatgttcaacacatcatatgttgtgattcttatgctacatatgcttacgactttgtgtttgagaacaacgttggattttcaagaactaaatcagatgttcctacaattcagattgcattccagtactcagttgtagttcctcctcaggaactttctgtttctaattcaggaggggtttctacaaatagaaccaagcactcccttcagcgccggctaaggatccgaacattgcaatttggtgttgctcagaacattcatgaactttatgatagctgtgatcccgaagttgttctatctttgcttgttcacaaggttatattagcctctttggaggaaggagttagggagggtagaattttgcttcaagaatggctagtgatcctgacagctcagtacaatgatgcatataagcttattcagtatgataatggaagtccataagatctcagattgatgttgcattctctcaatgtcctcaattgcag

SEQ ID NO: 14289 - DNA, 663 bp, Glycine max
agagcctgttcactgtttggcgccgagttgctcagtgagtgagtgagtctgcacaaaattacatatccatcgactcacagacacgacacagcagaaaaccctctcgaattgaaaaaaaaaatggtgtatggaggagcaatgtgcgctcacgcgcacaaattcctactctcgccccgtgccctcaacctttgccgtcaaaacaccactcgccttcaacaatttcaaactctcactccgctccactctcaatcccttcctttcaacttcaaaaactccgccacccccttcaaacccaccctcatccgcctctccgccctctccaacgatggctccggcggaaacggcccacatggcggcgccggcggaggcggaggctctgacggtcccaattctggcggcgccggcgatggaggaggcaagtggtccttcttgtcatggtacttggctcttcctggaaaataccctgttgccgtgaaagctctaacatcttcaattttgaatctaattggagatttgatttgtcagcttgtgatagacaagtgccgtcactggatttcaagaggacatttgtctttacttttcttggttttgctttagtgggtccaacactgcatttctggtatttgtatctgagtaaattggttacacttcctggagcatcag

SEQ ID NO: 14290 - DNA, 238 bp, Glycine max
tctctctctccctccctctctctctctctgcaatggcaatagcaatagatcagcaatgctgctacagaggctgagatgaaactgagaattcttgtgtgtgtgagaatcatgagcgaagaagagaacaagggttgtgcttttctgggaaccaactccacctattcaggttttcttcttgaccctgaaaaatgtggtatgctgagtttgccagacaaacaaagactagtccgtgagattg

SEQ ID NO: 14291 - DNA, 839 bp, Glycine max
cttagccacgcatccccgaaagcccaccaaacaccgcttcccattcaatttatacgtcaacccagcaatttcagaagcagaagcataagcataagcgttcagttattaagtgtcggtgttgaacgttaaaacctaaaatggccggtaacgggacccattcagattcaaaagcagcaacaattgtgattaaggatctgagattcacataccccggcatcgacggccaccctccgccgggttccactcccctcattcaggatttcaatctcactctttcttccggccatcgctgcctcctcgtcggttccaacggcgccggaaagaccactctcctcaagatattaggagggaaacacttggtggagcctgacatggttcgcgtgctcggaagatcagcttttcacgacaccactctaatatcttctggtgatctctgttaccttggtggcgagtggaggcgagatgttgcttttgcgggttttgaggttccaatacaaatggacatatctgctcaaaaaatgatatttggtgtgcctgggattgatcctcaaagaagagccgagctaatcaaggtattagatatcgatctttcctggagattgcataaagtatctgatggtcaaagaagaagggtgcagatttgtatgggtctcctcaaaccattcaaggttcttcttctcgatgagataacagttgaccttgatgttctagcaagagctgaccttctgagatttctaagaaaggaatgtgacgagaggggtgccactattatctatgcaacacatatatttgacggcctcgacgattggccaacaaatattgtttatgtagcccatggg

SEQ ID NO: 14292 - DNA, 547 bp, Glycine max
tgatgaagttatgcaactctattttgctttgagtaagttaaggggtaaaaaagaacaagggaattggcgctttgattgaagacccaaaaggccaccaaacacaagttcaatttcaatctataagaagcaatgtcagaagcagaagcataagcgtcggtgttgaacgttaaaacctaaaatgactggtaacgagacccattcaggttcaaaagcagccacatttgtgattaaggatctgaaattcacataccccggcgtcgacggctagccaccgccgggctccactccgctcattgaggatttcaatctcactctatgttccggccaccgctgcctcctcgccggttccaacggcgccggtactctctgaatcttaagcatttggctattcgcatatccatttataactttatctgtttttgtgattattatgaaagaccactatcctcaagatattaggagggaagcacttggtggagcctgacatggttcgcgtgctcggaagaccagcttttcacgacaccactctaatatcttctggtcatct

SEQ ID NO: 14293 - DNA, 1006 bp, Glycine max
ctcacactatcctctttcataagaggaagtgcagagattcattgaccttcaaaaacccaaaaccctaaaaagcgcaagaaaacaaaatccccaaaatatctctcgctctgaaaccgccatggatttgcagcagagcgagttcgatcgcctcctgttcttcgagcacgctcgtaaggccgcagaagccgaatacgagaagaaccctctcgacgctgataacttaacaagatggggtggagctttattagagttgtctcagtttcagagttttcctgaatcgaagaaaatgacccaagaggctgtttcaaagctagaggaggcgcttgcggtgaatcccaagaagcatgacactctttggtgcctgggaaacgctcacacttcgcaagcgtttttaattccggaccaggaggaggcaaaggtttattttgataaggcagctgtgtactttcagcaagctgttgatgaggatccttcaaatgaactttaccgcaaatcattggaagtggctgctaaggctcctgagctgcatgtagaaatccataagcagggatttggtcagcagcagcaggcggcagcaacagctggatcttctacttctgcttcgggtacaaagactcagaagaaaaagaagagcagtgatctgaagtatgacatatttggatggataattctggcagtcggcattgttgcatgggtgggatttgcaaaatcgaacctgccaccgcctctcccttcccctcctcgataagtggagccatttgattttatctcatacattattgattattgagaatgatatttgatttcgggcagtgccgtttatttagttttttttgacagtagtaatggttgtcatggggcttatcttatccatcatgcgaaattttatcttaccgtgggttgagcagttaaaatgtccggcttagatctttgctagtatttgcaaaatcgaaatcattgccatttgccatcaggcaagtattgaatataataagaattttgctgc

SEQ ID NO: 14294 - DNA, 464 bp, Glycine max
tagatagactctgatcttcgtacttgtgtgctcattcattacctattttgtttgattatttttcagactcagaagaaaaagaagagcagtgatctgaagtatgacatatttggatggataattctggcagtcggcattgttgcatgggtgggatttgcaaaatcaaacctgccaccgcctcccccttcccctcctcgataagtgaagccatttgatttgatctcacacattattgattattgagaatgatatttgatttcggttagtgtcgtttatttagtttgacagtagtaatgtttgtcatggtgtagccgttggcttatcttatccatcatacagaattttcttactgtgggctgagcagttaaaaatgtccggcttagatggttgctagtatttgcaaaatcaaaagcattgccaatttgccatcagttaagtattgaaaataataagaattttgctgc

SEQ ID NO: 14295 - DNA, 536 bp, Glycine max
ctcgagccgaatcggctcgagaatcgtgtttctgactaccagaaaccctaagcctcaatccaaaccccactctcttctttttcacttaggttgggctccactctctccgaccacttccactgcctcaaccctcgtcgactccctcaacaactctaagggcctccgatccttcctcacgtgcccctctccacacactccctctcacgcgtcgtcgtcgaaatcgggtacgaaatccaagcctggatcgaccgcgaaactctccaccgcctctctgcctcgctacgaaatcctaacattaataacaatgatttggtcgcgctgctgactcagtttcatgaccgagtctcgcagggcttcaatcgtgagttgcaggacctggttctcaaattaaagctcttctccttgctggaatcagttctttttgactcaaaatgtccgaaccgggttcgcgaataggctggtctggtagtggcggcgttaatccgattcaataaagaagtgttcgtgagagaaagccttttgcgagctgcgtggca

SEQ ID NO: 14296 - DNA, 488 bp, Glycine max
cggctcgagcggctcgaggtcagagtctgaaacctgaaacctgaaacgctgaagctgagttggagtcacagttgttgttggtagccatggatgcagtagctacggcgaaaccgcttctgtcactgtcgtttttgcttttgctaccgtcttttcttccgatcgccgtcgcttacagacccggcgacatcgttcccatgagccgcatgggtcaataccactcctcgcgaaccgtgtggcaggacctcattggccgtcactgccccatcttcgcagtgaatcgcgaggtgttgatgcccatacccaagcccacgggttacactggtgctgatgcttataaaatatcgtttcaagttggcagggaaaagtttttaatcccgtggcttcttgtggtgaatcgaaaaagcacggaggtcccaatgattgaagtagatctgaggtattcaggaagtgatttgcatggtgtcacagctaaaagttgggatatgcct

SEQ ID NO: 14297 - DNA, 562 bp, Glycine max
gctcggtccaatcaagtagcccgctaagcaaaaacgacaatacggattcctttggctaagtgcttcaagctccaaaacgacaccgtgagtgagagtccgaatcctgaaacgctgaacagttgattgttggtagccatggctgcagcagccaccgcgaaaccgcttctgtcactgtggtttatgcttctgctaccgtcgtttcttcggatcgccgtcgcttaccgacccggcgacatcgttcccatgagctgcatgggtcaataccactcctcgcgaaccgtgtggcaggacctcattggccgccactgccaaaaaggaggttagataggagatattcaagaatagctgatgattaccattcactggatgaggttaccactgctctttcacatgctggcctggaatcttctaatctcattgttggcattgattttacaaagagcaacgagtggacagggaagaggtcattcaaccgaaaaagtttacatcatataggaaggggtcaaaatccttatgaacaagcaatctcgattattgggaaaactctaagtgtttttgacga

SEQ ID NO: 14298 - DNA, 1892 bp, Glycine max
cggctcgagtatttccgcagctcaattgtttgaaacttgaagaactaccaaagctgagaagcttctataaaggaagtttattaagtttcccatcattggaggaattgtcagtagtgtggtgcgagtggatggaaacattatgtccaggtacccttaaagcagacaagttggttcaacttcaacttaacagggacttatatgaacttgaggagtcatcagatgctatcaaattggaaaatgacctgaactctaccatgcgggaggcatttagggaaaagttatggcactctccacactacaagagatatgttgacctcaaagatagcccactacaagagatatggcttaggcttcactcactgcatatccccccacacttctgcttcacttacttagacaccttgattgtggacggctgccattttttatcagatgcggtgttacccttctctttacttcctttattgcctaaattgaaaatattgaaagttcgaaactgtgattttgtgaaaatcatatttgatgtgacaactatgggaccactcccttttgccctggaggatttgattttagagcggctgccaaatctggagaatgtttggaattcaaatgttgagcttacgttcccccaagtcaagtcattggcactgtgcgatctgccaaagttaaagtatgacatgttgaagccatttacacatctagaaccacatgctctaaatcaagtctgtattcaaaagcttacacccaacatagagcacctgacactcggtcaacatgaactcaacatgattttgagtggagaattccagggaaaccacttaaacgagttaaaagttcttgccctgttctttcattttgaatccgatgtatttctacaacgggtgcccaatatagagaagcttgaggtgtgtgatggttccttcaaagagattttctgctttgatagtcataatgtggatgaggatggattggtttcacagctgaaagtgatatgcccggactcccttccagagcttgtttccattgggtcagagaactctgggattgtgccctttctcagaaatctagaaacattgcaagtaatcagctgtttcagttcaataaatctggtaccatgcacagtgtctttctccaatctgacatatttgaaagtagaaagttgcaagagtctgctatatttgttcacatcctcaacagcaagaagtttgggtcaactcaaaacaatggagataagttggtgtgattcaattgaagagatagtgtcttcaacagaggaaggggatgaatcagatgagaatgagataatatttaagcagctcaattgtttgaaacttaaatatttaggaaagctgagaaggttctacaaagggagtttaagtttcccgtccttggaggaattcacagtaaagtattgcaagaggatggaaagtttgtgtgcaggtacagtcaaaacagacaagctgttagaagtgatattcgaatggagagatcatatcccattggaaactgatctgaactctgccatgcaaatccgataggcatttctggcaagggcaatgactccaatattagagttagaggagattgattcaccagaaagaaaatggttagaggagatcaacgaattaagtggcctggtgcctaccgaaaaaaaaaaacaaagtggcccagttttattatatttgtttgtgtgtgaataaaaaaacgagttgtgcgtgtggtctatacagttagtggtgaaatacattgttctattctatttattatgtaatgtgtgtgattataagtcttaaacgaccctggagaataaaaatgaagtgatgaactgtaagtttgtaacactaaaacttgactctattgttttatcccaaaataaaataaaaatgtgtcct

SEQ ID NO: 14299 - DNA, 451 bp, Glycine max
cacgcctacgtaagctcggaattcggctcgaggtgattcaattgaagagatagtgtcttcaacagaggaaggggatgaatcagatgagaatgagataatatttcagcagctcaattgtttggtacttgaacatttaggaaagctgagaaggttctacaaagggagtttaagtttcccgtccttggaggaattcacagtaaagtattgcaagaggatggaaagtttgtgtgcaggtaaagtcaaaacagacaagctgttacaagtgacattccattggtcagaaggtgttatcccattggaaactgatctgaactctgccatgcaaaagcgataggcatttctggcaagggtatgtctttttattcaactgttgttataatacaccgtgtcagaaatttagtttttactagtatgttacgtgacaagattaatttaaattttgaaaagaatt

SEQ ID NO: 14300 - DNA, 259 bp, Glycine max
gtcaagtcattggcactctgtgatctgccaaagttaaagtatgacatcttgaagccatttacacatctagaaccacatgctctaaatcaagtctgttttcaaaaggtatcattactacttctatatatatgaaccaattgccatcctgttaaaattaaaaagttgtgaacctttcccttatacagttatatatgctatgttgagtcttctatccatcttctacgcatattggcttccatttttattttatttatctaca

SEQ ID NO: 14301 - DNA, 927 bp, Glycine max
tttctgacattgaaaggaagacaaaacacaagacagagtcattcagcaaggcttgaaacgagaagcgaggatgcccatcagatgtattctgcattggcaaccgaaccaaggaagcgttgtgaacagccaagtcctgaatgagatctcgcagtgcgtcgaaagccttaacggcgtcaaagaaggaagatgcaaagcctccctcactttctacagacccaatttacgagaccaatcggtgaccatcgattttcctcgcgattttctggggatatcgatgctggagcagccgaacaaatactacttaatcattcgcggccagaagattgttctcgaggccgattcttctatcttgcttatcatggagaaactccagtcctacaagtccaaagtcgcccttcatttcgagggagtgctgtataagttgggtgactttcagatcagggtgattaaagttgttcccagtcaagcggagagtctcagaggaattatgattgagattgagtatctccctatctcgtcagttgaaaaatccaagcaaattttggaagagttcattgatatatggaaagaagtcgtgtctaaaaaatcattagccggtcagttcatgcatacagaaccaaattatgcagaatatgggctttctgacaattatacctctcagcatacagctgttcagtatgctgctgcattggcccaactgattcaatctgcacagttacggaactaggaactaggacctttgaagggtatgtaagggatatttattttatgaaatcttattggattcttgtgagtgtggagatggtaatatatatttcaataatgtttgttagaaagtaataaaaaaatatttcctgagatggtcataaaatcatatttattgtgtaaaatttttattataccttcactatcaatacccactatgtc

SEQ ID NO: 14302 - DNA, 586 bp, Glycine max
cggctcgaggtttaatccacctagctgaatggcatccattggaatagcaatgctaaacagggcttgacgcccttccgttcctctcatatcagggtcagcagagtgcagagaaaagagcagttagttattaggatatacattggctttggccgtttgagggtgcgtcagattgatgctgtgatgggagattataagagtttttcattttccaaaatgatgggctgctgtggttgcttcggatttgtccaaaaaccaagacgacggcgtcgggataaacgtggcatcagtaatcttctctcccaggggctattattggatggagaaactgaaggcgatgagacatatagtggtgacgttactagtaactgcaccagtgtagatgacaatgaggtgcaagctgtacgcaaccgttcagaggatattttaaactttagagctaagaatggcatggtttgcaggccgtttcctgttaaggagacttgcaaacttgatcgctcagaggatgaaaatgggaacaagatgataaatgaatatgttcgagagtataaaattggttgcggaagctatggcaaagtggctctttatc

SEQ ID NO: 14303 - DNA, 764 bp, Glycine max
ggggatagtggaaagcactacaaacgatgaagcaacactttttgaggctttatatctcaatgacgagctgcagcagattgtttctaaatatgaggagttagatgctgctcaaagttctggggcacaacaacctcaaaatgctgacactgacaagcatgatgccaaagctgttcaaaaccccaatgaagtacccgaaaatgaagaatctgaagctgctcagaatctggatcgaaagcttccccaaaagtctaacactcttgaagtcaatgcaactgagggcgagagagatgatcttgctgaaactaaaatagtggatggtcttgctgaaactaaaatagtagatgatggcacgaacgagaagaatgctgaatctagtttcaagcgagataccgaatgagcaaagcatagttggcatatgtatcttctaattcgcattttatctggtctttgttcatatcttgtaataagctatagtccttctatgcgggtgattttcattgcccagatgtgtaatgggcaggagtttccatcccgaggattgtgataacatccttgtgagatcatgctagtttctcataatattaagtggttcccacattttgatccgcttccttatattattaatgcgcgaaggggataaagttagcactgtggtaagtgcatagagtgtggaaacaactaatcgcgcacattggagtacagattagaaaatcggactcttgtttcagttttatatatgataataatgttttgttatgtaagtt

SEQ ID NO: 14304 - DNA, 496 bp, Glycine max
ggaaacctctacaaacattgcctccaaggtgcgcgctacgtatacgaaacctcaccaaacattgcctccaagatgaattttaacaatgtgaatgtcccaaaggttcctggtggcggagtcgctgctttgcttaaagttagcattattggtgggcttgttgtttatggggctgcaaacagcttgtacaatgttgagggaggtcatcgagccattgtcttcaatcgtgttgtcggtgtcaaggataaggtttatcctgaagggacacatattatgattcctttgttcgagaggcctgtgatctacgacgtacgtgcacgacctcatttagtagagagtacatcagggagccgtgatctccaaatggtgaaaattggactcagagtccttacgcgccctgttcctgaccagttaccgacagtttatcgaaccctgggtgagaattataatgaaagggtcctgccttctattatacacgaaactctcaaagctgtagttg

SEQ ID NO: 14305 - DNA, 602 bp, Glycine max
tccacgcgtccgattacagccaactgggatgacattgatattccaccaaaaagtgctgatgaagcaagagacctttgggaggtattgtatttggattcattcaatcttttgtttcgtaattgcttgcatgctttgtaactttgttttcatcacaattttgttggatacttgtgctataacttaaggtgtctgctaatgcatgtagcacaagacattgatgagacccttcgtggataaattgactgccacagtacatccacatgggtgtaaaatgtacgtgctgaagccagtggcttgagcacgtacagttgacacccttcgtggataaattgactgccacagttgatccacatgggtgtaaaatgtacgtgctgaagccactggcttgagttttctgaaacaaatttttggattgcagcttttggagtcactgatgtcaatatttgtttttcttgctgagtgataacttgtacacgagcttcacttcaataaaccttttcatttgcttctattgatagaagcttgatacgttatttagtgtaccagctcaatggaatcagtcacttagatgatataataaaatgaagctgtttgcatgcaaa

SEQ ID NO: 14306 - DNA, 446 bp, Glycine max
accgtttatataagcttagcaagggtttaagaagtcgaacgagcgagcactgagcagcggttgcaggaaaagccgtgtcagcgagcgtcgcattcacggcgatggcggagacggtgagacttcgcgtggtgttcgaggatcgtggcatgttgagcaagtcaaagaagaagcaagggctcaagcgttgctggtttctgcttaaaccccaacacaccaccatttccgatgttgcctctcatctactcaacactttccgcctccaccgcacctgtccccatggcatcgtcctatcgatggatggttttgttttgccatctttttgagttcacttgcattttgaaggataagggcattgtgtgtgtgaaaagaaaaggaagtgtatcaactgatgataaatctgcaatgctgcggcccgcgacatgtgagaatcaggctattgagcttca

SEQ ID NO: 14307 - DNA, 588 bp, Glycine max
ggccactcctttgaaggtcttaccttgtggactctcaatcctaataccagcacaaggatcggatctgcacctgctatgtttcagtttccttctttcttaaccatcttaccaatcttataccttatgtgttagtctgctagattgtatggaagtgttgagcaaaggggtgcatcgtgctatggtaccggtagatgggcaagcggagaacatgtcagctggggtggaacttgtagagtctgcttccagctaccaaatgctgactcagatggatgtgcttaggttcttgcatgatcgtgctggtgaagctgatcgtgaactgcagagcattctctctcgttctgttcaagatttgggggccgtcactgaacagatttatgccatcactgaccgcacaaaactcgtggatgccattaagtgcttaaaggccgctatgttaaatgctgttcctattgttagagcctctgatgttgatcaagatgatcacaagcagcacataaatgcaagtctagctcattaattctcgatcccttaattgttattccttcctaattttggtgtcacataccttacgtacggttttgcagggca

SEQ ID NO: 14308 - DNA, 270 bp, Glycine max
cagatttatgccatcactgaccgcacaaaactcgtggatgccattaagtgcttaaaggccgctatgttaaatgctgttcctattgttagagcctctgatgtcggtcaagatgatcacaagcagcatataaatggcagatgcaggaagcttattggtacattttctgcaactgatttgaggggatgccacgtagccacgctgaaatcatggttgggaataagtgcactagcattcactgaagatgttgcatcgagtcctttgtacacagaa

SEQ ID NO: 14309 - DNA, 519 bp, Glycine max
gtaattttgcagagtctgaactggagaggattgttctaattttccgtgaagtattggtggggtattttgacaagaagtctcaaatcaaatctggatttttgaaagaaataattcgaagacgaccatggattggacatgctatatttggctttattttagagagatgtggaagtgccaagtcagactttcgacgagtggaagcacttgaattggtaatggaaatattgaagtcactgtcaacagggaatagtgatgaacagaatgcatcgaaaaagattcttaagaacagtttggataaactttctcatctgttgaaagaattagtgactaatatgccaagtaaaccagcaaggcggacagaggtacagaagttttgtgttaaggccttggagattttgtctaagcttaacctcaccaagaattttgtgaaaactttggcacctgatactcaagctgcccttgaggcgcaacttggtgagcaattcattagtttgaagaagctggaaaaataaactacac

SEQ ID NO: 14310 - DNA, 900 bp, Glycine max
ctccagccgcgccggcgcgagcaacactttctttcactcccacaattcttcttcttcctctggagctgcgatcctctgcttcgatggccaccgtgcaactccaatccctaacccttgttcgctcctcagcacttccttccgccaccttctcccctccgatcgccgtctccggccgccgcaactccgccgcgctgccgcgctactccggcctccggctccgacccgccgctgagaccagtttcccgactcacgccagctcgagaaccgctcctcgcggcggaggcgtcaagtgcgaggcaggagacaccgccgttgaagtggctcctattactgatgcaaattggcaatcacttgtgcttgaatctgagtctccagtattggttgaattctgggctccatggtgtggtccctgccgtatgatccacccgataattgacgagctggcaaaagaatatactggtaagctaaagtgctacaaactcaatactgatgagagcccttcaactgctactaagtacgggatacgaagtatcccaactgtcattattttcaagaatggtgagaagaaagatacagttataggagctgtgcccaagacaacattgacctcaagcattgaaaaattcttgtgaggtggtaagcaaaggcttcagctggaagtagagctatttttctcgttagcttccctctcatctaagccaaatatctcaagtttgggttatttgtttcttaaataaccatttatggtcctgtatagttatggatgcaaccatattttctgttctctttatacaattattatagttaacaatatgtggcgtaaatttggaggggccccccaaattagtaacctctacccccggggatttattccgggacgggtacttgcggggtacaaag

SEQ ID NO: 14311 - DNA, 350 bp, Glycine max
atttaatttggatgggttgaaagactcagacaaaacattgaaaagaatcagagcaaaagaaaagggattctctacgtatcagtgcagcgatggcgttatccctactaatccactgttctcccaccgttaaccctctccgacgatccccaaaacccaccctccgccgcgtcaaccaccgcgtctgcgtggccagcgccgccactcccctcctccaagttaatgacttgagggccaagattgtcgaatccaacgtcgacattctccacggcgtcaacctcaccgtcaaccaaggagaggtccacgccatcaagggaaaaaacgggttcgggaaaaacacctttgccaaaggt

SEQ ID NO: 14312 - DNA, 444 bp, Glycine max
cgagcaagaagagcgatgtgctggagttagtacctgtaaaactagaagatcaaccaaatgtaacccctgattcttctacaactgttaattcgaagtcagaccttgacaactcattgattatgtttcaggagatgtttatggatttatacaaatggaaagagaaaatggaacagcagctgttggaggtatcgaatactgtatatggtatgctggcaatgaagtagacatcactccgaagtatctgaggctataggataggatataaccaccctttcgttcataagtttttctctgttactcttaaaactggtagagtttagatattgtacagcattaacaacctgatcctgaaaatctatgccaaccactaagttcagaaaagaggttgagtctcaccctgctggctgagctgcaaactgttgatatgtctgactggccttttac

SEQ ID NO: 14313 - DNA, 385 bp, Glycine max
ctaaaatcacgacaccgtaggagactattaattcctattagagagctcttgggctagagctggcaaatggtgaacaagaggatggctacgacggggaagaaggaagggaacaacttgctagggttgccgaatttcacagaattaggaaacgggcgtttcaagtgcttagaaacagggcacgaggtcctctcgaaggacatagcgtcctactcgcacagcaaaaaatgccgtttgggtctcatcgatttcgccttgtccaataacaaaccccctctcaacatgttcaaacaacaccctctctgccgttcaatgttgagacgttcgctgacaggtgacaatgtcaatagctcagcggaatccaactgggaccccattattgggaaaa

SEQ ID NO: 14314 - DNA, 453 bp, Glycine max
atgaattgtaggaatttgagggagttggagttgcgggagagtgaggtggacgacatctgtgggcattggctgagccattttcctgattcatacacatcgttggtttcccttaacatttcttgcttaggcaatgaggtgaatttgtctgccctagagcgccttgttagtaggtgtcccaacctgcagactctccgcctcaaccgtgctgtgccgctagacaggcttgccaaccttcttcgcggagctcctcaattggttgagttaggcacgggaacctacacgactgagatgcgaccggaggtcttcacaaacctggcggaggcattttctgggtgcaagcaattgaagggcttgtctggattttgggacgtgctcccttcctaccttccagctgtctatcctatttgctccaacctgacttcactgaacttgagttatgcaactattcaaagc

SEQ ID NO: 14315 - DNA, 423 bp, Glycine max
cttggctgtaacaggttgaacactgcatagcaaattctgaatggaaatgtgtggagccacagctctgacatggtctcacaccatctgtccatcgcttcaccttcctcgatccgtctctaccagggaggctaggaggagcttcagtgtttggtgtgtctctgatcaagaccccaagggaaataaaatgatcatatctgtaactggagcaacaggttttattggtagaaggttggtgcaaagattacatgcagacaatcacagtgttcatgtcttgacacgatccaaatctaacgcagaaacaatttttccggcaaaagactttcctggaatcaagatagcagaagagcccgaatggaaagatagcgttcagggctcaacgggggttgtgaatttggctggactgcccataagtacccgatggtc

SEQ ID NO: 14316 - DNA, 455 bp, Glycine max
caatctttaatatttccacctctcaacttcacaacagattatgagccaaaaattgtagaggggtgagctatgcaacttcatataccttggtttctatgtgtctgggaagcatgatttctgttaagattatattggtaattttcaaattaagatattatttaactgtttcttagttttggcttttctaagtggtcatttagtttaggtttcttctagattgttatcacttgagtgattttgcagggaaataaaatgatcatatctgtaactggagcaacaggttttattggtagaaggttggtgcaaagattgcatgcagacaatcacagtgttcatgtcttgacacgatctaaatctaaagcagaaacaatttttccagcaaaagactttccaggaatcaagatagcagaagagccagaatggaaagatagcgttcagggctcaacaggggttgt

SEQ ID NO: 14317 - DNA, 653 bp, Glycine max
tacgtaagctcggaatgctgctctagattactacttcattttcactagccactactaccctctctcaaaaactccaaaaatcataatgccatatcatcgatatttatctccttagccatcagcatcccaagtgtccaaccttaaaatcttctatctctctcactaactcatactctgtttgctctgtttcagtgtttctctcccctgctatctctaaattgaacgtgttttctgctacttttgcgcgtgtgcattcctcttcccttcaaagctagcactttacccaccaccacaacaaccccttttgctcccacgtgcacagagtcaaacccaaagctctttttttctctccaaacccacaacaacaaaaacagagcttctctgttttctccattcccaaaacacaaaataaaataaaaaaggaatctttttcacgcataattctgctgaatttcggaacagaaaatgggtgctggtgagtactacaagatcctcaaggtgaaccgcaatgccacagatgaagaactcaagagggcatataagagattggccatgaagtggcacccagataagaaccatcaacaccaccatgttacgaaggaagaagctgaggcaaagttcaagcaggtttcggaggcttatgatgttctcag

SEQ ID NO: 14318 - DNA, 498 bp, Glycine max
cccactcgtcctcccactcgtccgcccactcgtccgcccgcgcgtccggccttactgagattggttggtcactataccggctctcgtcagtcttcattatcacactcatcattctctaatttctctaacatggcttcaaccgcttctgaggttagccaacaagtccaatccaacagcaacagaccaattttcaaaagcgtgaaagcactaactgaatcaccagaactcacttccctcccaccctcttacacctacaccaccaactcagatgatgaaatagtggcagacccagatgaagatgatccaattcctattattgactattccctcttggtcactggaacacctgatcagagggccttgaccatccacgacttgggcaaggcttgtgaggagtgggggttcttcatgctcatcaaccactttgtgtcaaagaccatcatggagaaaatggttgatgaggtttttgctttcttcaatcttagagaggaggagaag

SEQ ID NO: 14319 - DNA, 663 bp, Glycine max
ttgggttatttcatatgccttcagaatggagataaagcaccacacaccgtttcactccatttcccacgtctttctagggtttccctgctatcttcctcaattcgaacccttcgcctttccacccttcgatttcttatcttccaattcgtcaagcgtatccgcgagtctcgatttccttctctgcaagcggattggtcgcttgtgaaggaggaacatgtattcaagagggagcggcggttacggccaatcgtacactggtcaatccgcatatggccagaacctgggtggcaattattctgggagttctgttggagggcatgatgtgggtcagcattctgtggcttctaggcattcaacaattttaggtggttctcaagacgttgatgttggtgggtataggccttcggctgcgacccagtatgggggacagtatagttctggttatggctctgctgcattgagcagtgcacagcaggtcccttcattgagtaccaagggttctgcatcatcagctttagatggtcctggaggctatgctttgggtggctctgattcacctaaggttgcatctggagattatgtctcgtcctcaagccatggatatggtcacaaatctgatcaattgtatggtgacaaaggtttggaatattctggaatagatag

SEQ ID NO: 14320 - DNA, 607 bp, Glycine max
ggttttggacttcaattgatcccaaagaaaaatatagagagagagagaatgtggtggcggcggcgcccgagaccatgagaactacagcaccttccgatttcattttcacccaaaagcttcaccctttcaacatcacctccaccaaaacctccctccaacgaaccctaccctattttctccaactcaatcgcatggccgaggctgcacgaaccgcgcataaacccgcgccgcacccgatccaacccaaacccgacgataaaaccccgaatccggcgaaggagattccgccgccgccggagaagccggagcccggcgattgctgcggcagcgggtgcgtccgatgcgtccgggacgtttactacgacgaactcgaagatacaataagctatacaaacaagacgatcccagccccaaagcttcttcatagtcttcatcatcgcatgggtgaaagtgttatgagtcgatgattgttgggttattgtcgtcgtcaatacaccagatgactaggtgaattgctttaaggcaccatgtgctgaaggatgtcgggacacaacgctctgataggatgttacattggggtatagggtcttatagacggccttgttgg

SEQ ID NO: 14321 - DNA, 633 bp, Glycine max
  unsure (1)..(633): unsure at all n locations
gacccacgcgnncgcccacgcgtncgcccacgcgtccggcagcttcaaagatctcaatacctaatgcaatacaatcgaccagttcaaatagctgtatgggctgttattctcctttgctttattgttttaattgctttttgcacgatgtagaaaggaagatttagataaattttctatcaatttctggttgcggcaggcagaatgggagaatggacaaacaatcttttgattcgagttcatataatctatgttgtcgcttaagcaggcgagagttttttatctgctttctcgctggcatacatggtgtcgatataacatttcaagtgctttgatattattactacttagagtcttccattatacctagcagtagcatttccttacttttttcttcttctctttttgctatctattgttcattcacctattccagaatggtctcatgaagattgaagagtattccctcttcgctgttgtactatatcacaagatgtaaatgacgaagtcaatgcacataatgttgtaacgaatatgatgtcttattgatgcgagaactgtgttgtgtaccanagattttagcttttgcatgtataaaataagtttattcataagataaaataaattaatttgtgg

SEQ ID NO: 14322 - DNA, 744 bp, Glycine max
accagctatagcttcaacgaatgcaattatatcggctgcatgtgcactagaaacattaaagattgcaacagagtgcagcaaaattttgtcgaactatttaacgtataatggatcagaaggcctccatactgaagtggcaagatttgaaagggacaaggactgtcttgtgtgtggtcctggtatacgtattgaattggatacttcaatcacattgcaaaagttcatggatcttctggaagaacatcctaagttgcgattatcaaaagctagtattacacatcgaggaaagaatctgtacatgcaagctccccctgtattggaagaaatgactcgatcaaacctgaatctatctctttttaatctcatgggtaaattgcccaaggatgttgtgcatgtgaatggtacaacaatcaagaacgaccaaaagttttcctgtttgagaaaattacgtgttgttttcaagggagttgacggggttacagatatggatacagctggaggagcataacttaccacatccaaacatgttttgctgctagaattttttcggctctatatgcatagtttatgttagatatcatagcttgtttccaatattggtcaggtaaggttttacagtttctacctgtcaaagttattcatagacgagcaaaactgtaacacttgatacctgtttcacttaatgattcgtgaccttctcaaaaaaaaaaaaaaaagggcggcctatgagcatgtcgacccggg

SEQ ID NO: 14323 - DNA, 431 bp, Glycine max
tgagctatgactgcacgcgtacgtatgctcggatttcggctcgggcataacgtaatttttccttctcttttgcacttgtttcataaaatgccggaccaagatattttcagttgcattagtgaacctcgtcttgtagccagaaagttcttggccagacctcagcatgagggtgttggagccgttgttagaagaagcatagggagatttgaactcaagtactttgatcctttccttgtcttggatgaattctcagtgactgctcctgctgggtttcctgatcatccacatagaggatttgagacggtcacatacatgttgcagggagctgtaacgcacgaagattttgaaggacataacggaacaattgaagcttgtgacttgcaatggatgactgcagggagagggttagttcactcagaaatgcctgcagc

SEQ ID NO: 14324 - DNA, 375 bp, Glycine max
ctcgagccgaatcggctcgagcggctcgagcggctcgagctataaactgttttttttcctatctcttttgcacttctttcagtaaaatgccggaccaagatatttgcagttacattaatgaacctcgtcttgtagccagaaagttcttggccagacctcagcatgagggtgttggggccgttgttagaagaagcatagggagatttgagctcaagtactttgatcctttccttgtcttggatgaattctcaggtgggcatctctgtattttcctctgttttttaatttggattacgaaaaatattgtggtgcatcttgtattgtattctaagaatatgaaattctgaaatattgcagtgactgctcctgctgggt

SEQ ID NO: 14325 - DNA, 431 bp, Glycine max
ctcgagccgctcgagccgattcggctcgagggtccagtagattcctctctttcgattcatttgcttctcgctgatcaaagctgtttattaggtaacttggtatgggagttgtgactgtttctagctcggctgctcggactccattgggattgaatacaaagttttgcaataatcgtctgaagagacctttaattgtagcatttaagggggataagcacaatgactcagctttggttgcaacacaagagaaaattcctgtgccggttgaaacggcgaagaagacgcagaaaaagaggataggaaaaactaacaaactacctaagagagagagttctccatcttccatggatgtggactacaatgaagctgctgccatgcttgaaaatctatacaaacttagccctgcttctgataatgcagaatgcatagat

SEQ ID NO: 14326 - DNA, 290 bp, Glycine max
gtcttctcttctcttctcttctctaggagtgtaattttgttgttgtggttagtgcttccgtgacactcacttgtttgtaacaagtggaggggagtgttataggaacataatttggagggagacatttcagtttcagaaacgttacaaaatatctgttgtgtgtgtgactgtgaaagttaatataactaacaaaatggatacacgaagtgaaatgaggcattcaaagttcaagaggatctgcgtggtctgtgggagtagccccggcaagaaaagtacctaccaagatgctg

SEQ ID NO: 14327 - DNA, 799 bp, Glycine max
ttcggctacaaagtcaaaatcacattttcctttggttcctacttccctgttttgtattttctcatttaccacacactcaggaccccctctctattctcttctgcatcaccatttcaccactgagagaacaacacaacacaacaaacaaaggagcctctcggtttccaatgtgaagagagcgaacatggctctaatcgctgccaggattctcggttccaattcgaggccggcggtcgcgctccaccgctggcagtggctggcgtactcctccgcctccgcggcggtggcggagccggagaccacggaggtgaaggactacgccgattaccggcgctccctgtacggacagatcacgcacaaggcgctcctcgtcgacgccgttggcacgctcgtcctcccttcgcagcccatggctcagatatatagaaagattggagagaagtatggagtggagtattcggaagatgagatactgttcagatatagaagagcgtatggtcagccttggggaaaatctcgtctcagatatgttaatgatggtaggcccttttggcaatacatagttagttattctactggctgctcagatcctcaatactttgaagaactttataactattatacgacagacaaggcatggcacctcaatgatcctggcgcagaagaagtattcagagctcttagaaaatcacgtgtgaaattagctgttgtgtcaaactttgacactagattaagacctctcctgcgggcatttaattgtgacaattggtttgatgcagtagcagtgtcagctgaggtg

SEQ ID NO: 14328 - DNA, 622 bp, Glycine max
  unsure (1)..(622): unsure at all n locations
ccagtgtaatgctttcaccaactaagtactagagagtactagaaacagaacgaaacagatcaagggctcggagaactttagagtcccttgaccttggtcctgatccagtcatatatcccccacgttcgttcgttcattcttcggtttctccgaatctgattgctgatttgggaaaatgctcctgggattctcaacgttagcgttgttggtgtgtttctcatgttgttggttattagtgttgggcgagggtgaaacggcgtcgtgttcgaacatagtggcgttggggcaccgcaccgacaacatatccataacggagtttgggggcgtgggtgatggacgcaccctcaacaccaaggccttcagagaggccatatatagggttcagcacttgccacgagaaggaggcacgctcctttatgtgcctcccggggtgtacttaacggagccctttaacctcaccagccacatgacgctgtatctcgctgccggtgccgttatcatggccacccaggattcattgaattggcctttgattgcacccttgccatcttatggaagaggaagggaacggcctggaggaaggtatatgagttntatccatggtngatggagttcagatgtg

SEQ ID NO: 14329 - DNA, 478 bp, Glycine max
ggggttctggttcaggtctctcaatgcaatccgatgccccaggttgtactgatgcctgaacttttgcattaaactggcttgctggcatcaacggggaaattaagcttgaacaactcaaaagctacacctgacagacagcagtctggagactctgaaatgtttgaaccaccatctttcatgaccttggttgatcctagtcaggttagccccaaagcttctgcttctgaagtccagaaggggcagaacacacaacatacagattccacttcacaggctgcttggtttcccactctcacgcaggttgtcaacgagtctcaagggaggaagaagaatgaagaaataattgccaaggtgacaaactggagcaccagtaaggagcacactcctctgaagagcctcttaggtgaggctgcccatagtagcaagccaagatctccaaaaatggaaaactctgtgaatcagaagagtggtaaagttc

SEQ ID NO: 14330 - DNA, 443 bp, Glycine max
caaattgctaactatggaggattggagactatgtctatggtaattgctggtcatttcccttctttcagttcatcgtcatcctttgctcaaataaaggaaaatggtgcaggaacgacaaaagatcatcaatccgataggcatctgactgatcatgagttagatttccttgttgctattctgggcctgcttgtaaacctggtcgagaaggatggtcataacagatcacgacttgcagcagccagtgttctgctaccttcctcagtaagcttgcaccaggaggttcggaaggatgttattcaattattatgctccattttcttggctaacctgggtgaaagtgaaggagctggggaagataaacatttgcaactgaatgatgaggcagctgttctacaaggtgaaaaagaagctgagaaaatgattgtggaagcttattctgcgct

SEQ ID NO: 14331 - DNA, 718 bp, Glycine max
agcctcctttccatttttcttctcctctctctggtaaccttcctctcctttttaatccaaatcatcgttcttattttttcaaggatatttttgctgtgattgcgtgaatttcgatcaacctttgaagcatcctttgctgcaacttttaggtctcaattttaaggtcaactttctgtgccgggtcgttcaacttgcatctttatcatttgatctattgtttgagttgacgagtgaacttgtgtgacatcatagtttctgtgagagattgcatatctctcaagcttctttatttgataagaagcttgttgcataatagaatcaagagtgaaatcactggtattaaactttctaatttttcttctttcccgttatcactgatggattttcctgtgattattgtgtagattatgataatatgttttttcgaatgtattttgttttttggcatcagtttgtggaaaaattagggcctgattgcatactaaatagtttgataattattctctccagtctctagtctctagtacttgctttgtcttttgtaatgtttctgtgttttggaggtttatgtggagtggcggcagaggatgaaaggctgtaagcctgcaacttttagcagattatgaattttctcaagttcctcgctcatttgtaacattttagtatttaactatttgtagcataacaaagaatatgtgataatcatgtgcagtggtat

SEQ ID NO: 14332 - DNA, 1005 bp, Glycine max
agtaaacgtaggagtatgcctaaatatgtagtgaaagatatgaagccgaggacaagctgtttttgtcttttgtgggctacgaacgctggaaaatacccaggatttgaggtgctggagaagaagggataaagtgtatggtatgggggcgtggtgaccgagggcacgaaaggaggaaactattggctacagaaagtcgtttctttagccgggtttctttcaaaaaatggtgcagagtctctgtttgatggcttctcatggttaccctcctggccttgtcttgcatccacaagtactgggcttgccctgcgctaccatgaagggctaccaaacattctttccttctccagtagcaaaagcagacctgatcagatatcagtctccttgtcttgatccaagtccatgtgaggagtcaacgaaatctcaaaatgaatggtttgattataagaagtttgtcaatgttgacttctcagttgaaaggcccatgcttattgatgaccaagcaaactgctcaaatgcagttcttcttggctttggcattgttgaccaatgcactaagcgtgatgaaattataaatttactaatgtctgagactgccgaagcagggatagatggagcaaatttatctttgttatcagacttgatgaaattgcagttgtcaggcattgatgaactcagcaaccattgtcatctcttatctacccaactagcaaattcaacatcctgaagcctttgctgtattttgttcaaggttcagccctttcatcaaagatcacggttcatccagatggtcaaatgacatttatgggtaccgcaattgagttgaaagatcttctctctgtagttgctgagtcatgcttatcaaaatggtcacgaagggatgaaaagcaatctatgcttgttccacacttcagttgggtgaatatcaatgaattagagagaaatcattcctccacattgaagaatcaatccaccttaactgctcctttaaagagtcctgagaaagtc

SEQ ID NO: 14333 - DNA, 416 bp, Glycine max
cgctcgagccgaatcggctcgagcatttaagtccaattctctcaaacactacaatcaaacaatggccaaggtttaccctcagctcatacccacatctccagatcagactcagtgtctcacctccacaagagaaacatacactctatggttgaaatcacttgtcttccactccaatggatgcactgtctatgactctaatggtgacatcgtttaccgagttgacaactatgacagaaagggtagaagagaagttaatctcatggatctacgaggcaaagttctctgcaccataaagaagaggttactagctcttggatgctgggaaggccacaggtgcatgagttccgattttggtacacaggaacaaccatggtttcaagttaaaagatgtaatcaaatgatcaaagggaaagtag

SEQ ID NO: 14334 - DNA, 807 bp, Glycine max
gatcacaaccacatttgcaaaacaaaagccatagtttgttacttctcttcgccttttgctttgcaattgtcaccaaacaattcttgcttagctctcacaagcaagcattatcaacaatgaagaaaattgtgttaaaggtggacttacatgatgacaggatcaagcgaaaagctatgaagacagcatctggcctttcgggggttcaatcagtttctgttgacattaatgacaagaaaatgaccttattgggggatgttgatccagtgagtgcagtgtcaaagctacgaaagtggtgtcacactgaaatagtctcagttggaccagcaaaagaggaaaaggagaaagagaaagtggagccagcaaaagaacctgttcctctcaagctctatgatgcctatcccttttattatcatatgacaccaccactgtatctgtatagttaaaattaataggttagatgttttgaagagaatcttatatagtggctgtgtcatctactaaattttagaatattattaggattattattcgcagagggtggtgtaacttttttgataaattcagacaagtttctagctacttgggtttttgatatatagtataatgtatacctttgtaatttcattggcttttccagcaacacacatcttgttagtatagtttgttggaagtaagagcatattaaggaatgtgaatgagtatgacacaagtttaatctacttctagctgccatcacgttttataatacttttttttcctgttaaatactacaataatataattatcgtagtcttaggaactagttta

SEQ ID NO: 14335 - DNA, 456 bp, Glycine max
gacaactacatttgcaaaacaaaagccatagtttgttacttctcttcgccttttgctttgcaattgtcaccaaacaattcttgcttagctctcacaagcaagcattatcaacaatgaaggtcagaactagactcatattttcctctccttcccctaagcaatgcatgaatcacattcttgagttttctgagctttgtattaactgttttctttcatgttttagatgtagaagcaattaattattggatcttaacagctcttcgatatttgttgtgtaacagaaaattgtgttaaaggtggacttacatgatgacaggatcaagcgaaaagctatgaagacagcatctggcctttcgggtaaatcaaaattttcaaccctactacaactttgctttgtttcaagaagccaaatacatatcatgctgcagcattaaggaattaatgttttcataacaa

SEQ ID NO: 14336 - DNA, 704 bp, Glycine max
actagttctagatcgcgatctagaacctcgagctcccaaacagaaaaacgaaagaaagataaaattctcaaaaatggctgcgacttcgatccccatccgagtcgccggaatccaaccgtgcgccacctccggccaccgcaggaccgatcccgatcgccggagagcctcctccaccagctggtggaccccgctgttcggctggtcctccgagccggactacattgactcaaacaacagagcatcgagtcttcaacggaccaagccggaaccggttacggcggcgacggagtcgaaagcgccgagaccgcgcttcgccggcggcttcacggaggagaaggcgaagcagctccggatgatgaccagcgagtcttttcacgacaccatgtatcactccgcgatcgcttctcgactggcctcagacttcaagtctcgctccgatctgtagcacttgaatagttaactattccttctttgttgtattttgcggattgtttgtagccaaatttttagggtttcaaatgtaaccgttgatgtataatagattagcatttagaataatttaggttatcaattgatgatacaatcaatcatggtgtatgtaagaaggatttaggagtaaaaatataaatataattgacgattgatgaacgatgattttgttgtttcgaattcaatttgaattgttcgattgaaaaaaaaaaaaa

SEQ ID NO: 14337 - DNA, 760 bp, Glycine max
cttggaaagcctctgtaaacaccctgaagaatatctttcttatgatggtcattgcagtgattcaacagtgaaatcactgtcaagctcactgtgttggtactgttggggagatatcaacatggccaagtgccagtaatgtcattccaggccaggttacatataccgtggatatacgagcgatagatgaccttggacgtgaagctgttatctatgatttatcgaaacaaatttaccaaatatgtgacaagcgttcagtttcctgcattattgagcacaagcatgatgcaggtgctgtgatttgtgattcggatctaagttcacagctcaagtcagcagcttattctgcactcaagaagatggagggtgacattcaggatgaagtgccaacattaatgagcggagcagggcatgatgcaatggcaatatctcacttaacaaaggtgggaatgctgtttgtgcgttgtcgcggaggcataagtcactctccacaagagcatgtgctagataatgatgtctgggcagctggtttagcaaccttgtcatttctggaaaacctatcataagtgatacggtaactgtgtaaagcaataaatagatattatagcttgtaattataggttaatttattgagttaattcatgagttaactcttttcttttagttgcttgtgtcttatagttttgtaattgaatttttggttttagttatcctgttatcaggaaacggctccaagttgttatgcatgttctttgccagtgtc

SEQ ID NO: 14338 - DNA, 797 bp, Glycine max
tatcacgcacgctgcccgcatacgtgaactcggcttgagactacatcatcttctttacaatgtcaatgacttacttgaaaaagttgtcatttctcattttcgttttgcttttcatcctgcatgtccacttgtccactgcacaagtaaatcttaacgctggtgttggcactagcaatgacaatggggtcgtggttgttgaacttggtgatgacacagacacgtctcaagaagctgtcgttagtgttgaggtcaacgtcgacaatgacaatggcacatctaatgaagctggtgttgaagctgatgtcacaattactgttaacgttgagcctgacactgaggtacctgatgaagctcctgtcgaagttactattaacgttgatgctgactctgacactgatgctgaccctgacactgatgtacctgatgaagctcctgtcgaagttactattaacgttgatgttgatcctgacactgatgtacctgatgaagcttctatcgaagttactattaatgttgccggtaatgacacagacactaatttgggagcagtatccatcaatggctccgaacctgagacagcggttaacattcatggaggtggttcattgccataataatcatattgtgttggatacacatcaagatatgaatacaggacaagaagaagaacgaacacctgaaaaagacatgaaaaagacccaagacattacttttttttttttttatcatgtacaccatatgttggatgaataatatgtagaagtaaaataatataaaatttattaaagtataatttt

SEQ ID NO: 14339 - DNA, 963 bp, Glycine max
gcttggtgtgatgaataagagcttccctgaacttggtttggttgctgaacagtgcattgaaatgagttggatcgattcggtgttgttttgggacaactatccagtggggacttcggttgatgttttgcttcaaaggcataatacacaggagaaatacttgaagaagaaatcagattatgtgcagcaaccaatttccaaaactggccttgaaggtatatggaacaagatgatggagctagaaaaacctgctcttgcattgaatccctatggtgggaaaatgggtgagatttctgaggtggaaacaccgtttccacatagagctggtaacatttataaaattcaatactctgtgacttggaaagaggagggtgaagatgttgctaacagatatctagatcggattcggaggctctatgattatatgacaccttatgtgtcaagttcacctagaagttcatatatcaactatagagacgttgatataggtgtcaatggacctggaaatgctagttatgcagaggctagagtctggggtgagaagtatttcaaaagaaactatgatagactggtagaggtaaagaccaaggttgatccaagcaattttttcagatatgaacaaagtattccatcacttgcatctggtctaagcataatgtcagaatagaagatgccttcaagatgtataaaataaaaggtttgattcaggacaaaaagttatctagaagcaagcatgtcttggaaaaccagttcagacttacgtacaagtgtgccataaaatttgattggttagagaattatttgttgggcaattgtattttcccctattaagggactttttttaacttcaattctatactaagattgcggctatattaaaaaaaaggattgtttaatttaatttattgaaggcttttaaataaattttaacaaaaaaataatccccctttttttttatgtgcgccc

SEQ ID NO: 14340 - DNA, 823 bp, Glycine max
  unsure (1)..(823): unsure at all n locations
cgcttttacccccacgtgttccttttgttcgtccacccttttagaaaaaacacgtgctgcaggatcaccaaaaggatgaaagagttgatcttgctcgaagggctggtggttaagcagcaagaaacggaggctgtgaagagggtaaagaagctgttaatgatgtcattgaatggcactcttcgtttgcacgccttgaggttgttcaagagagaattgggtctccctgaggatttcagagactccattcttggcaagtatagtgcggatttcagattggttgatttagaggttgtggcgttggttgattgggacgccgaattggcggtggctcgggttgaggaatggagggagaaggagtactctgagaagtggttgagtgagtttgagaccaagttcgcgttccccgttagtttcccaactgggtttaagttcgagagggtttaaagagaggttgaagaattggcagaggcttccttacgccaagccttacgagaggaaagaggttgttcgggtgaggacgtgtggaggaatcgaacggtacgagaagagggctgtggctgttcttcatgagctgttgagtttgactgtggagaagatggtcgaggttgatcagctggctcattttcggagggactttggtgtcgaagttaatgtgcgtgaattgctgctgaggcaccctggtatattttacttatctactaaagggaagactctaactgtttttcttagggaagcttataggaaaggggggttggttgagccaaatcccgtgtatgagacgcgtangaatatgttggatcttgtgttgttagggtgtaggaaa

SEQ ID NO: 14341 - DNA, 419 bp, Glycine max
gaaagtcatttatgatactggcttgtttctgagcttctagcttgtacagctcaagtgactctcctctctcggaggtttttaactgaggttgtgatgattgtatgtcactcgtatagctgtaagctgtgtcattgtccagtgagatattctttgggaattaattaatttcagataaattctttgatcttgggggaattctgtatataatttagagctggactttcattcaaggggagcaacatctctactgatgaggactgaaactgctgttttgagaacgggcttgccttcatgaaatgtgtttatttagtattagggtgattgatccccggatatacgagactagtttaaaattccccactttttcctgtttgggaagttttgttctgcagaccaatttattttctaattattcttta

SEQ ID NO: 14342 - DNA, 435 bp, Glycine max
atttcctacttcccaacccataaccattaattcttaattagtttcctcttgctttcttctccttctatattattactattactagtacaacttatcatacacatatacctctggttatagcagcaaactaggctatagcttgcactttgaagatatttatacacagaccaagtacaacaccaagctctagctagctagggacatgtctagccgaagatccagacaacattcagggtctacaaggatctccgatgaccaaatcatcgaacttgtttccaaattgcgccaacttgttcctgagattcgcaataggcgatctgataaggtttcagcgtcaaaggtcctacaagagacctgcaactacatcagaggcttgcacagagaggtgagtgacttgagcgagcgactgtctcagttgttgaccacaattgatgc

SEQ ID NO: 14343 - DNA, 555 bp, Glycine max
gacggcatcttgctagtatacgtaggaaaacttggacagggtgctaattaatttctttattattttccaaattccaatcaaaatttccagtacgacagtttggaaagcgaacattgaaattcagatagggttcattgattgatacgaatacgagttgaacacgccttatcgtctgaagcatctggcaggttgattagttagtcccttttgtgtcaacgatttggtgattttgaatcttcgggtgcagcgagataagataatcgtgaaaattgggtctccaaaatttgtttgaggggattttgtttcttgagctaaaccaaaacatgaatgaaaatactgtgaggtctgctggtgcagatctgacagctgctatagtaccattgttgaagctgctatgcctaacagtcattggactacttcttgcaaacccaacaatgcaattcattcccaaagctacatttaaagcttcttagtaaacttgtgtttgcattgttcttgccgtgccttatatttactgagctaggtgaaagcattactcttgaaaactttgtggat

SEQ ID NO: 14344 - DNA, 382 bp, Glycine max
gcggggtccgagcctgagcgtgactgtcaaatcttacatattctctctctctcttactctttctctgtctctctctatatctctctcggcaattctcagagacgaattcataggacaagtctctcactccagagattccattcaatcgctgatcttaatcactcttttacctttcagtctcacacctaaaagaaaaaaaatataatgttttggtttcagaagggttggttctgacttgagaattaggttttgattcaaagagaggaatggagggtgacacattcaatggtgctcagattgatgccaagatcatgcagacatttaaagaagaactttgttcaagttcaagacatttttgatcagaacaggctactcatcaatg

SEQ ID NO: 14345 - DNA, 503 bp, Glycine max
cccccttcattaccctcgtaactcgtaacggcgtcatacccctttcttttccttcgttcaagttagaatcttttgcttcactcagtgagccatggatgacgctgagttggacgccgcgttcgggtttccgtctgagttcccctacgagtttgactcggttggggccgaaccggctgattccggttcgaccggaaccgagagcagcgacgaggaagacttcttcgccgggttgactcgccggctgagtcacacctcactcaatgaaacaaggaaggaacaacaaaaactcaatgttcccatctgcaacagcgacaaaaccgagaatcagaagatgatggctcgcggtttggccgggtcgcctcagtctatactgagcggaatcggaagctggtcgggtcggagcggagggtccggcgacggaagcccgaacgggtcttcccgtgttgcgtcgccaaccacgacgccgttttgaggctcaaacgacgcgttggagtgctgtatgc

SEQ ID NO: 14346 - DNA, 995 bp, Glycine max
accacatcactctcacaaacggaaactaaactacgttttttattttttccagacaataatactttaatatttgagtgtgatcgatggcatacccaaacccttatccggctcagccctatccctccgcctccgcgccgatgccggcggttccctccgccgtgatcggcccccagttctgcgcgccgtacccggtggatctggcggtggtgaagaaggtgatgaccatctctgacaacttcgttgtcaccgacgtcaacggcaacatcgtattcaaagttaagggatcgctcgcgaccctccgtgaccgccgcgtcctcctcgacgccgccggcaaccccctcgtcacccttcgccggaagataatgacggcacatgatcgatggcaagcttttaggggtgaaagcacagatgccaaagatctaatctttactctgaagcggtcgtcccttatccagtttaagaccaaattacatgtgtttttggccaataacaccaaagaagatgtttgtgactttaaggtcaaaggtagttggttggaacgatcctgcgttgtttatgctggtgaatctaacaacatcgttgcccagatgcataaaaagcacacggttcagagtattttgattgggaaagaccatttcatggtcacggtttatcccaacattgattatgcgttcatagtggcgctaatcgtgattcttgacgagattaacgacgatgagaaggaagattagaggaaagctatacattcagcgaatctttttgtttgtttaggtgtttcgtctttctaatttatgagtgaataaaaatatttaaattcgagctgcattcatttttaattttttatgtttggtaccatcttaattaagatcctaggttattctgtagtgtgtgaagatattctcccaaattttgatttttttttttaaccgcctaattaattttcgatcagaatttcaccccacttaaattatttttctcttcccgtgtgtaaaaaa

SEQ ID NO: 14347 - DNA, 553 bp, Glycine max
aattattgggtctgatgttaaatgtaaattgtgctaatgatgcagataatgaccgcgcatgatcgatggcaagctttcaggggtgaaagcacagaggccaaagatctaatctttactctgaagcgttcgtcccttatccagtttaagaccaaattagatgtgtttttggccaataacacaaaagaagatgtttgtgactttaaggtcaaaggtagttggttggaacgatcttgcgttgtttatgctggtgaatctaacaacatcgtagcccagatgcataaaaagcacacggttcagagtattttgattgggaaagaccaattcatggtcacagtgtatcccaacattcattatgcgttcgttgtggcactaattgttattcttgacgagattaacgaagatgagaaagaagattagagaaatgctacacattcagcaaatcgtgttgtactttttatcgacggtggcatatttccactgaagctattgtgtttgtttaggtgtttcgtctttctaatttatgagtaaataaaaatatttaaattcgagctgc

SEQ ID NO: 14348 - DNA, 577 bp, Glycine max
  unsure (1)..(577): unsure at all n locations
aaagcattccataggaatacacgttaaattatatacacagctctttaaatttccaaacttcaaagcagcttcgtagatcctcaatcatgtcttctatataagtacaaaccttcacccatctcacatatcacaacactgtcacaaaggaaaagtactttttttttaaaaaaaattatcttatttgagtgtgatcgatggcatacccaaacccttatccggcgcaaccgtatccctccacctccgtgccgatgccggcggtgcccaccgccgtgatcggcccccagttctgtgcgccctacccgctggatctggcggtggtgaagaaggtgatgacgctctccgacggtaactttgtggtcaccgacgtcaacggccacgtcgtcttcaaagttaagggatcgctcatgaccctccgtgaccgccgcatcctcgtcgacgccgccggcaaccccctcgtcaccctacgccggaaggtttgttatctactctctctcacgcacacgtgttcatttaattttgggtatagntaaattgcatagtccacacgcttcatacgcgtgtatagctaagttttttt

SEQ ID NO: 14349 - DNA, 685 bp, Glycine max
  unsure (1)..(685): unsure at all n locations
ggttcccacctcacattccaaaccgacgtcaatggcagcctcatcctccttctccaccctcttctccttcctcctccctccaaagccacaccctcctcccatcatcactcgcttcccactccagaagctacgtgccaagcatcaggaccaggaccaccactcgtcggcggagctgtccgccgtggcgaacccgtcccacgcgcatgcgaacacgctcttcttccggtcggcgtacaacgtgcaggtggtggtggacgagaacgagccggaggagaggctcctcaaccggttccggagagaggtcatgagagccggagtcattcaggagtgcaagcggagacggttcttcgagaacaagcaggaggaaaagaagcgcaagaaccgcgaagctgccaagcgtaagagcagaagcaggcgctctcaatcgagatttcaaccacaaaacaagccggatgttgcagcaaccaagaaggaagaggatgatgataactgggatcttccagaagtagacgctccatatatttcaaccgcatgatccactcacattctgtacggttcttcacttgggagaggctttttatgcatgtgagttctgttatgtaaaatcaattccttggacgcagttagtgcaatgttcaattcacatttcattttaagttatgctatttattcattgtccatctna

SEQ ID NO: 14350 - DNA, 431 bp, Glycine max
atccaccaaaaaagaggaggttagaggaaaagcaggttgggatacctagtggaaaaaaaattgttcaaggcttgcagggaacagggccaccccagagtgcgggttggatgcagcaagctcttgatgaatctgtgcgtaatgtgcttacttctgcgacttccaccatttcctaccaacctatttcttctgtgacttcccctgtttcctatcaacttcctgttcctatttctagtaccaatgttaaggtgaatccagggacaacttctcatttttccttaaatgcaggagcttttggacatccttataacccaccttccataaagcctcatgttgcacctcaaacttcccaagatttttttgccacagttagtaaaaaagttttagctccatgtccttgtcttccatcaattaattcacaccttcatcaaaat

SEQ ID NO: 14351 - DNA, 607 bp, Glycine max
  unsure (1)..(607): unsure at all n locations
cggctcgtgttgacagtggcagtgggaggagacatgtggaaggcccatgtagccgtggcgtttgttcagctattcaatggaggttaccatgtcatcaccaaagtggcccttaatgttggcatcaaccagttagttttctgtgtcttccgngatctccttgccctttccatcctcgcacccctcgcttatgtccgtgaaaatacagaaagagtgaacttactcagatattgatggtctggcaaaagttggaggaactattatctgtgtctctggtgccatatttatggttttgtatcgggggccagctttgataggatatgccgaactcggtcatgtgacacaaaatgaaataagtgccagaggtcagccagagccatctggatggttaattggtggcttacagaaccttgggtttgacaattttcatcttggagttttgtgcttgatagggaactgcatttgcatggctgcatttctagccattcaggcatcggtattaaaaaaatatcctgcaaacctatctgtcacagcgcgctcatacttctttggagctatactgatggtgacacgtatcattattcatgactactgagacaactgactggag

SEQ ID NO: 14352 - DNA, 401 bp, Glycine max
aaccctctcagtcacatatggttagcactctcttctaaagccaactactactattagtatttagtgccctttcactcgtaacaagtgttcactgatataaatgtctttgtctgtggaagacaactactatggcatgagcagcagtgtgagtgagatagaggaagagaattcttcacacttgcacttgaataatgatggtcctaatcctatggtcaccattggtgaagaagagaacgaggatgatgatgacactgtttatgtggctgttggtaagagccagagtagcacggaggccttggcatggaccctcaacaacttggccactccttctaccatgctctttatcatacacgttttccctgagatcaagctcctttcgaatccattgggggtgggaatga

SEQ ID NO: 14353 - DNA, 868 bp, Glycine max
caatattaaagctaaccactcgtttgcatttgtatggtatatcattccaagaatctcagctgcagtaaacaacgaccatgaaactaatgacagcaacaacaacgtttgatgtctctgccacttgcttccgtgcccctcctccttcgtgctcaatgaatccatgccacaccagtttttcagttataaactccctgaatcctcacaagggacgacggataagcgttgctgttccacccaagtttccaaacttccggagggaagcatctctgcaggggaatttggaggctattagagtcccaacttcggtgcctgtgcgtgtagcatacgagcttcttctagctggtcatcgatatttggatgtaaggaccccggaagagttcgatgctggacacgctcctggcgcaattaacataccttatatgttcagagttggatcagggatgacaaagaacagcaactttattagagaggtgtcttcacagtttaggaaagatgatgaaattattgtcgggtgtgagcttggtaaaagatctatgatggccgcaagtgacttgctagctgctgggttcactggactcacagacatggctggtggttatgctgcatggacacaaaatggacttccaacagagctatgaagtgtttctgttggaactgtagctgtaaatagaataagttttgggaggagtccaatgcatggaaatgcagaaacacttcaccaagacagtgacaatctgacactgggaaaacaaaaatctataaatggaaaattaaatgtatttgtcgatatcaacaataaataaaatgttaatatatatccaactttgcaaagaaactttattacttggttgaaaaataaaaattaaat

SEQ ID NO: 14354 - DNA, 390 bp, Glycine max
  unsure (1)..(390): unsure at all n locations
gtaagaatctcagcaacaccaattagacaataaacagcgacgatgaaagcaatgacagcaacgacaacgtttgatgtctctgccgcttgcttccgtgcccctccttcttgttcaccgaatccatgccacaccagtttttcagttataaactccctgaatcctcacaagggacgacggataagcgttgctgttccacctaagtttccaagcttccgagggaagcatctctgcacgggaatctggaggctgttagagtcccaacttcagtgcctgtgcgtgtagcatacgaacttcttctagctggtcatcgatatttggatgtaaggactccagacgagttcaatgctggacacgctcctggcgcaattaacatnacctatatgttcagag

SEQ ID NO: 14355 - DNA, 371 bp, Glycine max
cccacgcgtccgatcatgcaccctttcaaatatttggcttgggagcggcaaccttacacagtcgatcatcaatagtaaagctaaccactcgtttgcattgggtagtatatatcattctaagaagtaagaatctcagcaacaccaattagacaataaacagcgacgatgaaagcaatgacagcaacgacaacgtttgatgtctctgccgcttgcttccgtgcccctccttcttgttcaccgaatccatgccacaccagtttttcagttataaactccctgaatcctcacaagggacgacggataagcgttgctgttccacctaagtttccaagcttccggagggaagcagctctgcaggggaatttggaggc

SEQ ID NO: 14356 - DNA, 702 bp, Glycine max
aaactcagcttttaagtgttctcaaaattagcaaggagaaagtagatgagtgttataatgcaattctccaactctcaaaggccaataaatatggtcataacaacatcaccaacactagcaagcgcaagtatgagcaaatcccaagcagcccaagtggcgttattgatgctgcattttgctctgatggttccaacgattcgtgggcagtggggtcatcattgttatattcaccaccagagcctctcttcaagaagagcagaacccaaggacaacaaatgaatttgtcaccacttaaccgggtcattgtcggaattgttggcacctctccttaattaaatacccctttcacaaaccaaaaaagaagtcttatattttatttactgtggtaattagtcttccatgcatgttgctgaacttcagagccttcccctctatatgtatctcttcatttccaacaatgtccctcattcatttaacatttcttgaagaggcaaggtggtggtggttcaggaatgagtggtctatctctgagggaagaggaggacagagttggcaatgaagaattgaagacaatcatcagcactctataatatgtttcaggcactcttttttaattgttcaatgggtctcatatagaccataccaaatttggacatattttatatcatattttctataataaattgggaacaattttgttcc

SEQ ID NO: 14357 - DNA, 258 bp, Glycine max
tgaacttcagagccttcccctctatatgtatctcttcatttccaacatgcatggaagactaattaccacagtaaatagtcttccatgcatgttgctgaacttcagagccttcccctctatatgtatctcttcatttccaacaatgtccctcattcacttaacatttgcttgaagaggcaactgtgtggtggttcaggaatgagtggtctatctctgatggaagaggaggtacagcgttggcaatgcaagacttgaaga

SEQ ID NO: 14358 - DNA, 422 bp, Glycine max
atgagtgggaatgactgctaaaagttaccttggaacctcgttttgcttctgggagctggttttgccatagctgatggagtacaatctagtggcctagcagatgttttgtcaagagccttggatttcttggaagatgctccatacttggcaattgttcctgctgttagtctaatatgtagcattatcactgagttcatcacctccaatgatgctactgccacccttcttgtcccacttctgtatcacatagccagaactatgcatgtgcaccctcttcttcttatggtccctggaggaatagcaactgagtttgccttctggcttccaacttcaacaccatcaaatgtagttggctttgccactggacacatagaaattaaagacatgctcaaagttggtgtgccactcaaggttgctgggat

SEQ ID NO: 14359 - DNA, 1436 bp, Glycine max
catggaatcaaactttacttaactaaggaatggtacaagaaaacgacctggatgtatctggctattcccatcaccatttatgcattggaaagactggttagagcattcagatcgagcattaagtccgtcacaatattgaaggtgactctttatcctggaaacgtgttatcacttaaaatgtcaaagccgcatgggtttagctacaaaagtggacaatacatgtttgtgaactgtgctgctgtgtctccatttgaatggcatccattttccataacttccgcccctgatgatgattaccttagcgttcacataaaaatacttggtgattggactcgaagtctgaaagccaaattcacacaggcgtgccagcaacccctcaatggacagagtggactcctaagagctgaatgcttgaaaggagataacagcccaagttcctttccaaaggttctggtggatggtccatatggggcgccagcgcaagactacagggagtatgaggtggtgttgctagtggggcttggaattggggctaccccaatgataagtatactaaaggacacggtgacacacattttaaggcgaatgatgaggaggagggagggcaagagagggtgagtgacttcaagacaaggagggcatacttctactgggtgactagagagcagggttcatttgactggttcaaaggggtaatgaacgaagtggcagaagaggaccgaaggaaagtgattgaactccacagctactgcaccagcgtctacgaagagggtgatgctcgctctgctcttattgctatgttgcagtccctaaaccatgcaaagaatggagtggacattgtctctgggacacgagtcatgtctcactttgcaaaacccaattggcgcagtgtctacaagcgcattgcgcttaatcatccagatgcccgagttggggtattttactgtgggccatcagccctcacccatgagcttcgtcagctagcattggatttctctcacaacacatccaccaagtacgacttccataaagaaaatttctgacaagatcgagctaagccgtccaccacctagatcattccactttgttttttgcctataaataattaagtttctacatgtggttcttatttatggctttgtaaaagcaccaaggcaggtgggagctaaatggttaaaatagagttgcctaccaattataaaaggtgtggacgtctgttaatgtctctgcgtgtctttatgtccatgtaaatttaaggagaaataaccactccttggaaacaccttgggagaaactagaaagtaatacagaagagagaataatgtctagctggagcgcacttgatactttgtattaatccccgatgccttttagctgatcaattgcagaattcaggagattcatttataaatattataaataatttgtgcacccgc

SEQ ID NO: 14360 - DNA, 1196 bp, Glycine max
gtgattggactcgaagtctgaaagccaaattcacacaggcgtgccagcaacccctcaatggacagagtggactcctaagagctgaatgcttgaaaggagataacagcccaagttcctttcctaaggttctggtggatggtccatatggggcgccagcgcaagactacagggagtatgaggtggtgttgctagtggggcttggaattggggctaccccaatgataagtatactaaaggacatggtgaacaattttaaggccattgatgaggaggagggaataggtggtgctaaatcaccaacgaggttgagtgacttcaagacaagtagggcatacttctattgggtgactagagagcagggttcatttgactggttcaaaggggtcatgaacgaagtggccgaagaggaccgaaggaaagtgattgaactccacagctactgcaccagcgtctacgaagagggtgatgctcgctctgctcttattgctatgttgcagtccctaaaccatgcaaagaatggagtggacattgtctctggcacacgcggcatgtctcactttgccaaacccaattggcgcagtgtctacaagcgcattgcgcttaatcatccagatgcccgagttggggtattttactgtgggccatcagcccccacccatgagcttcgtcagctagcattggatttctctcacaacacatccaccaagtacgacttccataaagaaaatttctgacaagataggggaattatcggagatcaggtgaaggatgatgtggaacgagctaaggcgtccaccttgatccccattccccaccacctagatgattgcctataaataattaagtttctacatatggttggttgttatggctttgtaaaagcacgaaggctggcggctgctaaatggttgaagtagtgagttggctaccaattacaaaaggtgtgggcgtctggttggatggccctattattgtgtctgcgtgtctttgtgtctatgtaaatttaaggagaaatacccacaagggtattttattttttctctttttggaaggacctgggagaaactagaaagtaatacagaagggagaataatgtccagccggagtgcacttgatagtttgtattaatccacaatgcctttctgttgatcaattgcagaattcagagattcattataaatatcatacataacttg

SEQ ID NO: 14361 - DNA, 1254 bp, Glycine max
tatcacctccttcagaaaccacataacaatcaagaagtccatccacaacagcagcagcatacttatcaagactcgctctcaattctgggtgatcagctccatcagaggcaacactctggctttccttcaccgtcatatgtcaaaaccggatttcttggattcgagcatgaagttccctgcttcagtttcccctgggcaaaacatgcttggttcactttgtcccgaagggagtggcagtctcttgaatttatccaggagtggtcagtccatgttgactgaacagttacctcaacaatcatgggccccaaagttcacaccattgcagattaatgcttttggcaactcaatgcaacatgtgcagtattctggaaaagataccgcaatggtgccaccacattgtaacccggacacccaaaatcctattctatttggggtcaacatcgattcatctggtcttctgctccctacgactgtcccgcgttatactactgcatcagctgatagtgatgcatcagcaatgccattaggagagtctggattccagtctcctctatatccttgcgtgcaagattcatcagagttggtgcaaagtgcagggcatgttgaccctcaaaaccagacacgaacattcgtcaaggtttacaaatcagggtcagttgggcgctcacttgacatctcccggttcagcagttatcatgagctgcgggaggagttggcacagatgtttggtattgaggggaagttagaagaccctcttagatcaggctggcagcttgtattcgtcgacagggagaacgatgttcttctccttggagacgatccgtgggaatcatttgtcaataatgtttggtatatcaaaatactttcacctgaagatatccataaaatgggagaacaagccctggaatcccttggtccaagtccaggacagaggctgaatagcactggtgcagattctcatgaaattgtttcaggactaccatcaattggctcccttgaatactgagagaattttaacatgtatttttctctcaggtcctacggttaagaagactattacatatccacatgtttagtacttctgtttgaacactacttttcgaccttgcatatctgaatcaatatatactgtattgtctgtttcactttcaaaaacatcgttattatttcgtagaggattgttgagattttcagcacccaaaatctattttatatacccgatgagaaagaaacctaggacaaacttaataagcc

SEQ ID NO: 14362 - DNA, 467 bp, Glycine max
cgagcatgaagttccctgcttcagtttcccctgggcaaaacatgcttagttcactttgtcccgaaggaagtggcagtctcttgaatttatccaggagtggtcagtccttgctgaccgaacagttaccccaacagcaatggactcaaaaatatgcacctgtgcaggtcaatgcctatggaagcactgtgtcacatccacaatattccggaaaagattctgtaatggtgctaccacattgtaactcagatgcccaaaattctactctttttggtgtcaatatcgattcatctggccttctcctccccaccaccgtccctggttacaccacctcgtccgctgacactaattcatcaacaatgccattagcggagtctggtttccagggttctctatatggttgcatgcaagattcatcggagttgttgcaaagtgcagggcatactgacccagaaaaccagactcaaacc

SEQ ID NO: 14363 - DNA, 1422 bp, Glycine max
cgaatcacgaatcgagggaataagagggaagaagagaaaacgacccaatgtttttggtttgttccccgtaagtacactgtgcaggaagaagatccttctcacccaaaccaaatgccgcagcagcagcagcagcagcgcgctgtttggtaccaacgcaaaatctaacccgcattcctctgtgtcatccaaacaacccctccgcctcagatctcgcctcgagaacatggatcagttgtcggcgatcagcgaggacctggccgagatcgacggacacatcgccgacaatttccgcgccctatcaaatggatttcagaagttggagaagattaaggattcgaatagacagagcaggcagttggaagacctcacggaaaaattgcgagaatgtaaacggcttattaaggagttcgataaagaagtcaaaacattggagagtagctttgatcgagaaaccaacaaaatgttgaatgagaaaaagcagtcaatgatcaaagagctaaactcatatgttgctttgaaaaagcagtatgctacaaatattgagaataaacgaattgaactctttgaggggcccaatgaaggttacgcagaagaaaatggcttgctagcatcctcaatgacaaatgaacagctaatggatcatgggaatcggatgatggatgagacagatcaagccatcccaagggggaaaaaggtagttcaagacaccataaatgttggtacagatactgcagcagctcttaaggctcagacagaacaaatgagtagagttgtcaatgagctggattcaatccatttctctatgaagaaagcctctaaattggtcaaggaaattggtaggcaggttgctactgacaagtgtataatggcgcttcttttccttatcgtcattggagtaattgcaatcattattgtaaagcttgtgcacccagacaacaaggacattcgcgacattccaggactagctcctccagttcagaaccgaagactgctttggagtcacaattgaggaattaaaatgaacatagtgatgactgatgagcttatgacaaatgcgttggggacactagagattaaaatgaacatgtttatgacttcatcaaattgatttgatgctctttggtttgatggtgatgacattggctgctgctgttgctagaaacagggttgccaacaattgagtttgttattacataaaagagaagggttggttggcctgaggcatgatatagaacgtgggtctctaagcatgcacatttgattttttctgaaccatttttctaaataggttccgtctatcgaatcatagggaaagccaaacaaaagagccctctgagattatttgttgtcaattttgtaatatacgctcgcttttactgtaaaccttcagttcttaaaatctacctggtatcatcagtatta

SEQ ID NO: 14364 - DNA, 580 bp, Glycine max
gccatggatagcttatgtggcaatgagagtacagatggctgtaaataactgcatgtagtgtagcttcaagattccttccagtcttctgttttggatcatcatcagatttggccttttttcaagaattgtgcaactgtattacatattcgtcgagtttagatgtctgaagaaggagcgagatatctgccagatgatgaaataatgcatccttatgtttcgcgaagaagcagggaaggacattatgactctctgcttgaggtttatgttaattgtccttcacttgaaggaaatttaatttaagtgatgtactgtttgatcaagagatttggctttgctgcatcatcatcaaacgattgtgctatgccctgtcctgtaataatctacttcgatagtcttgggtggatgtttttgtagccttgatcgttgttattgaaattcatcctcattttctgtagttcttgggaacatagtatttatcactggtttgggttcttctctactttttactttgataatgtcgcaacagtttccgtgtccaggtctctctccatatgcaagggtaactgtgtgtacaatatca

SEQ ID NO: 14365 - DNA, 278 bp, Glycine max
gaggatgacatgtgttgttgagtgaagtgtgaaaggatgaccaattttgttggactaaggttgcacacgaggttgccattgccagtgttgggtgatgtttctgccactgccacttccactactctgtcaagagcagtattaaagaagtggaattggagagttaagggtcctcgtcgtatgctattgggccttggggtttccttcttgtctatggctggtagcaaatccttcattgccttggctaggataacggctggtccctctgtggatgagatact

SEQ ID NO: 14366 - DNA, 733 bp, Glycine max
agggaacatagaacttgtgaacttgagacagcgcacaacacaacaaaacacaattacagcagaaacaaacctaaatttccttgataatgattcaagaactcatgatagattgacgcattgatcctgacagcaaaaaatttggtggagggccaagagaattgacaggtgctgtggatctattaaatcacttccaattactcccacattttgagtttttctgcaagaggccacttcctgtttcaatttcagatgcacactatttatacaatgtagtaggtgacatagaaatcagaaaaggagatgggatgcagttggatcaacttattcaagatacatctttgtccagtggttctaattatcatatacaacctttggacctcgatattctaaaggaggcttttcaactcaaggaaactgttcccattgatttgcctgctgccgagaaggggattctgactgttgcaggaaaatcaaaaggtgaatctaaagatgtggagaagaagcataaaaaacacaaagacagggacaaagataaggacaaggagcataagaagcacaagcatcgtcaaaaagatcgaagcaaagacaaggaaaaggagaaaaagaaagacaaaaacaggcatcgtgattctagtgctgatccttcaaagaaacacaatgagaagaaaaggaagcatgaatgagatgatgatcttaatgttgtgcacaaacacaaaaaaagtaggttctcatt

SEQ ID NO: 14367 - DNA, 496 bp, Glycine max
aaacttctcttatccaaaaaacctagcatctgtgacccaagtaagtttaacattgctaaagctggcacgacatcatgaacagaaccacatccccacaagcatgaatgactcagtagacaaactggtaatcttcctagcaaagagagatggcatagacaagctggtgaagacgttccagtacgtgtcaaagctcgtaaactggcacgtggaagccacgcaccccgacacatccaagaggttcaagcaatgggaagtggcctccggcctcagcagaaaagccttcagaaccggaaggttcctcaccggcttcaacgttcttcgcagaaacccaggctccaccctttctctgaggctactagcagtgctctctaatgctggcgagatggtgtatttcttcttcgaccactttctttggttggccagaatcggtaccatagacgcgagcttggcgaagaagatgagcttcatatccgcctttggtgagtctgttgggtat

SEQ ID NO: 14368 - DNA, 477 bp, Glycine max
ctgcagtgcacccagaaagagtagctggtatcataactgtaggcattcctttcatgcttccgggtccctctgctgtggagagccaccttcagcttcccaaagggttttatattactagatggcgggagcctgggagggcagaagcagattttggccgctttcctgtgaaatcagtgataaggaacatctacactctcttctctaaaagtgaggttccaatagcagctgatgatcaagaaatcatggacttgtttgacccatctactcccctacctccttggttctccgaggaagaccttgcaacctatgcatctttatatgaaaaatctggattcagatatgcattgcaggttccttacaggagtatcaatgcggatgctggcttaagtgatgtaaaagttactattccatcacttctgatcatgggtgagaaagattatgtgttcaagtttccaggcatggaggactatattcgaa

SEQ ID NO: 14369 - DNA, 861 bp, Glycine max
acctaggccgccccttgcacgcgtacgtaggctcggatttcggttcgggaaaccaacagatgaacctccacatgttgaaggggatgttgttaaagcagatgctggtcatgttgaagtggagaaatacattgaagaaacttatggaagttgggcagtgttccggccacagtacatgattgggtctggcaacaacaaagactgtgaggagtggttttttgacaggattgttcgggacagacctgtgccaattcctggctcgggactgcaactcagtaacatagctcatgttagggacttatcttcaatgcttactcttgctgttgagaatccagaagctgcaaatcagaccattttcaactgtgtgagtgaccgtgcagtgactctagacggaatagccaaactatgtgctcaagctgcagggcgccccgttaacattttgcattatgatccaaaagctgttggagttgatgcaaagaaggctttccctttccgcacctatcacttctatgcagaacctagagcagccaaagctaaattgggatggcaatcaaccacaaacctccctgaagacctaaaagaacggtttgaggagtacgtaaagattgggagagataagaaatccatccagttcgagctagatgataagatattggaggcattgaaggttccggtgtcagtgtgatccatttatatccaaaacgaacaattatcagacaagactttaagattttttggtcgctcaattcaaatgatgtgcattgaagaaagttactaaatcctggcctcccgcacacgattacaacaatcgtccagcattgtatatcatgaccttgtgctgatgggctgctccatacccattct

SEQ ID NO: 14370 - DNA, 692 bp, Glycine max
acgagccattgttcactttcaaatcaactcaagagattcaaccaagaaatatagaagctagggttttgttacatttgtgttagcacgcaatactttgcaaatatggagagcagcttaggagacatgttggttaaggttgtggtgttcattctagttcaagccttggtttaccttatcctctccaattcatcaaacgtgttcaacaagaacatgaagaaatctaacagcttcaggccggcacgttcggtgagcattcgccggatgctcgctttgatctctgattttcctccagaagaagaaccctctccttcaccgaagggtgctaaaacaacatcacttcatcaaagtgatcaataattgtaaggatttaattaaattgtggctgcaattacaaattggagacaatttcagcttatcgggtggccatattaaggctcagaaacctccaaatgttgcggctgctgtggtggttacaaactgcaatttagactagacccatgccaagtagaatgtaattaaattatttctctctctgtttccttgtgtagaggctatggtattgcaaaatttgttaaaagagtccaaaattattggtatgtaggtattgaattcttttgttcatttattcttttatgaagaatattgtaatatatttatgagtggaatattaatgttgacattaatttactttt

SEQ ID NO: 14371 - DNA, 646 bp, Glycine max
gggtccaacatgtccttcaatgcgttagcaactataaaaggacgtgtgcatgccacttttctcttcacaattcattcatcaatccattgttcactttcacatcaactcaagagattcaaccaagtcatagaagctagctagggtgtattgttacatttgttagcaaaaaacttgaaaaaatggagagcagcttgggagacatgttgattaaggttgtggtgttcattctagttcaagccttggtgtaccttatcctctccaattcatcaaacatcttcaacaagaacatgaagaaatccaacagcttcaggccagcgaggtcggtgagcattcgccggatgctggctttgatctctgattttcctccagaaggggaaccctctccttcaccaaagggtcctaaaactcatcacttcatcaaagtgatcaataattgtaaggttttaattaaattgtggttgcaattacaaattggagacaatttcagcttatcgggtggccatattaaggctcagaaacctccaaatgttgcggctgctgtggtggtttctggccatattaaggctcagaaacctccaaatgttgcggctgctgtggtggttaccaactgcaattgagacgaagaccatgccacgtagaatgttgt

SEQ ID NO: 14372 - DNA, 614 bp, Glycine max
gcagttaagtagtggctgcaagaaatatatatataaagaaaaacaaggttggcacttggaagcatatgatccactgattccactcagtgaattatgaagtgatctgaaatcacccgcgaaccgttaggataaggcaaagagagagaaacaaacacaaagcggcttccaatggccactctgcggctcaccttctccgactcaaccacattgttcaggccttctctaccttccacgcgaaccttctctcgaaaccgaagcctcattgtcaaagcctcttcttcttcttctgacgacttctccaaaagcaggcgacgcttcatcgccgaaaccgccgcactctcggtctcgctccctcagttagcggcgcgtgccgaagacgcgctttcggagtgggagagagtatacctccctatcgaccccggcgtcgtgcttctcgacatcgcttttgtccccgacgatcccaaccacggttttcttctcgggacgaggcaaaccattctggagacgaaagatggaggaaacacttgggctccgcgttcgattccttctgctgaagacgaagatttcaactatcgattcaattctatcagcttcaaagggaaggaagggtggat

SEQ ID NO: 14373 - DNA, 404 bp, Glycine max
ttcagcatggaaatctccttggttcatgaacactgttttgtccagccccaggattgatactgaaattacaattgaggattttgggtatttcatgagccctggtgacagaagctatgatgcaatcgggttgatgaaacagatcagtgaacaaactgcggctcaatatgccagcgctcaagagattctgggaaatgagactcctaaggcattaccaaaagatgcttccagaaacgacagggatgaagatcaggaacatatcgatgctcataacagcatgggaaccattgtcagttggcttcaagtgctctggtggagcgacgtgtacttgacttcagcgaatgtggaactccggtccgaggtgatagcagcaaatcctcagctaagaacttttcaagcccttcttt

SEQ ID NO: 14374 - DNA, 354 bp, Glycine max
cgccttacctcactttccgaccacaaccatgtcagcgttcatttcccacaaccttaaacccggcggcatcatggtgtccccttctctgcaccaccgttcctcattccctttgcaactttctttgaaagcacccttctctgcttcccatcctttagtcctcacccgaagactcttccttccttcggtttccggcatctgggacgctctcaccggcggcaacaacaacaatgcccgcgaagccgttctcgcaattcgacgcggaatgcttctttgtccccgccggggtgatgtttcggggtctcttgcggagtttgaccagggcatttcagttggaccctcgtcaaaaggcgtatc

SEQ ID NO: 14375 - DNA, 774 bp, Glycine max
ctcgagccgatcttaagctcgccgacttcggttcggcggagtggttcggcgacgggaggagcatgagcggcgtggtggggacgccgtactacgtggcgccggaggttctgttggggagggagtacgatgagaaggttgatgtgtggagctgtggggtgattttgtatataatgttggcggggattccccctttttacggagactctgctgctgagatctttgaggctgtggttagggctaacctcaggttcccttctagaatcttccggactgtgtcccccgccgccaaggatctcttgagaaaaatgatctctagggactcttctagaaggttctccgcagaacaagccttgagacacccttggatcttgagtgcgggtgacacggctgaactgacttgagaatgtagctacatgctgtagtagtagtgtagctaattttgcccctttgtcttttctctctactagcttaataaggtctactcgtggtggcagaggaaggaacgcttctgtaaattttcatggtgcaagtagttttttttctttctaggaatcttatatctgagactctgggtatgagtcgagagaatcttgttttccactctcggtgattctctcttttgtagtagaaagtgagaaagtgggtgatctcccagactccctccccctagtacaaaggaggagtttgattctactatccttgtagtttttgtatatgtaaatcataataaacaatcattttgaatgaatgtaaatggtgtttaatcttctgaaa

SEQ ID NO: 14376 - DNA, 483 bp, Glycine max
gatctcttgcgaaaaatgatctgtagggattcttgtagggggttctccgcagaacaagccttgagacatccttggatcttgagtgcgggtgacacggcggaactcacttgagaatgtagctagagagagacatgacctaagttacatggtgcagtgtagctaattttgctccttttgtcttttctctctactgtctcaataaggtggtctactcgtggtggcagaggaaggaacggaacagagcacgcttctgtagatttttgttttgttttaggaatcttatatctgagactctgtatgagtcgagagaatcttgtttttccactctcggtgattttctctctgtgtagtagaaagtgagaaagtgggtgatctcccagactctcttcccccttgtagaaaggagtttgtttgctgatatccttctggttttttgtatctgtaaatcataaataaacaataattttgaatggtgtttaattt

SEQ ID NO: 14377 - DNA, 1033 bp, Glycine max
agcccaaccgggttcttggaaactctggcaaagtgatgcagaattcagttcatggagatgctgcggtcattaagaattccattggaagtgattgtcagtcacaatgtctcgggaccacagtgcccaaacgggttcttgggaactctgtcaaagcgatgcaggcagttcatggagatgctgtggtcactaaaaagaaccttggaagtgatcaatacctcagggttacagaaccgaaacgggttcttggaaattctgattctagaaatggcaaatcaaagcagaatccagttcatggagatgccgtggtcactaaaaatacctttggaagtgatcatcagttgaaaagtctcgagattacagagcccaaacggattcttggaaactctgattctaaacattgcaaagcgttgcagaatttggttcctggaagtcaaaaagttgaatctttgtacgaatctttgttacagattccaccactaacgtatgatggattggactcggtagatgatgattggttatttagttcggaaccgacagaggcaaggcccgtctcaaagaaacagaagtttgattctgatgtctttcagctttcaaattctatgtggcctcgtgcacaatacttgcctgaggtcgaaatatacgcgttgccatacgcagttccattttgattcttttggattttttttgtcaataggtggtagctttgaaagtagccgcgagctgtgttctaactgagaaccggtgcttattgcttttttgagagaaaaacaattacatggcatatgggcaaaaagatttcgttatatcttccaaacatgattcatgtaatttttttgtcttccatatcggacgttaatagcatttgtagaatgtacatacatataaatactaaatagttttttaggaagtgcttaactatagatttgagaacacaagatatagagaaaggatttggtggaagttattgattccatgggacttgcacttgttcacttgaatctgcacaatttcgtattgttgttaaagtgataat

SEQ ID NO: 14378 - DNA, 1350 bp, Glycine max
agttacttcccatttctcttcatataaatactttattgctttgtcctaaataaataaaatcatcaaagctcaaacccccctctctctactcaaactaaccactctgtttctcttgctctacttttaccctgtttccagtggaacaaatcttcatccaaattaggttttgttttggagaaatgtatgcagagactggtcttttcttcccatatttgcacaacgtctctcacggccttcatcagcttgaggagtactgcaaaacccagaagtccaatgcttcaatggatgaccttgttcagtcttctgccatgtcagagtatgatttggcagctgagggagatctgttcaaagctcctgaacctattattgaagagccaatcatggatatggatcccatgacagccaccatctccatgatatcttgtggggaagatgtctcctcacagggactaaaatccactgatattgatattcttcaaaatgatcagtttctgcatgaggtgttctatgaatgtgaaaaggatctcttagaaaaggcagcaatagagccaccattctctgagattctggaaatcaaggttccttttctgaacattgatgagaacacaattcaagaaaacaagccatttactgacatgcaattagcaaagagtgtcagctcaggaagtttgagctcaatggactggatgcgtggagctgcaatgaagcctgctttcattgatatctctgcaatagatttcaatgcagattatggcatgcggagatcatttagtgaaggagatataaagactcttggtaatggtaacatgaacatcgtccaatcaccccttgagaggccccttcttatcagcaactgcaccagtgaggaacgcttccaaaagctctccagatacaggaataagaagacaaagaggaattttgggaggaaaatcaagtatgcttgcaggaaggcacttgctgacagtcagccaagaatccgtggaagatttgcaaggactgaagaatctgatgtcaagagggaatgaatgacttaaaactgatttagtaggaagaaaatagagttgagtagctatatctgatcaagctatatggaaaaactcagcagtaatatgtgattagaacttatgtggggagtctctgtatgcttgagcagatatttgctgaataaaccaggccccaaacttcttgggctagttcatctcttatctattgtattaacgtctctatagacggaaataaccttccagatatgtaaatagttttgttgaataatggaaagaaaaagaaaggattttactatgttcatatatatgatgaaatgacaaggtaacatcaataatttcgttctgt

SEQ ID NO: 14379 - DNA, 438 bp, Glycine max
tcaggggaaaatcatcaaagctcaagccggtctactcaaaccactctgattctcttgctctgctattaccctgcttcctgtggcacaaatttccatctagctctcctccgaattagggggtgttctggagaaatgtatgcagagactggtcttctcttcccatatttgaacaacatctctcacggccttcatcagctcgaggagtactgcataacccagaagtccaatgctgcaatggatgaccttgttcagtcttctgtcatgtcacagtatgattgggcagcagagggagatctgttcaaagctcctgaacctattattgaagagccaatcatggatatggatcccatgacagccaccatcttcatgatatcttgtagggaagatgtctactgacagggactaaaatccactgatattgatattcttcaaaatgat

SEQ ID NO: 14380 - DNA, 794 bp, Glycine max
gcggtagagagaacggtcttctacagagagagagcggctggaatgtattcagctttgccatatgcacttgcacaggttattattgaacttccccacatcttggttcaggcccttatgtatggaattatcgtatatgccatgatgggattcgattgggccacatcaaagttcttgtggtatcttttcttcatgtacttcactttcttatactacaccttttatggtatgatgaccatggccattacccccaacgcacacgttgctgccatattgtccagtgcattctatgcaatatggagccttttctcaggcttcgttattcccttgtctagaatacctatatggtggaagtggtactattggatctgccctgtggcgtggaccttgaatggattggtggcttcccaatatggagacaacagggacaaacttgagaatggtcaaagggttgaagaatttgtgaagagttattttgggtttgaacatgattttctaggggtagtggcatctgtggtggctggcttctcactattgtttgctttcatcttcgcctttggaatcaaagtactcaacttccaaaaacgatgaaatcatcccaatgattctcactctagagcttttatgcatccatttgaagcattgaataatttatatgaaaaatgcttagtggtgacgggtgaactaaatttacaattttctttttctttttttttattcattggaatcaaatttaagtatagaagtttactcccattcaaacttattattctacttattgagctggactccttaat

SEQ ID NO: 14381 - DNA, 533 bp, Glycine max
  unsure (1)..(533): unsure at all n locations
gtgaagtcaactaaatatgggatccttttagtaactcgtgagaggcgagctcaaaggcttgggactgcgttgaaggtactgtgtgacataattcaagatgacgcagagcctgccaagaagaaattctatgaccttaagctctctttgcttgatgagattggatggacacatttggctgcatatgagagacaatggatgcatgtgcgtttccctccaagcttacctcttttctaggacctgcccatcgggaagatgctggacagcaatgttaggactttggaaccatgtccttttcctcaatatttatgtaacactagaccctttacgtgacctatcctttctttttgtgaacatcttggccttggtatttcgaacatggcatgggaactttgccatgccttcagtgtggctgccacatcagtggcttcgtcaatcccatttatattaatttaataataacaaaataaagagtttttcactnnnnnnnnnnnnnnnnnnnnnnnnnnnnnnnnnnnnnnnnnnnnnnnnnnnnn

SEQ ID NO: 14382 - DNA, 677 bp, Glycine max
  unsure (1)..(677): unsure at all n locations
aacacaccggacaattttccaaactacaccacactagacaattttccaattcaattatcgattcccctactcacaaaaattaacatgcaatccatttctttgttcaattcctcaccaatattattccatccattttcaccatctaggccatgttctaatggcaagaaaatgaattcgtttgctccaactaaggcttccatgagaggatcagcggatcagaacttcagtggaaggttggtggatgagagcatgataatactgaggaagaggatccatgagatgaacatgatagagaggaactatgagcctccttcagattggatggattgggagaagcgctattataacaagtatgactccatcatatgtgaagcagtgggagttttgcagtcccaattgatgaacaccaggccaagtttggctcttggggccatggctttggttgcaatcagtgttccaacttcttctgctgtgcttttgtttcatttggttgaattggccaaggttgttttggctggggctcatcttggctagctagactagaatattgttcattagatgctttgaatttggtttggtatttggaaaaaccattcaattcttttgaattatacatagagcatatagaattntaattgattggaatttggaaccactatctgatctgttagatttga

SEQ ID NO: 14383 - DNA, 562 bp, Glycine max
cacaatcttattggaccaaatttctccacatgaattctcatctacgttcttccaaagtgtcgttaattgtcgtgccaagttcctctgtgttctctttgcctcgacactctgcattcaagttccataatggcagcaaccatagcaacaacaatggctatgatcaactcaaagtgcatcaacacaacagggtcatcacacaagttgcacaaccccaagctcccaccctcaaaacccaccctctcccttttctcccttcagaacctcccaaagggcctaacctcccacgtctcaacttccacagcaggcactgccatcgcaggcgcaatattctcctcactcgcaaactgcgacgcagccttagctgcatcgcaaattgctgaattagccgaaggtgataaccgcgggctggcattgttgttgccgttgattccagccatagcgtgggtgctgttcaacattctgcagccagcactgaaccaactgaaccgcatgcgtaacagcaagggggtcatcgttgggctcgggctagggctctgtgcatcgggcatgatgtccggcccag

SEQ ID NO: 14384 - DNA, 642 bp, Glycine max
aattttccgttgtggtccagtttccatgttccagaatctatgctacagatggggtgcaagattgacaccatcacaagtggctgaaaaagtaaaacacttcttcaagtattattctatcaatcgacacaaaatgactgtcttgacgccttcctaccatgctgagagttattcaccagaggataataggtttgatcttcgccagtttctctataatgcaagatggccatatcaatttaggaaaattgatgaacttgtaagtgaattggatgttaaagatgttaaagattcaggagaccatgaggcaatggcagctacatctgatggtgttggtgggatgggagttgccgcagctggttcaggcaatcctaatgttggattgtaattaaaattaacccctaccctaataaaaaaaagaagaaataaagcaggattgatgaaattcattcaacctttcatttcagcttcttattaatgtcagctgtaaaaacaatatttttaattagtcaatgtcaatcatgtttcagcagtttcgttgtattggaaagaggaagacaatgtgtgttctggaacccatttgcagtgatgcaaacacgggttcacactttccaacacatgaaattaagaagcaagaatttgtgtttt

SEQ ID NO: 14385 - DNA, 644 bp, Glycine max
tttgctgaggcattaagagactatgcggggagagagacacctctgtatcatgcaaagcgattgtcggagtattacaagagcgtgaataatgggaaggggcctgacatatacttaaagagagaggatctcaaccacagtggctctcacaagatgaacaacgctcttgctcaagccatgattgctaagcgcatgggctgcaaaagcgtcgtcaccgccactggctctggacaacatggccttgcaacagctgcagcttgcgcaaaacttgctttggactgcaccgtcttcatggccgacaaagacatccacagacaatattcaaatgtgaggttgatcaagttgttgggagctcaggttgaagcagtagatggagggttcacagatgcagcatcagaggcgtttcggtattgggtaggggatttggaaaacaggtaccacttgagtggctcagcggtgggaccacacccgtgtccaaccatggttcgggagtttcagtcagtgatagggaaagaaacgaggatgcaagcattggaaaaatggggtgggaagccagatgttcttgttgccagcgtagggaccgggtcaaacgctttggggctggttcatgagtttattgcagacaaagatgtgaggttcgttggagt

SEQ ID NO: 14386 - DNA, 445 bp, Glycine max
acctaggagttatgaggacgcatgcacgcgctcggaatctgggaattaggttaaagcgaatattcaaaatgtccaaaatccttaaagggtatgatgaacaattatggcgtgcctgagttggactggcagtatgctgatcattggagcctaccgcatctgcattttcaatatctcacacacttcttctttgatagcttgtggagtgactgtgggttcacctattggtatcgatgtggaagagacacaaaggaggttcaagaatgatattttagcctgtgcacaacgattcttttctccccatgaaatagacatgctgactcacattgcagaccctgaacttcggcttcaggagtttattatattatggactctgaatgagtcttatgtgaaaacaatatcgatgggctttttaaactctccttttaagacttttactatttctatt

SEQ ID NO: 14387 - DNA, 715 bp, Glycine max
cacgaggaacccccttccccccaatctccttcctttattttgctggattttagatgtataattaaagccacctatggcactggtgttacactcagggttaaagttttggtagttctggttctttgacacttgttatgatctttcatgcaggtggggaaggctttgtttgatgggcaactgctggatgtttactttactcgatctttctataagcatatacttggtgttaaggttacataccatgatattgaagcggttgatcctgattactataagactttgaactggatgctggagaatgatgtgagtgatattcctgacctgacatttagcatggatgctgatgaggaaaagcacatactttacgagaagaatgaggtcactgattatgagcttaaacctggaggaaggaacataagggtcacagaagaaacaaagcatgagtatgttgatcttgttgctgaacatcttttgacaaacgccatccgtcctcaaattaattcctttctagaaggttttaatgaattggtaccacgagaacttatatccatatttaatgacaaagagcttgagcttctcataagtggtcttccagaaattgatttggatgacttgaaggccaacaccgagtataccggctatacagtggcatcaaatgttgttcaatggttctgggaggtggtcaaagctttcaacaaggaaaacatggcaagat

SEQ ID NO: 14388 - DNA, 1068 bp, Glycine max
  unsure (1)..(1068): unsure at all n locations
tgcagcttggacagagctctttctcttctaacatgtcaaacataaatgttgcggagaatctgcaaggttcctctacttcaccacctcttcctcctgggacacagaagactcttgcctttcattgaggctttttttgttttgtgtgaaaagctacaagcaaatgaatccttcatgcagcaagaccattgcaatgcaactgccagagaagtcaaggagtctgctggttgttcagcttcaacaagtgttaaaattggtggagattcactgcggaaattcgatggtgctatcactttcacaaggtttgctgagaagcatcgccgactgtcaaatgctttcattaggcagaatccaggtttgttggagaaatcactttccatgatgctcaaggcaccaaggctgatagacttcgataacaagagagcctatttccgctcaagaataaggcaacaacatgaccaacacttgtctgggccattgcgtataagtgtaaggcgggcttacattttggaggactcttataatcagctaaggatgcgtcctactcaggatctgaaggggcgattaaatgtgcaatttcaaggtgaagagggtattgatgctggtggtctcaccagagaatggtatcagctgttgtcgagggtcatatttgataaaggtgctttacttttcacaacagtgggcaacaatgcaactttccaaccaaaccctaattcagtataccagactgaacatctctcatacttcaagtttgttggccgagtggtggggaaggctttgtttgatgggcaactgctggatgtttactttactcgatctttctataagcatatacttggtgttaaggttacataccatgatattgaagcggttgatcctgattactataagaatttgaaatggatgctggagaatgatgtgagtgatattcctgacctgacatttagcatggatgctgatgaggaaaagcacatactttacgagaagnatgaggtcactgattatgagcttanacctggaggaaggaacattagggtcacagaagatacanagcatgagtatgtgatcttg

SEQ ID NO: 14389 - DNA, 975 bp, Glycine max
  unsure (1)..(975): unsure at all n locations
actatataagagctatgacgcccccgtcctaagcttggaattcggcttgaggaggaggaaaaaaaacagcacaataatacatgagcttatccacaagtctaggagtgcattttccacagttgtttgtttaactagaatttacacaaaaaagcatagctagcatgggcatggagaactgtttacgagtgaccacagtaggcacagccacaccccaatgcctttctccattctttccatcttcaagggataagcttgtcttcccaactcacagaggtttcaagaaatccttgcaaaactcaacactgtcatacccttatctttactccaccggtgctgcctatagaaaatcccgttttgtttgcaatgctcgtgaagcagtaaatgaagttaaagtggtgactgactcaagctggaacaaccttgtcattgcaagtgagacccctgtgctggtagagttttgggcaccgtggtgtggtccatgcaggatgatagcgcctgttatcgatgagttagcaaaggattatgctggaaaaattgcatgctacaagcttaacacagatgattctccaaacatagcaacacagtacggcatcagaagcataccaacagttctgttcttcaagaatggagagaaaaaagaaagcataattggcgccgttcccaaatctacactgtccgcaacagtggaaaaatatgttgaattataaactgagaaaatgataaacaattgcatgcattacagtgctagaattgaagggatggaatgggagaagtgacaatagtgacattgcaaatttcattctcttcaattcttttccattccttaaatggcaatagatagtgtttgtttataagtttaaagaccatctttccttctgggatttgacaattttaagtaatacttgtactcttatttttcattttgtaaatgttacattggataatcaaacttcattcaatgattgaatgttgntt

SEQ ID NO: 14390 - DNA, 455 bp, Glycine max
cctaaagtcactgtctgcttcttcttgtccactctggccgtgtttatagcttctcttctgctttgagtaaaatcatctctaaacttccttctaaggaaaaacaaaaaaaatatggagaaaaggttgtttttggtggtttcaaccctctatttccacatctcttctaggattgagtggcattgaagcttttggcttcaagactagatgaacaatccacattttttttgttctcttcttaaaaggagcaaattctctcaaccttatttgttgtagctacgcttgtccattcttagttcctcaattgcttctcgggttggatctatgagcacaaaagcccgcgtggtatatatttatgaattctttttagatgtgtattttgtatcttttcctgtaagatatatttatatttaatacttgttggcggtgcatttggcattaggttaccaattttcccc

SEQ ID NO: 14391 - DNA, 374 bp, Glycine max
attagtttggagaacagtgtttgctatcataaccacttttgtagcaatgctgattccattcttcaatgacgttgtgggacttcttggagcactggggttttggcctttaagtgttcttctcccagtgcagatgagtatcaaacaaaagaggaccccaaggtggagtggtagatggattggtatgcaaatcttaagtgttgcttgcttcatagtatcaggtgcggctgctgttggctcaggtgccagtatcgtgcttgacctacagaaatacataccgtgtcatggagactattgaactccatccaccctctcctagcataggctaaaaactgatgtgggcagtgatgcaggtttgcatatcttttgctgagatc

SEQ ID NO: 14392 - DNA, 486 bp, Glycine max
cccacgcgtccgctagctcccaagtaaaaagcaatatagtttgtttaattgttgcttcatttctattgtgtgaatggcatttgggaagttcattatgaatataggggtagtggcaatggttctgggtttatggattcgggttggatttgcacaacaagtaccttgctactttatttttggagactctttggtggataatgggaacaacaaccagcttaactcactggctaaggctaattatctcccttatgggattgacttcgctggtggcccaactggaaggttttccaatggaaaaaccactgttgatgtagtcgctgagcttttgggattcaacggttacattcgtccatatgcaagggctagaggccgagatatacttagtggagtcaattatgcttctgcagctgccggaattagagaagaaactggacagcaactgggaggccgaatcagttttagagggcaggtgcaaaattaccaaag

SEQ ID NO: 14393 - DNA, 410 bp, Glycine max
ctcttctttctcaatagtgttctaagcagtcagaaacaatggagaggaaaagacacagtcctatttctttcactatgttcacattgctacttggagtgcttgctcagaaccttgtcatccctgtaatatctaccactgccatcattgtggaccagaacttcaactctccagacccacatgcaggaacagatttatcaaattctctatgttcatactgctctccagatcatggctctgggagtggtgggcacggaagctcaccacaccactctcaacatggaacaccctctcatcatggatctacatcacatggaggtggtggaagtcacaatccaaccccatcaactcccccaggtggtggaagctatgatccaactccatcaccaccctcaggtggtggtggaagttac

SEQ ID NO: 14394 - DNA, 307 bp, Glycine max
agcttcacccagtggagattctctcctccaacccccaccaccaccaccaatagcaacctcatccaaacaaacactaaccctccttctcctcctccgccaccccaggtccacaacctccaagaactcttccacattttagagcttcaactaaccaccgacccaacctccgttctcaaccttctagaacgttctctcgtccccaaccctccccagaaccaaccaccgtgtcctccgaaccttatgcgcgctttaacggaaaatctcgacagggaaaaacgcgacaccaagaccctttgcgctctgtgtc

SEQ ID NO: 14395 - DNA, 353 bp, Glycine max
ctaagatatctctgatatatatagtttctgtgtctgatcccgtttttaattcgggttaagattgaaagcgtgagaatgccggtgaagaagtattactgcggttactgcgacaagctattccaagacacaccagcggatcggaaacggcacgttctgggcattcaacaccaccaggccaaagctcgctgggattttgccgctacggcgactcttgcaaatatctccatcccgttcccaacaacaatctacagcagcccccagtcctaaccacaccgtcaccgtcaccgccaccagggaatgtggtaggagtttcattggacaatcttccccccttgcttcagcctccacctgaa

SEQ ID NO: 14396 - DNA, 360 bp, Glycine max
  unsure (1)..(360): unsure at all n locations
cctctctctctctctctaacatggaccaacagcagcgccgcgtcagcagcggaactactaatcctgtggccgtgctccgcttctccacggggcgcgccttccccttcgcacgcctcatcgccgcctcccgccgccgcctattcctctccgactgcgccgaccaccgatcggacgacgacggagacagcgacgccgacgccggcgagtgcgcgtactcgcgcgcggtgctggtgctcgacatggtgtggaaaacctcgccttcgtcgntcgccgccgccggncccgtcctcctctccacgctccgagagcggccagcgacgccgctgaggctctggctctgcggctacgccttcgagtgcg

SEQ ID NO: 14397 - DNA, 538 bp, Glycine max
cttcttccttcctccttctctctctcaccctttctcccccactccctagtcagctagctcctgcaacaacaaccactcctcttctttttctcacccaaatccacgcttcccttacaccgcgtttggatctccgttatacaaactcattaaaatgtagcgagagaaaaacaaaaccgcaaaagaaaatcagttaatttattaattttatttttttatggctttccacgaccatctccagcacgaaatagcgttccagcgtttcacggaggagcaagagttgaccgagaacagagacatgcagcagaggctcccacctccgacatggctcaacaacgttaacgcgcgtcaacagaatttcctcgacaccgagaagagcgtggatcggaacaaccgaagcgagagcaattgcgaatccgaggatttgagggaatacaaagcggacattctaggtcaccctctctacgatcaactgttgtcggcgcacgtctcgtgcctcagaatcgccacgcccgtggaccagctttctaagatcgatgcg

SEQ ID NO: 14398 - DNA, 1119 bp, Glycine max
gccatcttcatcacttcttgcatgataacttgaacgctgaaattgttgctggaattattgagaacaagcaagatgctgtagattatcttacgtggacattcatgtacaggcggctcacacagaatcccaattattacaacttgcaaggagttagtcacagacatctttctgatcacctctcagagatggtggaaaatactttgagtgatttagaagcgggcaagtgcattacgattgaggatgatatggagcttgctcctctcaatcttggaatgattgcatcctattattacatcagttacacaacaattgaaaggttttcatcatctgtgacttcaaaaactaaaatgaagggtcttttggagattctgtcttcagcttcagagtatgctcagcttccaatacgacctggagaggaagaggttgttcgtaagttaattaatcaccagaggttttcctttgaaaaccccaaggttacagatccgcatgttaaagctaatgctttgcttcaggcccatttctctaggcaatttgttggtgggaaccttgcattggaccagaaggaggtgcttctttctgcaaatagactgcttcaggcaatggtagatgtgatatcgagcaacggttggctgagcctggccttacttgctatggaagtcagtcaaatggtgacacagggaatgtgggaacgcgactccatgctgcttcaacttcctcatttcacaaaggatctggctaagaaatgccaggagaacccagggaagagtatagaaactgtgtttgatttattagaaatggaggatgaggagaggcaaaaattgttgggcatgtcagatttgcagttgttggatattgcccgattttgtaaccgattccctaatattgatttgtcatatgaggtgctggacagtgacaatgtgcgggctgtggaggttgtcactgtgctggtcactcttgagcgggatcttgagggaaggacagaagtaggacctgttgatgctcccaggtatccaaaagccaaggaagaagggtggtggctcattgttggtgataccaaaaccaatctgttgcttgccattaaacgggtttccctgcagcggaggttaaaagccaaactgg

SEQ ID NO: 14399 - DNA, 636 bp, Glycine max
cacgcgcacgtaagctcggaattcggctcgagagtggggggacacataagcagcaatgtcaatgacaaaggagatatcttttcagttccttcgaaccaatatgcagaattcaatatgttcctggatcctttagcagccaagatagtgtttgaatcagaagttaacatcacactcatcccactcaacacacagcgcagagtaagatcattttcaaccattataggcgagttgcgtagaacaccaagaacacccgaggctgtattttctgagcgtctgctgtcaaggctataccgtttaaagcaaacccataacagatatcagcatatggacacattcttgggggaaattctaggcgcagttgtcttggctgagagccattcaggtcttaatccaaaatttgaggcgaaggcagttaaagttttggctgatggcaatgaatcaagtgatggaaaaactgtggtagatgagaaaggtggaaaactaatgagaattttaagcagtgtggatgcaaaggcttatcatagtttgtatgcaaaaaagcttggcgatgagaaccaatcagctaagataggcagctttgaagaacagcggagaaaatggagtcatcctcacattataaattagagatcacttcac

SEQ ID NO: 14400 - DNA, 924 bp, Glycine max
gttggcgaagaaggaggatcgattcgctcttgattcggccatcgaagagcttgttcacctcggcatgcaaagagaaatggcggcggagtctatttacaaagagagatgtgtttcggtgaatgatggtccaagttgggccaaatacatgttgatctctggttctcctgatgatgaatatgatatcatcactttgcaatatactgaggagggtttattatctgtagatgagaatagagagggtcgtgctgcagctttcggtgatgatattgcaattgaatgccttgctacagagttcaagcgagagatatatgtggtgccagcacatggttcagatgccatggtcgatgaagaaaattgtgttttcttccttccacatcgtccaaggagccgaattactgaacctccatttttccttttcatgaaaggaacaggttggtgcggtgctggagctgaccactatgagcccctcattgctcatccttccgcctttgtttcccaagaaaaggttgctgtggtactgtgaggtttcgcggcctgcaattttgtggagtagagatcgagtagaattagaattttcttcaccctattttatgggccactctcaactgtttggcctcctgcattatggttcttctccgtcccaagggagaaaccaccacctaatcgggtagccatttgttttgttactgacatttagaatcaatcatctttgactctcttgacattggacaagcaggtttgccattgccgttgcctgctgtttgagcaaccctagagtattattgtattagtttcaccggcttctgttttgttgttcctgttgttgagttaattagagggtagtgtgttgttcaaattggaagagttgagttgcatctcagtggattgcttcacattaatgaagtggcttcatcttttctaggc

SEQ ID NO: 14401 - DNA, 488 bp, Glycine max
acgagcggcacgaggctgctcaaggtacacgcacccacacccacacccacatctgcctctgctcaactgcaatggcgctgcagtgtaagtgtggcacccaccactctggcgtttcccaattcctactccatttctgcggaaagaggaagaagagaatggaattggagggtgaaatgcagcagcagcagtgcggagattgagaaaggggctgcgagttttgggcccgggagcccagtgagagcaaccaacattctggtggttggagcgactggaaccctgggaaggcagattgtgcgacgggcactcgacgaaggctacgacgttaggtgtctggtcaggcccaggcccgctcctgccgacttccttcgcgattggggagcaacagttgtgaatgctgacctcagtaaaccagaaaccattcctgctaccttggtcggcatacacactgtcattgactgtgccactggctgtcccgaggagcccatcaa

SEQ ID NO: 14402 - DNA, 979 bp, Glycine max
atgtggtgttgtggcgtttggtgagttgagttcatgctcaacatgtcgatgctgctgaggaaggtgtgggaaagggtgttatggagatctgattcttcaacgtcagcatcagcatcagcatcatcttcatcatcatcatcaccaccagaagtggcatgttctgacatgggtgagttggagctgctacccagtgacatcttgatgcacattctgagacttttgggtccaaaagaggctgcaaagttgagtgtggtttgcaaggctttgagatcccttgtgtctgataacagactttggattcactttcttcagacccatcaggctgagccctctgcggattctgtcttctttgctgagaccaccttgagctatggctaccctcttccgccctttgctggccattggccccaactatcattcaagcatatttatggccagagagcactggttcctggttctattatcatcgatggtggttctggctattgcaaatttggttggagcaaatacgcatatccatcacggcgttcagcaacatttttggaatttggtaatattgagtcaccaatgtatactaggcttcgacatttttttgcaactatttataacaggatgcaggtgaaaccaaataaacaaccagttattgtttctgtgccaatatgccattatgatgatactgaatcagccaaagcatctaggcaacagcttaaagaggcaatttatgcttccttgtttgacatgaatgttcctgctgtttgcgccgtcaaccaggccactctagctctgtatgctgcaaaacgaacttctggaatagttgttaatataggttttcaagtcacgtctatagttccaattttaaacggtaaagtaatgcgcaaggtgggtgtggaagttgtggggctgggagcactgaaacttacaggatttcttaaggagaagatgcaactgaataatttaagttttcaatctttatacactg

SEQ ID NO: 14403 - DNA, 1089 bp, Glycine max
gatagttccaaatttagcaatcagtaagattttatcacgagataacaataaagttcgcattctccaggaagggtgtaagggccttctttatatggtgcttcatgctcgtgttgtgctggacttgtgtgaatatttagaacaggagatcagttttgaacaagttgaaggggactttgattcgttccggggaaaatggatttttgagcaactaggaaatcatcacacactgctaaagtactctgtggagtcaaaaatgcgcaaagatactttcctttctgaggccatcatggaggaggtcatttatgaagatctcccatcaaacttgtctgcaataagagactatattgagaacatgaatgcatcaaaatcttctgaagtttgtgagcagaatacgaattcagggcaacaaattgtttcatcaggctctcaaaaagatgacaactctggttcaactgaggaagttcctcattgcgacgttcgatgttcatctcagcaaagatctaaagtgccaggcttacagaggaatattaaagtactagaatctgaactactgaaattcattgcagaacatggacaggaaggatttatgccaatgaggaagcaactccgtttgcatggaagagtggatattgagaaggctataactcgcatgggtggattcagaaagattgcaaccatattgaacctttctttggcttacaaacaccgcaaacctaagggttactgggacaatcttgaaaatttgcaggaagagataagtcggtttcaaaggagctggggcatagacccttcatttatgcccagtagaaagtcatttgaacgtgcagggcgatatgatattgcacgtgcactggaaaagtggggtggactacacgaggtttctcgccttctgtcgctcaaggtaagacaacggagcagacaggacaaccttgctaaggataagaggagtgatcatacagatagtgaaatgaagacaccatgtattcctcaagacacacaaaagtggcttacaaaactaaaacagtttgacatgaattggtttgagtaaaagaggattgattttatattgtgtatacccgtgttagtgtg

SEQ ID NO: 14404 - DNA, 1651 bp, Glycine max
aaggccacaataaacccctttctctcaattttcattcaacaccatggcaagaacaaccaagtccattttcttcaccttcttattatgctcttgggtggtggtagtagtagcccaagaggtagcaattgcaaaatccgaaagtgaagcattaggggaaccggaattagaaaaaagagaaacacttgaaatcatcattggtggtggtggtggtggtggttaccctgctccttctccttctccatcttcccctgcatattgcccacctcctccaccaaaaccactgagccggttagaaaaagcgcgtcgagtgcttctcaagttcaaaaccctaatctatgatccagactgttacacgcacagctggaacgagaacaccgacacgtgtgatttcaacggggtacgatgcgccacatatccaaactcagaagagaaagcagtggctggacttgacctaaacggagcaaaactcagcactaaagacggttgcaatttgcccctcacgggtctcgtcgacagcatacccgagttaacattcttccacgttaactccaacaacttctccttcaccggtggcttccccaacaacatcacgaccttccctttcttcttcgagcttgacctaagtaacaacaaagtcagtggccagttccccacgcaagcgattcagaacaaccagttagtcttcctggacctcaggttcaaccagcttaccgggccgatagacccgaaactcttccagagggacctcgatgtgatctttgtcaacgataaccagttcaccgggtgcctcccggagaatttcgggtccacgccggcccggtacctcacgtttgcccacaacagcctctcgggctcgctccctaagagcgtgggctacgcgccgaacctcaccgaggttctcttcttgaagaaccagttcgaagggtgtctgcccttcgaaatcggttacctcaagaaggccgtagtgtttgatataagtgaaaatctcttgaccggtcccatcccgctctccttcggatgcctgaagaaaattcaatttctcaatttggcgcacaacaagctctacggctgtgttcccgacaacctttgccaaattccttctatccgcaacaatgggaatctctctttggcggacaattatttcaacgaaattggaccttcgtgttggagtttgataaagtccaaggttttggatgtgtcaagaaactgcattccggggcttccagaccaaaaatcacccaaagaatgctaccagttttacaaaacaaagaagacatgccctaaccagaattcattttactacgtcccgtgtaaatcccactgggggacacagagcaacaagccccctgctccaccttctgagcctgtgacttacaacgctctcaaaccacatcgcttgagattgtgatgatcagatatcataggatggctcatattagtcccttgtgttgtattattatttttagtttttcacatatctcactggatggaaacatctctctcaaggggatttcgaatcttggctcactcgggttcatgttattaacgcggttatgttagtatatttctctttcatgattagctggtgttattttggatttatctatgcccatgaataagtactgccctggaattgggcatcttgactatt

SEQ ID NO: 14405 - DNA, 513 bp, Glycine max
cacaccaagagaaccaaactcctccactgcctctctctccgtcgcctcctccggccacttcatcctcccaccaaacagcccctcaaccaatccctaacggacgcaaccttctctcttcagctcctcttttcaacctctgccggaatccgccaattaggttctgatcaacctttcacagattagaggggcaggggctgtaagtgaggatgaatttgcaacaagctgggcagtctaaatcctccaatggatatggccgccgaaaatctgaaagagataggggcaactaaatcggagattaagatcctgtctgggaaattaaatgccaacagattggcaaatgcagtcgtcacaggcgcagtgactggcagtaaaggtggcagttatgagagcccttcacatgaccgattagtatatgtaacaacatgtcttattgggcaccaagtggaagtccaggtgaaaaatggatccatatactctggaatatttcatgcaacaaacacagacaaagatttt

SEQ ID NO: 14406 - DNA, 717 bp, Glycine max
agaaggggcaactaaatcggagaataagattctgtctgggaaattaaatgccaacagattggcaaatgcaggtgcagttactggcagttaaggtggcagttatgagagtcctccacctggtgccaaatgggccttgttgttgcagtttgataaagtccaaggttttgaatgtgtcaggaaactgcattccggggcttcctaaccaaaagtcttcccaaagaatgctaccagttttacaaaacaaagaaaacatgtccgaacccgaattcattttactacgttccgtgcaaatcgtactgggggaggcagagcaagcccactagtccaccttctgagccagtgacttacaagactctcaaaccacatcgtctcagattgtgatcagatatcataggatagctcatattagtcccttgtgcaggcgggactttgcctttgtgttgggtttcattttttatttttctcacaacaatcctctggtcagatagaaacctctcctctgatgcgttgattcaaatcctgttcactggtttcatattattactgtggttatgtttgtatgtttttctttcatgattagctgttgttattttgtattttgtatgccccgtgaataagcgctgtcgtggagttgggcatcttgactattacaagtttggtgtcactcaaatgtaatttcccaagttgtcgaataaaattggtactatatttggatgg

SEQ ID NO: 14407 - DNA, 479 bp, Glycine max
cgataagaacacaataaactccttcctcatttctcatttctcattcaacaccatggcaagaaaaaccaagtccattttcttggccttcttactactatgctctttctcactgggggtagtggtagtagcccaagaggaggcaatagcaaaatccgaaagtgaagcattaggggaaccagagaaaagagaaacacttgaaatcatcattggtggaggtggttcacctgctccttctccctctccccctacatattgcccacctcctccaccaaaaccactgagccggttggagaaagcaaaacgtgttcttctcaaattcaaaaccacaatcgacgaccccaattgttacacgcaaaactggagccaggacacagacgcgtgtaaattcaatggggtacgatgcgccaatttcccagacgatcagcagcgagcagtagctggacttgacctaaacggagcaaaactcgccactaaaaacg

SEQ ID NO: 14408 - DNA, 614 bp, Glycine max
catgaaggtatatcaacgagaaagacaaaatgggcattatggtgtgactgcatttgtcatggggaacaccttgtcatcaatcccatacttgctaatggttacattcattcctggggctatatcttattaccttcccggtcttcagaatggatgcgaacattttctgtatttcatttgtgttttattttcaagtctcatgttagtggagagtcttatgatgatagttgctagtgtggttcccaactatcttatgggcatcattgctggttctggaattcaaggaatcatgcttttacttagtgggttctttaaattgccaaatgatattcctaagccagtttggaagtacccattacactatgttgcttttcatacgtatgccaaccaaggaatgttcaagaacgaatataaaggactaagatttaatacagatcatcaagttggatcaggaggctcacatggttacataagtggtgaagaggttttaagaaatacatggcaagttgacacgagttactcaaagtgggttgatctagcaatcttgattggaatgattgttgtatatcgagttttgtttttggttatcatcaagattaaagagaagatgaagcccc

SEQ ID NO: 14409 - DNA, 936 bp, Glycine max
tatccgcttttgtggaggagtattcatgtggatcagcctttgaacgagaggattactgatgatgttcttttgcaattgaccaacagggctcaaggtcatctccagtgcttgagcctggtcgagtgtaccaggattccagatgatggtttgaagcggattcttgaaggctatcccaagttaaccaagttgagtgttccaggatgtacaagactcagtattgagggtattgtgactattttaaaagcttacaactctatggatacccaaggggtgaagcatttacacataggtggtctttatggtgttacacaaaagcattttgaagagctgaggttcttgttgggggctgatagtccgctgctcccacactctcacaaatcacactattatcgcaggggaaacttgtacctgtcctgtgatgatgatcaagccatagatattgaagtttgtccacgatgccagaatttgaggcttgtgtatgattgcccggcggagagttgtcaaggggtggagcacactactcaggtgtgcagggcatgcactctatgcatacccaggtgtagccagtgtggtcgctgcatcaatgacagtgaatatgaggaaacattttgtctggaattgctttgttcttcttgttctaagcagctagtcaaatgttcagaaaggggagataggaagattggatcagataaatccgttgttattcatgagcaaaactagggtttttgtcatagtatcccatggaagtctttgtgagaaaaaggtccctgatggaagtcatatgaaatgttgggtgctgttggagttgtgtgacattctgtattttgtctctcggaagtaggattctttcggggattgtcctgttggtagagaaagtgggaaatgacttcatttttgtgtttcttgcagctactagagtgtaatctgcaggaacca

SEQ ID NO: 14410 - DNA, 432 bp, Glycine max
ggttattatgtaagctatgacaattggggtaataaagaagaggttgatcctgccaatataaggtcaattcaagaaggttctgttgatgctttattagaagctgagcgagttgctgaagcaacaaaacaggccatcaaacgaaaaattgtgcgggctgcatctatcgatttacagtctcggagtctacctgcaaagcttcgtatagaggctgatgatcctgaggatgtgaaagcttcgaaacgcacgaaaatacatgcctttaagtcaaagatgcggatggagcaacttgaagtcacacataataagcggcaaaatgcttggcagcaatttcagtcaaccataggaaaggcatagaagattggtttcttctctggaagaaaacgggagagtatttttaaatctgctgatgatcctcagggtaaggttggtgtg

SEQ ID NO: 14411 - DNA, 501 bp, Glycine max
caaaaaagatccccatttgtctatcccctacccgcgctttccttccatagaaaggaatcaagatttttcccaataaactatgggtgacatctcacaaatcacctgctgattttgctgccatttcgagaggggacgaacgagacagcaacatatcatctccgaccaaatcccgttcattcaggcagtgttcatttctctgcccctcacttacttattcactcccaactccaaaaccatcatcgtcaatatggcacaagcacacgctctattttctcctttcaatcctcgccttcttccttcttcctcccccattctccgacgccgtttcttttcccttccaatttctccgttaactcaccggaccgtgattgcctccgataacgtcgccgtttcgcctgatgccgcctcgtctactcactctctcccccaggtgattgaaaccctgatttccggagtggatttatcggaagaagaagccgaagcgtgtctcaacttgctgct

SEQ ID NO: 14412 - DNA, 399 bp, Glycine max
gagccgggaaataataatggcggggcggcactggtggaggctcagattctccttcaggaatgcaaccatggtcgtgtgtttccttaacataatcactgcaatcttcttgcttcatgcttttctcacctctgcttacacccgcaacaaattctccaacgctaactcaaactcagctcaactcaattacattaaggaatctgaagagattcgacttgccatgctaccggtggaactgataaaaagagtgagggagattgagcaggaagtatacactgaaccagaaactgcccagaagaaagacacaaagctgactgctgcagttgatctgtctaaaaggttaaaggatttccgttccttgaatgatgctgccagcttgaaagctttggaggaatggccaaa

SEQ ID NO: 14413 - DNA, 608 bp, Glycine max
ggcaactaaagaggagttagatggtttcagaaagcatgtgacaagcctggcagctcttgacttcttggtgtgcttgaagtcagatgtattcgtgatgacccatggaggcaactttgctaagctgatcattggagcacgtagatgcatgggtcaccgtctaaaatcaattaagcctgacaaagggctaatgtccaagtcttttggggatccatatatgggttgggctccttttgtagaagatgttgttgttactcaccagacacggacgggattgccagaagagactttccctaactacgacctctgggagaaccctctgacaccctgcatgtgtagagcctgattacagcaattttatcgataacaatgggactttactcaagatgcatttgggagaaatatgccatctaagttatgaattctatctatctacagggtaaaccgcggaatctgggctcctgtcaatgcaagctttgaggtaggaggggcagtaaatagaaatttgaagcagtgatattggcttgaagggaatgagattggactggtggttatcactttaatgaacagatttcctattctgagtattctctttgccgagaccaggtgga

SEQ ID NO: 14414 - DNA, 724 bp, Glycine max
cgacttcacattcaacctccatgttcccaaagctctgcctcctcttccctcttcatcacgtggaacaacttctctcttcttttcttccaagcacaaatcataccacaacaacactagtcctagccaatcactacgtataacatgcagcagccagaaatcaaatcatgatgatgatggcagcctaaagtatacaagtttggcactgcaaataggagtactcttggccttggctgagcagccagtattggctgtgactggagagaataaccggccagaactcctctgggttttgacacaatggggggttgttctctttggatatttccttgtcgtgccaccaataatcatgtactggctttggaaaagatggtacagaagaaacttgctggagatgtatttacaattcatgtgtgtcttcattttcttcccaggggttattctttgggcaccatttttaaacttcaggaaattcccacgggacccttccttgcagtacccttggtctgtacctgaagatccttcaaaaattagaagttcatacgcaaagtacccatatgccgaaccctgaagattatgataatctatgagatcaagcccaaaacccaacaaatcagatgttctataaatgtgcggttccccaaaactacattgttgtgaatgtagggttatacctgtttttctgcttttgattacaaaatgaatatattgagtgggattcagttgc

SEQ ID NO: 14415 - DNA, 1147 bp, Glycine max
aaagaaaccaatgcattcttctatcttcattccttccctattactctttctctgctaaattatttaaattttctctctttctctaattaattccctttgttatcaaaatggctgtggctatggctgcttgcagtcttggacttcacttgagtgctgacaacaccttgagaccttttgaaaaaaccactatcttgaaggccctctctatctctgatgctactaaaccatgttacatttctcacaaaacaagattatcatcttcatcttcaggaataacaatgatcccacgagcaacaacagttattggtactgtggaggatggaaatcaaggagaggctgataccattccaactccggtagttattattgatcaagactctgatccagatgcaactgtggtcgagataacctttggtgatcgccttggggctcttcttgacactatgaatgcgttaaaaaacttggggctgaatgttgttaaggcaaatgtctttctagattcttctggcaagcacaacaagttttccatcacaaaagctgattctggaagaaaagtggaagatccagagttgttagaggcaatccgtttgacaattttaaataatctgattcagtaccacccggaatcaagcgcccaattagctctgggagcagcttttggacttgtgcctccaaaagagcaggttgacgtagagatagcaacccacataaccatctctgatgacggcccaaagcgaagtttgttgtatgtggagacagctgatcggcctggattactggtggatcttgtaaagattattactgacattaacattgccgttgaatccggagaatttgacactgaggggctcttggctaaggcaaagtttcatgtcaactacaaggataaagccctcatcaagcctctccagctggttcttgttaacagcttgagatatttcttgaggcggcctgagactgaggaatccagtttttgagtggcacctattgcatcgtatttgcctctggattataagcaccatggaattgtagaatgcatgtattcttttccatttggagaacaatatttgcagtatatagttaactcgtaaaatttaatatacctgcatatcagtgtaaagtggacgttctcaatttattatttaac

SEQ ID NO: 14416 - DNA, 856 bp, Glycine max
accagaccacatccaaggaaggcagcagggctctgtaactgcataccataaatcttgtgtatattgaaacttggtggtttcgttttcaccattcaagtaagttattaactagattttctacgaattcattaattgaatatggtggtggagcttcgtttgcagtgattctggaagaaaagtggaagatccggagttgttagaggcaatccgtttgacaatattgaataatatgattcagtatcacccggaatcaagcgcccaattagctctgggagcagcttttggacttgtgcctccaaaagagcaggttgacgtggagatagcaacccaaataaccatctctgatgacggcccagatcgaagcttgctgtatgtggagacagctgatcggcctggattactggttgatcttgtaaagattattactgacattaacattgctgttgaatccggagaatttgacactgaggggctcttggctaaggcaaagtttcatgtaagctacaatggtaaagcaatctccaagcctctccagcaggttcttgctaacagcttgagatatttcttgaggcgtccgacaactgaggaatctagtttttgagtggtacttcttggaaagtagtgcaggacattgtattctcttttgaagtacaccatgggattgtacaatgtttgcattcgttttgtcatttgaaggacaaatgaagaatatggctaaccgatagccacaacacaatgcattaaatcataaaattgaatcaacatggacggatacttatgtaaatccactcttacataataaatttgagtatttattcttgaaaataggataatatctataggtgttttctttctc

SEQ ID NO: 14417 - DNA, 551 bp, Glycine max
ttcaacgacatcatgacgcccaacaagttcgacaatgcttacttccagaaccttccgaagggtttgggtgttctgaaatctgaccatggtttgtatgcgtgaccccactacgagaccctttgtggagacttttgcgaaggatcaaaatagattctttcaggtttttgctagggccatgcagaagttgagtctcttgaatgtgcagactgggaggaagggagagatcaggcgcaggtgtgatcagattaattgattttttttatttattttttgttgtttgaatttgataatgagatgagattttataatttataatgataatgagaatgataccctctgttgtgcgtgaattggatggtttttgaggtgattgtttatacatactacatagtgtttatgaggttgtaagagaatgggggcattggggtattgaggagttactattgttgttcttcgccctcttgttctttggatagatgagtctgagtatgtttttccaatgtaatattataagataagatttaattaataaaatttctcattttgagctc

SEQ ID NO: 14418 - DNA, 2016 bp, Glycine max
ctcgagccgctcgagccgttgaaacttggacgactcaactacaatcgctcttatgaacacatctcatttgcacctctataaacaaattttcaaaccttaacaccttacgaaaatcaactaaagaaaaccattgatggcgctccctcactccatctctgccttagccaccacactcacactctcctccccaacaaccaaaccccataaagttaacccctttcccttttcctcgaaccgaaattcacaatttttaacgaaacaaacgcgacccagaagcagaagaagcctctccctaacccctgcacgcgttgcggcgccaccctcaactgttgaagccgatcgatcatacccggagaccgaaaataacgaaactgaggaagagtttagcgacgagagctcttactctaaattcacttggagggatcactggtaccctgtctcgttaattgaagatctgaaccctctcttgcccacaccgtttcagcttctgggtcgtgaaatcgtgctctggtacgacaagtccatttcccaatgggttgcttttgatgacaaatgcccccatcgtcttgcccctttatctgaagggaggatagatgaagatgggaagttgcagtgttcttatcatgggtggtcttttgatgggtgtggatcttgtgttaagattcctcaggcttcatctgaaggccccgaagcacgtgctattggatctcctaaagcatgtgccactaggttccctaccttggtgtcccagggtttgctctttgtatggcctgatgagaatggttgggagaaagcaaaggcctccaagcctccaatgttgcctgatgactttgacaaaccggagtttgccacggtcaacattcagcgtgatctgttctatggttacgatactctcatggagaatgtctctgatccttctcacattgagtttgctcatcacaaggtcacgggaaggagagacagagccaaacctctgccattcaagatggattctcgtggttcatggggcttctctggagctaatgaagggaacccacagatcagtgccaggtctgtcgcaccatgttatatgatgaacaacattcagattgataccaaactccctgtagttggtgaccagaaatgggtagtatggatatgttccttcaatgtccccatggcacccggtaagactcgctccatagtttgcagtgctcgaaacttcttccagttctcagtgccagggccagcctggtggcaagtcgttcctagatggtatgagcattggacttcaaacaaggtatatgatggagacatgattgttcttcaaggccaagagaaaatcttcctttcagaaaccaaggaaggtggagacattaacaaacagtatacaaacatcaccttcacaccaacacaggcagatcgctttgtcttggcatttcgaaactggctaaggcggcatggcaatggccaaccagaatggtttggcaacagcagcgaccaaccattgccatcaactgttttatcaaaacgtcagatgttggatagatttgaacagcacactctcaagtgttcatcatgtaaagcagcatatgagggattccaaacatggcagaaagtcctaattggtacaacagttgtgttttgtgcaacatcagggatcccatcagatgtccagttgcgtgtacttttggctggactcgcagttgtcagcgcagccatagcttttgccctaaatcaactccaaaagaattttgaattcgtggattacgtgcatgccgaaatcgattaagcacgtccctccaaaggaacttctactagttagttgtaaatagagttgaagacaagaatacatgtacactagtattttgatgaaaagagctcaaatctacctaaccttagtgttatcattaaattctgcgaatacaagtacataacccatggttttgaaatgcccatactcgattccagcaaaacgtgttagacatgaaaacagattccccaccatgttatttgcacagaaaagtgttcactttc

SEQ ID NO: 14419 - DNA, 489 bp, Glycine max
caaacatggcagaaagtcctaattggaatccctcatatcctgctttacatgatgaacacttgagagtgtgctgttcaaatctatccaacatctgagggattccaaacatggcagaaagtcctaattggggcaacagttgtgttttgtgcaacatcagggatcccatcagatgtccagttgcgtgtacttttgcctggactcgcagttgtcagcgcagccatagcttttgccctaaaccaactccaaaagaattttgaattcgtggattacgtgcatgccgaaattgattaaacacttccctccaaaggaacttctactagttagttgtaaatagagttgaagacaaaaatacatgtatactagtattttgatgaaagagctcaaatcttcctatccttggtgttactagtattttgatgaaaagagcaacaaagttgatcgtgagatatcctttttgaataaaaatttaatcaaagtattacaattgaa

SEQ ID NO: 14420 - DNA, 299 bp, Glycine max
cacgactcaactacaatcgcgttcgatttctcttattatgaacctctctctatgcaattcttcaaaccttaacacctcaagaaaaccattgatggcactccctcactccatctctgccttagccaccacactcacactctcctcgccaacaaccaaaccccagaaagttaacccctttccctttttctcgaaccaaaagacacgatttttaacgaaacaaacgcgacccagaagcagaagaagcctctccctaacccctgcacgcgttgcggcgccaccctcaactgttgaagccgatc

SEQ ID NO: 14421 - DNA, 770 bp, Glycine max
gaacgagccagagtaagaaaggagtgtcattcatggcgattgagcaatgaagatccaaggctttctcaccgtcgcaatcccaacgaatcagtttcattggaccaattagcagaattgggtgtgttatactggaagctcaatccaactatctatgagaacgatcaagagttgaccaagattagacaagataggggatacaactacatggacctgcttgatttatgcccagaaaaggtggaaaattatgaacagaagttgaagaacttctacactgagcacattcatcaggatgaagagattcgttattgtttggaaggaagtggctactttgacgtgcgggacaaggatgatcgctggattcgcattttgatcaaggctggtgatcttatcattttaccagcaggaatttatcatcgcttcaccctagacccaagtaactatgtgaagttaatgaggctgtttaagggcgagccagtgtggacagcatataatagaccacaggaagacaatcctgctagaaaggaatacattaagggcctaactgagaaatttggagtgccacttgcagctcattagggccctgaaatacactagtatatcttgtttcagatattaatcacagcttaaggtctgtgatgtaattgttggtataatatttgtgtagttttaccatgagtagacttgtctatgaacctgaaacataccaagcatgagatgaaacagacccaagagcttatgatatatgtttatatactactagttcttgtctc

SEQ ID NO: 14422 - DNA, 345 bp, Glycine max
gtcactctggtcagttgcaatttagatagcgagaacaaatcagagtaattggaacttgaaacttgtctgtcattcatggcgattgaggcatggttgatggacgatagcaatgaagatccaaggctccctcaccgccgcaatcccaacgagtcagtttcattggaccaattagcagaattgggtgtgttatactggaagctcaatccaactatctatgagaacgatcaagagttgaccaagattagacaagataggggatacaactacatggacctgcttgatttatgcccagaaaaggtttgctttctggaattagatagtgcttcagttgctacctcttcagtc

SEQ ID NO: 14423 - DNA, 452 bp, Glycine max
caagggccgcaatggaggaacactttttaggtgctatccaggaccctggaaggtccttagaagggtggggaataggaaatatgtgggtctacatcagcagaatagtatgccatccctcaaggaagttgcccttgagattcttccatctgcttgataaatacttatggtaagcaattctagcttgttatgtgccataactggggaaatccactatggtgtctttttcagagctacaatattgttttaatgtatatgtattagaaaaaacattgacattaacttaagactgctgatttgttgacaccccaaacagtgcagacacctacttggcaccccttatattagctttctttattctttcgtttttcttgtcacatcacattaccaatcttactaaatagaactactatcctactttaaagttgattactatcctactcttcttatctctg

SEQ ID NO: 14424 - DNA, 476 bp, Glycine max
aatttttggaccctttgattgtaaacatttaactgatttacatgttacctaaatgtaagggtaagtctgcgtacaacaaccctgccccatatcttcgcatagtgaagagcctccgggcaatggggtacgaagtttacatgttacctaaatgtggcctaacctacgtgtccgtggactggattgagccctttgaaaacttctgcaatatattaatgttagacattgtaaatataaattgctgcatttttggatttcgcatattaagttggaccaaatatattactcatcattattattattatatggtatttatttaatggaatcaattagttgcataaattgacaataggagctactagcttatcatgatcatgatccaaacagatgatgatgttgggaatgaattatggaacatatttacccttgcaatatcttattctttcatagctgccgatgccatgtaggcccttaatttt

SEQ ID NO: 14425 - DNA, 444 bp, Glycine max
caatagttatggaagagagaagtggagtgcttgaaacttcgagatcttgcaagcaacgtcataggacctgaagggtccgataaggaatttgaaggctatattgatagcaacctacgtgttgtggagaccttcttgcgtttgttccccattggtctttgtgtcacagctcttgtaattatgctcaagaactctcaggaaaataagtatggctctgttagctacaccgaccttggtgctttcaggtatttggtgcatgccaatggcatttgtgcaggatattcattattttcagccatttttgttgctttgcctcgtctgtcgagcatgcatatagcttggactttctttgtgcttgaccaggttttaacgtacataatcctgtctgctggagctgcatcagcagaagtgttatacctggccgaaaaagggaacatggcaacagca

SEQ ID NO: 14426 - DNA, 520 bp, Glycine max
gcaagagatttggaaaaagtattctcatcaattaaggaattggacactgaaatagttgtagcaactacaactggaacagccacaaatgcaactgctgttgctgctaatatagttgttgatgagaggcagatgaatgcactctttcttgatgtggttcgggttagtgaatcatatggattgaagtttcctagagaatttgctcttctcctgaaacagctcttgtactttgaccggtacacacggttgctggctcccaacttgaacatgcttcaggatcagaggatttccattgcttccaatagcagaagcagggtatagagacaatttttaaggagttggtacacaaaatctagatgtaccccatcttagttcaaaatattttatttgtatgattactttggtatataaataaaataatccatagttgtcatgtgagagccaagctcatttggttgggacatttctttgcaagttctcgggatggaattcaacatccttaatagaatattccttcactatt

SEQ ID NO: 14427 - DNA, 499 bp, Glycine max
aaaacaatggttatcttatggtctcgtgcaatggaggactcaaccagatgagagctgcgatatgtgacatggtggctattgctcgatatttaaatgtcacgcttatagttcctgaactggataaaacatccttttgggctgatcccagtgacttccaagacatatttgatgtggatcattttatcacttccttgagagatgaagtgcggatactgaaagagttgcctcccagactcaagctgaaagtggagcgcgggtttctttacaccatgccgcctattagttggtctgatatatcttactataaggatcagattctacccttgatacaaaagtacaaagttgttcatttaaatagaactgatgctcggttggccaataatggtcaaccgctggagattcagaagctgcgttgccgagttaattttagtggtctgagatttacttctcagatagaggagttgggcagaaaggtgatcaggcttcttaggcaaaaggg

SEQ ID NO: 14428 - DNA, 668 bp, Glycine max
aaaaaaaccatggacctcataaattcttcaataagctctcacattttgtgaccaaaataatactttaggaaaaaagaaaaaaatgtcatccactgctagcttgggttatggggctccaacctgcttcaacaacgttcatcacacaaagaagcagcaagcaatgaggaacagtttcttgagcaataagcacaacagtgtgagagtgatgaagggttggagaggaagacatggtaacactaacaacacatccaaaagggtaggaattgtgcagtgtagagggttaggggacttcataggtggagacttgataaagtttgatcttggacgttggctttcagatgttgaagagcacaaagcacttgcaatataccctcctcatgaaggaggctatgagggccgctacttgtcgcgtctcaaacgccaagggtactatttcctcgaccttacggctcgtggccttggtgatcctgaaaccaccctcaccaagattcaccctgtttgccctcctcatgttggcaagcagccaatagcaaggtggtatttcccaccagaagttgattacagattagaagcgttgccaccaaatgccaaaggattggtagtgtggataattgaagccaaggttctctctaaggcagaactgcagttcctagctttgctgccaacac

SEQ ID NO: 14429 - DNA, 553 bp, Glycine max
ttctacgcgtccgcttcagttctctcatttctcgtcttcactgagaaaaatccttcttcgtgcatgctcctcgtttctatctaaaggggcgaaagagtagattataagggggtaagtgagaaagagagtaaaaacaaaattaaaacatgactatggaagagggcagggtcgagaacgaggactacacacaagatggtactgtcaacattaaagggaaacctattcttagatccaaaagtggtggttggaaagcttgctcctttgttgttgtatatgaggtattcgaaagaatggcttattatgggatatcatcaaatttgatcctttatcttacaacaaagcttcaccaaggcacagtatcctctgcaaacaatgtcaccaattgggttggcaccatttggatgacacccatattaggcgcctacgttgctgacgctttccttggccgctattggacttttgtcatagcctccaccgtttatctctcgggtatgtctctcaataagctactattgcttctaccaattttttagcctcttataacccccgtaag

SEQ ID NO: 14430 - DNA, 2293 bp, Glycine max
ggacttcaaagtggagaaaaacacacacggttggttcattctctctcttttctttttcctcaaaaagttgaaaaagaataaagggggaacaatcgagtgaagttgttgctcttcaatagtaaacttacctatggaagagggaagggttgtgagtgagtacacaaaagatggaactgtggatcttaaagggaaacccattctcaaatccaaaagtggtggttggaaagcatgctcctttgttgttgtgtacgagatatttgaaagaatggcttattatggaatatcatcaaatttgatactgtatctgactaggaagcttcaccaaggcactgtgacctcttcaaacaacgtcaccaattgggttggcaccatttggatgacacccatattaggcgcctacgttgctgacgctttccttggccgctattggacttttgtcatagcctccaccgtttatctctcgggtatgtctctgcttacactggcagtgtcccttcctagcctgaagccacctcaatgctttgaaaaggatgtgacaaaatgtgccaaagcctccacactacagcttgcagtgttctatggtgcactctacactctagcagtgggaacaggaggaaccaagcccaacatctccaccataggagctgatcaatttgatgattttcaccctaaagagaagttacacaagctatccttcttcaattggtggatgttcagcatcttctttgggacactctttgcaaacagtgttctagtttatatccaagataatgtggggtggactcttggctatgctcttccaactcttggccttttagtatcaatcatgatattcgtggcagggacacccttctataggcacaaagtgcctgcagggagtaccttcactagaatggctagggtcgttgtggctgctttgaggaaatcaaaagttcctgttcctagtgactctaaagaactatatgagcttgacaaggaagagtatgcaaagaaagggagctacagaattgaccacactccaacattaaagtttcttgacaaggcatgtgtgaaaacagattcgaacactagtccatggacgctatgcactgttactcaagtagaggagaccaaacaaatgataagaatgattccgatcttggttgctacatttgtgcctagtacaatgatggctcagataaataccctttttgtgaagcaaggtactactcttgacagacacctcggaagcttcaaaattcccccagcaagtttggctgcatttgttactgtgtccttgcttgtttgcattgtgctctatgatcgcttctttgtgaagatcatgcaaaggtttaccaagaaccccagaggcattacccttcttcagaggatgggaattggccttgtaatccacacactgatcatgatcattgcatctgggactgaaagctatagactcaaggttgcaagagaacatggcgtagttgaaagtggagggcaagtccctttgagcatattcattttgcttcctcagtttatactcatgggaactgctgatgcattcttagaggttgcaaaaattgagtttttctatgatcaatccccggaacacatgaagagcattggaacttcatattccacaactaccttaggccttggtaacttcatcagttcctttcttctctcaacagtgtcaaatgtcaccaagaaaaatggtcacaaggggtggattttgaacaacctcaatgagtctcatcttgactactactatgcatttttcgcaatactaaacttcctcaacctcatcttcttcgcgtatgttactaggttctatgtatatagagttgaagtttcagattccatagacaagcttgcaaaagaactgaaggaaaagactgtgtccaacgttgtgaatcccaaagactagttgattgggtatctaaggggacaaaactactttatgtacaaatttggatggccaaagaactagatatgtgtgtgtctgtggggtgtgtgcgtgttaactttggaatggttttgatcattggaagccacttcagaagagaacctaatcaagttatagttattggaggtcgttttagcatcatgtgatcattttccttatcctttgtaaccttcgggaaatgtcacttgcaccttgaaaaagcacgagattgaaaaaatgaatgtaatatgtttgaagtttttctttctagatcttttcttgccatttaagcttttctttactcaagaaattgtaaaataaagggtcgaagacaaaatctatcaggtgagattttcattttcattcctc

SEQ ID NO: 14431 - DNA, 433 bp, Glycine max
gacttcaaagtggagaaaaacacacacggttggttcattctctctcttttctttttcctcaaaaagttgaaaaagaataaagggggaacaatcgagtgaagttgttgctcttcaatagtaaacttacctatggaagagggaagggttgtgagtgagtacacaaaagatggaactgtggatcttaaagggaaacccattctcaaatccaaaagtggtggttggaaagcatgctcctttgttgttggtatctctctctctcactataaattttatatggtcattttcatcttgttttggacattaatttcaaaagcaatttcccaaaacattggaagcttcatgatgttttgttaacaaaaatcttaatttcctctgatcgagagacattgttcaattctttgtgttgtgttgtctcctaaaacatgggaagaga

SEQ ID NO: 14432 - DNA, 786 bp, Glycine max
  unsure (1)..(786): unsure at all n locations
ngttcccggggaaaacccacgcgtcgatgaagagcatgaacttcatattccacaactaccttaggccttggtaacttcatcagtgcctttcttctctcaacagtgtcaaatatcaccaagaaaaatggtcacaaggggtggattttgaacaatctgaatgagtctcatcttgactactactatgcattttttgcaatattaaacttcctcaacctcatcttcttcgcgtatgttactaggtactatgtatatagggttgaagtttcagattccatagacaagcttgcaaaagaactgaaggaaaagaccgtgtccaacgttgtgaatccaaaagactagttgattggggtatctaaggggagaaagaggattaagaccgtgaaaagtttcaaaactactttatgtacaaatttggatggccaaagaactagatatgtgtgtgtctgtggggggtgtgtgcgtgttaactttggagtggttttggtcattggaagtcacttcagaagagaacctaatcaagttattatagttattgggggtcgttttagcagcatgtgatcatttttccttatcctttgtaaccttcgggaaatgtcacttgcaccttgaaaaagacacgagattggaaaaaggaatgtaatatgtttgaagtttttctttctagatcttaattttcgggccatttaagcttttctttactcaagaaattgtaaaataaagggtcgaagacaaaatctatcaggttagattttcatcttcattcctccaataaaattgcttttttaa

SEQ ID NO: 14433 - DNA, 290 bp, Glycine max
ttctgagttctctcatttctcgtcttcactgagaaaaatccttctttgtgcatgctcctcgtttccatctaaaggggagagggggtgagtgagaaaaagtgagtgaggtttctagcttctactgttgagtaaacatgactatggaagagggcagggtagagaacgaggactacacacaagatggaactgtgaacattaaagggaaacctattcttagatccaaaagtggtggttggaaagcttgctcctttgttgttgtatatgaggtattcgaaagaatggcttattat

SEQ ID NO: 14434 - DNA, 1253 bp, Glycine max
ctccgcagaaaaataaaaaaagagtagctagcactagctagctaaacacagtacgagtagtgatcataggcaagcaaaagcatattcataatatggcaaccatggaagacatgaacaacatgagtggtgaaattacacttccaggcttccgattccacccaactgaagaagagcttcttgatttctaccttaaaaacatggttgttggcaagaaacttcgttacgatgtcattggtttcctcaacatctatcagcatgatccatgggacttgcctggtttggcaaaggttggggaaagagagtggtacttcttcgtgccaagggacaaaaagcacggaagcggaggaaggccaaaccgcacaactgaaaaagggttctggaaagccaccggttcagaccggaaaatagtgaccttatctgatccaaagcgcataattgggttaaggaagacactggttttctatcagggaagagctcctaggggatgcaagaccgattgggtcatgaatgagtaccgtttacctgacaattgcaaactacctaaggaaatcgtgttatgcaagatatatcgaaaggcaacttcgttgaaagtgctggagcaaagggcagcactagaggaagagagagagatgaagcaaatggttggttcccctgcttctccttcctccacggacaccatgtcctttagcagcccacaggaagagcaaaacatgcccttgccattgttgcaacatgttcttaagaaagagtctgaaactgaagacatggtagtgcctaaacaagaaaaaataaccaaccaattggtcttaaaagacaccaacaaaagcacttgtggcacatcactacaaatgccctttgggaaggagaagcttccagaccttcagcttcccatgctctcggattggacccaagataccttttgggctcagttgaatagtccatggctccaaaactttactcccaccaatattctaaacttctactgactccactctatatgcatcattactcaaataccatatcaactgcaacttaatcagttattacttatttattttggaatgtatatgcagtgaattagtaattaataacgttttttatattagctcaattaactagacatgttttcgtgcacatatatggtgtttcctatcaagttcagcctaactggaactttttgtcaacccttgaagatgtttccctcttaaaatgaatgttcaaaaagtaaaattcatcagcagattcaattcggc

SEQ ID NO: 14435 - DNA, 1523 bp, Glycine max
ctcttcttcttcttctcccgctcgcgccttctgtctcaatctcaatccaccagaaatggcaacaatagttagccaccaccaccgcctattctccgccgccacgcgcttcaattccactggcagagactcgcggcggcaaaggagcggcgcaaactcggtccggtgcgctgacgtaagcacggtcacgagcgagaatcagcgagtgacggtgagtaacaggagcgattcgctggagatatgccgcgtgctgaacggaatgtggcagaccagcggcggatggggccgaatcgaccgagacgacgccgtcgaggctatgcttcgctacgccgacgccggcctaactaccttcgacatggccgatcactatggacctgctgaagatctatatgggattttcattgatcgagttcgtcgagagcgtcctgcagaattattggaacaggtcagaggtctcactaagtgggttcctccgccagttaagatgactagtagctatgtaagagacagcatcaatgtttcaaggaagagaatggatgtggaatccttggacatgcttcagttccattggtgggattactcgaatccaggctacctggatgcactaaaacacctaacagatttgaaagaagaaggtaaaatcaagactgtggctctgacaaattttgatacagagagattacaaattattcttgaaaatgagattcctgttgtaagcaatcaggtgcaacattcacttgttgatatgcgtccccaacagagaatggcagagctttgtcagcatacaggagtcaaactgataacgtatggaacagtaatgggtggtctgttgtcggagaagttccttgacaccaacatatctattccttttgctggtcctgcaataaacaccccctccctccaaaagtacaaaaggatggtagatgcttggggaggatggagtttgttccagggactgcttcggactcttaaacaagtagcttctaaacatggcgtatcgatcgcaactgttgctgtgaagtatatactagatcagcctgcagtagcaggatcaatggttggtgtcagacttggcttggcagaacatattcaagataccaatgctatcttttcacttgttctcgatgaagatgacgtgaacagcataagagaagccacagcgaaaggaaaggatctgcttaaagtgattggtgattgtggagatgagtacaggcgtgcatgagtcatgttggcttatcaacctggtgaagtgctttaatttatataggacaaggggatggaaaaaaagggagggggacacaggaaaagtgttcaagctcaattttttgtcagttgaagaatttgtgtgtaatacttttatggattccccagtaatgatcaaaagccaaaatagatgaaaggaggaagtaatgtattctgtagtatatatcttgtgagatttatgcaaactttcctcacatattggccccctcaaagtatagaaactttggtgaatccctgaacaagaattagacattgctctgttt

SEQ ID NO: 14436 - DNA, 948 bp, Glycine max
  unsure (1)..(948): unsure at all n locations
gatttcgaagggcacattttgcattgccagaaggcgattgatgggcccaaggccgggaaatttcaacagcagcagcagcacgggaatgttaatgcgcacgcccagcgggcccagtttcagaggaatagtaatgttggtgctaatgctgctgcgggttatggtggtggtggttcggcggtgcagccggggcacttgatggcgccggctgggccggggattgggtttaatccgtcggctgctgcagctgcgcaggctgcgttgaatccggcaatggcacaggcgttgacggccctgctggcgtcacaggggacgttggggctgacgaatttgttggggagtattggaacgagtgctgcggtgaaccctggtgtgcctgctgcagggtctgcggtgcagggtggtggttatagtgctcagccgaatataagtcccggtgttgttggaggatatgggaatcaggtggggttacaggcggcgtatccgaatcagaatcagcagatagggcagggtggatctggaagagggcagtatggtggtggagctgcgccctacatggggcactaggttccgcgtgtgatcattttgtgtagataattgtgtcttttcctgtttggccttatttttatcttgttggtactgtggttaattgtagaagggaataggggaggtcttggggaagggaaagcaaaggaagtggtttcttttgtggtatattctttaggttagtgccaacttttaggtgcgaatatgatgattttgaatgctagcatgcctgccttgggctttctttggtaataaacatnacaaaaaactggggnggcccgtacccatcgcctatgtgagtgatacgcgcctcctggcgcgtttcaacgttgactggaaacccgggtactcacttatcgctgagcaatccctttcgcgtggttanagcagggccgacgatcgctt

SEQ ID NO: 14437 - DNA, 678 bp, Glycine max
accaggttgaatccggcaatggcacaggcgttgacggccctgctggcgtcacaggggacgttggggctgacgaatttgttggggagtattggaacgagtgctgcggtgaaccctggtgtgcctgctgcagggtctgcggtgcagggtggtggttatagtgctcagccgaatataagtcccggtgttgttggaggatatgggaatcaggtggggttacaggctgcgtatccgaatcagaatcagcagatagggcagggtggatctggaagagggcagtatggtggtggagctgcgccctacatggggcactagattccacataagtgcatcagtcttttattactggcctggcgtttcttctgagttctgaagtttaaggagctgatgcaattggcgtgtttataatgaaatgctacttactgatcagaatattttaattaccaaatggagttctgttttcgccacctgctttttcttattttcttccctttcaaaatattgtagtattttgatttttagtttatcttcaaaaaaattcctgtggaactgtttttgtactgcaaattgaagttttatcagcatttatgaggagtttgggatgctgtaccaattatatttttaaatatttatgtttgtgtgagacaatgtgctgcaacttggtattcttgtattctcgat

SEQ ID NO: 14438 - DNA, 291 bp, Glycine max
tcttctgagttctgaagtttaaggagctgatgcaattggcgtgtttataatgaaatgctacttactgatcagaatattttaattaccaaatggagttctgttttcgccacctgctttttcttattttcttccctttcaaaatattgtagtattttgactttggtttatcttcaaaaaaatcgtacggaactgtttttgtaccgtgaattgaagttttatcggtacaaattatatttttaaatatttatgtttgcgtgtaccattgtgtttcaacttagtattctcgaaaaa

SEQ ID NO: 14439 - DNA, 371 bp, Glycine max
ctcgagccgccacgtttgaagtgtgagcaataactctgttacggaagaagaaagtgagagtgaaaatgctgctgcaaactcaattcctctcttgttgggttcaacacttgtctcccgggcaaacccaaggcagattgttcttgagaatcaatatcaaatcagaaaaggcttcttcagatgattctggtccctcaaaaaccggggtggggtttggatcatcggacactgctgctgtgcctgtgagcagtaaaaagaaaaagaaggcgcaaagagaaagggcgtccataattcggcgaagcccgcttgaaaaacctgcatttgtttctgaacaacaagtgggtaaggccaaggaagagaacaaaaatgaaagc

SEQ ID NO: 14440 - DNA, 782 bp, Glycine max
tctcgtccctctggccgcccccacggcaagatccacctcaaactcggcctcctcggccgcccccaattcgtttactcctcccccaaccctaaccctaaccctaaccctagtcctaatttcgtctgctacagaggatacaccccttccccttcccattcccattctcactccccttctccaccaccttctccttacacctcttacaccgactcctattctggttactaccccggttactattctggcgcacctccccctccccctcctagacccttcttcgaccgttacgctgggtctagtgggccttctgctccgcttgattactcctccacttatgactccaagcccaaggctcccaaaatgggcctcggcgctggcctcgccgttggcgctgttgctggggctctcggcgggcttgctctcgaagaggggcttaattacgaagaggacaaaatcgcggagagggttgagaacgacgtcactgctgctaatgttgctgctgcgcgcgacaattacagcgattaccgagtggattattgaattgaacacttactaccggcttggtgttgtcgcaaggcttgaaattcgaagggtatttccattcggattcactctaatgttattacagtatatagatatatgtctatgtatatagttcgacttggtgttggattgatgaatgatgcatcggtgttgttttacttgctgcttgtggtgatttgatactcttcttgcgcttctttatttaaagtgaaataaagctggttttgccttaaaaaaaa

SEQ ID NO: 14441 - DNA, 481 bp, Glycine max
gaaagataataagattggaatggagaaggcaagcctgtgccacaggaacactcctctcccacttcttaatcgcccttccaattttcttcaattcaagcaccaaaactccttcctcaagttcccgaacccaaacctccatcgactgcgcaggctcaattgctcagtatcagacggcaccgtttcgtcttcgcttggtgccacggactcgtctcttgcggtgaagaagaaagcagcagaggtgtcttctgagctcaaagggacctccatatttctggttggtttgaagagctctcttaaaactagtttggggaagctgctggctgatgcattgcggtattattatttcgacagtgatagtttggtggaagaagctgtacgtggtgcactggctgcaaaatcattcagagagagtgacgaaaaaggcttctatgagtctgagactgaagtactgaagcaattatcgttcatgggtcgactagtg

SEQ ID NO: 14442 - DNA, 465 bp, Glycine max
  unsure (1)..(465): unsure at all n locations
gggagaaggcaagcccatgccacaccaacactcctctcccacaacactcctctcccacttcctaatcgcccttccaattttcttcaattcaagcaccaaactttcttcttcaagttcccgaacctgaacccgaacccgaacccgaacctccttcgattgcgcaggctcaattgctcagtatcagacggcaccgttccgtcttcggttggtgccacggactcttcttctcttgcggtgaagtctttgttcagaagaaagcagcagaggtgtcttctgagctcaaagggacctccatatttctggttggtttgaagagctcttttaaaactagtttggggaagctgctggcggatgcattgcggtattattatttcgacagtgataatttggtggaagacgctgtangtggtgcactggctgcaaaatcattcagagagagtgatgaaaaaggcttctatgagtctg

SEQ ID NO: 14443 - DNA, 496 bp, Glycine max
taataaggttgtatatggtttggtgggatttgttattgtaaggctagctagctagccatggctgagtcggacaacgagtccggaggtcacacggggaacgcaagcggaagcaacgaattctccggttgcagggagcaagacaggttccttccgatagcgaacgtgagcaggatcatgaagaaggcgttgccggcgaacgcgaagatctcgaaggaggcgaaggagacggtgcaggagtgcgtgtcggagttcatcagcttcataacaggagaggcttccgataagtgccagaaggagaagaggaagacgatcaacggcgacgatcttctctgggccatgactaccctgggcttcgaggactacgtggatcctctcaagatttacctgcacaagtatagggagatggagggggagaaaaccgctatgatgggaaggccacatgagagggatgagggttatggccatgcccatggtcatgcaactcctatgatgacga

SEQ ID NO: 14444 - DNA, 1129 bp, Glycine max
cccttccgttccgtttcacctttcctcttcccgccggagccgccgtcacccgccgccggcaatcgtatcagaccctcccaatacaccgtcgccgacttccacacagaattgcaccactcattgatttcaattttcaagtcttgaggatttcgtttcaacagcgcttcaatttgacgcagaaaaactgagtcaaaccaattctcccagagttcgtgacttggattctcaatttatcgttcattccgaatagaatttgaaactccgaagaaaactgcaccgaacactgaatctcagttaccgaggagcttcttctacgaaccgtgcttaattccacacagaaacaccgagtcaaactggttcgtgctgtgttcgtggttcagattctcaatcgaaatttgaaattcagaagaaaaccgcaccgaacacagaatttcagaatctgaacaagtttcttccgttaacagcacttcaacttcacgtggaacaagaatcaaaccgtttcgtggttcggattctcaattcctcgtccattcgcaatcgattttcaaattccgaagaaaaccgctccctccaccgattttcagactccgaacagcgaacagtacttcaagttcacgtcgaacgagtcaaagcgattccaatcgatttcgcgaactcctccacggtgaactccgatattttccctgcactgacttagtgattcgtttcatctttctcagcgcgtcttcgatttttccgtttgtcgatggcggactccgacaacgactccggcggcgcgcacaacgccggcaaggggagcgagatgtcgccgcgggagcaggaccggttcctgccgatcgcgaacgtgagccgcatcatgaagaaggcgctgccggcgaacgcgaagatctcgaaggacgcgaaggagacggtgcaggagtgcgtgtcggagttcatcagcttcatcaccggcgaggcctccgacaagtgccagcgcgagaagcgcaagaccatcaacggcgacgacctgctctgggcgatgaccactctgggcttcgaggactccgtggagcctctcaagggctacctccagcgcttccgcgagatggaaggagagaagaccgtggcggcgcgtgacaaggacgcgcct

SEQ ID NO: 14445 - DNA, 277 bp, Glycine max
gaagaagattcctggattgattgtgaagatggctgagtcggacaacgactcgggaggggcgcagaacgcgggaaacagtggaaacttgagcgagttgtcgcctcgggaacaggaccggtttctccccatagcgaacgtgagcaggatcatgaagaaggccttgccggcgaacgcgaagatctcgaaggacgcgaaggagacggtgcaggaatgcgtgtcggagttcatcagcttcataacgggtgaggcgtcggacaagtgccagagggagacgcgc

SEQ ID NO: 14446 - DNA, 966 bp, Glycine max
cggaacatccctgattccttctacaccaacggcggtctcaaactgcgcgttgtgtggaccatcagttccctcatcgctgcctccgccaggcattacttgctccaacccattatctccgagcacgccaccctcgacaacttggtgctcaccgacgccgatggccagggggtgctttacatgaaccgggagcagctcgaggagctgagggtgaagccgctctcggcctcgtcggcgtcgaagaggactcttgtcccggcgctcaacatgaggctctggtacgcgcctcacctggaattaccaactggggttgtgttgaagggtgccacgcttgttgctattaggcccagcgagctatcccccaacacggccaagaaggaggcgtcggatttgtcgtgggtttcgacggcgtttgaggagccgtataggacggctgctacaatgcttgtcaagaggaggacttattgccttgagatgaactcattctgatgcgtttgtgagggaatgcagaatcatttgaaaagggagaaaatgttaagttcttcatagaagggaatcacaaaactcaaattttcttgggcggacatgaagtggaagcagcttggtcgctggaatcttgctctttccagcttctgaaactatggcccacatttgagtagttactaaaggagctgcaaatcattcaccaatcatgcttgaactgagaactgaatgcatctgctggtttttttaatttgaggcaatgcttgtaagagtgcacccctgcaactaggaatgatcatgtaagagctttaagtttgtagtcatctgtccctatcagatctctctgtgaatattctaggtatcagtttggtttgcctttatgatatatttttctcaagttaaatgagcaatgtactttgcttctgtaattttaaataacttctggatgagtcaatcatgccaaatgcaatacttgttcctgcactt

SEQ ID NO: 14447 - DNA, 428 bp, Glycine max
  unsure (1)..(428): unsure at all n locations
gggagaatctttgtggtggagcttgagggcaggtcttatagatgcaagttctgcagaactcacttggcccttgcagatgatctcatctccagggcctttcattgccggagggggaaagcatacctattcaataatgccgtgaacttcacaattggaacaccagaagaaaggatgatgctttcaggattacatactgtcgcagatattttttgctgttgctgcggtcaaataattggctggaaatatgaatctgcacacgagaagagccaaaagtataaagaagggaagtttgttcttgaaagatgaaggattgttgatgaagttgatttctccactgagttctacatcgatagtcatgccagcatgagtgatgctgaagaacctanaacatgcgggctggccttgttggatcatgagaaagatgcact

SEQ ID NO: 14448 - DNA, 606 bp, Glycine max
  unsure (1)..(606): unsure at all n locations
tggtgagtctagtcaatttctttttaaactctgcgatgctaaatttagcggtgtcactcacctgaatttctcgtttttgtgatctttggggcctttatcaatgccacatctctttctttctctcttgatctcattttgtgatctttggggcctttatcaatgccacacctaaatttagcaatgtcactcacctgaaattaagtgtgtattctttcttttgcgaattttttttcagagttgatttgacgtaacccaaaatcgtgtttaatgttttgaggcaatttctttgtttgctacatcaatggggtttctttaaacaatagttttggaattttcgttttaaattgtttgcctattggctacattgtttggttttacattgtctggttcttctttattcaagaacgcatcatcttgtacaagatttgcacgaactcagagcgagagcaacaggaggaattgtctactttccgcaaccagatatgttctgaagggtaatccctaggacctggaatgcaactcacttagcaagtcttgcttcagttaanaacggatagtatatctttttcctaatctggtattcttgctagagttaaaaacagatag

SEQ ID NO: 14449 - DNA, 459 bp, Glycine max
ctatgacgtctggtggactacttaatctcggaattcagctcgagcaagctccaagaagagcacctctagttttatattcacacaacaaaccactaagaaaagagaggataaaccaatggctacttcactttcagcaactgggtgtgttggaacttccttctatggaagttggggcacttcaattgttggggaggattacaccatgctggccaagtcagtgccatcacaagttcgtatggggaggggaaagccagtgagattgcagcctatgatgaagaatgtcaatgaagggaaaggtatctttgcacctcttgtggtgatcactcgcaacatcgttggcaagaagcgtttcaaccagcttagaggcaaagcaattgctttacactcccaggtgatcacggagttctgcaaatcaataggagcagatggaaaacagagacaagggctgatcaggttggc

SEQ ID NO: 14450 - DNA, 837 bp, Glycine max
ttccaatccacaatcgtgggagtgagcgaacaactacaaagggatattagatactattgtgagtgagtgcgtgcgattcattgtgtttgtgtagtagtgactttgggttgggtttcgtctcaactcaacaaacgtcgtcgttctcccatttccaatctttctccaatggcttcttctgcttccttaatcaactcgttgacttgctcttcgcctgcacccactcagcactgtttcgccttcacccgcaccaccgccaccgctaccgccacgtcactgagacaattcaacagccaccgtccgcccccactcaccacgaggatctcctcgtcgccttccaccgttgtctgcaaagctgtctccgttaagccccaaaccgaaaccgaaggtctcaacattgctgacgatgtcacacagctcatagggaaaacgccgatggtttacctcaacaatatcgtgaagggttctgtggccaatattgctgcgaagcttgagattatggagccctgttgtagtgtcaaggacaggattggttttagtatgataaatgatgctgagcagagaggagctataacacctgggaagagtatattggtggaacctactagtgggaacacaggaattggtcttgcctttatagcagcttcaagaggatataagctaattttgacaatgcctgcttcaatgagtttagaaagacgggttcttttgaaagcatttggggccgagcttgttttgactgatgcagcaaagggcatgaatggagcagtacaaaaagctgaagaaattttaaaaagtacccccaattcatacatgcttcaacaatttgataatccttca

SEQ ID NO: 14451 - DNA, 488 bp, Glycine max
gacacgagaaaattaataatcccaatcatcaagataggaaaagaatggaggccatttgttccaagcaccttatgacatcccttgtcataattcttgcttctagtttgaccttatcacagggtgccaagaaaggcagtgacagtgaaaggccataccaagaagcgagcacggtgttcattagaacatcttgcagctccacgacctatccaagactctgctacagctccttagtgaagcatgcagacttgatccaaacaaaccgtgtggttctgacaggcacagccctgaatgtgacccttgcgtctgccaagtcgacctcggcaatgatgtcgacgctggcaaagaggcaaggcctgaagccaagagaggttgcagcgatgaaggactgtgtggaggagttggctgactctgttgatgagctcagaaggtctatttctgagatggctcaactaacaccctccaattttgagatgacaatgagtgacgta

SEQ ID NO: 14452 - DNA, 426 bp, Glycine max
cccacgcgtaaccaccaaattaatccatatatagagagagttaggaaaacaatggaagccatttctcctaagcatcttatgacatcccttgtaataattatagcttctagtttgaccgcacactgtggctgtgccaagagagggggtgaaagaccatacaaagaagccaacacactgttcataagaacatcttgcagctccacaacatatccaagactctgctacagctccttagtgaagcatgcagacttgatccaaacaaatcgtgtggttctgacaggcgcagccctgaatgtgactcttgcgtcagtgaaatcgacatcggcaatgatgtcaacgctggcaaagaagcaggggctgaagccaagagaggttgcagcgatgcaggactgtgtggagcagctgagtgacactgtggatgaactg

SEQ ID NO: 14453 - DNA, 1485 bp, Glycine max
caacaacacagtccacgtgcattggaaaggtgctgcagagattatacttgcaatgtgttctaattacattgactataacggcatagagaagtcccttgatgaagatcggagtaaacttgagaagataattcaaggcatggctgctagtagccttagatgtattgcttttgcttgcatgaaaatttcagaagacattgattataacgataaggagaaagtgcatcaaatccttagaaaagatggcttgaccttgctaggtattgttggcctaaaggatccatgccgaccagacgtcaagaaggctgtggaaacttgtaaacttgcaggtgttagcatcaagatgatcactggagacaacattttcactgcaaaggccatagcaacagaatgcggaattttagaccttgatggccatgtgaatgcaggagaagtggttcaaggtgtggaattcaggaactacacagaggaagagagaatggagaaagtcgagaagatccgcgtgatggcaagatcgtcccctttggacaaacttttgatggtgcaatgcttgaaaaagaaaggtcatgttgttgcagtcacaggagatggcacaaatgatgcacctgctctaaaagaagctgatattggactctctatggggatccaaggaactgaagttgccaaggagagttctgacattgtgatcttagatgacaacttcaattctgttgccactgtcttaaggtgggggagatgtgtctataacaacatccagaaattcatccagtttcaactaaccgtgaatgttgcagcactagtgatcaattttattgcagcagtttcttcgggagacgttcccctaacaacagttcaactattatgggtaaatctcattatggatactctaggagcattggcactagctacagaaaggcctacaaaggagttaatggagaaaaggccagtgggtagaactgagcctcttattactagtattatgtggagaaaccttttagctcaagctttatatcagattgctgttctcttggttttacaattcaatggaaagtcaatcttcaatgtaaatgggaaggtaaaggatactctaatttttaatacttttgttctctgccaagttttcaacgagttcaactctagaagtatggagaaacttaatgtgttccaaggcactcacaaaaaccacttgtttcttggaattgtggggattactttggttcttcaagtattgatggtggaactcctaaggaagtttgctgatacggagagattaacatgggagcaatggggaatttgtattggaattgcagctgtgtcatggccaattgcttggtttacaaagctcgtacctgtttcagatataacgttctttagccatcacgttaagtgggtaaaagtattggtcttcaagattaagcatttgttttcattttacctcgtcacacgtttgaagaatcataaattccaagcatcttaaaacacttgaat

SEQ ID NO: 14454 - DNA, 475 bp, Glycine max
ctcttttgccaactcaacttcgaactcaaatcaagcaatcaatttcaaatccaatcatggggagctcaaaccttctgtgccttcttcctcctgtgtgcaatcttggccgtccacgtggcacaatcctcatcctccaccctcgacctggacgccttcttcctccctctcaagtccggctgtcgcggatccgtcgccgagtgcagcctcctcgccggcgacgacgacaccgagtttctgatggagtcggagagcaaccggcgcattctagcaggaaggagctacataagctacggtgcgctgaggaggaacactgtcccttgctcccgacgtggtgcttcctattacaattgccgccccggcgctcaggccaacccctacagccgcggatgcagtgctatcacccgatgcaggcgttgaatctattcttcttctcttttttttttatttctttttttatatatatatttttgcaatt

SEQ ID NO: 14455 - DNA, 876 bp, Glycine max
tctactgtcgtgtgtcattctgtacctttttagctcttctttgaatgatagtgatgctggatatttcaattaagactctctaggtgaagattggacttcgagttcttactcgcccggtgcccaaccaattacctacggtttatcggacccttggagagagttatactgaaagggttttaccttcaatcatacatgaaactttgaaagccgtggttgcccagtacaatgccagccagcttattactcagcgagaggctgttagtcgggaaatccggaagattctgactgaaagggctgctaacttcaatattgcccttgatgatgtgtcaattactagtctgacttttggcaaggagtttactgctgcaattgaagctaagcaggtagctgcacaagaagctgagagggctaaatttgttgtggaaaaagctgagcaagacaagagaagtgctgtaattagagcacagggagaagcaaaaagtgcccaactgattgggcaagctattgccaacaatccagcttttatcacactgaggaagatagaagccgcaagggagattgcacatactatatcaaatgcggcaaacaaggtttacctgaattcagatgatctattgttgaatcttcaagagatgaaattggagccaggcagaaagtgagtgtgttagcctgtttgtttctttttggttttagcttgtaaactatcaatttcaggatcgattttcttgatatgttttcgcaaattcggatatagctggcttgattagactactgagcggcaaccctttgaatctttggcaaaggattaattgaggtcccaacgaatgcttcacattacttgaaataattgctagagtttagcatcctgatttaaaa

SEQ ID NO: 14456 - DNA, 536 bp, Glycine max
gaaaagggctgcataaaccccacaacaaccccaaacccttcactctttcaattttccaaggtaaaaagatgaatctgaagaacatgaaggttccgaacgttccaggtggcggggggatctctgcgctgctgaagcttgggattgttggtggaattggtttgtatgcagctgctaacagtctctacaatgttgatggaggtcaccgagccattgttttcaaccgtctagttggtgtcaaagacaaggtctatcctgaaggaactcactttatgattccgtggtttgagaggcctgttatctatgatgtccgtgcacgaccccatctagttgagagtacatctgggagtcgtgatctacagatggtgaaaattggacttcgagttcttactcgcccgttgcccaaccaattacctacggtttatcggacccttggagagaattataatgaaaggggtttaccttcaatcatacatgatactttgaaagccgtggctgcccagttcattgccattctggtcattactcagcgagaggct

SEQ ID NO: 14457 - DNA, 474 bp, Glycine max
aaagtttaaaccctacagaaaaacgctacataaaccccgcaacaaacaaccaacccccaaacccctcactcttctcggcgtccatcggaaatttccaaggtaaaaagatgaatctgaagaacatgaagattccgaacgttccaggcggcggtgcgtcctctgcgctgctgaagcttgggcttcttggtggaattggtttatatgcagctgctaacagtctctacaacgttgaaggaggtcaccgagccattgttttcaaccgtctagttggtgtcaaagacaaggtctatcctgaaggaactcacttcataattccgtggtttgagaagccggttatctatgatgtccgtgcatgaccccatctagttctagttgagagtacatctgggagtcgtgatctacagatggtaaataatacatgtagctaggatttgcgtgtagtcacagagaaatggttttggtatcaaattcgta

SEQ ID NO: 14458 - DNA, 1666 bp, Glycine max
gtgtgtgtgtgtgtgtgtgttgggttcaatgtgctgttggtttgcttgaccttgtttatcaaccaaatctagagcaacccatttctctgttctcccatttgaaggaaaggaaaacttacacctctctctctctctaactgattcgctccaattccgccgcgcccagattcttctctctcacctacaaacccggtcccaacaaggtctttccttccaactcctatggcgggagaaacatcttggatcagccactatgatgacagacaaagggagactggggcgtttgattcatttttagaacttggtgaggaaggtgaaaaagaagcaactgctgtttctttggatgttttgccagatgacttgttggaacgaatcctagcctatctccccattgcaagcatttttagagctggctgtgtgtctaagaggtggcatgaaattgttaattcagagaggtttgtatggaacctttcacatgttctaccgcagaaaccttggtactttatgtttacgagctctgatgaaccagatggttatgcttttgatcccgtccttcggaaatggtatcggtatcgcattgaacttccatgcattggaacttctaattggttcattgcttcatcatatggcatggtctgcttcatggacaatgacagcagaagtgaaatatgcatctgcaacccaattaccaaaacctacaggaagcttgaggagcctccaggtttgaaagtttctgattacagtgcattagcaatctcagtgaacagggaatctcactgttatactgtggcaattgtaaaatctaaacaagtccctgagaactttgtccagtgggatatctcaattcatctatacaattcagaaaatgcaacctgggtgacctctttaacggaagttttgatggggtggagaggtggtaatgagagtgtgatatgcaatgggatgctgtgctttttagtttattcaaccgggggtggccaacctgtaaaccgtcatgccctagttgcgtataacatgtccaatcattcatctcaaggtagtttaacaaggaacttcattccggtaccttgttctctaacatggggccgtttgatgaatctgaaggggaagcttgtaatggtgggaggaattggtaaaccagatcgacctgacataataaaaggaattggtatctggcttctaaaggataagaagtgggaagagattgctcgaatgccccacaaattcttccaaggctttggggagtttgatgatgtgtttgctagcagcggtgcagatgatctgatatatattcagagttatggaggtccggcgcttctcatatttgatgtgaaccataagcaatggaaatggtcgcagaaatgccctgtgggaaaaagattcccgctgcagctttttactggcttttgctttgaggctagacttgaaattgctccatagttctccttacaatcaagagctgctaattgtgtccaaggcttctactcattttccttcattgttcttttaagtaaaaatttaatatgatttcagtgttttcacagtttcatacaaaatgttcttgctgataaaactgcttattcatggatactggaatattattaatagcattagaaaataccacagcatttttttttagataaagctccaagtatgttaatacaat

SEQ ID NO: 14459 - DNA, 348 bp, Glycine max
gtgtgtgtgtgtgttgggtttcttggccttgtttatcaaccaaatctagagaaacccatttctctgttctcccatttgaaggaaaggaaagcttacacctctctctccaactactgattcgctccaattccgccgcgcccagattcctctctcttagctacaaacccggtcgtctaggactctttccaacaaggtctttccttcaactcctatggcaggagaaacatcttggatcagccactatgatgacagacaaagggagacgcgggcgtttgattcatttttagaacttagtgaggaaggtgaaaaagaagcaactgctgtttctttggatgttttgccggatga

SEQ ID NO: 14460 - DNA, 499 bp, Glycine max
gacaagtacttccaaaggaagcaactgtcaagtgtcttgctgatgcaggcttcttcctagatgagaaggatattagtggaaacagtacaatgagatctttctatcatgatgttgcccagcttcagggtcttgcaaaaagtttgcacaaagattgcattgctaaaatggaaccatctaagtgtctctttccatcagaaattgctaaaaacataaagactccactgttccttgttcatccagcttatgatttctggcagatacgcaatattttggtgcctcaaggatcagatcctgatggtcactggcaaaggtgcagactggacattcgcagttgtaatgctaatatgattgataaacttgacagttaccgtggctctttgctgaaggctgtgaatgaattccaacaacgaaaggagattggaatgtttatagattcatgcttcgtccattgccagactgagatggaagtgacgtggcattcacccaactctcctaaata

SEQ ID NO: 14461 - DNA, 498 bp, Glycine max
tccaagcgtccgcccctgccccgaaccaaactcaaaaccctaacaaaccaaaaacagttgctgccatattcaccaatggctttctccaaggcaatgtttctcgccgccgtaatgtcggtgctcgtcgccgtcatctccgccgccgaagctccagctccgagccctacgtctcccgccgccgccgtttcgccgtccttcgtcgccggtgttctcgccgccggagccgctcttgcgttcggatctgctctgcggatctgaacgtagctcatggattttctcgtttacatgcgtggatttttagtagaagcggagatttgagcagcattagtatataactctctctctctctctccctccctctctctctatatatattgatattgctatgtagagattattactacatatgttgatttctggatctatattgcgtttatggtttgagtagtattattgtgagatcattgtttctagtacataattgatttctttatattc

SEQ ID NO: 14462 - DNA, 270 bp, Glycine max
ctcaaaaccctaacaaaccaaaaacagttgctgccatattcaccaatggctttctccaaggcaatgtttctcgccgccgtaatgtcggtgctcgtcgccgtcatctccgccgctcttgcgttcggatctgctctgcggatctgaacgtagctcatggattttctcgtttacatgcgtggatttttagtagaagcggagatttgagcagcattagtatataactctctctctctctctcgctcgcactctctctatatatattgatattgc

SEQ ID NO: 14463 - DNA, 573 bp, Glycine max
gagagagttgaattggaagaaagagtagatcgatcagagaaagaggggagatggaagttgaagggtcatcgaagaagatgatagcgactcaggaggagatggtggaggccagggttcctctggcctacagggaccagtgcgcccacttgctcatccctctcaacaagtgcaggcaggccgagttctacctcccatggaagtgccaggaccagcgtcactcctacgaaaagtgccagtacgagctcgttatggagagaatgctccagatgcaaaagatccgcgagcaccaacaaaaccccaacgccaaacaaccccttatcgcgcttcccaaacccgccaatgcctgattcatattcactgaacctttgcttgggacagatgttatttcatgttttgctattgtatggatcaaagtgactttggaatgtttgtccaaagactacttcagactttttatattttatttctggctatttctgctgtcatggacccatgtttctccttggaagaaataaaattccttggttatcgttcttaacgggaataattataatataaaataataaaataaac

SEQ ID NO: 14464 - DNA, 1118 bp, Glycine max
  unsure (1)..(1118): unsure at all n locations
cgcggnntggcggccccgctcttttagaactagttgtgtatcccnnnccgggctttgcaggggaatcgaaaaatatatttgggcaatgcaaagcctaacactggtcctctcatagtcatgaatctatcataactcttcctttccttttatcgtttcatccagaaaacatggatgccatgacactgtcactcccgctccctccggttccggtctgtacagtgcccgcgtctgcatcaacctcgtcctctgtttctctcactcactcctggtcggccacggccaggcagaggctctcctctcacagaacaagactcattttccggaatcattcctctgcggttccaaaacttacggtgacatgcggtgcggctgtgacggagatcaacgagacccaattcaaagacacggtgctgaaggctaaccgtccggttcttgttgagttcgtcgctacttggtgcggtccttgccgtctcatctcttccgccatggaatccctcgctaaggaatatgaagacagattaacggttgtaaagattgatcatgatgccaacccgcagctaattgaagagtataaagtttatggactaccgacattaatactcttcaagaacgggcaggaagttccagaaagcagaagggaaggtgcaattacaaaagtgaaacttaaagagtacgtggatgctctattggaatcgatatcagtttcatagtcatcatattcatatatgtttcaaagttctgacctgttctgggagacttgagatataggagcatatctgtttgtttccatatccttgtattgtatgaaacagtttaacaggcttatacagttgtataatctatataatttctgaagctgtaaatacagcataatgtggtgaaggaaggttgtgcttaagggtttctacacggggttggaactcattcattttaaatccaaaaataaaatttgatcgagtcaaatatgaagaaaaataaaataaaaattgaaaaaagataagtatttggcaggataattgggttccaaactgtggtggccttgttgattgcttaattgaggaggttggtagtatttctttggacataaaggtgttgaattcagtcagagactttattcc

SEQ ID NO: 14465 - DNA, 452 bp, Glycine max
tcttagtagcatgtcaattgggccattggatactagtttcagtttagatgcctcacatggtaagaccactcgtggctcaaatttgatgcagaccaagagccgtgacaattctcgcaaacatcaggctcatacagagatacatgatactgattcgatgctcttgcctcaactctgtgatcttcaatgggattctcaatgcaaggtcattcaagatttgaaagataatttgaaaagcaatagccaagctttcgtttctgtatcagcagagaatttcatcgaaccactcgtcaggtttctgagcaatgcatatgatctgcgtgatattaacgcactgagagctggaactcagcttctgttggagtttgtgaacaactgcagaaatggtacgactaatttgcatgaagatactttcattatgctggcaagttttctgaattcaaatgtgattggag

SEQ ID NO: 14466 - DNA, 505 bp, Glycine max
ctatattttgcgagccacacccagctttgagggcctccaacaaaatctccgttccgggtttttgcaatcgggagagtgcgagagagacaatacactacacggttgctgcattattgctttcagaggaactcattgcaggttctccaatttgaacaagtctttcaaatattctcttagatctttgctcacttcatgctcaaaggaggaattttataaagcattttcaagtttctctaacattgaaaaggaattgctccatcgcctatttcttcaggtcattacttcgttgcatgaaaacttagaggatgggtttgagactgtctgtcttcaaacacaggcaggagctactcttgatgctgtggagaaaattgtagaagaacaagatctggatgtcttgttttcagataggagtaacataatggatgttgctgagaatctgtctatggcaaagaagaatgaaatccaacacttaaagcatatggttcaattgggagaggaacataat

SEQ ID NO: 14467 - DNA, 482 bp, Glycine max
gagtcagtcacatcgataaaaaaaaagtacgggaaagaaagggtgtgtcaaaattttgagagccactcccagttttgcaccctcccacaaaatcaaaatcttcgttccgtgttttagcaatcggtagagagcgagacacggtttctgcattattgctttcagagggactcattgcagtcattgattgtaagcaatggagaaaacgcccaaacaaggttccaatgcatcactttttccttctactggaattggatcgaggttctccaatttgaacaagtctttcaaatattctctcagatctttgctcacttcatgctcaaaggaggaattttataaagcattttcaagtttctctaacactgaaaaggaattgctccatcgcctatttcttcaggtcattacttcgttgcatgaaaacttagaggatgggtttgagacggtctgtcttcaaacacaggcaggagctactcttgatgctgtgg

SEQ ID NO: 14468 - DNA, 618 bp, Glycine max
ctgggccatatcacactctgttagcatatggagaagaacactccattgttgacattgagaagagaagagaagcaggagaatgcaatgggggctttgtacatgtcagttatggagatactcttgttcctcttcatattcatatgctctctcacaccaatctcacagtcacagggattacatcaatctcccccttttctctttggcacttcttcttcttcgtaccagtatgaaggagcttatttgagtgatggcaaagggataagcaactgggatgtcttcactcacaaaccaggtagtatatctgacgaaagcaacggtgatgttgctgttgatcaataccaccggtatctggaggatattgatctaatggaagctataaaagtcaatagctaccggttttcaatatcatgggcaagaattctaccaaaaggaagatttggagaagtaaacttggcgggtatcaactactataacagacttatagaagcattgatactcaaagggatccaaccatttgtaacattattccagtttgacatccgtcaagaacttgacgacagataccgatgttgacttaatccccaatcacaggaagattttcaattatttgcagatatc

SEQ ID NO: 14469 - DNA, 872 bp, Glycine max
ctgcgcgtggcggagacggaggcggccaggaatatgattttacaggagttggaggggaatggtgaagagggggataaggtggatgcaggggagggtgctgtgcgtgttccggtggtgaggctgaggattggggaggtggcggaggcgagttcggtggtggtgttgccggtctccgcggcggaggagagggagattttggaggcgccgtatgagagtaggagccagggggtgtttggtgtggtggtggcggagaagggatggggaaaatgggtggtgttgccttcgtgggacccggtggttggtttaggaaaagggggtgttgcggtatcgtttcccgatgctagggttttgccgtggaaggtgaataggtggtataaggaggagcctatattggtggtggctgacaggagtaaaaaagaggtgggtgccgatgatgggttttatcttgtgaatgctgatggtgagggtttgaaggtcgagaggggttcgggattgaaggaaaagggtttcactcagagtttaggaactgtgttattggttgttagacctcccaaagaagaaaatgatgaattgagtgacgaagactgggagtgaactcaaatcaaagggaagggaatgattgagttgctaaagaatagcgataacaccacattatatatatatatatatggttttctcaattcaagaattgctagttaactcagctcaatcccctgcctttgttttttgtgtcatgcaaaataaggttctattaatttgggattacatgcaactttcttttgttttccatacttaatagaaggatttaatcgtttttgttttctctttgtacgttatattcatgtggttaatacagtgagtggtttcttttt

SEQ ID NO: 14470 - DNA, 426 bp, Glycine max
  unsure (1)..(426): unsure at all n locations
ggaagaggttcttccctttcatgtggtgtcctttgaaggccacttaaccctaattcgacgactgctcatccattagatgttgcattgcgtatatgttgcatctaagctacagtgtcagtgattcatatatttcttcatttgcttttaacagcaaaaggaatttaaagaagaaaagacttttaagacatttctaattttcatgtgctataatacatgagtcaaatggtttcaagtagttgtcattatatctcatttgtnnnnnnnnnnnnnnnnnnnnnnnnnnnnnnnnnnnnnnnnnnnnnnnnnnnnnnnnnnnnnnnnnnnnnnnnnnnnnnnnnnnnnnnnnnnnnnnnnnnnnnnnnnnnnnnnnnnnnnnnnnnnnnnnnnnnnnnnnnnnnnnnnnnnnnnnnnnnnnnnnnnnnnnnn

SEQ ID NO: 14471 - DNA, 774 bp, Glycine max
cttgaagctcctgtttcgggtagcaagaagccagcagaagatggccaactcataatacttgctgctggagataaggcattgtatgatgaagtgcttccagcatttgatgtactggggaagaagtctttctttctgggtgaggttggaaatggtgcaaaaatgaaacttgttgttaacatgataatgggcagtatgatgaatgctttctctgagggactcacactagctgaaagaagtggtttgaaccctggtactcttcttgatgtgctggatcttggtgccataagtaacggcatgtttaaattgaaaggacctacaatgctccaaaacagttattccccagcttttccgctgaaacaccagcaggaaggacatgagattagctcttgcccttggagatgaaaatgctgtatcaatgccagtagcagctgctgcaaatgaggctttcaagaaagccagaagcatgggggtgggagaccttgatttttcagcagttcatgagactttgaaagctcctgatcattcatcttgaccagatggatctctgaattgattaaaccactgttaggcaacagtgtgatgcgaaccatctatttatgaaacagcaatttgagcataggtcattattgtagaatcttgttgaaatgaatgaaccttgtaaaattttgctactttcactgcaagattaagctataaaatgcaagaacattggtttagttcaactgattgcagacttgtagtggacggcttggccatctgttcacagacgttaat

SEQ ID NO: 14472 - DNA, 564 bp, Glycine max
cctcgtccttcgctgcaccatcttcgtcaacctctggtccttcgataacgattgccgtataggattccctcatcgaagatactaaccgcatcctcgccgagatccgatccgacgccgacccctccgatcccgacgaccagcagttcttcaaccctaacgacaccttcaccctcggccccaagatcgataattgggacactgagcgcaagaattggcttcaccaaaaccccgaataccctaatgtcatcggaggtaaacctcgcatcttgctccttactggttctcctcccaagccttgtgataaccctattggagatcattaccttttgaagtcgattaagaataagattgattactgtagattacacgggattgaaattgtgtataatttggctcatttggatgtggaacttgctgggtattgggctaagttgcctatgattcggaggttgatgctgtcgcaccctgaggtggagtggatttggtggatggatagtgatgctttttcttactgatatggtgtttgagcttcctatgtctaagtatgatgagtacaatttggtg

SEQ ID NO: 14473 - DNA, 590 bp, Glycine max
gtagcatccaatggtcatttccccttcactccatcagagatatcaggaatgggcaccgatacatctatccttgatacggcattcacatctgatgtggcaagctccgtaggacttcaacttgcaccggacaatggaacggggatttccagatccctggatcaaattcagtggaattttagtctatctgacttaacagcagatttgtcaaacttgggagatctaggagctctaggaaactatcctggttcaccatttatgcagtctgattcagatattttgcttgaatcatcggatcaaaaggacatagtggatgacttctttgctaattctgagcccccaggttctccgtcggacgaggagaaatcttaagtggaggtgtgttgcatgtttcacattaattgttaggttagggaaaaattaggattaataaatgtcatctagcttacatggcatacaggtttactgttacctaagtgtaggcagcagcctgatttaatatcatcaggatgaagatagagaatgtcaattgttccctgtagtagcaaactagcaatcttttgcattcttttaagaaaactattatcaggatg

SEQ ID NO: 14474 - DNA, 1060 bp, Glycine max
gacgccgagatcagccaggagctgccggttgagaagggttccatttactcgctcacgttttgtgcggctcgcacctgcgcgcagtttgagtccatcaacgtctcggttctgcctgcgtcgcagacgatagacctgcagacactctataacgtccagggatggaacccttacgcggtttctttcaatgcggatgaggacacttttaggttggtatttaagaatcccggcatggaggatgaccccacttgtggccccatcattgacaacattgctattaagaagcttttcactcctgataaacccaaagacaacgcagtgatcaatggggattttgaagagggtccatggatgttcaggaacacttcactgggtgtgttgcttcccacaaatttggatgaagaagcgtcctcactacccggttggatagtcgaatccaaccgtgccgtccggtacattgattctgatcattactctgttccacaaggcaggagagccattgagttgctctcaggaaaggaaggaatcatatctcaaatggttgagaccaaaccagacaagctctacagcttgaccttctcattgggtcatgctgatgacaagtgcaaggagcctcttgctgttatggcctttgctggtgaccaggctcagaacattcactacactcccaattccaattccaccttccaaactgctaacgtcaatttcactgccaaggctgagaggactagaattgcattctatagcatatactacaacaccagaagtgatgatatgagttctctatgtgggcctgtggtggatgacgtcagggtctggttttctggctccaacgggcttcgtgggttgggcttaggaaggcttgtgcttgtaattttgggtctagttttggttctgatgtaaaagggtttcatttggtcttgctttatttattattaccattaccatatgcctaataggttgttttgggttgaggggggtgtaggtaaagtcacactctccatgtcaacaatgttgtatgtgaactggccttaagtttttagtttatagtttaagctatgac

SEQ ID NO: 14475 - DNA, 733 bp, Glycine max
aggaagtccttgagcttggaccagtttgtggtgccacagaccgtgtttgcgcttactgacaaaccagtttgctccttcctgggacatctccatgatgtgcttgacctctcatggtctaaaactcagcacttgctctcatcttcaatggacaaaactgtgcggctgtggcatctatccagcaagtcttgtttgaaaatattttcacacagtgactatgtaacttgcatccagtttaatcctgttgatgatagatacttcattaatgggatctctggatgctaaggttcgcatatggagcattcctgatcgacaagttgttgattggaccgatctacatgagatggtcactgctgcttgttatacacctgatggtcagggtgcactggttgggtcatacaagggtagctgccatttatataatacgtccgaaaataagttgcaacagaaaagtcagatcaatctgcagaacaagaaaaagaaatcacatcacaagaaaattactggtttccagtttgccccaggaagttcatcagaagtacttatcacatctgctgactcacgaattcgggtggttgatggtgttgatctagttcataagtttaaaggctttcggaatgcaactagtccaatttcagcatccctcacggcaaatggtaaatatgttgtcgcagcaagtgaggactcccatgtattcatctggaaaaatgaagctgattgcagaccaaacagaagt

SEQ ID NO: 14476 - DNA, 418 bp, Glycine max
cgctccaccacttattttttttaccccacccaccaattatcttctcttctcttccgccaaggtaatcccttccctctccaataatcaaacaatctcacttttttcttttgatacattcaatctcaaaaattgttttaaaaatggcaatggcagcccaagccatggctcaattccgtttctctcctctatcttctcattaccgttaccattaccagtacaattaccattccaccccttctttcccgtccccgcgacgtcacccccgcaaccaaaggctccacctttccttctccggcggagacagaggcggaagcggcggcggcggaggaggaggagattccgatggaggaggaggcgacaacgagaagaacgtgggattgggagttgtgggaatggtgttaaacggatggagatcgag

SEQ ID NO: 14477 - DNA, 1826 bp, Glycine max
gaatgacacaccccattgctacatagggctatatagcataaacatttgagtcttcattgcacaatgtcgacctcttccattaacgggtggtgcctctcttccatctccccagccaaaacctctctcaagaaggccacattaggcccttctgtcttcgcaaccgttagcactccttcttctccttcttcttcttcttcttcttcttcttcccttctctcattcaagacaggcctgtctttgctgcccctgcccccatcatcaccccaactgtgagagaggatatggcaaaggaatacgagaaagctattgaagaacttcagaaattgttgagggagaagagtgaactcaaagcgacagctgctgaaaaagtggagcagataacagcttctctagggacatcatcatctgatggcatcccatcatcagaagcctcagacaggatcaaagctggtttcattcacttcaagaaggagaaatacgacaagaatccagctttgtatggtgaacttgccaaaggccagagccccaagttcatggtgtttgcttgctcagactcaagggtgtgcccatctcatgtgctagatttccaaccaggagaggcctttgtggtcagaaatgttgccaacattgtcccaccatatgaccagtcaaaatacgctggaactggggctgcagttgagtatgctgttttgcatcttaaggtgtcggagattgtggtcattggacacagtgcttgtggtggtattaaggggcttctgtctttcccatatgatggaacctactctactgattttattgaggagtgggtcaaaattggcttgcctgcaaaggcaaaggtgaagacacagcatggggatgcaccttttgctgagttgtgctcacactgtgagaaggaagctgtgaatgtttcccttggaaaccttctaacatacccatttgttagagatggcttggtgaacaagacattgtcactaaaaggaggatactatgactttgttaagggatcttttgagctctggggccttcagtttggccttgcatcctctttctccgtatgaacatcaaccattatcaatgacctcatcttggttccctaagtattctcctatctaaaatgtactctgtaattaattgctcttgttatgaatgcatgcatgtgctgaatttcctaataataaaagtggatatggagatttctccacatatcaccctctattccaaattgaagttcaatccgttttgttcaaggaacgtgtaatatttttatggtctttcaccactgcatttttcttctttgttaggttaaagatgtggccaccattctccattggaagctataggggccatgcttagaggtcgtgtgtatctgcaatgaagaggcctagccaccttcatcaccatatgatatttataaaaatatatatatatgaaactatgaactgcgtttatgcatgtcggaaaatcttcttttgataagagtttggaaatcctcttgtaacaaaattttcattattcaaccttgatctttatatagcccgcaacaccgagagagatgacaaattaatcttagttaattatataagcaatgctaaattgtatgaagattcaaagttttaaatacagtcgcattgcagttagtcacgtttgttgaaatcatggcaaatcgcagataaatgtggtcgatgcaatctcaaaaattatagcagacagttaaaaaaacttgatgctgcagcctaaatcacggtcaccaccactgttttttaaaaccttgtacgaaattattattttggaccaatgcctttaattaattgactcaactataattt

SEQ ID NO: 14478 - DNA, 586 bp, Glycine max
caactttgaagatactcttgcaaattacgagaccgaaaacagtgatgttggggaagataccaggaacagacatatatagaaatcttgatcaatacaaggaagctgtgagaatacctggatttcttattttaagcattgaggctcccatcaattttgccaacatcacatatctcaacgagagaacgttaagatggattgaagaagaagaagacaacataaaggaacaattaagccttcgattcttagtattggaaatgtcagctgtgagtgctgttgacacaagtggaatctcacttttcaaggagttgaaagcaacactggaaaagaaaggtgttgagcttgtgttggtcaatcctcttgctgaggtcatagaaaagcttaaaaaagcagatgaagctaatgatttcataagagcagataaccttttcttgacagttggagaggctgtagcttcactttcttcagcaatgaaaggccaatcatcaaccattacagaaggggcacacacaattgtgtcacataattgataaaataagactgcaacatatataagcagaagttaaaagaaaaagaaaaaaaaatagaa

SEQ ID NO: 14479 - DNA, 648 bp, Glycine max
actctactgattttattgaggagtgggtcaaaattggcttgcctgcaaaggcaaaggtgaagacacagcatggggatgccccttttgctgagttgtgctcacactgtgagaaggaatctgtgaatgtttcccttggaaacctgctaacttacccatttgttagagatggcttggtgaacaaaacattgtcactgaaaggaggatactatgactttgttaaaggatcttttgagctctggggccttcagtttggccttgcatcctctttctccgtatgaacatcaaccattatcaatgacctcatcttggttccctaagttaaagatgtggccaccattctgcattggaagctataggggccatgcttagaggtcgtgtgtatctgcaatgaagaggcctagccaccttcatcaccatatgatatttataaaaatatatatgaaactatgaactgcgtttatgcatgtcggaaaatcttcttttaataagagtttggaaatcctcttgtaacaaaattttcattattcaaccttgatctttatatagcccgcaacaccgagagagatgacaaattaatcttagttaattatataagcaatgctaaattgtatgaagattcaaagttttaaatacagtcgcattgcagtt

SEQ ID NO: 14480 - DNA, 473 bp, Glycine max
gttggaggattctaaggcgaataaagaagcaaatccaacaaaaaatagcaactaattaatcctcggacagtgtaaaatcaaatttccacatttccgagagagaggatatggcaaaggaatacgagcaagctattgaagaactccagaaattgttgagggagaagagtgaactcaaagccacagctgctgagaaagtggagcagataacagcttctctgggaacatcatcatctgatggcatcccatcatcagaagcctcagacaggatcaaagctggtttcattcacttcaagaaggagaaatatgacaagaatccagctttgtatggtgaacttgccaaaggccagagccccaagtttatggtgtttgcttgctcagactcaagggtgtgcccatcttatgtgctagatttccaaccaggagaggcctttgtggtcagaaatgttgctaacattgtcccaccatatgaccag

SEQ ID NO: 14481 - DNA, 1137 bp, Glycine max
gacgtctagaccacgcgtacgtaaactcggaaatcggctcgagctcgagccgaatcggctcgaggaactcaaagccacagctgctgagaaagtggagcagataacagcttctctgggaacatcatcatctgatggcatcccatcatcagaagcctcagacaggatcaaagctggtttcattcacttcaagaaggagaaatatgacaagaatccagctttgtatggtgaacttgccaaaggccagagccccaagtttatggtgtttgcttgctcagactcaagggtgtgcccatctcatgtgctagatttccaaccaggagaggcctttgtggtcagaaatgttgcgaacattgtcccaccatatgaccatgtcaaaatacgctctaactggggctgcagttttgtatgctggggtgcatcttaatgtctcaaaaattgtggtcattggacacagtgcttgtggtggtattaatgcgcttctgtctttaccatatgatggaacctactctactcattttatttattatatagtgaaaaataaattgacttcctggccaaggttataacacaacgttcccgatgccccttttgctgacttgtgctcacactgtgagaaggaatctgtgaatgtttcccttggaaacctgctaacttacccatttgttagagatggcttggtgaacaaaacattgtcactgaaaggaggatactatgactttgttaaaggatcttttgagctctggggccttcagtttggccttgcatcctctttctccgttccctaagttaaagatgtggccaccattctccattggaagctataggggccatgcttagaggtcgtgtgtatctgcaatgaagaggcctagccaccttcatcaccatatgatatttataaagatatatatatgaaactatgaactgcgtttatgcatgtcggaaaatcttcttttaataagagttggaaatcctcttgttttaaaaaaaaaaaagcaaactacaaaaaaaaacacactcttaaaaaaaaaacaaaaaaaaagaaaaagagaaggacctctaaacatacgataaaaatgacagacgatctaaaatacaaaaggggggccccctattaaggactttttccacccgggaata

SEQ ID NO: 14482 - DNA, 334 bp, Glycine max
acaaagacattgtcactaaaaggaggttactatgactttgttaacggatcttttgcgctctggggccttcagtttggccttgcatcctctttctccgttaaagatgtggccaccattctgcattggaagctataggggccatgcttagaggtcgtgtgtatctgcaatgaagaggcctagccaccttcatcaccatatgatatttataaaaatatatatatatgaaactatgaactgcgtttatgcatgtcggaaaatcttcttttgataagagtttggaaatcctcttgtaacaaaattttcattattcaaccttgatctttatatagcccgc

SEQ ID NO: 14483 - DNA, 368 bp, Glycine max
agatggcttggtgaccaagacattgtcactaaaaggaggatactatgactttgttaagggttcttttgagctctggggccttcagtttggccttgcatcctctttccccgtatgaacttcaaccattatcaatgacctcatcttggttccctaagtattctcctatctaaaatgttaaagatgtggccaccattctgcattggaagctataggggccatgcttagaggtcgtgtgtatctgcaatgaagaggcctagccaccttcatcaccatatgatatttataaaaatatatatatatgaaactatgaactgcgtttatgcatgtcggaaaatcttcttttgataagagtttggaaatcctcttgt

SEQ ID NO: 14484 - DNA, 549 bp, Glycine max
cacatatcaagcaagctcctctgttttgtcattaaagcccatggctaattttgatgatcctagtggtcaggccagctcttccaattgttcggcttgccacaaccaagaatctatatctcaaagtcatataactgagattgttgaaagttctagaagaaaagcaagaatgatggttgttcaagctacacaggctatgtcaaatttaagaaagacagaaagtaaggttgaaagaattgaggatgcaataaattttatcaataaccagctttcagtggacgaacctactgcttcagccacaacatttcttcctacagattctttttctctggcttctcaggatcaattgactgccagcgtattaaaccccttggcaagttgtcatgtacaagatgctgaacttaacagttcatctgatcaaaatgaaatgaaaattccctcagaactcatatctcattgcctagctacattgttcgtgattcagaagtgtacggaacgacaattccccccagctgatgttgctcaggtactagattctgctgtcaccagttt

SEQ ID NO: 14485 - DNA, 1097 bp, Glycine max
caaacattcctctcttatctctagctatataataaacttttcctgtttccactcatcgatatctaacgctttagtcttgcaattgatatataattatcatccaaaacatgtcaccaacaaacaacacttttgcaatttttgtcatcttctgctgtgccatatcctttgccttcgcttctgaccctgacacacttcaagacctttgtgtggcacttccctcttcaggtgtgaaggtgaatggatttgcctgcaaggcagagtcaaatgtgacagaagctgatttcttctttgctggtttagccaagcctggagttatcaacaacacagtgggatctgtggttactggagctaatgtggaaaaaatcccaggacttaacacattgggggtgtcattctcaagaatagactacaaagctgagggacttaacccacctgacacacaccctcgtgccactgagattgtgtttgtgttggatggacaactagatgttggattcatcaccacagccaataaactcatctcaaagtcaattaagaagggtgaaatctttgtgttcccaaaaggtttggtgcactatcagaagaacaatggggataagcctgcttctgtgctttctgccttcaacagccaactccctggcacagtgtctatagctgcagctcttttcacttcaacaccaactgtgcctgatgatgttcttgctcaggctttccagattgatactaagaaggttgatgacatcaaggccaagcttgctcctaagaagacttaattttaagttgagcttaatcatattcaagagagagagcaagattcagtcttttaagtctactttccctatacttttccctataattcttgaagggttatgactcagtatcagtatcacttatggtgttacattttcctcattgatgtggtatcgagtattataatataattgtatcgcggaattatggtacatgttaagagtaatcaaaatttaattctatatactgtagaagctctcaacttttttgtgggtatatatattaatttcttgttttcgtggttcattgattttgtatacactgatcaataaaggttggacctttac

SEQ ID NO: 14486 - DNA, 464 bp, Glycine max
caaacattacactctcttctctctagctataaaaaatataccttttcagtttccactcattgatctaaagccttactcttgcaatcaatacaattaagtattattcaaagtcccaaccatgtcaccaacaaacacttttgcaattttggtcttcttctgctgtgccatttcctttaccttcgcttctgaccctgacacacttcaagacctttgtgtggcacttccctcttcaggtgtgaaggtgaatggatttgcttgcaaggctgagtcaaatgtaacagaagctgatttcttctttgctggtttagccaagcctggagctaccaacaacacattgggatctgtagttactgcagccaatgtggataaaattccaggactcaacacattgggagtgtcattctcaagaatagactacaaagctgggggacttaacccacctcacacacaccctcgagccactg

SEQ ID NO: 14487 - DNA, 648 bp, Glycine max
caatgatggttctttatgcaagaggaaaaaatgcagcactcacagaacttggccggacagaagtaattctgaattcattaaatcctacatggattactaaacacactctcatatataattttgaggttgttcaggttttagtgtttcgtgtgtatgatgttgatactcagtttcacaacatagatgtaaagatgcttaagctagaagagcagcaatatctaggtgaggcaacctgtgcactatctgagataattacaaagtttgaccgatcaatgacattagatttacacagaagagaagattctatcagatctacccagtcccaaaactgtggaaagctcttggtgcatgctgaagaatgtgttagttcaaagactacaatagagatgattctcaggtgttcagatttggaatatagggatctcttctcaagaagtgatccctttttattgctatcaaaagttgtggaaggtggtagtcatattccaatttgtaaaacagaagttataaagaatgatcacaacccaatatggaagccagtgttcttgaatattcaacaagtaagaagcaaggaaagtcctttgattatagagtgctataacttcaaatgcaatggcaaacatgatttgatggggaaagtgcaaaaat

SEQ ID NO: 14488 - DNA, 492 bp, Glycine max
cagctctcttattaatttgtcatctttcagcagatccccctagtttttcttccaacatgagtttcaaatctcccctgcaattgctcatcatcatccttctagttttttcatttgttgtctcttctgctgctctccaaacaacaagaaggcttttgccaaacaaagaaaaactctcaacccagattacatctgataagggtgttgaggaattgagaaatggagaagaaatgttagatatggcagaagagttcatggtagagggaaggattgatttggagagtaatgattatccagggacaggagcaaacaaccggcatgatccaaagacaccaggaggaccttgagaaattaatgcataaattttgtacagattatgagagctaagagaattatcaatggtactaaacttggtattggatttgcatattgttgattcttgctgctagaattaatatcccttcatccaatattttgtactggatgaatgtgttt

SEQ ID NO: 14489 - DNA, 685 bp, Glycine max
cccacgcgtccgaatttgtcatctttcagctcatcccccttgtttctcttccaacatgagcgtcaaatcccccctgcaattgctcatcatcatccttctggttttttcatttgttctctcttctgctgctctccaaacaacaagtacgaatgaaattaaataaattacttttcctatgattaacatggaactatttcatctcaattttttataattttcaaaattgattttcatgctatatgttgaaatttcatggtctgcaggaaggcttttgccaaacaaagaaaaaacccctacccaaattacatcagataaggttatatataatttagacccccacacgaacataatttaatcttatatatatatagtcctttgcaatatattccaaaattcaagagttcctctatctgcatgccgcaaaagggtccaactgagtacaattttttgtgtctatggttttcagggtgttgaggaattgagaaatggagaagaaatgtttgatatggcagaagagttcatggtagagggaaggattgatttggagagtaatgattatccagggacaggagcaaacaaccggcatgatccaaagacaccaggaggcccttgagaaattaatgcataaattttgtacagattatgagagctaagagaattatcaatggtactaaacttggtattg

SEQ ID NO: 14490 - DNA, 1145 bp, Glycine max
gttctaagatcgcgagcccccgctcgccgctacacgtccgactcactcttctattttccaactttacaatttcatttcagatagcttcttgactcgttactgactcactcaatggctgaccgagttcaccccagccactcgccttccgtttccgccgattcacaaccgccatcgcctcaagactcctccgtcgttccgaaaccgccgtcgccaccgtcaccggagaagccagtgcctccgcctggaacctacgtcatcaagatccccaaggaccaagtctaccgcgtccctccgccggagaacgctcgccgctacgaccaatacgctcgccgtaaacaccgccggagccgatgctgctgctgcttctgctggctcatcggaatcctcttcattctcgtcgtgctcctcgccatcgccgccggcgtcctctacctcgttttccgtcccgaggcgccgaaatactccatcgaaaacatcaccgtcagaggaattaacctcacctcgccgtcgtccgtggcggcgatctcgccggagttcaacgtcaccgtcaaggccgataaccctaacgacaagatcgggatccgttacttgaaggatagctccgccgaggtgttttataaggacgcgaggctgtgtaacggcgctctgccggcgttttaccagccgtcaaacaacgtgacggtgtttgggacggcgttaaggggtgacggaatcgaactgaggagcgaggtccgaagagcgttgctggaggcgcagaccaaacggagggtgccgttgaccgttaggattagggcgccggtgaaaataaaagtggggtccgtcaagacgtggaagataaccgttaaggtgaactgtcatatgacggtgaatgagttaacggcgcgggccaagattgtttctaaacgttgtagttatgacgtggatctttggtgaagaaaacggtgacaacagagggtgttttttttttttttcgtttatagataggaccgaaatattggagattatacaaattttcgtatacattaatgttacattgtagcgcatttattgatacgcgtacgccatgtatcttaggatttgatttggttttgtgcatatgtcatgtgatttttattgaatgataaagtaagtaatttcattgttcc

SEQ ID NO: 14491 - DNA, 1986 bp, Glycine max
cgattaattagcgacttcttcttcaaaaacacacagacacactacactttgtctctgttctgtgtgtgcgagaaatggcgatggcaatggcgcttcgcaggctttcatcttcaattgacaagcctctgcgccctctcttcaatgccggttccctctactacaagtcgtctttgcctgatgaagctgtttacgacaaggagcgacccggagttacatggccgaagcagttgaatgctccacttgaggtcgtggatcctgagattgctgatattattgagcttgagaaagctaggcaatggaaggggctagaattgataccgtcagagaatttcacctctgtgtctgtgatgcaagcggttggatcggttatgaccaacaaatacagtgaggggtaccctggtgcaagatattatggtggaaatgagtatattgacatggctgaaacactgtgccaaaagcgtgccctagaagcttttagattggatcccgctaaatggggagtgaacgtgcagcctctgtcagggtctcctgcaaatttccacgtttacactgcattgcttaaacctcatgaaagaatcatggcacttgatcttcctcatggtggccatctttctcacggatatcagactgataccaaaaagatatctgcagtctcgatattttttgagacaatgccatatcgattgaatgaaagtacaggatacatcgactatgaccagatggagaaatctgctacactcttcaggccaaaattaattgttgctggagctagcgcttatgcacgtctctatgattatgaacgtgtacgcaaggtttgcgataaacagaaagctatactattggcagatatggcacacatcagtggattggttgcagctggtgtcatcccatcaccttttgattatgctgatgtagttactaccacaactcacaagtcacttcgaggaccacgtggagctatgatattctacagaaaaggggttaaagaaattaacaaacaaggaaaagaggtattgtatgactacgaagacaaaatcaaccaagctgttttccctggactgcaaggtggccctcacaaccacactattactggtttagctgttgcgttgaagcaggccactactcccgaatatagagcatatcaagagcaagttctcagcaacagctttaaatttgcacaggctctgagtgagagaagctatgagcttgtctctggtggaaccgagaatcacctggttttggtgaatctgaagaataagggtattgatggctccagagttgagaaggtgttggaagcagttcatattgcagctaataaaaacactgttcctggagatgtgtctgccatggttcctggtggcatcaggatgggaacccctgctcttacttctagaggatttgttgaggaggattttgtcaaggtagcagagttttttgatgcagcagtgaagatagctgtgaagattaagggagagagcaaaggaacaaagctgaaggacttcttggccacaattgagtcatcttctacctttcaatcggagatagcaaagctccgccttgatgttgaggagtatgcaaaacaatttccaaccattggttttgataaagcaaccatgaagcacaagaattgagaaaagaaaattttccattaggtcatcccatggtcttactggcaagcaattcaacaagatcagttttcctgatccatggtagaggacgacaacatattttaaaaacaatgtcaaaagcctttatatgtaagaatccagaaaatcttgatcgttatgttgaaatgtatagatgcatatgtaataaaggcttcaaataccaaatttcttaatcagatgattgttgaacctatcccctataatggggttacaatcgatcgtaagtggttgtatctgctataaattcaactagcctcctcaattgcatagaatcctgctggatgctgatgtgaattattttacctcaatgatatttctt

SEQ ID NO: 14492 - DNA, 961 bp, Glycine max
tcaaaagataattgcaagtaatgacctttctgtagttgctgtcctcgtctgtggacatgtctatcatgctgaatgtttggagattatgacacctgatatcaataagtatgatccagcttgcccagtttgcacttttggtgagaaacaaactatgaagttgtctgaaaaagctctgaaagctgaaatggatttgaaggctagaaacaataaatcaaagaatcgggttgtggacagtgatattgatgatgattctgttgtgtttgatcactttaaagggagagggcttaaaggtaaaggtcctaggatagattccagttccagtgggagaagctcctttgggaaaccttttctgaggcgacatttttcctttggatcaaagggttccagatccgtgttagataatcaccctacaagaaagaagggtttcttttgggcaaaatctagcaaggaataatctgcttcttggttattcggaggttccactgttgatcttctgtgcatcctcaattggtttgtgaaaaggacaagatgcaattcatgatttcagagcttctgtatacactaatctgcgatttcaactggataagaggttgaagttactctgtaaagaagacatacagaagtataagatgaacatacagacgtaaaatatagtgtttgagaccaaggttctatctgcattgtacaggttgatttgtttatttcatggatatgattcttatatccaaatgatgttctgttgtccatggttcttttacgcaatgcaaaccattagcccttcggagtttctgaagttaggcaatggttttcacagattgataggcaataccaattatttcgatcgactctggttgcttttaatgacatagcagtttcaggatagcctattatcaaaccagtgtttttgtagttagcagattgaattacatacattattctgatgtgttgcctttaatgaaac

SEQ ID NO: 14493 - DNA, 339 bp, Glycine max
cggaactctgactcccatcttcgcgcttcgggttagggttagggttagggaattagggcttcgaacttcgacgcaatgtcgtccattaacccctcacgagctaccgctccctccgccttcgccacgcgccggccgtgggaggagttcttcgcgctccactcgttcacgcgcccctacaccctcggcgagaccacgctccgtgtgaagcgcaacctcggccacttccgcgtgaactacgccatggtcgtgctcctcttcgtgttccttagcctcctctggttccctatctccctcgtcgtcttcctcgccgtcttcgccgcgtggttcttcctctacttt

SEQ ID NO: 14494 - DNA, 1016 bp, Glycine max
gccacacaacctcatcaatttgtgtggcaaagaatttagatagtctagctctcaaatcctcttcttctcttccatccaatcctctcagactgatcttagacgcaaacacatcctaatcacaaaagcggtgaccatggcaaacatgattatggcttccacaaaacctctggttccagtctgcaccagttcccgttcccccacaccaaaactccccattctccaaatttcactccccaaagccccaaccttgaaactgaaactcccaatttcaaagccccagatgctgtccctccttggagggatagcaccactggtcttggccagaccctccctcgcagaagaaattgagaaagcagcactctttgacttcaacctcacccttcccataataatggtggagtttctgctgctgatggttgccttggacaagatatggttcaccccacttgggaaattcatggacgagagggacgcggcgatcagggagaagctgagcagcgtgaaggacacgtcggaggaggtgaagcagctggaggagaaggccaatgctgtcatggcggctgctcgaggccgagattgcggcggcgctgaacaccatgaagaaggagacgcaggctgaggtggaacaaaagattgctgaggggaggaagaaagtggaggctgagctgcaggaggctctggctgccttggagaatcaaaaggaagaaaccatcaagtcccttgattcccagatcgcagcccttagccaggagattgttaataaggttcttcccactgcttaatatgtctatgtaattttcatttcaatcccctcaccaaaggattcatcagtttctacttttggatgggtctattctgtaatcgcaatacttttcaatgtaaaatcagagattcaggttatgaattgggctcccattgttttttttcttaaagaatatagaaaacgtaggaaaattccccaccccagctatgtgcatctcttctcgttatatgctatttacgtagtaatttttttg

SEQ ID NO: 14495 - DNA, 490 bp, Glycine max
  unsure (1)..(490): unsure at all n locations
tcagatccttccgacactacacaaccccctccgatttgtgtggcaaagaatttagatagccttgctctcaaatccaaccctctcagactgagcagagacacacacacacatcctaatcacaaagcgttggccatggcaaacatgattgtggcttccaccaaacctctggttccagtctgcaccagttcccgttcccccacacccaaagtccccattctccaaatttcactccccaaagccccaaccttgaaactgaaactcccgatttcaaagccccagatgctgtccctccttggagggatagcaccactggtcttggccagaccctccctcgcagaagaaattgagaaagcagcactctntgacttcaacctcacccttcccataataatggtggagtttctgctgctgatggttgccttggacaagatatggttcaccccgcttgggaaattcatggacgagagggacgcggcgatcagggagaaac

SEQ ID NO: 14496 - DNA, 708 bp, Glycine max
ggagtggccagcgtaagaagaatggcttctcaaagtttgagtttaccaccaacacatattccttacaataggataattgggaagcttgattccaagtttttgttgtggccttcttgtgctcatatcaaacccagaagaatttctacctcaattcgggcaatgggttcctccgcttcttcccactcccagtcacaatatgcagacagcgttgaatctgaagcaggagctgatactattgactataaatctttaaccgatgaagagtggaagaagcggctcacaaatgaacagttctatattactcgtcagaagggaactgaaagagctttcactggggagtactggaatactaaaaccccggggatttaccattgcatatgttgcgacacacctttattcgaatcatctactaagttcaatagtggaactgggtggccatcctattaccagacaattgggaaaaatgtgaaatcaaagttggatttgtcaattattttcatgccgcgccaggaggttctctgtgctgtttgtgatgctcatcttggacatgtgtttgacgatggtcctccacccacgggaaaacgtttctgtatcaatagtgctgcccttaagctcaaaccaaagcagtagacagtgaaatacctacctatcactcggaagcagatgggataatattctaaatatgtgatatactttgtgctgtttttc

SEQ ID NO: 14497 - DNA, 885 bp, Glycine max
  unsure (1)..(885): unsure at all n locations
aagggagttaacttgtgaagaggctattggtggaagttcctacaaaacagcagcactatggctctgtttatgaagttctttaattcttcttcgacaagcttaatgctccgtttcatattatcgttagttctatcattcagagcgaaggctgtggtgaaactaccgccaaatattaccattcctgcagtgatagctttcggagattccatcgttgacccgggcaacaacaacaaggttaaaacactggtcaagtgcgatttcccttcttacggtaaagattttgagggagggatcccaaccggtcgattttgcaacgggaaaattccatcagatttgctagttgaagaactgggtattaaggagcttttacctgcttatttggatccaaatcttaaaccaagtgacctagttaccggagtctgctttgcttctggtgcttccggatacgatcctttaacgccaaaaatagcgtcggtgatatcaatgtccgaacaactagacatgttcaaagaatacataggaaagcttaaacatattgttggagaggacagaacaaaattcatcctagccaacagttttttccttgtggtagctggaagtgacgacattgccaacacctattttatcgctcgcgttcgacaattacaatatgatattccagcttacactgatcttatgctccactccgcttctaatttcgtaaaggaattatatggacttggagcacgcagaatcggagtactgagtgcaccaccgattggatgcgttccatcacagaggactctagctgaggtttccaaagagagtgtgcagaagaatacaattacgccgccaagttatttaactcanaattatcaagggaactggacgctcttaagcataact

SEQ ID NO: 14498 - DNA, 893 bp, Glycine max
aatgtcactaccttgtgtacgagttcatgaaaaatggaagcttgcaagacactctgagcaaggtcgagaggggcgagagcgagttggattggttgtcaaggcacaagatctccctcggtgtggctgctgggcttgaataccttcacatgaatcacaacccacgaatcattcatagagatctcaagcctgctaatatccttcttgacgatgacatggaggcaagaattgctgattttggactcgccaaggctatgcccgattacaagactcacataacaacctccaatgtggctggcactgtgggctatattgctcctgagtatcatcagatactcaagttcactgataagtgtgatatttacagttatggagtgattcttggtgtattggtcattggtaagcttccttctgatgatttctttcagcacactgaagagatgagtttggtcaagtggatgaggaagattttgagttccgagaatcccaaggaggctattgatacaaagctgctggggaatgggtatgaggaccagatgcttcttgttttgaagattgcatgcttttgcactatggatgatccaaaggaaaggcctaacagtaaggatgtttggtgcatgctgtcacagattaagcactgactctgttggattactaatgtgtaccatatttgtgccaaagtgtgtttgtttaagaatataatcttgcttcataaggtaaattatgaaccgatgcaatattgtttccttcatcataccttgctgaatttccttggaaaatagaaagaaaatttcagcactgcgatgatctatctataatctagtctgtcacaactagtttccactttacatgtttatgcattcaccctgcaaataaaatagttttatgttgttacc

SEQ ID NO: 14499 - DNA, 471 bp, Glycine max
gactttaagctccgagaatcccaaggaggcaattaattcaaagctgctggggaatgggtatgaggagcagatgcttcttgttttgaagattgcatgcttttgcactatggatgatcccaaggagaggcctaacagtaaggatgttaggtgcatgctgtcacagatcaaacactgaatctgctgtatgtttaagtatgtgaaatattgtgtaccatatttgtgccaaagtgtgcttgtttaagaatatagttgataactagaggatcaatgttggttcatagggtaaataatgaaccgatgtaatcttgtttcctttatcacggattgctgaatttctttggaaaaagaaaaattcagcactgcgatgatctatgtataatctagtctgtcacaactagtttccactttacatgtttatggatacaccctgaaaataaaatagttttacgttgtttcaaaaaaagaacgaaa

SEQ ID NO: 14500 - DNA, 551 bp, Glycine max
  unsure (1)..(551): unsure at all n locations
gtgataagcacgtgaagaaggacagcgctacgangaaacaaaccaaccctgaaatccaaatccgaatccaaccctctccaacgtcactctcaccctctctctgttttctgtctcttctttcttttatcacacaacaacatacacacgccctcttcttcttccttgcatggactaactcagagactaaaccataccaaaaaaaacaacatgtgttccgcagagaaggacgggatcatgctcttcggcgtgcgcctctccgtcgtggataaccaccccacctccttcagaaagagcgctagcatgaccaacctttctcagtacgagtctccaccaccgcacgatcccaacgcagggtatgcctcagacgacgtcgttcacccctcccgtcacacccgcgaacgcaagcgaggggttccgtggacggatgaagagcacaggttgttcctgctgggattacagaacatcggtaaaggagattggagagggatttctagaaacttcgtgaagactcgtacgcctacacaggttgctagtcatgctcagaagtactt

SEQ ID NO: 14501 - DNA, 533 bp, Glycine max
cttcttatccatatgcattactatttttccttgcaacaatgacaagtatccgatcctttcaaagtgctatatcaaaacctttgctatggaaactcacaggctttgggtcaagcatagtagggtttagctgttatgccctcagcccctctttcctatgcttggtcaaagaatggagcccgaagaagatcgtggcgtacagcgtggtaagctcacttttatcaatctccatgctcttcgttaaaaaatggagcttgggacgacacgggaagagtttgttgctgaaaggacatgtggtttttgtggtattagcgcttaccaatctgtggtccttctgggaagaccgttgccaacaagggaaagtggaaaacaggttccggaaaattatgaacctcgcttcaattggagcatttgccttgatggccttgagtttgtcgcggcaacttcaaattggattcgatgctggcgtctccaacttcttggttggatgcttcttggtgacgttgatgaagatgaaccttaagttagctccactt

SEQ ID NO: 14502 - DNA, 514 bp, Glycine max
ctgctcagaagataagggaagcaattgaagtggttacatatgagtatatatggtcacagatagatgtgattagaggtcaggagcaactggataatgcaagggctttgttctttggacaaaatgaaggaaaggatgccttgttttatgggaaccctaaccttcttattacaagttggatgagcatgccaatgcacgaagcagattttggctggggaaagcctgtgtatttaggtctaggaagtgtatctacacaagatagggcactgattattcaaagccctgatggtgacggctctattattctgtccatacactttcagatggaacatatgcagcttttcaagaaatatttttatgaagatatgtgaactatattcacatcgctactatcttgaacttcttgtatgggagcttaatttacgtgtgatctgcaatttctcatgtttaataaatttagttaaccatgtgggttaactataagcttgaatatgactgattagctataattttgttc

SEQ ID NO: 14503 - DNA, 839 bp, Glycine max
acgaggagaaaggtgaattttttgggagcaaataagcaccaaacccatcaaattaagaatcaaatacagcaagagaaaatagaacaaccaccagagacatttttcacttttggatcctcaggccttgaagttaaaatagaggacatggaccacaaggaggacatgttcccatcattttgcttttcttctccattaaaagaagggtcagaaaatggggacaacaacagccttttctcatataccatgatggagaacaacttaatggaaaacttctctcctacattcatatctccaacaagttcagatatagaatcaaacattttctaccactgggggagcactggaataggccaaagtgtgcaaagctcagagtctgatatcactgatatagtttcagcaccaacttcagtcaccaattctccaataatggaccttgatttcttcgataagatcgatttcgacacagatttccctttgagcaccatggaactttgcacttaataaattgtccccacttctaagtttacagcagttatgtgttttctatccggattacctgtgagttttgtagatcctgactagcaccataaccgagggaaggaagtctataataatcaccatagatcatgtccataaatgaagacaatgaaaaacttccctcttgtgctaattaagagagttttcatgtacctaggctgcaaatgtgaaaataatttgtaggttgtagcttaatttggtgcatgtttggtttgcaatggaaattgttgtaatgcgcgttccaatgtagatcttatggataaaagtaaaatcaaatcccaagagttctaatcttttagcat

SEQ ID NO: 14504 - DNA, 279 bp, Glycine max
gtagatcctgactaccagcataaccgagggaaggaagtctataataatcatagatcatgtcaataaatgaagactgtgaaacttctctctcgtgctagttaagagagttttcatttacctaggctgaaatgtgaaaataatttgtaggttgtagcttaatttagtctcttgtggtttctcacttcagttgtagtattgtcatttgtcgtgcttcaaacagaacaacaaattgtgaaataaatgaattttgtctaaaaaaaaaaaaaaagggcggccgcc

SEQ ID NO: 14505 - DNA, 544 bp, Glycine max
  unsure (1)..(544): unsure at all n locations
ggatgataatagtgcacaatcaagttttgggtccgttgagcagggacagacaacagatcagctgaagggaaaacctgggaaatctccattttctgcatcttcacttgcatttgcttctagcagccttatctctgctattccatccaagctgcaactatcattttcattctggaacaaggggagatcaaaaccgaagccagttcctcccccatgcattgatagcttgagtaatatgaaaacagttgattcagtcaatttccgtcctgtgaccagccagaacggtagcttgaaggctgtgggcaaaacacatgggaaagtcaagacgagaagctctttaggtgggaaatttcttggggtgcactctcagactcgatcacatatgttggcttctgcaaattccagtagcaacttgaaggagccaagagtgagcagtgacatgtggttgcatgcagcaccagagagggatttagacagcatactgtctntgcattcatcattgtattattttgaacagcatagagagattatttggtgatcatgtact

SEQ ID NO: 14506 - DNA, 569 bp, Glycine max
gtcttcctgagggttactccactaaagtaggtgaaagaggagtgcaactatctggtggccaaagacaaagggtagccattgcaagagctgttctaaagaaccctgaaatcttgctacttgatgaagccactagtgcacttgatgtcgagtcagagcgtattgtgcagcaagcattggacagattaatgcagaacagaacaacaattatggtggcacataggctatccactataagaaatgcagaccaaatctcagttttgcaagatggaaagataattgatcaagggactcattcaagtcttatagagaataaaaatggagcatactataaattagtcaaccttcaacaacagcatcaattatagcaaaatggaagaacataccacatgaacatggattttttatactgtgatttttcattcttttagtttttttcccccacgtttatagagaatgatgtgggttgggaagcttatgtcggatcggaataatttcatatactatatatatgtttgtaagtgctattaaaaagtaaaatggcttcatgtatttagtccttgaccctcagt

SEQ ID NO: 14507 - DNA, 524 bp, Glycine max
ctagttttgagttgaagcatatagctttggggtgttcattgtgtgttgccactctcctctcttgttgtacacttgttccttttggtttgcagaaaggaacatggaagctgtgtgtgctttttctgttggcacacttcacatcccaacagcacatgaaacatcaaactcctttaggaaatccatattcttgagcaaccaagtggcttcaccagtttcattggtttttctcaggggcagttcaaaatccaagcttttaactgccttgtcaccccctccattgacagaatccagtaaccaacctgaggctgagccagaatttgaaagtcatgcagagaaatttgactggtactctcagtggtaccctttgatgccaatttgtgaccttgacaagaggaagccacatgggaagagggtgttgggaattgatgtggttgtgtggtgggataggaatgagggtgcttggcaggttcatgatgatgcttgtcctcatagattaccacccttgtctgatggaaggattgatc

SEQ ID NO: 14508 - DNA, 1129 bp, Glycine max
atttaattatcaagtgggaggaaatgttgtcttctgatggatcatgtgaaattgacgtatggcctttccttcaaaatttatctagtgatgctattgctcgaacagcatttggaagtagttatgaagaaggaagaaaaatatttcaacttctaaaagagcaagcagaacttgcaatgaaagctataatgaaactttacatccctggatggagatttctacctactgctaaccataggaggatgaaggaaattgatagagaaataaaagcttcacttacagatatgattagcaacagagagaaagcactaaaggcgggtgaggctaccgagaatgacttgttaggtatacttttggagtcaaatcacaaggaaactgaagaacatggaaacagaaacagtaagaatgttggaatgagtcttgaagatgtaatcgaggaatgcaagctattctactttgcagggcaggagaccacttcagttttgcttgtttggacaatggtgttattgagtaggtaccctgattggcaagcacgtgcaagggaggaagtcttacaagtctttggcaaccaaaaaccagattttgatgggctaagtcacctaaagattgtcaccatgattttgtatgaggttcttaggctatacccaccagcagttggccttaatagaaatgttgacagagatatgaaactcggaaacctatcattacctgctggagtgcaagtttccttaccaacaactatggttcaccatgaccgcgaactctggggtgatgatgtgaatgaattcaaacctgagagattttctgaaggagttctgaaggccacaaatggcagagtttcattttttccatttggatggggtcctagaatatgcattggacaaaacttttccttgttggaggcaaagatggctttgtcaacgattttacaacatttctcatttgaactttctccagcttatgctcatgctcctgttacagtatttactcttcagccccaatatggtgctcatgtcattttacgtaaagttgaaatataaaaaataatagtaacaagccttgtttgatttgcatttcagaattgcaaattttataaagcaatgataatagcagtttgctacctagatcgcga

SEQ ID NO: 14509 - DNA, 428 bp, Glycine max
aaaagagaaaattgaacttacactgaaaatgagagctcgcagggcaggacaccacgtcagttttgcttgtttggacaatggtgttattgagtaggtaccctgattggcaagcacgcgcaagggaggaagtctctcaagtctttggctaccaaaaaccagacttttgatgggctgagtcgcctaaagattgtcactatgattttgtacgaggttcttagattataccctccggtagctgggatgactcgatctattgaaaaggatgtgaaacttggaaccctaacattaccagctggagtacatgttttacttccaacaattttgattcaccatgatcgcaaattctggggtgaagatgctaaacagttcaatcctgagagattttccgaaggagttctaaaagcaacaaatggtagggtttcattttt

SEQ ID NO: 14510 - DNA, 748 bp, Glycine max
gaacctccgaacgcaggagagccaagtacaggttggtgcacgttgttcgcactcacaaaggcgctgatgacaaagcctaccgttgcgtttttgaagaggaagacagagaagggaaagtggggatttcacttcagaaggatctcatggctattgcaggtgaggctctcaagtctaacattactaccatgggtcctctcgtgcttccggcttcggagcagttgctcttccttctcactctcattgggaggaaaatcttcaaccccaaatggaagccttatattcctgacttcaaacaagcctttgagcacttctgcatccacgctggtggacgtgctgtgattgatgagctgcagaagaatcttcagctttctactgaacacgttgaggcttctagaatgacccttcacaggtttgggaacacttcgtcttcttcgctgtggtatgagctcaactacattgagtccaaggggaggatgaagaagggtgatagggtgtggcagatagcgtttgggagtggctttaaatgcaacagtgctgtgtggaagtgcaacagaagcattaagacaccggttgatgggccttgggctgattgcattgatcgttacccggtcgatattcctgagatcgttaagctctaggatggagaattgttcaagaacaagaagataattgcttattttatgaaaaaaaaaaatagatgagttctcataacccttctctatctgctcaccgtagccgtaccacaaat

SEQ ID NO: 14511 - DNA, 422 bp, Glycine max
cactctcaagtggaccttcatttttcatagttacgatcttggtctaacccgcaatataaatatagcagtcgggcacatctgatggaacttgaatgctggtgaaagcacaatacaatatctaggagtttctcggataacttatatcttaaagatcctcaacctcaaccagaagatagaatggagtcgatttcggacccaccctttcacgaggcatacaagatcctgtttgacaagaccagaaacggaaacaattttgaagagcattaaggagctcttggcggtggccgaggaatgcgacctttccggtgatcgatctgagccgtttagaacagagcgatgaggttgtgagggaagagtgcaagtcacagatagctagggcttcgcaggagtggggtttcttccaggttgtaaaccatgggatt

SEQ ID NO: 14512 - DNA, 468 bp, Glycine max
cgggaacgccgttgccgttaacgattcgtccaacgtgcttctcttcctcctcctcctcctgcgagatcgaaatcgaaaaccccaacacaccggcatcggaggaggaagaagggatattgaagaaattgaagagtaacgaggtgtttgagcaagaagaaggcgcaatcgcgctgaggaagatcacgaggtgcaaagaggaggctagggtttcgctctgcacgccgcgggtgctgttagcgcttcgtggtttactcgcttcccgatacggcgtcgttcaggtcaacgcagtggcgtctttggtcaacctttctcttgagaagcagaacaaggtgaagatcgttaggtcagggtttgtgccgtttttaatcgatgttttgaaggggggattgggtgagtcgcaggagcacgctgcgggcgcactttttagtttggctttggacgatgacaacaagatggcgattggcgttc

SEQ ID NO: 14513 - DNA, 440 bp, Glycine max
  unsure (1)..(440): unsure at all n locations
gatgcataatgaggagagaaaacgtgtcccctgggttgcgtgcgtcgtttgacagcaaattcgtgggttcagcacggtcagtgctatcggttcggtggccttaacttaagaataataacaaaacaaacacagcctaatacccaatcctcactctactttccccatttatctgtcaaacgcgcagcaacaagaatcaaaatccaagggcgagctttaaaccatttcagggttttgttcttaagctttctaaccccccaacctactcctttgtagttaccaatttcattttagcgttttttttctactcaaaattagaattagaattacaacctcggtaaaatagaattactgggtatgtgtgtgctacttgcaactttgagaactcttgtgattttttttcccataaggtatntgtgaaaatgctgtaatgaggaaaattg

SEQ ID NO: 14514 - DNA, 498 bp, Glycine max
gagaaaacgtgtcccctgggttgcgtgcttcgtttgacagcaaattcgtggtttcagcacggtaagtgctatcggttcggtggccttaacttaagaataataacaaaacaaacacagcctaatacccaatcctcactctactttccccatttatctgtcaaacgcgcagcaacaagaatcaaaatccaagggcgagctttaaaccatttcagggttttgttcgttctggtacgagttttcttatttctgatcatctgccttacatcattaacaaacaacaatgaccacccctttccctcgctcactgtcctgtgtagccaacactgctcttcaccgcaccaaatccgagcagttaactcattttgtttccaacacagtgacacggctcctctgctcttcaactcagccacaacacgaaaaccctctcagggaacaagcacagacaccacctcaagaatctctccatgatgagaacaaacaaagccatgagcccgaaga

SEQ ID NO: 14515 - DNA, 254 bp, Glycine max
ttaacgcgcagcaacaagaatcaaatccacagacaagcttgaaaccatttcagggttttgttcgttctgatacgagttttcttatttcttatcatctgccttacatcattaacaaacaacaatgaccacctctttccctcgctcgctgtcctgtgtagtcaacactgctctccgccacaccaaatccgtttccaacgcagtgacacggctcctctgctcttcttcaactcagccacaacatgaaaaccctgtca

SEQ ID NO: 14516 - DNA, 472 bp, Glycine max
acaggggcaacaatgtctgatgatgagaatgaccaagtggatagtgatgccaatctcttcgattgtagttttgatggggcagatagcatggggtttggtcctcttgttcctacagagagcgagaggtccctcatggagcgagtaagacaagaattaaagcatgaactgaaacagggttataaggagaaaattgttgacataagagaggaaattttgcgcaagagaagagctgggaaacttcctggtgacacaacttctgttcttaaagcttggtggcaatcacattccaagtcgccttaccctaccgaggaggataaggcaaggttggtgcaggaaactgggttgcaattaaagcagattaataattggtttatcaatcaaaggaagaggaattggcacagcaatccttcaacttcaactgtcttgaagagcaaacgcaaaaggtattcccatcaaaactagtaatttgtaa

SEQ ID NO: 14517 - DNA, 591 bp, Glycine max
tctcgagcgaatcggctcgagcaaaaccaaaaccaacttaactccttcttcctcttcttcaccaacgaccaaggtggagagtactggttcccaaaagaagaaggaggagcttagaaaagtgttctccactttcgacaaaaacggcgacggattcataacgaagcaggagctgagggagtccctgaggaacatcagaatcttcatgacagaacaagaggtcgatgatattgttgtcaagtacgattccaacggggacgggttgatcgattttgaagagttttgcttgttgactagtgagtgtgtaggaggggatcatcatgagaaagagggtggtgttatgggaaatgaagaggttgatttgaaggaggcttttgatgtgtttgataaagataatgatgggcttatttcggtggaggagttggctttggtgcttacttcgttgggactaagggaagggagaaagattgaagagtgcaaagagatgattaagaaggttcatatggatggagatggcatggtcaattttaacgagttcaagagaatgatgatgaatggaggaaagcttgccttcaacgcatagtgattcactac

SEQ ID NO: 14518 - DNA, 598 bp, Glycine max
tgcttcgggaaatatgaagaatttttattaatctaggaggagccaaaggttggtgagtgtagcggtgatgggtaacaagatccctctatatggaagtggtgctagcctaagtagcacaacgggtgtgcccactgtgtctgtgctattgaacctcaactttgtgctacgatctagggcttatgtgctcgggaaattggtgaagcctaaatactacaaaaccattcaatgttccataactttggatccaaaaaagctcaatgctgcgatttccctcaagaaatcttgcacatatgattgatacatgtgacggagagcaagtgggaattatttgaaaaataataataataataaaaatattgttttatgattaatgtgttcttttgatgtgaggaaagaaatggtacagccagagagcagtgtgccaaggacgcgtttttgggactgcttgggctgcccaaattgcctcaaattgcggtaagacaaagacatgcatgttgggttcggtagagaaatgtaatcttgtgattgatcatttcatgaagacatttttttgggttgattatttgtccgattttaatttattaattgttaaagtgac

SEQ ID NO: 14519 - DNA, 548 bp, Glycine max
aaagtatctccaatgttcaatcttcaagttgctagagttagtcccgggtgcattgttgtaacaatagttcattgtgttgtgccttcaaaattcagagtttgcttgcttgtaactttactcaattttttaagccctgctttggttctagcaatggataggaaatccagagagataactcaccctttggcttgaatgccatatttgagaattatggtccacgtgttatctaattaatgtgataatttgtctgttgtagcagtgtaaaatatcaacgtcaagctgtaacaggttgtcctccgagtccccttttccttttgtttagttagcatatgaaagaattcttaggctaaacctttgggagcggtagtaacaaggattagataccatgctatatgtacatatcacctttattagtaagcaattgtttgtgtacatctttattttgttcccagtttcatctgttttcttttatcatttcacgcttttcgttctgttgcgtatttaaattttaaacaagcgatgtaataaatggggtgttctatgttttc

SEQ ID NO: 14520 - DNA, 275 bp, Glycine max
gggttgatttgtatcttcactggcttattcgattcttttcttttgatgacatgtctgacagttcattggatatagaaatatctccaatgttcaatcttcaagttgctagagttggtctcgggtgcattgtcataacaatagctcattgtattgtgccttcagaattgcttgcttgtaacttaatcttttatgcactgctttgaacctagcaatggatatggtactccagagagataactcaccctttggcttgaatgtcatatttgagaattatg

SEQ ID NO: 14521 - DNA, 1040 bp, Glycine max
tccttattttatgctgccggtggccccattggggggggtcctcctgggagttacggggggaccccaatgccatggggaccccctgttcctcctccatatgctccctatgctcctcctccacctgggtcaactatgtatccacctatgcaagggcaacctatgcctccttatggggttcaatatccccctcctgtgccgactggccctcccggtgccccatcccagcctgcaacttctagtgaagtgcagcagagttaccctcccggagtgcagtctgacaacagtacctctactcagtctgtaccagctaatgtgtatggtaactcgggacctccaatgccacctcaacctacatatcctgcatcttatggatatccaccttactataatgcagttcctccaccacctcccccttctgcccccatgcctgtctcaacttcagatcaatcccacaacattgcaaatgtgccttgggccagtaattctctcgtcccacctcctgcttcatcagcagacaatcaatcccagagcattggaaatgtgcctagggccgcaaatccatcagtgcctcctcctgcttcatcagctgattcagagtatgaaaagttcatggcagagatgaaatgattttgttcaattttggttcagtgttccaaaaggcctgatgtttcttggagctcttgtgaacctgatttctaacctcttgccatgtctttcttcgaagtttgggactcacttctttaaccttgctgtactgttatgaaatttgcagagattcgggctagaagttggtagcagtcttcatacagcagaagtcaaaagcatattatagttatgattattattaatcatttcttgtcgtgtaggacttaatactgtctgaattattttctgtggcattttattgatttacacagtaatgtctggttgctaatgtttcctttggaagtttgtttgaactttatggcagctggttcctggggtttcatgctgatacttttctgttgtcacagttgttgtagacttttacttcattcact

SEQ ID NO: 14522 - DNA, 618 bp, Glycine max
cattaatttacatccttaaacaaaccttcccctacttctctcaaattctcctctctcttcataaacccttctcattattttcagcttaatttcctcactagtcattaatggcaaaccaccaccttgcagcgatgctgctgctagtgtttctgtttctgacatcatcatctgctaggcccttgaatgatgaaaataactatttcagccttgcagccactgagccttctttgaacctcgcgcttcccagcgacagggtggtggtgccggaggagccagcaccccgacacgtgtcaggatgtggccacacgagggtcgccggaatgctggcgttgccgggaacgagactcgccggagggaaatacgggccaatgatcctgaacatgcttccgaaggggccggttccaccatctggaccaagcaaaggaaccaacaaccttaacaactagtttttgttgaatgtttctgtatcgggatcgaacccagtccgtgtgaccaaactataagacaattatcatcggatcctgatacaacctcaacagctagtcattcatgattaatcaaagatagtggatacatcacatatacgtcaattgcagccgcaacccattcactcaccgc

SEQ ID NO: 14523 - DNA, 1842 bp, Glycine max
cctaccctaaatttccatgtattccaacacaagacagacactgatttatgtagatagataaccataaccataccatagcttacaaattaagctccgctcactctctttctctctagaatccatggcagccattggtctgaatggcgtaaaggttgggacgacgtcgtctcaggcgtaccttgaaggcaaggcagtgaaggagacgagagcgttgatggctgaactgtgtcgccatttctacacccttggatgggtgacagggacaggtggcagcatctccatgaaggtccacgatgactccatccccaggcctcaacagctcatactcatggccccttctggtgttcagaaagaaagaatggagccagaggacatgtatgtgttatcacacagtgggtctgtcttgtctgctccatctcctaaaccttggccgcacaagcctcctaagtgtagtgattgtgatccacttttcaagaaggcatatgaaatgcgtgatgctgcggctgttttccacagtcacggaatagagtcttgtctcgtaacaatgatcaatccattatcaaaggagtttcgaatcactcacatggaaatgataaaaggaatcaaggggcatggctattatgatgaacttgttgtccccataattgagaatacggcctacgagtatcagctcacggaatcttttgctaaagctattgaagactacccaaaagcaacagcagtgcttgttcgcaaccatggggtatttgtctggggagactcatggatcagtgctaaaacacagtctgagtgttaccattacctctttgatgctgctctcaaacttcatcaaatggcattggactggtcaactccaaatcatggtccaatacaaagtgcaagaaggggtctaagtattgctggggagtcaaatgtgtcagttaaagcaaggaaatctaatggtgacagtgatccattgccacgttgcgttgttcttgacattgaaggaactactactcccatatcatttgtttccgaggttctcttcccatatgcccgtgataatgttgggaggcatctatctctaacatatgatacccccgagaccaaagctgatatcaagttgcttcgttcccaagttcaaagtgaccttgaacaagggattgcaggtgctgtgcctatccctccagatgatgctgggaaacaggaagtcattgctgcacttgttgccaatgtggatgctatgattaaagctgatagaaagatcactgccttaaaagagttgcagggtcatatatggaaaactggctatgagaataatgaattggagggaatagtttatgatgatgtaccagaagctctagaaaagtggcacgccttgggtataaaggtatacatatattctagtggtagcagattggctcaaaggctaatatttggaaaaaccaaccatggggacctaagaaaatatttatctgggttttttgacactacagtggggaacaaaagagagacacgcagttatgttgaaatttctgagtcactcggtgttgaaaaaccatcagatattttatttgtcactgatgtatatcaagaagccacagctgcaacggctgcaggtttggaggtgataatttctattcgacctggaaatggacccctccctgacaatcatggcttcaagacaatcaaatccttctcggagatctaagaccaattgcagtcttctggaatgacattaaatgtgttatcattactaagaatagtgtaacgttcacttcttaattaaaataatgtaattaaaaaaaattaaaataatgtaatgtaatgtattttgcgttgagtttctccaagtttaagttt

SEQ ID NO: 14524 - DNA, 595 bp, Glycine max
attaatttgtaagaacaaaattagatggcttgcgaagtgccaataaaatccatgatgtccagcgcagtcacactcctgacgccgcgccacgtggcagtgatcggcgcgggcgccgccggcctagtggcggctcgggagctccggcgagaagggcatcgcgtggtggttttcgagaaaggggaggaagtgggtggcatgtgggtgtacagtccggaggtggattcggatccgctgggtttggaggcgaacggagattagtccactcgagcctctacgattcgctccgaacgaatctgtctcgggagagcatgagtttccgagattaccctttcaggaggagggaggggaaagggagggattctcgaaggttcccgggtcacagagaggtgttactgtacttgcaggatttcgctgctgaatttgaaatcggagaattggtgaggtttggaacggaggttttgtttgctggattggatcactgtggtgagtggaggcggacttcaccatcaccccatactcatcctgtggatgagatttacgacgcccttatcatttgcaacggccattacgttcagcctcgtcttcctcatatccc

SEQ ID NO: 14525 - DNA, 518 bp, Glycine max
tactcaagcattttcttccaatcttgaacccaggtggatcttcaatctctctgacatacattgcttcagaaaggatcattcctggatatggtggtggtatgagttctgccaaagctgcactggagagtgatacacgagttcttgctttcgaagcaggaagaaagcgcaaaattagagtcaatactatatctgctggtccactgagaagtagggctgcaaaggctattggattcattgatatgatgatcgattactcatcagccaatgcacctctacagaaagaactatcagcagaggaggtgggcaacacagctgccttcttagcatcacctttggcatctgctatcactggtactgttctatacgttgacaatggtctgaatgctatgggtgttggagttgacagtccaatattcgaaagatcttgacattcgcaaggaccagcattaagtggaagctccccacaaaagctagtgtcaccagaattagcatagcaatggcaatattgtggggcactg

SEQ ID NO: 14526 - DNA, 918 bp, Glycine max
ttgcaagcatcataacatctcgcaaaagtgcaagcaaatcagaagaagacatgctgcagtgcttcattgactcaaaatacaaagatggtcgctcaacaacagaagctgaagtgaccgggctcctcattgctgcactttttgccggtcaacacacaagctcgtattacctcctcttggactggggcatatctgctgtctgacaacctgtgcctttctgctgtgcaggaggagcagaagatgttaatagaaaagcatggggacagagttgatcatgatgttttggctgaaatggatgtgctgtataggtgcatcaaagaagccttgagactccatcctcctctaatcatgctgatgagaagctcacacactgattttagtgtcacaacacgagaggggaaagagtatgacattcccaagggtcatataattgccacatcacctgcttttgcaaacaggctaggtcatgttttcaaagaccctgataggtatgatcctgatcgatttgctgtggggagggaagaggacaaggtggcaggtgcattctcatacatttcatttggaggaggcagacatggatgccttggggagccatttgcatatctgcagataaaagctatatggactcatctgcttaggaattttgagctggagttggtgtcaccttttccagagatcgattggaatgccatggttgtgggagtgaaggggaaagtgatggtccgatataagcggaaggagctttcagttaatcaataggaccacataattcagtgtctggcatgattttattttaagcagttattgttagtcttttctggttcagcttctgtcaaagttcgttgtttatttggcaatgaatatctagaatcttgattttgattttttttttcttctaattctattaagtgattttaactt

SEQ ID NO: 14527 - DNA, 922 bp, Glycine max
cattcttaaattataaatatttcggtctgtgaagatatatgtccataagttccttaattttctcgaaccttcattttcagctcccaacaacaatggcttcaatggcatcttcaagctccttctgcaacctcaagttcatcaccaaacccaacaatggtagaagaagctctcttccccgtattgtattctgtcagaagcaccacgatagcacacccaccgaccaaatcaaccgaagagaactcatattgagaagcagcgaaatagcgaccattggtgccatcttgaacttcggtgggaaaaaacctgattatcttggagtgcagaaaaacccaccagcattagctctgtgcccggcaactaagaactgcgtgtcaacctctgagaatatcagtgatcgcacacattatgctcctccatggaactataatcctgaaggtaggaaaaaacctgtgagcagagaggaagcaatggaggaactgatagacgtgatagaatcaacaacaccagacaaattttcaccacggatagttgaaaggaaagaagactatattcgtgtggagtaccaaagctcaattttggggtttgtagatgatgttgagttctggttcccacccggtaagggttctactgtggagtatcgatctgcatctcggttgggaaactttgattttgatgtgaacagaaaaagaataaaggcactgagacaagagttggagaagaaaggatggacatctcaagataccatatgattaataaactcaggctgaattaacatcagcatctaagcaaatattatttcatatactttgtgaccttgtatacttttgtattagatacaaatcgcacaggatcattgaaagcaaacttttctttgattattggaattgtagagaaatcattgagaacagtacttcaaactctc

SEQ ID NO: 14528 - DNA, 604 bp, Glycine max
acttattctgcttctgattcctcattcaacggtttgaaattcaagataccacacagagattacagagacagtaccctttgaatttgctgtgctgaaaggagactaggagatttggattaaaataagggtacatggaaatgtgggatctcttttggagcagtgtttctatagttgtgggaaatagtatcctcgatgacggcatcaaatataaacgttgagtgttggtttgcattggaggttggcagatgaaaagggggattaaccccgaaggattttgaaccaattttctataaattcatttgtgctctcacacataaaacgagaaaaaggtaggatcgtcatacaaatccgtcgtcttggcttcgaagaaatccaagattcatttcattacctctgttcctgttcaattttcgttgtcattttttgactttttcgtctgtgaaggataaggaaatatatgtatattcatttatacaatcttttaccagaaacctgtcatacccttgtaacaatagttttgtttaatggctataagtgcaagtagtgttacttttttcttctgtttttttgggaggggttgaataaatccccaatttagtcctct

SEQ ID NO: 14529 - DNA, 392 bp, Glycine max
ctcgaaccgctcgagccgattcggctcgagaaaattttcacacctcattaagccctttagccaagagtccctagccaaaaaattacacatggcatggtcaacttcctcctctagcacccctcatcaaaagcatgaagtgttcctcagcttcagaggtgaggacacacgctacaccttcactgggcaccttcatgcctctttaacaagactccaagtcaacacatacattgactacaaccttcagagaggtgaagagatatcatcctcacttcttagggccattgaggaggcaaaactctcagtcgttgttttctccaaaaactatggaaattccaagtggtgtcttgatgagcttctgagaatacttgaatgtaagaatatgagggggcaga

SEQ ID NO: 14530 - DNA, 580 bp, Glycine max
gtttatcagatgagatttgtgtgtgaagagaatagcgaatagcgaaggtggaaatgtcgaaaggcggttcgcttcaaaaggacgtgccatggagagcatcgtcttcttctgcgaacccatccccaaaattcaccacagtccccttcttcgcgtatcccaaacacctgtttccgattacggtatctccgtcatgaggcatccggaccctataggtggtggattgggtcatgaggccatagtggaaccagctggccctgattgtctcgtacctggccagaaaatgcccatccaattacttggcctccaggtctggccaatccatgttgacctgaagtttttggaaccagctgggcgagaacttaagatgcttggaaagttcatggatgacgctgttgaactaatgaacaaatcattcatagagcgttgataatatgggctttgtgaagagacgaagtagccgctgtttgattctttttttatgggatgggaaatatagacaagcagagtgactgtaatgtaacatttgactcattttgtatgcaaaagagaattgcaatgcgagatagttttgttcggttcc

SEQ ID NO: 14531 - DNA, 1601 bp, Glycine max
  unsure (1)..(1601): unsure at all n locations
tcccacggttgatgctggtttctccgttttgaaattcccatctgtttggatgcactaatcctgcatccctcgaagcgcgtttgatctaaaaccataaacctctgtctcgtcagatctccttcttccgttcagtaaacctgtccttcgatccgatctgatctattttccgaatccaaaatggcgacgatgacaagcttgatcggtctcatcaataagatccaacgagcctgcaccgttttgggcgatcacggtggcgagggcttgtcgctttgggaggctcttccctccgtcgccgtcgtcggtggacagagctcagggaaatcgtcggtgctagaaagtgtggtcggaagagattttctgcctcgtggatctggtattgttacacggaggccactagtgctgcaacttcacaagacggaagatgggacacaggagtatgctgagtttcttcacataccaagaaggagattcaccgactttgctgctgtgaggaaggaaatagcggatgaaacagatcgtataactgggaagacaaagcaaatttctaatattccaattcacctcagcatttattctccaaatgttgtgaacttaaccctcatagatcttcctgggttaacgaaggttgcagtagagggacaacaggagagtattgttcaagatattgaaaatatggtccgttcttatgttgagaagccaaactgcattatcttagctatctctcctgcaaatcaagataccgccacttcagatgccataaaaatcgccagagaagttgacccttcaggtgaaagaacatttggtgtcgttaccaaacttgatcttatggataaaggaactaatgcagttgatgttctcgagggaaggcaatacaggctgcagcatccatgggttggaattgtgaaccgttcacaagctgatattaatagaaacgtagacatgatcgctgctcgtaggaaggagcgggaatattttgagacaagtcctgaatatggacatttggcgcataaaatgggctcagaatatcttgctaagcttctatcccagcatttggagcaagttatcaggcagaagatacctagcatcattgccttaataaataagacaattgacgagcttaatgcagagttggaccgtattggcaggccaattgctgtggactcaggggcccaactttacactattttagagatgtgtcgtgcatttgacaaagtgtttagagaacacctggatggaggacgtcctggtggggaccggatatatggagtttttgatcaccaattaccggctgctttaaaaaagctcccttttgatcgccatctttctttaaaaaatgtccagagagttgtcactgaagctgatgggtatcagccccatctgattgctccagagcagggttatagaagactcattgaagggtcaattggctatttcaaaggcccagctgaagcctccgtggatgctgtccactttgttttaaaagaacttgtgcggaagtcaatttcagaaactgaggaactaagcaatgttttagttgatgcaacccttttctgacagatcatgattntaaaataaacatgggagttggatgtgactgtttg

SEQ ID NO: 14532 - DNA, 850 bp, Glycine max
  unsure (1)..(850): unsure at all n locations
tcggtccactntgttntaaaagaacttgtgcggaagtcaatttcagaaactgaggaactaaaaagatttcccacactttcaaatgatatagctactgctgcaaatgaagctctggaaaaattccgagaagaaagcaggaagacagttttacggttgcgtcgatatcggagtctagctatttaacagtggaatttttcaggaagattcattttgaaccagaaaagaatccaaatggaccaccaaatccaaatcggaatggtccccccaatatggatagttatactgacaatcacctgcgcaaaattggatcaaatgttaattcctatatcggtatggcttgcgatacacttaagaatactataccaaaggccgtggttcattgtcaagttagagaggctaagagatcattgctaaaccacttttatgttcatgttgggaggaaggagaaggagaaattgggtgctatgttagacgaagacccagcccttatggataggagaaatcaaatagctaaaaggcttgaattatacaagcaagctagggatgatattgactccgtggcttggaaataatgaaatcccagagtttgcaacagatgtttcgaggaagatttgttatagatttgatcattcttactatttttttttaatcaaacacgaacagaaaaatctacggttatggcaagaagttgaattcgcacttgcgaatgattcttttggtccacagaccacagtgtacaaaagcattggagttctatgttgtgattttatgtaacttacgagtggttcagatgtttggtttttacgcccatattgattattttcgaaggactttttccattttattagtc

SEQ ID NO: 14533 - DNA, 535 bp, Glycine max
gtgaccatttgccccatcacatactcactaaataaagaaccgtttggttcgtctccattaactttattttattttctgttgatgctggtttcctcgttcgaaattcccatctttttggatgcacattaattcggcatccctcgaagaagcgcgtttgatctaaaaccataaacctctgtctcgttagatctccttcttccgttctctaaacctctcctccgatccgatctgatccaaaatggcgacgatgacgagcttgattggtctcatcaataagatccaacgagcctgcaccgttttgggagatcacggtggcgagggcttgtcgctctgggaggctcttccctctgtcgccgtcgtcggtggacagagttcagggaaatcgtcggtgctagaaagtgttgtcgggagagattttctgcctcgtggatctggtattgttacacggaggccactagtgctgcaacttcacaagacggaagaagggacacatgagtatgctgagtttcttcacataccgagaaggagattcacc

SEQ ID NO: 14534 - DNA, 648 bp, Glycine max
tttcagttctcacaaattaaaaaataaaaatattatatatacatatatatatatatatatattctcttcgagtccgtcgaaaaagaaaacaatggcgaaacccagcagcgaaaagccagaggagcatagcgattccaagtactacaaaggggtccgaaagagaaaatggggcaaatgggtatccgaaataagactacccaacagccgtcagaggatttggttgggatcctacgacacccccgagaaggccgcgcgtgccttcgacgcggcaatgttctgcttacgtggccgcaacgccaagtttaatttccccgacaacccacccgacatcgccggcggaacgtccatgacgccgtcgcagattcagatcgccgccgcacaattcgccaacgctgggccccacgagggacattcgggtcgacccgaacattctcccatgcaatctctatcgccttctgtttcagaagggaccgttctaacggacagtgacgtcaccacacttaacggttcgctaacggatttgttcactcccgttgggtcgagtggttacgcatccgattacgggattttccccggtgttgatgatttcagtggcggtttttatgtgccggcaatgctgaactttaattatgagaagaaaacggggaa

SEQ ID NO: 14535 - DNA, 324 bp, Glycine max
aaataaaaaaaattgttttcgtgtggaaacaaaaaaacaattcaaaaacaaacatatgatggtgaagccgagtagcgaaaagccagaggagcatagggattccaagtactacaaaggggtccgaaagagaaaatggggcaaatgggtatccgaaataagactacccaacagccgtcagaggatttggttgggatccttcgacacccccgagaaggccgcgcgtgccttcgacgccgcaatgttctgcttacgtggccgcaacgccaagttcaatttccccgacaacccacccgacatcgccggcggggaatccatgacgccgtc

SEQ ID NO: 14536 - DNA, 403 bp, Glycine max
gcccttgctccctccagaaggatcacagattggggaacgtatttctttttctgggattgatggaaagccagaagatgtactaaacccaaagaagaaacagctggataagattacaccgcatcttttcactgatgacaagggggtagccacatacaagggaataccatttatgacgtctggtggaccatgcacatcatccattcccagagcaactattagataacggagatatggcccattcattgttcttcgccactcacagatttttggtaccacaagatatttgaaagttttgattacgtgaatgagacgttactatcctgttggcaagcttatcttgcagttgcacttgcatggtcttaaatgctacaaatataatcttgaatcccattattcttgagtc

SEQ ID NO: 14537 - DNA, 406 bp, Glycine max
acctgctaacacggttgcaaaacattaatttggctttccattttgaggtagaacagcaagtgaatggggttttcattaacttttttgggttcaatggaacggctggtgtgtggagaataaaggcccttgaggatgctggtggttggctggagaggaccacagtggaggatatggatatcgctgtacgtgcccatcttcatggctggaaatttattttcctcaatgatgttgagtgccaatgtgagctacctgaatcttatgaagcttatagaaaacagcagcatagatggcactctgccccaatgcaattgttccgtctttgtttgcccgacataatacgctccaagataagcatatggacgagattcaacatgatatctctcgtctttctctaagaaattgatat

SEQ ID NO: 14538 - DNA, 759 bp, Glycine max
cacacactcactctctctctctctctctctctctctctctctgctcccattaatttcacgatggcaacactcttcgactctctcgccgtcgtgcgtctccccaccgccgcccgccggacctccgttatgctcccgcactgcgctggcctcaggctcagacccgccgccgcctcgcgcctagttgcgtcccccgctcgcaggatcgcttctcgcgccgcgcgcgtcgcctgcgaggctcaggacaccgccgtcgaagtggctcctattactgatgcaaactggcaatcccttgtccttgaatctgaatctgctgttttggttgaattctgggcgccatggtgtggtccctgccgaatgattcaccctataatagatgaactggcaaagcaatatgctgggaagctcaagtgttacaaactcaacacggatgagagcccttcaaccgctactcggtatggaattcgaagcatccctactgttatgatcttcaagaatggtgagaagaaagatacagttattggtgctgtgcccaagtcaacattgactgcgagcatagaaaaattcgtatgaggtggtaagtaaagaaggcctttgctggaagtaaagctgttttttccccattagcttcttttcttctaagccccatgtctcaagtttcgataatttgtttactcaaatgctcatttatgctcctgtacagttattggatgctacctaattttatgtttttagattattcgagttaccaatatactaagt

SEQ ID NO: 14539 - DNA, 525 bp, Glycine max
cttcatcagttccaccacctcatcctcatccacacaacactccgctccgtttctctcttcactcctctttccccacacacaacacactcagatctctcaactcagatctctcaactcagatctctctctgcttccattaatttcacaatggtcactctcttcgactccctcgccgtcgtgcgtctccccaccgccgccttctccccggctgccaccagccggacctccgttttgctcccgcactgcgccggcctcaggctcagacccgccgccgccacgcgcttagttgcgtcccccgctcgcagaatcgcttcacgcgccgcgcgcgtcgtatgtgaggctcaggataccgccgtcgaagtggctcctattactgatgcaaattggcaatcccttgtccttgaatctgaatctgctgctttggctgaattctgggcgccatggtgtggtccctgccgaatgattcaccctataatagatgaactggcaaagcactatgctgggaagctcaagtgttacaaactc

SEQ ID NO: 14540 - DNA, 976 bp, Glycine max
cccacgcgtccgcccacgcgtccgaacaattacaacctctgactcacccttccctctccttgcttgagcatgaaagcttccactctacccgtttacccaacccctcttcccaaaacctctcatttctctcttcatctccttccaatggcttccattcccacactctcttcacccctacctacactctctgctcactccttatcccattcaaaccccaacaaccactgcactctccctcccacctctctcttcggcaccaggatcaccctcctacgcgccacctcatcgtctcgttccctccccaacaccaattgccgtgccacgtcagcaaccgtgtcgtttagcctccccaccccgaaacccctttcggatacgcccgataaaaccccaaagtggtcggagagggctataaaatcgtatgcaatgggggaattggaagcgaggaagctcaagtatccaaacacgggaaccgaggcgattctcatggggattttggttgaaggaacaagtaatgctgcaaaattcttaagagctaatggaattactcttttgaaagcacgtgaagaaacagtagagctacttgggaaatctgatttgtttttcttcagccctgagcatcctcctttgactgaaccagcccagaaagcccttgattgggcaattgaggagaaattgaagtcagatcttggctactctaggttttgatgatggaaaagccaaagaactttctaaaaaaattgatggagatgtttgatttaagtttcaaaaggcaagcttaagaaatttcttgcagattgatggttgattaatacccgttgacctcttggggttgcaagttcctcttagggaaaattaactatactccctcaagattatcaacaagtacctgtgttaatgttatttcaaatgctgtgtcgtacaccattttggggatgatgtatttcttattcttttttaatttatccaagttttgtac

SEQ ID NO: 14541 - DNA, 725 bp, Glycine max
  unsure (1)..(725): unsure at all n locations
ctctcctctacttgcttgaacatgaaagcttccactctacccttataacaaacccctcttcccaaaacctccctctctgcttctcatttctctcttcatctccttccaatggcttccactcccacactctccctttcaaaccccaacaaccattgcactctccctcccacctctctcttcggcaccaggattactctcctacgcgccacctcatcgtcccgttccctccccaacaccaattgccgtgccacgtcagcaaccgtgtcgtttagcctccccaccccgaaacccctttcggatactcctgagaaaacaccaaagtggtcggcgagggctataaaatcgtatgcaatgggggaattggaagcgaggaagctcaagtatccaaacacgggaaccgaggcacttctcatggggattttggttgaaggaacaagtaaagctgcaaaattctcaagagctaatggaattactcttttcaaagtacgtgaagaaacagtagagctacttgggaaatctgacttgtatttcttcagccctgagcatcctccattgactgaaccagcccagaaagcccttgattgggcaattgaagagaaattgaagtcaggtgaaggaggagaaatnaacgttacacatttacttctaggaatatggcacaaaaagaatcacagtcaacaatcttggtactctggttcaatgatgaaaagccaagaacttctaaa

SEQ ID NO: 14542 - DNA, 302 bp, Glycine max
aaacggtttgagtgagtgtgacactgccaacaatggtgttggcgtatgctgctacgctttcttccactctgtcgtttcaaaagtctgttcctttgaattctcaacgttcaggaacatcatttggttcctctttcctattcagcagagagaatggttcagttgttccgtctcttgttgtgtgtcatgctaagaagaaactcagttttatggagcaaattctggattacattgaagggggtcccaaattaaggaagtggtatggtgcacctgatatccttgaaaaagatggtactgccatagaa

SEQ ID NO: 14543 - DNA, 736 bp, Glycine max
catccactttcctcaatcttccattccagatctctcaccttcttcttcttcctctgtgccacccttttgttccatgattgttttttgtgtctgtatcagcttgatctttttgtttttttccttgttgtaaaaacatttcaatctgcaagttcagagatattgttgttggagctcaatgtatctgctctgtgagcgatccatgtttggggttaaaacaaattttatgctggctgtcaagggcttaacataactgctctcctttatttggggttgagactagctatgagactgtaggtggagtgaagatgaatgtgtgtccacaaaagaaaggataagatacgaaatgatagtatcaaggagatattcacatgacagttattgaggaaaagaagatcgcaactcaattaatgtgatttggacacgtgcaaagaagtccactcgaggcattggggaggagagtagatgacaccgtttttagccttttgtgaagtggtaaagagagatctaaaaggacattggacaaaattattgaaagggattgcatgataattattggcagcttcactaatatcttttaagactacatactttagctaggctatcacatttcttgggataatgttgggaggcaacaacggaaattgcttgctttctgttttcttggacgaaactcaatttcagcatcaaactaatgtgtcaaatcaattgcagttgcttggaaatttacaagctggat

SEQ ID NO: 14544 - DNA, 1845 bp, Glycine max
tcgcgatctagaactagcatatattggaccttgtatcccatccaatcctttcatgtcggaactggtggtttcttcttggcaggtgcatcatatccataaagtgcgtaccttctgaaaacacatccagttccgacatatattggctctagaaagaaaaagaatgccaatagtaagaaggagaaaaagaggaaggtgaagcacagtgaagcatcaaagcagatacatgcacttgaaaatattgaggcggggaatgaaggaaccaacaatgagaagacatccaatctgactcaaacaaagttggagaagaggtttggacagtctccagtatttgtagcctccacacttttggatgatggtggagttccacagggcgtgagtcctgcatcacttttaaaagaagccatccaagtcatcagttgtggttatgaagacaaaacagaatggggaaaagaagttgggtggatatatggttctgtgacagaggatatcttgactggatttaaaatgcattgccatggttggcggtctgtgtattgcattcctaagcggcctgcattcaaggggtctgcgcctatcaacctttcagatcgtctgcatcaagttcttcggtgggctcttgggtctgttgagatttttttcagcagacattgtccaatctggtatggttatggtggtgggttgaaatggttggaacgattttcctacattaactcggtcgtatatccctggacttccctcccattgcttgtctactgtactctaccagccatatgccttctgactggaaaatttatcgtacccgagattagcaactatgccagtattgtgttcatggccctcttcatatccattgcagcaactggcatccttgagatgcaatggggcggtgttagcatagacgactggtggaggaacgaacagttttgggtgatcggaggtgtatcttctcatctttttgccctatttcagggtttactgaaggtcttggctggtgtgaacacaaacttcactgtgacgtcaaaagcagcagatgatggagaattctcagaactctacatcttcaagtggacatcactcttgatccctccaatgaccctactaatcatgaatattgttggggtggttgttggggtctcagatgccatcaacaatggttatgattcatggggacctctctttggtagattgttctttgcattgtgggtgatcctccatctctaccccttcttgaaggggttgcttggaaaacaagatagaatgccaaccattatattggtttggtcaatccttctggcctccatcttgactctcatgtgggtcagaattaacccgtttgtgtcaagagacggccccgtgttagaaatttgtggattgaattgtgacgagtcttgaataaagaaaagctgaagaagaaggttagttatttttcagctacactgcagtcatgttgaagaatgtagcacatcatgcttcacaaagttgcacgaattttcggatggaagttttatttttcgggtgtgtagagattaaagagaggaaggggagggggctgacacattgttaccttgtaatagggttttttcatttattctttgattatattttctgtgggttttagtgttattctctttccagtttcatgtattataagaaagaggcattgaatgataaattattccctcttcaaaatgggggatcctcagtctcaagaaattacttggtcatatttttaggtatgggtcttgttctgtttaaaaccatttgtaataccgtcaaaactatggatattcttgttcctcagataaaaaaaaaaaaaaagggcgggcgctcgcgatctagaactag

SEQ ID NO: 14545 - DNA, 448 bp, Glycine max
ttcggctctagcgggcggtgttagcatagacgactggtggaggaacgaacagtatttggtgatcggaggtgtatcttggtctacagtgtgcactatttcagggccgtgtaattggtctaagtcgatggtaagtcaaactacactgtgacctcaaaagcagcaggggagggtgaatgctcagaactctacatcttcaagtggacatcactcttgatccctccaatgaccctacttatcatgaatattgtcggggtgggtgccggccacttttattccatgcaaccaggaaacaaatcatggggacctctcttggctagattgttcttagcattgaggctcatcctacatctttacccctacttgaaggggatgcttggaaaacacgatagaatgccaaccattatattaggttggtcaatccttctggcctccatcttgactctcatgt

SEQ ID NO: 14546 - DNA, 413 bp, Glycine max
cccggtttgcgaatcaccgccattctcaagtttagaactccccaatccaaggcaacgctgcataactttggccaccaacacccccgtctctcatacattctacgaagtgaacgtcaatggcaagttgtgttggcacttcacctctatatttaccagttggtattggaaattttcctcatgctcatgttaagcttactagaccaaacattgttgggatgaaacccttaccatataacatcagaaaaggagaacttaagattgctacattgcaaaatccatcatcccatgtcagacatgctgctgctttgaattttaaatgtgctgctgcaactgcaagtgcaacccaaactgtaacacgcaattctcggtcaatgactactgacaaagtgaagtctcctaaacttgacaacaat

SEQ ID NO: 14547 - DNA, 1817 bp, Glycine max
ctttacagctatcattatcattttgatgacccatttcaccactttcttcgtcctccgatttctccagaacagcaagggagaatccattcctcatcgctgcaattctcacatctttcactctctagattctcatctatctctctctctctctaaagttcaaagtttttgttgttttccccccgtgtctttctctctcttgcggtggacttgtggaatgctggggtcagaggcttctgagacatgttctagcagacttttggtgaattgggtcactgtggtttctgtcatgggtggtagagaatctgagtcctcagagatctaagcctctctgtctggtgttttgttcatcacagacccttttgttgtggcataattgtgaaagtgaaaaagtgagagaagatgatgaagatgaagaatattagtagtagtaacaataataataagacaaatggtctttcttccatcatgaacaatggaggttcagatggtaacagagctgagcctggttcaaaggaatgggagatgaggccaggtggaatgttggttcagatgagaactgctgactcggatcggaacccagcacttgtgccaacaattagagttagggtcaagtttggttcaatttaccatgaagtcaacattagttcacaagctacatttggggagttgaagaaaatgctgtctgggccaactgggttacaccatgaagatcaaaagctgttatacaaagacaaggagagggattcaaaggcttttcttgacatggttggggtgaaggacaaatccaagatagtgctagtggaagaccctattagtcaagagaagaggttgttagagagaaggaagaatgctaagatggagaaagctgcaaagtcgatctcagaaatcagcttggaagtagataggcttgcaggacgggtatcagcctttgagtcaattattagcaaaggtgggagagttgtggaaacagatttgcttaatctgattgagttattgatgaatcaattgcttaaattggatggtataatggctgatggggatgtgaaactacagaggaaaatgcaggtaagaagagttcaaaagtatgttgaaactcttgatgtgctgaaagttaagaattctatgcctagtagcaatggagaccaagccccagtgaagccccatcagaagcattcaaatggtcaaaggaagggaccaattcaagagcaacaacaaaagcattcaaatggacgtcatagattagccttagcaccaattcaggagcagcaacaagaacaaccaaggaactcaagtgagaattctctagcactatatcaagagcaacaagaacaaccctcaaggaattccacctcaggagttgtagttaccacaaattgggagttgtttgattctgtcccaccattaatccctgtgcaagccacatcaccacccccaccctcctcagtgaccaataattcaggtcctcccaagttcaattgggaattcttcgactaagtaccataccacgtgtttttacttgtgtggatgtgatttgggtttgtcttcaacttggagtgttatatgttttacattcttttctgtatttagatttgtttagcaacccccttataatctgtcatttacttcagaataaatggggttgctatgatagtgattatcataaaaaaagttacatttctgtgattttggtgtccaccgaattcatttacctgtatgggcctattttttatggatatattatatacaatattattgtaagcatttgtaactttgttaatagaaacattaggatttagccacttttataataatatttg

SEQ ID NO: 14548 - DNA, 1018 bp, Glycine max
acgcgtacgcgtaatgctgccagggccaactagcggccctttcatgtacgatcaaaaactgctatacaacgacatcgagagggattcaaaggcttttcttgacatggttgacgtgaaagacacatccacgatagagctaatggaagaccctattagtcaagagaagatgttgatatagagaatatagaatgctaagatggataaagctgcctcgaccatctcagagctcaccttggaaatagatagacttgcagggagggtatcagtctttgagtcaattattagcaaatgtgggaaagttcttgaaacagatgcgcttaatctgattgagttattgatgaatcaggtgctcatattggatggtatagtggctgatggggatgtgaaactacagaggaaaatgcaggtaaaaagaattcaaaagtatgttgaaacacttgatgtgctgaaggttaagaattctatgtctagtagcaatggagaccatgccacagtgcagcttcaacagaagcattcaaatgggcaacaacaaaagcattcaaatggacatcatagatcagccttagcaccaattcaagagcagcaacaagaacaagaacaacccccaaggaattccacctcaggagttgtagttaccacaaactgggaattgtttgattctgtcccaccattaatccctgtgccatccacatccccatccccacatccctcggagaccaataaatcaggtcctcccaagttcaattgggaattcttcaaataagtaccctaccatgtgtggatatgatttgggtttgtcttccacttggagtgttatatgttttgcattcttttctgtatttagatttgtttagcaaccccctataatctgtcatttacttcagaaataaatggggttgctatgatagtgattatcatagaaaaaagttacatttctgtgattttggtgtccgccgaattcatttaccaaatgtatgggcctattttttttatgaataaatataaaaatattataagc

SEQ ID NO: 14549 - DNA, 776 bp, Glycine max
attattgttattattattattttgtttttccatttcaccactttcttctccctccgatttctccagaacagcaagggagaatcaattcctcatcgctgcaattcttctttcactctctagtttctcttctttctttcttccaacctcttctcttctatacccttcagaaaagaaattaaaaaacgtagcttcagattattctagctcttcatttttccatgttcaatattatgctgtaaatttctcaaactcactgtttcagccacattttggtctaaagatccgtgctttgacccttggcaggttcagcttttgaaggggttggagtttttcttcctcataagccattgattagtccaaattgtttttctttttttctctctctaaagttcaaagtttttgttgttttccccccgtgtctttctctctcttgtggtggacttgaggaatgctggggtcagaggcttctgagacatgttctagcagacttttggtgaattgggtcactggtttctgtcataggtggtagagaatctgagtcctcagagatctaagcctctctctggtgttttgttcatcacacacaccctttttgttgtggcatagttgtgaaagtgaaagagtgagagaagatgatgaggatgaagaatattagtagtagcatcatgaatggaggtggttcagttggttgtagatctgagccgggttcaaaggaatgggagatgaggccaggtggaatgttggttcagatgagaactgctgattcgggtcggaac

SEQ ID NO: 14550 - DNA, 337 bp, Glycine max
ttatgcactcatggttctaatggcagtgaaacattaattttgaaggtaaaaagagttcaaaagtatgttgaaactcttgatgtgctgaaagttaagaattctatgcctagtagcaatggagaccatgccccagtgcagcctcaacagaagcattcaaatgggcaacaacaaaagtattcaaatggacatcatagattagccttagtaccaattcaggagcagcaacaagaacaaccaaggaactcaaatgagaattctctggaactataccaagagcaacaacaccaaccctcaaggaattccacctcaggagttgtagttaccacaaattgggagt

SEQ ID NO: 14551 - DNA, 542 bp, Glycine max
  unsure (1)..(542): unsure at all n locations
gcccctgacagtgactctggcatgacacatatttccacccaaataaaaggaacagctggctacttggaccctgaatacctgaaaacttatcaactaactgaaagcggccgcgtgtattcatttggagttttgcttgttgaacttgtcacaggcagacgccccattgagccaaaatttgaactcagggagcgaatcacggcaagatgggctatgaagaggttcattgagggagatgctatctcagtcttggacccaagactggaccagactgctgcaaatactttggcactagaaaagatccttgagctagctttacagtgcttggctccacgcagacaaagtaggcctactatgaagagatgtgctgagatcctttggtccatccgcaaggatatcagagagcagctatccgcttcaaatttccgctcattttccacttcttcccaaagaagcacctcattgaaagagtgagaatngctaaagtgcaacactagcatcaaagaatgttaagttaggacaagccatggccttgggagagaaaa

SEQ ID NO: 14552 - DNA, 494 bp, Glycine max
aaagatagaggcccggtctttgtaacaacttttaaccctctctgcatggtcaattgtggctatcatgggctccttctttctggctgaaataatgtaccttggaagggtggttggagctattgtaattattttaggactgtatcttgtggtgtggggtaaaagcaatgactacgagtcatcaaattcaattactaaaaagcatacattgccatccaagcaaacagtagaggaggagcattctaatcatgatgtcatcactctcagtaacttaggcgcgggaaacatagttcgagatgaacaagtatgaggaaacataccaaattcaatctaaatttcagcaatctgggatctttcaaccgtccagaagcccatttgaaaacaactttataggttcatcgttgtttgaacaattatgatgtagtagtagaggtttttaatgtagccctgtggtatgtcgaatggtaagttttaatataaggcaagaaattcgcaac

SEQ ID NO: 14553 - DNA, 467 bp, Glycine max
ctcgagccgagacacacgcacatcatcttacatacataccactgttcacaaccatgaattgggttcgcggagagtctctcggcagtggcagtttcgccaccgtcaacatagccataccgacaaacacttccactcagtttctttcttccaccgccgtcaaatcctcccatgttcacacctcgtctatgctgaaaaacgagaaggaaatactcgattgccttggagcttccccttatgtcattaactgtttcggcgacgatcacacggttgaaaacggagaagagtattacaacattttcctcgaatacgccgccggtggttctctcgccgatcaggtcaaaagacacggcgggaggcttccggagtcttacgttcggaggtgtacgaggtcgatcgtcgaaggtctaaaacatattcacgacaacggttatgttcactgcgatgtgaagcttcaaaacattctcgtt

SEQ ID NO: 14554 - DNA, 473 bp, Glycine max
ctcgagccgctggaactggcaacctgccaaaggcgtgttgaagatgaaatgctgaggcattcaaaagctgtggaggtaacaagagccatgaccctcaacaatttgcaaacgggcttgcctggagtgtttcaggcactgaccagtttctcttccttgttcgctgaggcccttgaatcagtgtgtacccgttcatatgccatcaagtaggttaggtaattcatttgttctgcatgggatctaagttcttcataagggctgggggatttttttggcggcaagctcttattgctctcactattttgagttatattttgaaatgtaaatatgaagaattttgaggttccacctattttgatggaaagaaagggaattttctcattgtacagggaaatttcttggtttattgtatcagagggttgcaatttttaatatgtcaataaattatacgcatcgtgctttcatgttccatttat

SEQ ID NO: 14555 - DNA, 1571 bp, Glycine max
ccgtccgtaagctcggaattcggctcgggggaagtattagatttcgtttattaataagcccatgtcgttttaatgcttggtgactgtgtgtggagtattgaccagctggaattaatcatcaatctccttttccttatttctattttttattttccaaaattggatctgctatggaatttgtgccttgtttctcagatagtggaatatttgttggaccatgaagcataaagatggaaaaccgattaatcagccaaataagaaccgggctgtgactttggcagtcactttaattgctctatgtggtttttctttctatctgggaggaatcttttgctctggaaaggatggggttgtggttaataccattcagaagacccttgattctcctaagcaatcctcaggttctctgcaaattaagccaatcagtttccctgaatgcagcatagactatcaagactacactccatgcacagatccaaagagatggagaaagtacggcatgtaccggcttacttgttagaacgccattgtccttcagtttttgaaaggaaagaatgcttggttcctcccccagagggttacaagcctccaatcagatggccaaagagtagagatgaatgttggtacaggaatgtgccatatgactggatcaataagcagaagtctaaccagcattggttgagaaaggaaggggagaaattcctgtttccaggtgggggtactatgttccccaacggtgttggtgaatatgttgatttgatgcaagatctgatcccaggaatgaaagatgggtccattcgaactgccattgatactggttgtggagttgctagctggggtggtgacttgctggatcgtgggattctaactctttctcttgcaccaagagataaccatgaagctcaggttcaatttgctctggagcgtggtatccctgctgttctcggtgtcatttctacacagagacttccattcccatcaagctcctttgatatggctcattgctccagatgccttatcccatggacagaatatggtggagtttatctccttgaaattcaccggattcttcgccccggaggattttgggtcttgtctggtccaccgatcaactatgagcgcaggtggcgtggatggaacacaactattgaagcacaaaaatcagattatgagaagttgaaggaattgctgacttcattgtgctttaaaatgtacaagaaaaagggtgacattgctgtatggaggaagtctccagataacaattgttataataagctggctagagattcctatccacctaaatgcgatgacagccttgaaccagattcagcatggtatactccacttcgtgcctgtattgtagttccagatactaagtttaagaaatcaggtctgctgtccatttctaagtggcctgagcgattgcacgttacaccagatcggatttcaatggttcctcgtggaagtgatagtactttcaaacatgatgacagtaagtggaaaaagcaggctgcgcactacaagaaggtgattcctgagcttgggactgacaaaataagaaatgtcatgga

SEQ ID NO: 14556 - DNA, 536 bp, Glycine max
gggacaacgaggcacatggcgagcaaatagttatataaatggttgatctatgtttgcttgagcctcacacaaatctgacttattggttggtctcttcaaccttggcctttcactttctcttcctatctctctctcacgttcgcaacattccatgccagtgttttaggcagcaccccttcatattctttcaaccagacacagagccagaaaaccctgaagaagccagagtcagagagaaacagaatagtggaatatttgttggaccatgaagcataaagatggaaaaccgattaatcagccaaataagaaccgggctgtgactttggcagtcactttaattgctctatgtggtttttctttctatctgggaggaatcttttgctctggaaaggatggggttgtggttaataccattcagaagacccttgattctcctaagcaatcctcaggttctctgcaaattaagccaatcagtttccctgaatgcagcatagactatcaagactacactccatgcacagatccaaagagatgga

SEQ ID NO: 14557 - DNA, 1270 bp, Glycine max
cattaagcaaggacttaatagcttaacgcaaggacattcgctaatgaagaatgatcctggcagctacaagagtccaaatcttcgaaggtcgttgaccaatgaaacagaacatggtgacagatatgaactggttgcatatcgtaatgaaactcagggtagttttggagcatcaaagagtcaatctactggtccttggaatcaggattcaagagtaactaaggtggaaacatcaaatggggaatctagtgcaagttatgtagagagtaagacaagtgaggataagttgctggagacaattgtaacatcaggaggtgttcgcctgcaacctactcgagatgccattcaagttttcctaacagaagctgcaaagttggatgcactggctttatctcacgcccttgagctgaagctccaatctccaatttggcaggttcgcatgaaagctgtttgtgtccttgaggccatccttagaaagaaggacgatgatcatttttcaccagtggattcttacttcaccgaaaataaagatgtggtgctgagatgttctgaatctccccaagcctctttaagggaaaggactgtgaaggttcttggtcttttaggtggaggccagccaaacagctctatgataaattcagagaaggctgtgaaaactgagaatgctactgttgctgagttgcctgacttgatagacactggtgattcaaatgattaccatggaactgatgacactctaaagggtacaagtgatcaaaatatagcaaatttgacatcatcaactcctctggttgatgatttatttggagattttagtgcttctattggagctagtcaagaactaaaaaatgatgatccatttgctgatgtatcatttcacacaaatgagaacaaagaacatgcagatgatctcttttctggaatgactgttggtagcaataagcagggcgatcatgagagtcacaggcaggggaatataactgaacctcaactttttgacatttttgcttccaattctgaacaaggaaaccataaggagcctgttagtgatttaatggccggtctgtcaatggatgaaaatacctcaagtacgaagcagaagggaacgtctccttccatgcattctgaatctttattttcaggtttgaataaccatatccctgacaatacttcaggtggcatgttgagctctcagccaatggggtttaatgtaaatcctatgtttcccactggtcctatgccttataatatacagcctggtttcatgttgaac

SEQ ID NO: 14558 - DNA, 292 bp, Glycine max
cacgcaatacggatgcccaacttgccattggcacctttgatgtcgaagagataatcaccagcagccattggctatcacagatatgttggctctcttaccactccaccgtgcaaagagggtgtcacttggaacattctaggcaaggtacctcattactacgtatgctctcctttggtgggaaagtatgtctacacacatcaggagggttagtcatatactatgcacaattttttcttaacacattattaatcgtaatataaaatctgtccggccaccattctatacttttaaa

SEQ ID NO: 14559 - DNA, 1681 bp, Glycine max
  unsure (1)..(1681): unsure at all n locations
tactgcttctcgaaaatncctggtgggaataaccaaaagcaaattacatatgtgtgacgttgaggtcttcgctctcagattcttggcatctcagattaacgtgtacctaaagcaagaggcgttttcttaaacacaaagaaagaagctgtgcacatggctgggatgaaagaagagagtcgagagaagggaaccatggctgagaagggtgaagtggcgtttggttccctaccaagaaaaacacacttccctcttagtttgggcttcttcaacattgcgcgactgctctcttacgctccttcacctctcttctattcctttctcttttatattctacctccgggtatccgtttccccgcaaccgctgcggttgtgtagccccagatcagatttcggataaatggagcctgtcatatccatatccgcggggaaattttaaacctgtggagttaattaagtgggtgaaggctttagaagcggagttttcgagtgaaactgtggcagttgagttgccccggcatttgaaacagaacataattgatgagatcttgcagagactaaggagcttgaattccagtagaacagatattgctatggaacgagaagtagttgagagttggcgcaaagaaaaactggaagaggtcaagtcagctcttgtgaaggggacttccaattcaaccatcccccatgaagaagctggtatgctagtaagagctttggagtctgattgggctgtgctctgtgaagagattggcctctggatacctgctcaagtttctaataaagaacatgacgacaaacctgagggtgcagaggagtttgaggaggaggtccttcctggcagacccgtttcacccgagtgccatgctgaactgcacacagattatgatggcgccgcagtaagatggggtcttaccttccacaaagatagtgcggctgattgctgtcaggcttgcttggaccatgcgaaacatgccaaagaaggggaaaagaaatgcaatatatgggtttattgcccatctgagtttgggtgtcattctccagatatctaccagcacaaacatcaggaatgttggctgaaatatgctgagaaacctcgattaaattttaaggataagtatcctgaatcatatcgaaattcacatccttctgcaccagtgatcgttccgtgggtctctggagttatcagttcatgagtcaaataaccaaataccaaatgtgacgagatcaaccagagctaccttgtagactacacaagagtgcaaagctagcttagcaaagcctttgcatgctcgtggattatataccattgttcttcaacatgttttttgtgtaaaagaaatgaactggggagcaaagaattttccctatgttcatttatgacttgttttggtcaaaatgcggtttttgacagactcacctcagtgccaaggattttccaccaaggtcgggtctaacactgaggaaaggtgacttttaactgatgagcatgttgttttgttgtaagctatctgataacataattcattgtatctgtgggacttagaatcctactcatagtatcattcttgttcgtgatgttgatgatcatcaattcatcatcaatcccgcttcccttccttttatacattataatcatacgtacatttatacccgtataatataatgtttatctatgtcgcaa

SEQ ID NO: 14560 - DNA, 510 bp, Glycine max
tttcgtttagacaaaaagcgtacgatagaaccaacccaggttcgatgtctccatggtccataggctgatcacattcaccgccgaaaactacacaaccccgaaagctaaataaaaataaaatcaccttcgaataggaaaagcaaatctcaaattggtagcgcaagcttgtcacttgaggtttgcttcgattcttcgatctcagattaaagtgtacgaaagaagaggcttttctaaacaaaagaggaagcgtgcaatggtgggatgaagaagagaggaacatggcgagaggcaagtgggtttgttcctacaagaaaaccactcttttagtttgcttcttcaacattgctgttgctctctacgttcttcgctctctctatgcttctctttacatctactccggaaacgtttcccgcaacgctgcgttgtatagcccagatcagattcggaaaatggaggaatcaatccaaatccgctgggaatttaaacctgtggagttaattaagtgggtga

SEQ ID NO: 14561 - DNA, 420 bp, Glycine max
gtacgatagaaccaacctggttcgatgtctccaccttaggctgaaaactacacaaccctcaaaagctgattaataaaatcgtggtggaataacaaaagcggatcacatattgtgacttgaggtttgcttcgattcttggatctcagattaaagtactaaagaagaggcttttctaaacaaaagaagaagcgtgcaatggcgggatgaagaagagagcgagagagggaacatggcgagagggaagtgggtttgttcctacaagaaaaccactctcttagtttgcttcttcaacattgccgttgctctctacgctcttcactctctctattcttctctttatatctactccggtaacgtttcccgcatcgttgcgttgtatagcccatatcagattcggaaaatggaactgtcaatccatat

SEQ ID NO: 14562 - DNA, 966 bp, Glycine max
acgagggacaactacaccaaattattctgatcaacaattagttggttctgggaaaattgatcaaacccaaactcatgagcataatcagcttgtagttgttgaacatcacaatcctcaaagttcaacaatgaacgatggaggatggattgctcgaattgcagcattgcttgtgggtgaggatccaacacagtcttatgagcttatatgcggtaactgccgcatgcataatggtcttgctcggaaggaggatttcccatttattacttattactgcccacactgtcacgccctgaacaaaccaaagcaatcggatgagcgtatatctggtttaaattcccataacactcagtctcctaaaacagatgacggtgaagaagttaaaaatgctagtgattctgcagcccggagtgtaatcagaagcgataatcccgtaaatactagccctgagattgaggaagtatctgaaccggctatttcagaggagaaaagctagttaaaagacaagcctgatttggggatggactgtttagatgacatgtctaggcccctgtttcaggtcacagaccaactataaggaaaccaactacagaccaactataaggaaaccaactttgtagttggtttccttattgctgttgtaacaggaagagttttgataactttgagacttgtgatttataaattataacacataaattacatggcttgcttatgaattaaagcaattttgggatttccatataatttttctttctattttttgtccggatagtcttatttcaaaaatgagattgtgtaaagggtttaaactttgaatgttgttgcaacttgcaaaggttgtgtttagatctggtcaatgtaaaatttgttgaaactatatccatggatcattcttgatggacaatggcatcttgtgatgcatgtaacatgattccccccgatggatattggattgttgttatttaa

SEQ ID NO: 14563 - DNA, 236 bp, Glycine max
caactataaggaaaccaactacagaccaactataaggaaaccaactttgcaacaggcagagttttgataactttgagacttgtgatttataaattataacacataaattacatggcttgcttatgaattaaagcaattttgggatttccatataatttttctttctattttttgtccggatagtcttatttcaaaaatgagattgtgtaaagggtttaaactttaaatgttgttgc

SEQ ID NO: 14564 - DNA, 1047 bp, Glycine max
attaatttgcctagtaattttggtcattgattaattctgcaattgagcagaggagccatggccaaaatcgcacttggaagcacccgagaggccactcagccagactgcattcaggccctcatcgttgaattcatagccaccttcctctttgtctttgttggcgttggttcttccatggtcgttgacaagcttggtggggatgcactagtgggattgtttgctgtggccgtggcacatgcacttgtggtggctgtaatgatctccgccgcccacatttccggtggccacctcaaccccgccgtcacccttggcctcctcgccggtggtcacatcaccatctttcgttccatgctctattggattgatcaattagtagcagccgcaacagcttcttatctcctttactacctctcaggaggacaggcaactccagttcatacgctggccagtggagtggggtatggtcaaggagtagtttgggagattgtgttgacgttttctttgttgttcactgtgtatgcgaccatggtggatcccaagaagggagcacttgctgggcttgggccaacgctggttgggtttgtggttggggccaacatcctcgcaggtggggcttactctgctgcttctatgaacccagcaaggtcttttgggcctgccttggtcgctggaaactggaccgatcattgggtttactgggttgggcctctcattggtggtggccttgctggttacatctatgagactttcttcattgaccgatctcatgttccacttcctcgtgatgaagaaaactaaacaataggattgacaacttgcactttcatcccttcttaaaaaatgctgcattattgtagttaatttaatctaataataatctttttttttgcgtgttatgtatgtttgaaaaggtctatttatgtataatatatcgttaaatgatcttccccaaaataagatcaacgatttagttgagatctggcaccctgtgtagactttgtggacaggaatgaatgaataaatatatatttcaatggcttctgcttt

SEQ ID NO: 14565 - DNA, 248 bp, Glycine max
tttagaaatatgtaaattatgcggctcggagtagttagtcaaaattatttatacacatggcagaatgagtgaaagatgttctcttgatgcaaaagttcagtttgcttcttcagtttctgtatttggaattttgaattctctaaactgcaggtacaatatttcactttggagaatcccgtttcttatgtagcctgttttctttggattattagtaatcattcatttggctggtaaacgccactgataaa

SEQ ID NO: 14566 - DNA, 402 bp, Glycine max
aacaaactgaagctgctcttcacttggctcgttgtatgggcatggatccacattttccagtaaaaagcacattttgggtcatctactcttagttgcttcaagtggacttgtggcttgttggtgaggttttgtgattgagttattagttttgtaagtcttgtttataaattattgatcttttgcagtgattttgacttgtattcttcttcctattagctttatgcttgtggttccatgtttaatttattgggacttgtgattcttttaatgcctataattgatgtagtaatcacaatttaatcatactcttgatacatgtaactttacctggcgactcctactttcatctttatatttgggtagtttgtagcctatcatgcaaggtcaagatgcatggaccca

SEQ ID NO: 14567 - DNA, 378 bp, Glycine max
  unsure (1)..(378): unsure at all n locations
ggaagaagaagttaacggaggagcgacggagataacggcgacggagatgatcgttgctttttaatttattaatttagttaacttattagggggttcgagaatgtcacatgcgtgttatagttctaactggcgttacacgattataatattttatactaataataataattataataaatggtatcctttgtttgatgtatctaactgtaagctacaaaaaggccataccactagaagatgagagactgaactgaaagcgaaacctctgtgtgtccttttcgttccttcttgttccttctacagcctgtaccatgtaatgtaacttgtttgtacatgtaactctntgcggtattttgatgatattattatagttaaaaa

SEQ ID NO: 14568 - DNA, 953 bp, Glycine max
atggtgtctacattaatggccattctcatcacgactcgagtgttgacatttttcgaggaatgcaaataggatctcacattcaaccagaattggtttccagtgaaaatgatgttttggttaatcagtttgcaaggcatcctcatgcagagccatatgattttcagtcagtcttggcagatcgtgttggccggcagctgctgagggaacatgttaagattaacccatccattgatctcagtcccaactcgtctttgcttagccggccaaacggtttatgacatcaagatttttccttaagtttctcatagtacctttggttatgcagatctgttcattgttctatttgcaagaatataactatacaataaggagccaaagcacaagagaatcgatgtaaataaatttgcatctgagaataggctacatggggcacaaaagtgcattttgcatggcttctgctcgggcttatggagttcattaatgtctcagcattaaactttctgacaatttgttcatatcaagcaatcaactaacaaatgctcacttgttcgaaaagaggaacttgttgtatgtaacatatttaaagcatcaacgcatgaggggtttctctcctgcacttaagatactagaaatgacagttcgtgcaatggcaaatgcatcttctggaatcagaacaccatatagatgccagagaaagggctaaattgatacaaaacttaacttgcatatttttcttttttgggaggttagacattgctgtacagtagatgggaaactgttttgtgattcggcatttacgaatggggaagtcaaggttttgtagagagtccaggcatggtttttgaggctctgatgtattgttgtcagtgtatactctactactgggtctgttctgtacattattattcaacagtaaaatggaagaaatctgatcttatgatcctcattagatt

SEQ ID NO: 14569 - DNA, 601 bp, Glycine max
agagtgagtgtacttagcgacttgagggagcttgcttcagcagagagcctggatacctttacactcatctatacaaatatactcgaacatcaacctgactgcccgcctgaagttgttgagaaacttgttggtctacgagaaggcattcctcggaaggatgccaaggaggtcattcaagagtgcaaagagatatatgagaattcacttgttgatggaagacctccaaaggcaggttttgtttttcgacgtgtgaagtgcttaacagcaaccaagggagggctttggcgtaaactcacttgaagtacgattccattcatttattcatatatcttgttttgcctgttaaattatttgttccttttgcataattcccaaatgctatgctgtcaatagacaagttttgtaaaattcatttatacaatttccttagttaatgataccctcactttatttctgctcccgttctcggttttaccatgaaccaaatgtgctgtcgacattttcaagattacctacctgtctgggtggttgtattcaaaagaaaattatgaatacactattgaaaaactacaacaacaaacaccgtcatacaaacaaaact

SEQ ID NO: 14570 - DNA, 545 bp, Glycine max
tttgttcagtggggaggttaacaagtacatgtatggcgaagagaggttcggaggggagcctctgtttcttccaaatggtgtcgacggtgatgaagacgatggccatattctcgcattcgtgcatgatgagaaggagtggaaatcggagctgcagattgtcaatgccaaaactttgaagcttgaggcttcagttaagcttccttccagagttccttatgggtttcacggtacttttattcattccaaggatttcaggaaacaagcttgaattcaattattgggtgacgacggtaaaaaaaaaaaaatgtgatttttttttcactttgggaggagagatttaactgcgggatgcttgcagatacgcccccggaatctactcctcttcttttctgttgcagatttttatttttactttttcttcattttttttttaaaatttggggttaattacttttgagtgagaggttttggggaccagcgtgtagcttttgggtgtagttagcaatgaagctcagctggtctctgttttttctttcgcttgatgt

SEQ ID NO: 14571 - DNA, 460 bp, Glycine max
cgtgaaaagaaatctgctctggaccaggagatggagcttgctgcaacagctgagagcaagagttctggttggcgatggtttggtgggagtgagaaatgataaaatatgaggccatgggggcaaatgtcaactaaaaatgatttagagttgagtctgaggaacctcaactggttatattctattattgtagttcatgcagaaaatgacatttccttattacagaactcttacggtgtcatcttttgagttgaaatgcatgatggactccaattttgaagaactgaagtctgaaaccttcaagagatggggtacacaagttttttttgtatttgtaatttataccttgacaggtttacttttgactgattcatttcatgctcaagtgtccattaaattctataggatttacatttcattttattcatttgagtatatattggcatcttaattattaagttca

SEQ ID NO: 14572 - DNA, 733 bp, Glycine max
gctgcaattaaaactagcaaaagaacatggtgcaaaagcagcactgcaggagttgtcagaaaatggaactgatagagctaagagaaaagctggaagcatattggaactcttgcagcgaatggaaggggttgataatctgcagaattcatagtcccagtgttgcttcgctatatagctcatagatggtctgaaaattatgtattataaaccatgccacgttaaaatagtgtattcatctttttttgttttaaatgctgtgatgtgttaaactgtgcaggaactttgtattatgtttggttgtcgtttgtctgtataggaaatgctgtaaattgcctattgaagatgctatgcaaggattataaatggaataagtttctgccattgtctgtcaccgcaaagtttgtaattcttggaactttctgtcgtggtaaaagccaacgtttaagtagaacaatttaaagactattttcttatgatcaataaacgtagaacaatttaaattcctaagatatcattgttcttgagaaaaacactggtcaagagcatcttagattctagagaagccttaagcaaattaaaaacctgacaacctattaagaagggacaaaagacatgatctgttatcacctatacaattattgaaagtgtagaagagaatttctcacacataaatatctccttgcattaactcatgaagggtcaacataattttctttaacattatcatcattca

SEQ ID NO: 14573 - DNA, 550 bp, Glycine max
tcgagagaatgctgctgctgtcttgtggtcactatgcaccggagatccactgcaattaaaactagcgaaagaacatggtgcagaagcagcactgcaggagttgtcagaaaatggaactgatagagctaagagaaaagctggaagcatattggaactcttgcagcgaatggaaggggttgataatctgcagagttcatagtctcagtgttgcttcgttatatagctcatagatggtctgaaaattatgtgttataaaccatgccattattgccacatcataatagtgtattcatcttttcttgttttaaatcctgtgcaggaactttgcattatgtttggctgtcatttgtctgtataggaaattctgtgaattgtctattgaagatgttatgctaggattataaatggaataagtttctgccattgtctgtcaccgcaaagtttgtaattcttggaactttctgttgtggtaaaagccaacgtttaagtagaacaatttaaagactattttcttatgatcaataaacgtagaacaatttaaattcctaaa

SEQ ID NO: 14574 - DNA, 650 bp, Glycine max
ctttattccaagtctcctattatatcaccaatcctaaagcatggccgataagcaaccccacttgaatggtgcttattacggtcccgccattcccccggcggagcaaccacactaccgccctagccgcgaaagaagctgctgttgctgcctcttcggaatcttgtggaagattctggttgcactcattgtcctcgttggcctcgcggtcctcatcttctggctggtggttcaaccccgttccttcaagttccacgtcacggaagccgacctaacacaatttgagtactataccaacaacaacacccttcactacaacatggtcctcaacttcactgcacgcaaccccaacaagaagctcagcatatactacgacaaagttgaggcattagcattctacgaggatgtcaggttcgccagttacggtgtcataacacacatgaactccttccgccagtacaagaagagctccagccccatgagcgccgttttcacagggcaacaattgctgatgctgaacaatgatcaagtctcagagttcaaccaagacaggaatactggtgtttatgacatctatgtgaagctctacttcaagatgaagttcaagctcggggactttatatccaatgactacaagcccaaagtcaaatgtc

SEQ ID NO: 14575 - DNA, 423 bp, Glycine max
tcctattcaagtcccctagctattacgattcacaacttattctcttcatctttaatttcccttgataatttcttagtcacatcaaagtaatatctcttgttcatcactcatctgcgactataagaatggcagattataagcaacaccacggaagaagctgcggctgctgctgcctctttggaatcttgtggaagattgtggttgcactcattgtcctcgttggtcttgtattcctcatattttggctggttgttcaaccccgctacttcaagttccacgtcacggaagcggacctaactcaatttgagtactatccaaacaacaacacccttcactacaacatggtcctcaatttcactgcacgcaaccccaacaagaagctcagcatatactacgacaaagttgaggcattagcattctacg

SEQ ID NO: 14576 - DNA, 420 bp, Glycine max
cccctattacatattcacaaattttcccgttcattcattcactcatctgcaaacatggccgataagcaaccccacttgaacggtgcttattacggtcccgccattcccccggcggagcaaccacgctaccgccctcaccgcggaagaagctgctgttgctgcctcttcggaatcttgtggaagattctggttgcactcattgtcctcgttggcctcgcagtcctcattttctggctggtggttcaaccccgctacttcaagttctacgtcacggaagccgacctaacacaatttgattactataccaacaacaacacccttcactacaacatggtcctcaacttcactgcacgcaaccccaacaagaagctcagcatatactacgacaaggctgaggcattagcattctacgaggatgtc

SEQ ID NO: 14577 - DNA, 466 bp, Glycine max
caagtcccctattacattacaattcaccattaatattctcttcatcatatactttcccttgccgataatttcttggttacatacaaggttcttttagttttcttgttcattcatgtaacatcaatctgcgaaacatggtgccgatatagcaaccgccactgtgaactggcgcttattacaggtcccgccattctctccggcggagcaacctacgctactcgccctcacagtcactcgcggaagaagcctgctgttgctgcctcttcggaatcttgtggaagattctggttgcactcattgtcctcgttggcctcgcggtcctcatcttctggctggtggttcaaccctcgtcctttaagtttcacgtcacggaagccgacctaacacaaattgattactataccaacaacaactcccttgattacaacatggttcttcaacttcactgcacacaaccccaataaga

SEQ ID NO: 14578 - DNA, 277 bp, Glycine max
aagagttgagaggcagttaggagatacaggtgtaaatggaaatggcctattgcgataccagcaatgtagtgtttcccctgaaattgttgaagttcaggatgattctgatcaaagttgattcccaagagtcaatgataacagaaggcaccatattatggctggaggattcagattggccaaagggttatcagataaaagaggtaatcaacactagtgagttgacatacttcattgcatcccatgttgaagagccaggaaaaaatctggtcctatatgt

SEQ ID NO: 14579 - DNA, 448 bp, Glycine max
ggtggaaaagatagccaaggaggaaaagccagtttctggagcaaagaaaatgtcatccagttctgccgctcccccaaaactaaaaactatgattaaatctaatgatgcaacacgagacaaaataagggaaattctccacgaggctttatccaaggttactggagaagctgatgaagatcttgtagatgtagtcaataattctgatcctatccgtgttcactgtgacagtggagtctgtattatttgaaaaatggggcccttctaatggggcacaaaaggtcaagtataggtccttaatgtttaaccttaaggattcaaacaaccctgatttccggagaaaagttctgcttggtgttattgagccagagcaactgatcaacatgagcacagcagaaatggctagtgagcaaaggaagcatgaatatcagaaaatcacagagaaagcttt

SEQ ID NO: 14580 - DNA, 553 bp, Glycine max
ctcgagccgcgagtttgagatcagtgtgaattatcataagatcggtgtgtcagaaatataagtttataaaacaaaaataaaaaccctttcattaacccaacagtgtcgctgcaggagaagaagatcgaatcgaaacgaaacgcgaataagtttctttctctcttgctggacgaataatggttctgaggaggaagaagatggagcagcgcttcaccttcttctgctgatgttgatttcatggccacctcccagtcccagcatcgctgcgttttcgttgggaatataccgtatgatgccacagaggaacagcttattgaaatctgccaggaggttggcccagtagtctcattcagactagttattgacagagaaactgggaaaccaaaaggttatggattctgtgagtataaggatgaagagacggctttaagtgctcgacgaaatcttcagggttatgaaattaatgggcggcaattacgcgttgattttgctgaaaatgataaagggaatgatagaaatcgagaccagggtcgtggcggtcctggaatgacac

SEQ ID NO: 14581 - DNA, 677 bp, Glycine max
gacagatacagatccttagccaccaagtagagaccgaataacaatgagtattctcttcccaagaagttcctcagcagcaaagaggaaaagggtcattagagaacttgttcagggtcgagactatgctactcagttgaagtttctgcttcagaagcctattggccctgatgggtctgtttctgctaaggaacttgtggccaatgtgctgagatctttcgctgaaactctctctgtgttgacttcttcttccgaggattcaacaagtggtcatgatcatgacgacgaggttattgctcagaatcttgtaatttccggagaagatgcctcgcaggtggaaagcattaatgatccgaggtctgagggttcgactgagagtaagaagggatcaaaggatcggagagggtcctataaaagaaggaagactgaacagacatggaccatagttgcccaaactactgatgataatcatgcatggagaaagtacggacaaaaggaaatcctaaattctcaatttcccaggagttacttcaggtgcactaggaagtttgaacaaggttgccgagcaaccaaacaagtgcaacggatacaagagaatcctgatatgtacaccattacgtacattggctttcacacatgcaaagacaccctcaaggctccacaaatggtgacacattctg

SEQ ID NO: 14582 - DNA, 442 bp, Glycine max
ggtctctttcatctcacaacgaacgtctcaagtgagaaagtttctgagagtctgactcgttttgtttttgctctctctaatctcttggtgcgcgttgcagattaaatgattttgtatctttggttctcttttaggatcaatggattttagagatttagctcacaagttctctcgttgtattgttactgtaagtcttcagtttttcatatccttacttgccttggccttgagtcagatctgtttgcccgaaatttgatgttctttgaatttaagctctttatttctctcaattcaaatatcatgctgtcatagacacattgttagaccatacctattctttaataaactggtaatctatatccaaatgcgtgtaactaactgggtatattaactcaataaattacctattctgtaagataaataaattatgcttatgaaattt

SEQ ID NO: 14583 - DNA, 469 bp, Glycine max
tctgatttgagcctctctcagtgacaacagtttctgagtcttacttttcttttcttctctgcccacgcgtccgatttttcttctctctaatctcttggttgcgtggcagactaaatgattttgtgtttttgggtctcttttaggttggaaatcttgggcttcagctgccatggtactttctgcaaataattgtcagcgcatggtatttcatatcagtcgtgggtaatttgtttgaaagctatttcatctctttaaagaaatacaagtctcttcattcgggaaaggttcggtaccttgccattgtcatagaaagtgaagaagcttatcagatttccaaagttgttaaactttcgcagtggcttgactctattggtgtaaagaatgtgtgcctttatgacatgaatggagtattgaagaagtctaaggaaaccatgtttcaaaaattgaagaatgcaaaatccattgagtg

SEQ ID NO: 14584 - DNA, 538 bp, Glycine max
cgttcgcgtgggtttactatttggctttggttgtattcgttgatgccgtggcgttttggctttcgtcttcttccgtttctcagtttgattacagcaattattaattactaattatattattaccactaccagtttcgtgtttggttatttgattttctctttttcatacttttaggatcaatggattttagagatttagctcacaagttctcttcgttgtattgttactgtttgtacagattggaaatctcgggcttcaactgctatggtactttctgcgaataattctcagcgcatggaaaggttcgctaccttgccattgtcatagaaagtgaagaagcttatcagatttccagagttgttaaacttttgcagtggctggacattattggtgtaaagaatgtgtgcctctatgacatgaatggagtattgaagaagtctaaggaaaccatctttaaagaattgaagaatgcaaaatccattgaggaagttaatgaagttgtcgcactccatgatccagatcacatgactttagaat

SEQ ID NO: 14585 - DNA, 627 bp, Glycine max
cggctcgaggttggtggcttgcttggtcttggtggaggttttattttgggacctcttttcctcgagctaggaatccctcctcaggtgtcaagtgctacagctacttttgccatgacattttcagcatctatgtcagtggtggaatattaccttctaaaacggtttcctattccttatactctttacttcgtggctgtatccacttttgcggcctttgttgggcaagttttagtgagaaagctggttgccatactagggagagcatctctgatcattttcatcctctccggcaccatttttgtcagtgcaatatcactaggtggtgtgggcatatcaaacatgatccaaagaattgcaaataaagagtacatggggtttgaaaacctttgtacctactcagcctagatattagaattcggattacagattcaatttcaaggactatataattggcatttttttcagttcgaattgtttttttatcaagtcagaattttaagcagtgttatgtcaataattttaagtgatgaaaattaattcagcgcttaattttttattttttatttgtcaaacatggctgtatcctggacagagtttcttaaatatataatcaacgatatctctctt

SEQ ID NO: 14586 - DNA, 1071 bp, Glycine max
  unsure (1)..(1071): unsure at all n locations
tgctcccttggcattgttcccttcatcaatgcacagattgttttccagcttcttgcacaagtatatcccaaattgcaagatcttcaaaagagagaaggtgaggctggaagaaagaaagttctgcagtacactcgatatgcttcagttggatttgccattgtgcaggcaattggccaagttcttttcctacgtccctatgtcaatgacttttctacagagtgggttatttcttctgttatcttattgactcttggctctgtgtttacaatgtacatcggagaacgaattacagacctaaaacttgggaatggcacctctcttttgatattcacaaacattatctcgtacttgccagcttcttttggtaggacaattgctcaagcatttaatgatgcaaactacattggacttggtaccattgttttgtccttctttttgttggtagttggtattgtttatgttcaggaagcagagagaaaaatcccgcttaactatgcttctagattcaccagcagaagcactggtcttgaaaagtccgcttacctaccctttaaggtaaatagttctggagtaatgcctatcatattttctacatcatcattagctcttcctggtactttagcgcgcttcactggtttaactgcactaaagaaggctgcagtggcgttaaatccaggaggttctttctaccttccatttaacatacttttgatagccttcttcaactactattacactttcctacaactggaccctgatgatgtgagtgaacaattgaaacgtcaaggtgcttcaattccacttgtcagaccaggcagaactacagctacatttatcaaaacagttcttagtagaatatcagttctgggttcaacatttttggctatcttggctgctggtccagcagttgttgaacagatcactcacttgaccgcattccggggatttgcaggaacatctattcttattcttgttggttgtgcaacagacacagcaagaaaagttcaagctgagattatatcccagaaatacaagaacatagagttctatgattntgataaatactaaccg

SEQ ID NO: 14587 - DNA, 1291 bp, Glycine max
caaataataaactaatattatcaattaatccccaaggttcgttattattaaacgatggtatttgatttgtcaaatacatcattattgggtactcttttatatgtatggcgcaacccaatttttgtttttttttttcaatttttaatctcctatccctttttttaattttggaatcgaaatatctaatctaaataatccaaaaattcactcttaatcttgacagtgatatatgttgtatatgtaaatcctagatgtaaaaataggcagacttctcccgggaaaaaaagtaggtaaaaaaatatgctaagtataaattgtctactgatgaaatacgaaagctgatgatattgaaaaaaaaagaattgtaaataaggttcaggttcgacttccatagagaatatagatgatattgtctataatgatagaaaaaaataaaaaactttcgaaagattttatccaattgaaattttaaaaatgactgggataaacttaagaattcaattattgaaattgaataagtaaacaatttaattggattggtcgaatggtatcaaaaaaatggagtactaactcccatttcttatttattattgaattaaccgatcaacttgctttgttatcgaacatttctttttgatttcaaaaattttccggaaaaaatttgaatctatttttatatgcgaatcaatcctactacttctggtcctgaggtttctgcgcttgaaaaaaaaaatctgggacgtatcgcccaaataattggtccggtactagatgtagcttttcccccaggtaagatgcctaatatttacaacgctctgatagttaagggtcgagatactgttggtcaacaaattaatgtgacttgtgaagtacagcaattattaggaaataatcgaattagagctgtagctatgagtgcgacagaaggtctaatgagaggaatggaagtgattgacacaggagctgccctaagtgttccagtaggtggagcaactctaggacgaattttcaacgtgcttggagagcccattgataatttaggtcctgtagatactcgcacaacatctcccattcatagatctgcgcctgcctttatacaattagatacaaaattagccatttttgaaacaggaataaaagtagtagatcttttagctccttatcgtcgtggaggaaaaataggacttttcggtggagctggagtgggtaaaacggtactgattatggaattgatcaataacattgccaaagctcatggaggtgtatctgtatttggcggagtaggtgaacg

SEQ ID NO: 14588 - DNA, 509 bp, Glycine max
cctcgcgtccgcggacgcgtgggcggacgcgggggatttttatcgaacattggtttttgatttcaaaaattttccggaaaaaatttgaatctatttttatatgcgaatcaatcctactacttctggtcctgaggtttctgcgcttgaaaaaaaaaatctgggacgtatggcccaaataattggtccggtacttgatgttgcttttcccccaggtaagatgccgtaatatgtacaacgctctgggcggtaagggtccagatgctgttggtcaacaaattaatgtgacttgtgaattacagcaattattatgaaataatcgaattagagctgtatctattattgcgacagaaagtctaatgagaggaatgtaagtgattgacacatttgcttccctaattgtttcatgtagttggagcttactctattgacgaattttttatcgttctttggatagccctcattgtattatttaatgtaccttgtaatatactttcctactatcaatcttc

SEQ ID NO: 14589 - DNA, 391 bp, Glycine max
gttagagggagggtgaggatgcagggaattaaattagggtttacaataatgttggtggttgctggcattgtagcagtgccacgcatctcgggtcatgtatgcaatggtaattcgggtactattcaagaggaatgcgaggagtactataaacccggagggccaactattccgccatctacagaatgctgcaacgctctgagaaatgttgatgtgccctgcatgtgccgacttgctaacaattttcagtcatacttcagcggtggaaaagctgtctataccctcaggcagtgtggaaaagatgttccttccggaaccacctgcggatgttaccgtgctccccctgcttatactcaagtgtgatacgtcagcattgaagacgtatgcatacaac

SEQ ID NO: 14590 - DNA, 396 bp, Glycine max
ctccaaagcgacgctgttcccattcccttcccttccctctccgcaaccccactcgcccacctccgctgcttcctcacgctctccccacgcgccttcaagatcgtccttttcaactccgaccaccaccccgacgacgccgccggcaccgccggcaacgccaacaactgggactgcggctctttctctctccactctagggccgtcggcgttcggcttgacaccatggaggagttttgccggattctcgccggaaaacgttggagcttttacaaaaccaagaaagccccatcttccgatcagcgccacggcggggcgttttacctcttcagaagggtggacgtgaaccgggttcgggtcggtggcgtcggagctccggaggatggggcatgtagggtg

SEQ ID NO: 14591 - DNA, 407 bp, Glycine max
ggaacttcttcgcattttccaccgaaaatggcttcccaaaacccagcggaggaagaaaattcaaagcgacattggtcccttgaagacttcgaggtcggtaaacctctcggtaggcgcaaattcggtagagttttcgtcgccagagaagtcaagagcaaatttgttgtggcgttgaaggttatattcaaggaacaatttgataagtacagagttcatcaccaactgaggagagagatggagatacagaccagtctccggcacgcaaacatcctgcgtctttacggttggtttcatgatgctgaccgtgttttcttgattcttgagtatgctcataagggagagctttacaaggagctgagaaaaaagggtcatctcactgagaagcaagctgccacgtatattttgag

SEQ ID NO: 14592 - DNA, 410 bp, Glycine max
cagaatgtgaactacaagtggaccaaaatcgcaaagagcaagcgaaattcaaaacgcagaagaagtagaagaagctcgcgtcgtgcggtgaatcaaattcaatccccagaaggaaacatgtttactctttgcaacccctcttctcttttctctgcaaccgggtatcgtggctccgattccggtaaaacccaccaaactctcttcgaatctctctgtcaccaactccgcctcttccggcgagagaatcagcagtagcaccaggcgaagaaccatttcacccttcgaatcccgaatctcactcatcttcgccctcgctcctcaagccaactctctctcccagcgacttctagcggacgtggctgccgagactgcgagatacgtgtttccgaagagatttgaaagccgcaatc

SEQ ID NO: 14593 - DNA, 590 bp, Glycine max
aaaactgtctctgatgatgacaaggctggcagtagtggtgctgctgctgctaattctccttctatggctagacaaaccaagaacagctggttgttcaaggcatgctatgctgtaagacattgggatggccttcttaccattagtgataaatctgttggcagatatgcacctagcaacgctactgtggcaatcaacctcaaattgaagccggcatcaaatctgaaatggcatagagttttgtttaaaattagtggctctgcattggctggaaactgccagaacattgaccccaaggtggcaatgcagattgctaggggcatatctgttcttagtttgtctagccatagaaggagaattagcaccaccaccactactgccagccttatcatcatcagaaacagttttcacagacagagagttgccaacaatagcttcaatcttcttaaaccaatgccagtgactagtggcaatgccaccactcccaattctctgaagctccaccttatacctcttcttcaaattatcaatcttattcttacactgctccacgctcttctgatgcttccactctccgccgcatcgttccagca

SEQ ID NO: 14594 - DNA, 746 bp, Glycine max
cagaaaattgggagtggtggcattgtctgtgaaaactgtttctgatgatgacaaggctggcagtagtggtgctgctgctgctaattctccttctatggctagacaaaccaagaacagatatgcacctagcaacgctaccgtggcaaccaacctcaaaccgaagccggcgtcaaatctgaaatggcatagagttttgtttaaaattagtggctctgcattggctggaaactgccagaacattgaccccaaggtggcaatgcagattgctagggaagtggcaacagcttgccgccttggggtggaggtggccattgttgttggtggtcgtaacttcttttgtggagatgcatgggtgtctgctaccgggttagatagacctacggcataccaaataggtatgatggcaacagttatgaattctattttgcttcaatctgctttggaaaagctgggtgttcaggcacgtgttcagaatacaattcttgatgccagaggttgctgaaccatatagcaggcaacgagctattagacatcttgagaaaggaagggtcatatttggtggtgttggtgctggcactggaaatccacattttaccactgatacagctgcagctctcagagcttctgagcgtatgaccttgcacttccacttaagcatcgcatctttagttttgctgtttttatgtcagttctaattatgtgctctataatcatctgtatattatgcttgatgcctgagtaggagt

SEQ ID NO: 14595 - DNA, 1005 bp, Glycine max
  unsure (1)..(1005): unsure at all n locations
gctccaacactgaagtgaagagagaaacaatggccaatgtttcaattccactcccacgaaacggtttctccaaacccaattactcgacaaaacgcccatgtttcaccccttcagcttcaacactcagaatttcttgctctggagtggctgagtttgatggatctcatcagaaaaaaggaggtttgtttaatttcaatggaatcaagggcgtggcttgtggtattcttgcagcttgtgctgttacttctgctgcatttcctgttactgctgctactcagaggcttcccccattgtcaactgagcccaatcgctgtgagcgtgcatttgttggcaacacaattggtcaggcaaatggtgtatatgataaaccattagatctccggcaatgtgatttcacaaatgagaaaaccaaccttaaggggaagtccctgtctgctgcactcatgtcagatgctaagtttgatggagctgatatgacagaagttgtaatgtcaaaggcttatgctgctggtgccagctttaaaggggtggacttctcaaatgcagtcttggaccgtgtgaactttgagaaagctgatcttgaaggagctatatttaagaacacggtattgtcaggatccacctttgatgatgctaagctggacaatgcagttttcgaggacactatcattggttacattgatctccagaaactatgcacaaataagaccattggtgatgaatggagagttgaactaggatgtcgatgaaaagcaaagtcttcactgtcttctatttctagtatgctgctatgctatgacatgacacaaatattttgatgagggtaactagtggatgaatgctacgtccagaagtaaattcaattccttgcttttcctgtatgatattgtataacttatattattccctgtgattttaacatacaaattgaagacgctggtataattaataattctacttgtattttttttnnnnnnnnnnnnnnnnnnnnnnnnnnnnnnnnnn

SEQ ID NO: 14596 - DNA, 1276 bp, Glycine max
cacaaatctcggcagtataccgacactgaaaaccagagaaaagaaaagcaccttttttccgccattattgacccttcttgaaacctggtcatcaattgtgatgaaggactcaacatcttgacaccaccccatttcctaattgatttggattagtcgtgttggacctggatgctgctgctcatacagttgatccacaaatgagattccaccttgcattgtttctctttttggcttctcttcaagccactttaagtcaagatattgaacatggttcacttctagtagatggagctcagactaaggctgaaacaggtgataactttatttgtgccactattgattggtggcctcatgataagtgtgactataaccattgcccttggggatattcttctgttgtaaatttggacttgtctcatcctttcctagccaaggcaatccaagccctcaagccattgaggataagacttggaggttctttgcaagaccgggtgctgtatgatgtaggaagtttgaagtctccttgccatccccttcaaagggttaaaggtggattgtttggattttcaaagggatgtttacacatgaaaaggtgggatgagctgaatcagtttttcaacgagacaggggccattgtgacatttggcttgaatgcactccatgggaagcaccagattagtcataatgtttgggaaggcgcctgggaccctacaaatgcgtatgattttatagagtacactatttcaaagggatacaagattgattcatgggaacttggtaatgagttgagtggtaagggcattggtgcaagtgttggtgttgcacaatatgggaaagacttgataaagcttaaacaaattctaagcacgttatacgagagctccaagttcaagccttcacttgtcgcacctgggggattttatgaaaaacattggtatgacaggcttcttcaggtttcgggttcaggcataatcaatgttctgactcatcatttatataatttgggcccaggtagtgacgagcatcttgaaaggaagattctagatcctgagcgcttgagcagggtggaatcaattttcggcaatctttcagaaaccattaaaatatatggtccttggtcttctgcatgggtaggagaagctggaggggcatacacagtggtggcaatcatgtttctaacagatttctaaacagcttttgtgcagttttgtggcatcggttaatgggaaagaaggttcttacggtctccagtgatgttcatattaaagacttttac

SEQ ID NO: 14597 - DNA, 713 bp, Glycine max
catggctccagtgccaaccttgtgtcatatactgccacgtccaagttgaccctatattcaccccttcagtatccaagacctacaaggccttgtcctgctcatcctctcagtgttcctctctcaagagctccccactgaatgctccaggttgctcaaatgcaactggtgcttgtgtctacaaagcaagctatggtgacacttccttctcaattggctatttgagtcaagatgtgctaaccttaaccccttcagcggcaccatcatcaggttttgtatatggctgtggtcaagacaatcaaggcttgtttggaaggtcagcaggtatcataggtctagccaacgacaaactctccatgcttggtcaattgtccaacaaatatggcaatgccttctcctattgtctcccctcatctttttcagcacaaccaaactcttctgtatcaggtttcttgtccattggagcctcatcattgtcatcatcaccatacaagttcactcccttggtcaagaatccaaagattccaagcttgtactttcttggtttgacaactatcactgtggcaggaaagccactaggagtttctgcctcaagctacaatgttcctaccataattgactctggcacagtaatcacaaggcttcctgtggctatttacaatgcattgaaaaaatcttttgtgatgatcatgtccaaaaagtatgcacaggcacca

SEQ ID NO: 14598 - DNA, 595 bp, Glycine max
ggaacaagtaataaacaaatagtagcatgcgtgtgggtatattcctggatcggctctttcctcaacagcgccgcgtgcaggcccaaccctaggcagagagaaaattccccaaatcacaaaccctagattgagagaaaccctaacacgccatgggaacacccgagacatctcgcgaaccctgccccgatcgcatcctcgacgacataggcggcgccttcggcatgggagcggtgggtggctccgccttccattttctcaagggtctctacaattcccccaagggcgatcgattcgtcggcgccacccaggccgtgcgccttaacgccccccgcgtcggcggcagcttcgccgtctggggcggcctcttctccgcctttgactgcaccatggtctacgctcgccagaaggaggacccctggaactccatcgtcgccggcgccgccactggcggcttcctctctatgcgccagggcctcggcgcctccgcccgctccgcggcattcggcggcgtcctcctcgccctcatcgagggcgccgggatcatgctcaacaagttcctcagcgcgcagcagcccatgctatgatcatggacgag

SEQ ID NO: 14599 - DNA, 555 bp, Glycine max
ctcgagccgaatcggctcgagagaagagaaaagagaaaacaaagaagagagagatgggaactccagagacgtcaagggaaccatgtccagaccgcatcctggacgacataggcggcgcgttcggcatgggcgcggtgggtgggtccgccttccacttcctcaagggcctctacaacgcaccaaggggcgcgcgtgtcgtcgccgcgtcacaagcggtacgcctcaacgcgccgcgcgtgggcggaagcttcgccgtgtggggcggcctcttctccagcttcgactgcaccatggtctacctccgccagaaggaggacccctggaactccatcttcgccggcgccgccaccggcggcttcctctccatgcgccagggcctccccgccgccgcccgctccgctgcgttcggcggcgtccttctcgctctcatcgagggcgccggcatcatgctcaacaagttcctcagcgcgcagcagccgatgccgatgattgtcgatgagcctcttccgcctaacgggctaccgggccagccggttgcttcggcgccggacgctg

SEQ ID NO: 14600 - DNA, 376 bp, Glycine max
caaacccaaccctagattgagagtaaatatccccaaaaacaaaacacacatctctttcattctctccctcaccaaaccctagattgaaagaaaccctaacacaccatgggaacacccgagacatcgcgcgaaccctgccccgatcgcatcctcgacgacataggcggcgccttcggcatgggagcggtgggtggctccgccttccattttctcaagggtctctacaattcccccaagggcgatcgcttcgtcggcgccacccaggccgtgcgcctcaacgccccccgcgtcggcggcagcttcgccgtctggggcggcctcttctccgccttcgactgcaccatggtctacgcgcgccagaaggaggacccctgga

SEQ ID NO: 14601 - DNA, 375 bp, Glycine max
attaaagtctgggatgtatctggaaatttggaaggtaaaaaatttgaaggacctggagggggcattgagtggcttaggtggcatccaagaggacacatactcttagctggttctgaggatttcagcatttggatgtggaatactgataatgctgccttacttaatacatttattggtcatggtgatagtgtaacctgtggtgattttactcccgatgggaaaataatatgtactggttctgatgatgcaaccttgagaatatggaatccaaaaactggagaaagcactcatgttgtgcggggccatccatatcataccgagggattaacatgcttgacaataaattcaacttcaactcttgctctttcttggtct

SEQ ID NO: 14602 - DNA, 402 bp, Glycine max
tacctctcctgtaagcttcagttcagcagataaggtaatctcaaagctcgtcgtgttttcgcatcaatggccatggccatggctgaggcttcaagaatcacgttacactccactctcctccctttttttacccccaaaacccacgttggtcaccgccacttaagcctctcgtcatcacgcaagcaccaagtccagtgctcggtgtctgcaggcgcggcggctcagacgaacccagtggcttggggctgcgagattgactcgctggagaactcttcggctctgcagagatggctgtcggagtcggggcttccgccgcagaagatgggaatagagagagtggaagtgggagagagaaggctggttgctttgaagaacattaggaaaggggagaaactactcttt

SEQ ID NO: 14603 - DNA, 1000 bp, Glycine max
cccacgcgtccgctatcctcaactagtgaaattccttcttctctttccacgagccaacaacaacatcattgatgcaatttctgttcccataaataatgcccgggagaaggagaaggaagttgaaatcgttgagtgatacaattaccgacagcagacgggcatcagtggaggtggaaaatgaatatttagagctgcaaacttggtctgatctccctactgaactcttggaattaatactatcccgtttaagtctagatgataatgttcgagcttcggttgtttgtaagagatggcattctgttgccacttctgtatgtgtggtaaaccaatcaccatggctaatgtattttccgaaatttggtgactggtatgaattctatgaccccgcgcaccgcaaaacctattccatcgagttgccagagttgaggggatctagagtttgttacaccaaagatggttggttactgctataccgacccagaactcaccgtgtgttcttcttcaatccctttactatggagattatcaagctgccaaggtttgagatgtcataccaaatagttgccttctcttgtgctccaacatcacctgactgtgttctgtttactgttaagcatgttagtcctactgttgtggccatcagcacttgttaccccggggcaacagaatggaccactcttagttaccaaaaccgcttgccctttgtcagtagcatttggaataagcttgtgttttgtaatgggctattttattgtctgagcctcactggttggcttggggtgtttgacccagtagaatgtacttggagtgttctggcagtacctccacccaaatgcccagagaacttttttgccaaaaactggtggaagggaaaatttatgactgagcatgaaggagatatattagtaatttatacatgctgtagtgaaaaccccattatttttaagttagatcagacattaatgaaatgggaagagatgacaacactagatggagtaac

SEQ ID NO: 14604 - DNA, 1242 bp, Glycine max
  unsure (1)..(1242): unsure at all n locations
gcatgtccaatcaaggacgtggtaaatgacacaattgccattgtttgagctatatctgatgtagtttgagcagaaggcaaatgaagtggtggcaatgctcccttgggtcaagaatgtaaaagttacaatgtctgcacaaccagctagacccatatatgccgagcaacttccagcaggtctacagacaatttcaaatattgtggctgtgtccagttgcaaggggggcgtgggaaaatcaactgtagcagtaaaccttgcttacactttggctgatatgggtgctagagttggtatatttgatgctgatgtttatggtccaagcttaccgactatggtctctcctgaaaaccgactgttagtaatgaatccagagaagaagaccataattccaactgaatacttgggagtgaagttgatctcttttggatttgctggacaaggacgtgcaataatgcgtggccccatggtttctggagtcattgatcaacttctgactactactgagtggggtgagctggattacctcattattgacatgcctnctggaactggagatattcaactcacattatgccaggtagttccattaactgctgctgtaattgttaccactcctcaaaagctgtcgttcattgatgttgcaaaaggagttcggatgttttcaaaacttaaggtgccttgtgttgctgttgtggagaatatgtgtcattttgatgctgatggaaaacgatattacccatttggcagaggttcaggttctcaggttgttcagcagtttggaatacctcatctatttgatctccctattagaccaactctctctgcttctggagacagtggaatgcctgaagtggtagctgatcctcaaggtgaagtttccaagatattccaaaatctaggagtatgtgttgttcagcagtgtgccaaaatacgccaacaaggttcaactgcggccacctatgataaatcaatcaaggcaatctaagtgaagggaccagattcaaaggaagaattctttctgcatcctgcaacagtgagacggaatgatcgctctgctcaaagtgtggatgaatggacgggggagcacaaattgcagtacagtgatattcctgaagatattggacctgaagaggttcgaccaatgggaaattatgcagtttcaataaccttgggctgatgggtttagtcagattgctccttatgatcgattgcatgtgattgaactgctagttgatgtttttg

SEQ ID NO: 14605 - DNA, 414 bp, Glycine max
ccccttccgtaacctcggaattcggctcggggggaaagacctgcatattgataaagctctatgagaggtatcgtttcggttagagctcactacaccagcatgtccaatcaaggacgtgcttgagcagaaggcaactgaagtgggggcaatgctcccttgggtcaagaatgtgtaagttacaatgtctgcacaaccagctagacccatctacgccgagcaacttccagcaggtctacagacgacttcatatagtgtggctgtgtccagttgcatcgcgggcgtgggaaaatcaactgtagcagtaaaccttgcttacactttggctgatatgggtgctagagttggtatatttgatgctgatgtttatggtccaagcttaccaactatggtctctcctgaaaaccgactgttagt

SEQ ID NO: 14606 - DNA, 426 bp, Glycine max
cttttccttactacacccttcatcctctatcttcttctctcactccttcttctaaaggctctgttcatctttgtccatgctcttccacacgttctcgctctcttccccaattcccttccaaactacgacgcaaagccaccatcaagccgaggctgttgacgatcatcgaccccattttgctcttcaacggcgtcgccaccactttctatttcgacacgcaaacacttatcgtcactgtcagtgttttggccgccattgctctttctctcttccttggccttaagggtgatccggtgccttgtgagcgctgtggtggcaacggtggcacaaaatgtgtattttgcaacgatggcaagatgaagcaagaaatggggttaattaactgtaaagtatgcaagggttcaggattgatattctgcaagaaat

SEQ ID NO: 14607 - DNA, 738 bp, Glycine max
gaattcccgggtcggccgacgcgtccgcccacgcgtccgaagatcaccaaagtacttgtgagtgtatacccaacacaaactaagatcaacatggactactacacccgcgtttcagaagttgagagggaacctatcatggagtattccacaccacgaccaatgatgggcaactaccaccaccctaatgctcaccgtgtcctcaacgagaagattgtttatgaggaggatgtgattggaggatcccgccacaaccacatgcatcaccaccaccctgagactcatgagagagtcaaggtggtggagtatgaacaagttcctgagaggcgcgttgtctatgaagagaaagttgcttatgacaacgatcgttactactctccaaggtattgaaattggacaaatggaagaacacctataacgtgttatcatgtggctttttattaggcaggctacctagtataccaaaagcaccactgtgcttgtactaaataaattcctgcttatatatactggccattatgttatatataaaaatcatatgcatgccgtttatataaataaagctatgttgaataatatatctattttgtaaaaaaaagaagataaaaacaaacaaaaaagaagttaataaacaaactgttgatggtaaaatagataatgataaaaaattttttggttgttgaggtgtaacaaatttttgaaaaaaaaaaaaaaaggggggccccaaattaggaagttttt

SEQ ID NO: 14608 - DNA, 1116 bp, Glycine max
caccaaagtacttgtgagtgtatacccaacacaaactaagatcaacatggactactaaactagagtaaattaataaggaagggaaccatatcagccagttttgtgccagtgatgtgtggctcagctttcaaaaacaagggagtccaaccattgctcgatgcggtagtggattatctaccatcaccacttgacttgccagcaatgaagggcagtgaccctgaaaacccagaagaaacaatagagagggtagcaagtgatgatgaaccatttgctggactagcttttaagatcatgagtgatccatttgtaggttcccttacgtttgtcagggtgtatgctggaaagctaggtgctgggtcttatgtactcaatgcaaacaaagggaaaaaggagagaattggtagacttttagaaatgcatgcaaacagcagagatgatgttaaagtggctttagctggtgatattattgctcttgcaggtttgaaagatactattacaggtgaaacattgtgtgaccctgataatccaattgtgcttgagcggatggacttcccagatcctgttattaaggttgctattgaaccaaaaactaaagctgatgttgacaagatggcaactggtttaatcaagcttgcacaggaagacccttctttccacttctcccgtgatgaagagataaaccagacagtgattgaaggaatgggagaattacatcttgaaatcattgttgatcggcttaaaagagaatttaaggtggaagctaatgttggtgccccccaagtaaactacagggaaagcatttccaaaactgcagaagtgaagtatgtgcacaagaaacaatcaggtggacaaggtcagtttgcagatatcaccgtccggtttgaacccatggacccaggtagtggatatgagttcaagagtgaaatcaaaggaggtgctgtaccaaaggaatacattcctggtgtgatgaaaggattggaagagtgtatgagcaatggtgtgcttgctggctttccggtcgttgatgtacgagcagtactcacagatggttcttaccacgatgtagattcaagcgtgttggctttccagttggcagcaaaggagcttttagggaag

SEQ ID NO: 14609 - DNA, 427 bp, Glycine max
ctttattcttcttaagccgtttctttaaaaccttttggccagcttcttgctcttggttttgcatctttctttttctaaaccccacatcatctttattccctgattttcttctattagagtcagtggcagtgttttgaccttcaagtgatgcaccaccattgttatggccattttcgttattctttggcttcatggacaaggctgcttctcgattttctttcagtgcctttttactcttattgttgcccttttgtcttttgcatttgtgtccttgtggggattttccatttgccactgcaacacccgattcaccatttgtattcagtactgattcctttgctggttcgtcatgctctcgagattttcgctttctgtcctttacaggcttgcaaccttctaccgtgccagggttgtcattatccatggc

SEQ ID NO: 14610 - DNA, 521 bp, Glycine max
aattattaatataataatagaaataagttgttatctcgaagaagaaaggagcaatcgaattgaatcgaagagtgaagaaagatgcttccctcatttctaagcctggtgtcagtgtacagcctctacctccgacgctgcttcacgggcgcggggctctcatcgcagacgcttagagtggacgacgaatccacgctccacttctgggccccgacaaacccaacggcccagaagccttccctggttctgatccacgggtttgggccggagtccatatggcagtggcgcaaacaggtccaattcttagcccctcacttcaacgtgtacgttccggacctaatattcttcggaggatcgagcaccaagtccagcgaaaggagcgaaacgtttcaggcagcgtcggtggggaagcttttggacaagttggaggttgagaagttccacgtggtggggacgagttatgggggcatggtggcttacaatttggccaagatgttgggtgaagacagggtgacaaaagtggt

SEQ ID NO: 14611 - DNA, 1899 bp, Glycine max
agggggcatgaatcactttggggtcttgcctatctgcttcctcgtagtacttcattgagagagacatggacactgtactaagtactacgctgctactcatgttggcatgctccatcgtgcatgttcttcgttcactacaagcaagaatgagaagaaaatcaaactacaatcttccaccaggaccctctcttctcaccatcattagaaactctaaacaactctataaaaagccacagcagacaatggccaagcttgccaaaacctatggccccataatgcgtttcaccataggccaatcaaccaccatagtaatctcctcaatagaagccacccaagaggttctccaaacccatgactcattattctcggacagaacaaaccccgacatcacaacctcgtacaaccacaaccgttacagcttggtttttctccctgtctcacccctctggcaagaactaagaaaaatctgccacggaaacttgttttcggcaaagacccttgacgcaagcacggaccttaggcgcatgaaaatgaaggagcttcttaccgatatccgccaaagaagcctcaacggcgaagtggtggacattggaagagcagccttcatggcatgcattaactttttatcgtacacgtttctctctctggattttgttccctctgtaggtgatggcgagtacaaacacatagtggggactctgttgaaagcaacggggacaccgaacttggtggattattttccagtgttgagggtgtttgatccacaagggatcaggaggcacaccaccaactacattgacaagttgttcgatgtgttcgatcccatgattgatgaacgcatgaggaggaggggagagaagggttatgccactagccatgacatgttggatatcttgctggatatttctgaccagagtagcgagaagattcataggaagcagatcaagcatttgttccttgacctattcgttgcggggacggatacaacagcctacggcttagagagaacaatgacggaactaatgcacaatccagaagccatgagaaaagcgaagaaggagatagcagaaacaataggagtaggaaaaccggtggaggaatccgacgtggcaaggctgccatacctgcaatcagtgataaaagaatctctgcgaatgcacccaccagcaccactgctactgccacgaagggccaaaacggacgtgcaagtctgtcggctacacggtcccacaggggacacagatcctcatcaacgagtgggccataggaaggaacccggccatatgggaagacgcacataggttctcgccagaaagattcttggactctgacatagacgtcaagggtcgccacttcaagctcacgccgttcgggagcggaagacgaatttgccctggctcccccctcgccgttaggatgctgcacaacatgctcggttccttgatcaacaactttgactggaagcttgagaacaacattgaccccatcgacatggacttggatcagtccctcagggctatccctgttctcgtaaatgccaactaattcaacatcatctgtatgttggcatgccatcccatgtacctttttctcagaaacagcaaacagaagcttgattctttggtttgaatgtttctcgtatgtgctagctttgatccagcttgtttcttccagcctgggtttaggataaataaataaccaggctttgagtaacatgatgatcatttattatgtttattaattgttgcagaagataggagtcgtctgagtgtagctttaatctagctagtttgatttggcttgtagtgcctctttgtgttagcctttgtatgggatgtaaaacagtgtcctcttgaaggaaagaaaaaaaatagttgttctctattgtttctacaaaaa

SEQ ID NO: 14612 - DNA, 1176 bp, Glycine max
tgatatttctgaccagagtagcgagaagattcataggaagcagatcaagcatttgttccttgacctattcgttgcggggccggtggtggccgtgaagaggttgaaggatgtgacaatttccgagaaggaatttaaggagaagattgaggcggtgggagcgatggatcacgagagtttggtgcctctcagggcttactatttcagcagggatgagaagctccttgtctatgattatatgcccatgggaagcttgtctgcccttttacatggaaacaaaggagctggtaggacaccatgaattgggaagtgagatcaggcatcgcccttggagctgcccgtggcattgagtacctacattcacgagggcctaatgtttctcatggaaatatcaagtcatcaaacatcctcttaaccaaatcatatgatgccagagtgtctgactttggccttgcacaccttgttagcccctcctctacccctaaccgtgtggccggctaccgtgcaccggaggtgactgatcctcgcaaggtgtctcagaaggtagatgtgtacagttttggtgtgttgctcttggaacttctgactgggaaggcacctacccatgctctcctgaatgaggaaggagtggacctccccagatgggttcaatccgtggttagagaagagtggacttctgaggtctttgatcttgagctccttaggtatcaaaatgtagaagaggagatggttcagttgttgcaactggcagttgattgtgcagcacaataccctgacaagcgcccttcaatgtctgaagtggtaaggagcatacaagagttgcgaaggtctagcttgaaagaggaccaggaccaaatccaacatgacaatgatatactattatagaagaacatgtatcttctccctcgactttgctttgtcagagtcggagcccatattttacttgctaaatcctgtgcgtatgttgcttgcattctgttggcttgggccgtcctcaaatttctttctttggcaccaaacttttgaattttcttcctttttttttcctcctcaaatctccattgtgccatctcccccctttttcttcccaatcaatacattgttccattagttattgttgttggattctggttgattgtaattattacttctgctttaacatgccttttacttttgttg

SEQ ID NO: 14613 - DNA, 388 bp, Glycine max
gtccaaagttcttgccgacaagggggtctccgatgtcgagaacggcgctggtcatgctaatggcaactctgcggtcgcagctgtggcggtggggaatggcggtagcaaggtggcggaagggaacgcgaagaagttggtgttttttgggaatgcggcgagggcgtttgatttggaagatttgctcagggcttcggcggaggttttggggaaagggactttcgggacggcgtacaaggcggtgttggaggcggggccggtggtggccgtgaagaggttgaaggatgtgacaatttccgagaaggaatttaaggagaagattgaggcggtgggagcgatggatcacgagagtttggtgcctctcagggcttactatttcagcagggatgag

SEQ ID NO: 14614 - DNA, 730 bp, Glycine max
aaagaaaccctatatagtatatggtccttgttaatgctatgaatattaattgtgatttggccttgttggatctgagttatggaaatggagaagaggaagaacaagagggtcatgagagaggaagaagagagtgaaagagtgaagaacaagagactaaagggtgtagaagaagaagatggtagtgatggtggtgttcccacggaggaggaggtggaagagttttttgccatactaagaaggatgagggtggcggtgaagtactttgatgacaaagggagtggtggcaaggagtggcggaaggccctcgagacggcggagctcacggtggaccaccgccacgacgtcgttgctgccgaagaggatgacaagccaaggaaaaagggtggtgaggtaattatcaatgagggctttgacttgaacgccgtcgcgccggaagccgcagagggcggtggcgcgtagagttaattgattggcgtctgggacgcacgcgctgtcggtataaccaccgtaagattgaaggtttgggtttctcaaacatgttaattagttgccttgatttctccgaagaacaaaacgaaaaatgattctacacgtctccctctctctctctctttgtccttttcggattaattaggttgtatcatttaatatttcatcaatcaacagcactgctaagccttcctatattatgtataatactacctaattaatcgaaaaggacaagagagag

SEQ ID NO: 14615 - DNA, 1194 bp, Glycine max
ggtagggtttttttatcaattctttaacctacccaacatatgtgcatgattaatccttgcaagttgcaactatcataccaactaaggtttgggtttattcaagtttttagcacacacaagattgggccttggttgagtatttgcaccgcagagacagagaggaaaaagaaacgcaaacaacgatggctgtgaaaggatcaccacaacggtgggacatgagattagttttgacaattactcttcttttaatctcggtctctgtttctgctcttcaacacgtaagtcacaaaaacattaatcccaccaccgttgagacaacccaaactagttttcttggtaaagtcgtgaactttttgtggagctcatctggctctggataccaacatacttggccggatatagaatttggatggagaataataacgggtacgataattggattcctgggatctgcatttggaaccgtgggtggtgttggtgggggtggcatctttgtcactatgctctcccttattattggatttgatgcaaaatcagctactgcaatctccaagtgtatgattacgggtggagcagcagcgacagttttctacaatttgaagcaaaaacatccaacacttgacatgccagtgatcgactacgacttggcacttcttttccaaccagtgctggtgcttggaatcagcattggagttgccttcaatgtgatttttgctgattggatgatcacagtcttgctactaataattttcgtaggaattgcaaccaaggcattcttaaaaggagttgagacatggaaaaaagaaaccattatcaagaaggaaactgctagacaatcacaatttaatggcactgaaaggaccgcggaggtcgcatatgagcctctaccgggagggccaaacacaagcaatcataaagagcctaaaaaatccaaggaaacgggggatcaattcttgagaatgttcgttggaaagcacttggagttcttttcactgtctgggtccttatacttgcctccgagattgcaaaaagtcacacaacaacttgttcagtggaatactgggtacttaatctactacaggtccctgtggcattaggagcgacttcatatcaagctgtgcttctgtacacaggcaagagagtgatagcatccaaaggagatcaaagaacacaatggcgagcgcaccagttagt

SEQ ID NO: 14616 - DNA, 277 bp, Glycine max
agtgtactatgtgatgaaaattagtttatattttttcgctggatatcagtacagccttccatagtagaatctttttgtcaccaaagtgctattggtctggtgaaaatcagtaaattttcggtgctcagtacctattaaagtattaaggtatgattacgtggtggagcagcagcgacagttttctacaatttgaggctaaaacatccgacgcttgacgtgccagtgctcgactacgacttggcacttcttttccaaccagtgctggtgcttggaatca

SEQ ID NO: 14617 - DNA, 563 bp, Glycine max
ctgagggtctctttcttttaggtttttgtcaattctttaacctacccaacatatgcgcatgtgtaatccctgcaactatcatactaactaaggtttgggtttattcaagtttatagttcttacaagattggggaaaaagaaaaagaaaaagaaaaagcatacaacgatggctatgaatggatcacctcgacggtgggacgtgagattagttttgacattttctctacttttaatctcagcctctgtttctgctcttgaacatgtaaaccacaaaaagattgatcccaccaccgctgaaactagttttcttggcaaagtcatgaactttttgtggagctcatctgggtctggatacgaacatacttggccagaaatagaatttgggtggagaataataacgggtacgataattggattcgtaggatctgcattcggaactgtgggtggtgttggtgggggtggcatctttgtcactatgctctcccttattattggatttgatgcataatcagctactgcaatctccaagtgtatgattacgggtggagcagcagcgacagttt

SEQ ID NO: 14618 - DNA, 254 bp, Glycine max
aaaattttgtgaattctgagtgctcttgattttgataaaaaggtatgattacgggtggagcagcagcgacagttttctacaatttgaggcaaaaacatcctacgcttgacatgccagtgatcgactacgacttggcacttcttttccaaccagtgctggtgcttggaatcagcattggagttgccttcaatgtgatttttgctgattggatgatcacagtcttgttactaataattttcgtaggaattgcaacc

SEQ ID NO: 14619 - DNA, 830 bp, Glycine max
aactccagcagtccgctcgagcttgtatcccatttattgttgctttcttttgttccttccctaggaacttttctattgatgtattaagatgcagaagaggtaaccgtgtttgttcattcactttcctaatcctagaacacaaaacgaacgaacgaagacactgcaatctagaaaaaagttttgaactttgatgcacggaaagccttcatgcccgaccatgacatgtaccattttgatcacatggacgaagacgatttttttgacgaaattgatgaccaaaaccatggtaggggtgttggggatgctgctcttgatgaatatgagatgcttactaaggtgactgatacaacagctgctcaagcaagaaagggaaaggacattcagggaattccatgggaaagtttgaacatatctagggagaggtatagattgacaaggcttgagcaatatacgaattttgagaacattcttaaatctggggatgctgtggacaaggagtgcaagcaaatcgagaagggtgggaattactatgaattcttctataatacaagaatggttaagcctactatccttcattttcagctgagaaacttagtatgggcaacttcaaaacatgatgtctaccttatctccaactactctgttaatcactggtcatcattaagtggtaatttgtctgagataatcaattttgctgggcatgtggcaccggcccctactgagagatatgcaggaaatttgttggaaggattttctcagacccagattagcacattggctgtcaaggataatcttcttgttgctggtggcttccaaggagagcttacttg

SEQ ID NO: 14620 - DNA, 513 bp, Glycine max
cagaggtagacacctcttgcacaagcaagagagaaagaacaaaagaatactcatttaaccacagaaggtcagcagcgtcagaaagaagtaaagtaaatggaagacggaggtactggctagagcagtgggtagatacacaactttcaaagagtaaagagcttgaagatttagactcagtttttagctcacattctagagctggggagggatatggaggaaggcaacttaagctgagaagtaatattcagagacaaaatccagttgaaggattggattctccaatacttggttcaagaagatcttttcctcataggaggcagtgttcagtgggagaggaccactcatttttaagctctcctgcaactccagcatacatggctgcaacagaatcagcaaaagcaaaagcaagatcaacaagctccccaaaaataaggactggggggaatgtggacatgaactctgatagctattcaccatgcaagaaaaagctatccattgcatcttctattaaca

SEQ ID NO: 14621 - DNA, 924 bp, Glycine max
ccctcgcgtccgcccacgcgtccgcttttttgtcactcgcacacaccctttctttccgttctcaaactcactcacactctctctactgctagattcgacgattcccgaagtgccttcctcctcctcctccttcttcccctctaatcggatccaaatccaaatccaaatccagttcaaagaagatgcaatacaagaacctggggcgatctggcctgaaggtgagccagctctcctacggcgcgtgggtgagcttcgggaaccagctggacgtgaaggaggcgaaggccctcctacagtgctgccgcgaccacggcgtcaacttcttcgacaacgccgaggtctacgccaacggccgcgccgaggaaatcatgggccaggccatccgggagctcggctggaagcgctccgacatcgtcgtctccaccaagatcttctggggcggacaggggcccaacgacaaggggctctcccgcaagcacgtcgttgagggaaccaaggcctccttgaaacgcctcgacatggaatacgtggatgttctctactgtcaccgcccggattcctctactcccatagaggaaaccgtgagggccatgaaccatgttattgataggggctgggccttctactggggcactagcgagtggtcggctcagcagatcaccgaggcgtgggctgtggctcagagattggaccttgttgggcctattgttgaacagcctgagtataacctcttgtccaggcacaaggttgagtcggagtttcttcctctgtacaccaactatggcacaggcctcactacatggagtcctcttgcctctggagtgctcactgggaaatataagaaaggagttataccaccggatagcagattcgctttggaaaattacaaaaatctggcgtcaaggacagctgttgatgatgtgc

SEQ ID NO: 14622 - DNA, 285 bp, Glycine max
acactctctctctctctctagtctctcccctctacctcctcctcctcctccttcttcttcttcttccctggcatcggatccagatccaaatccagtttaacaaagaaaatgcagtacaagaacctgggccgatcgggactgaaggtgagccagctctcctacggggcgtgggtgagcttcggtaaccagctagacgtgaaggaggccaaggccctcctccagtgctgccgcgaccacggcgtcgaattcttcgacaacgccgcggtctacgccaacggccgcgcc

SEQ ID NO: 14623 - DNA, 517 bp, Glycine max
ggtgacatggaatgcaacttattatttctgggtgtcctctcaaggggcactcctttgttgcagcatagagaaatggaagactatgttataaggacaattgttgttggagttgtttcatggacatcagcttttgtcctagtgagaagaatctttcccaagcgttcttttgatttctgcaaccgcgttgtgtccacgctccatgcaactttagcagtcacattggcttggctctctgttgaagattggaagtgtccaatttgtcctgtgggatcaaaatcttcacccatacagatgcaagtcctagcagttagcctttcttatctcatttatgatctagctcgttgtcaattggatgaaagagcgaatctagacaacaccggccaccatttggtaagcattgttggaattggagcaggtctttcctatcaaaagtgtggctcagaaatggtagcgacaatatggataacagagatatcaagcccattcttgcatttgagggagcttcttaaagagcttg

SEQ ID NO: 14624 - DNA, 375 bp, Glycine max
cgaccgacggggaattttgaaccatataatacttttgtgcatatgtgtcatgtgtgtccatttaattaattcgtgaatgcttgcttatatggcaaggcatttgctgaaacttcaatcgtgaacacacattttgcagcatagacaaatggaagactacgttataaagacaattgctgttggagttgtttcatggacatcagcttttgtcttagtgagaagaatctttcccaaacgctcgtttgacttctgcaaccgcgttgtgtcgacgctccatgcaactttagcagtaacgttggcttggctctctgttaaagattggaggtgtccaatctgtcctgtgggatcaaaatcttcacccaaacagatgcaagtcct

SEQ ID NO: 14625 - DNA, 417 bp, Glycine max
attcatctctacttctctctctcttctctctcttcatctagattccgcccgaaaaatcgaatttttacttttagggttttaaaattcctgctactgcctatcctgatctgcgattagtgattgggtggcggcccccatttccgagtctgtgataagcccatcccgcaccttaagagtgatgtgctaagacatggcacttaaagttcctgctcgtaaggctgccgagattgcaattgggtccatcggccgtggttatgatatatcacttgatataaggcttaagtattgtaaaggagattccataaattcacgtttaattgagatagctgaaaatgctgtaagagaggtggtactacctggtggagtttcaataccacatgtttccaaatcaatataatgtgataaaggggaacgcac

SEQ ID NO: 14626 - DNA, 532 bp, Glycine max
cacctggatcgctctcttgagtgcattttttaagtgctttgtgtgctgttaccgatgtagcacttgtcacatctttgagggatggaatgaatcttgtaagttatgaatttgtggcctgccaagataaaaagaaaggggttctcattctcagcgaatttgctggtgctgcacagtcacttggtgctggggctattctggtcaacccttggaacatcacagaagttgctactgcaattgccaaggctctgaatatgccatcggcagaacgagagaagagacataagcataactatgaacatgtaaaaactcacactgctcaggaatgggcagaaacttttgtaagtgaactaaatgatactgctgtcgaggcacagataaggacaaaacatgttccaccacggctcccaacagagactgcagttgaacgttatttgcagtcaaataatcggttgcttattttgggtttcaatggaactttaactgaaccagttgagagagaaagtgatcggtttaaagaaagggaactcactgt

SEQ ID NO: 14627 - DNA, 601 bp, Glycine max
aagtgaggcaggttccttatcttgttggctttgactcaaaagctgtgtgtggcatcagaaaatggaacagtttatcaatggcacttctccacccaaatcttcttcccactttcaattccaacactcttacctttccttccatcaaactcaaaccctcactctcgcacgtgccttctccaacccccacacgcttcagtctctctgtttccgcggcggaaaccaccgcttttgccgcccctcccactccccaacctgagaagcttggagttgtagttaagccaacggagaagccgagacttgtgttgaagttcatatggatggagaagaacattggaattgcgcttgaccagatggtaccgggccatggcaccattcctctgagcccatattacttttggccccgaaaagatgcctgggaagagctcaaggagttgcttgagaacaagccttggatctctcagaagcagatgattattcttctcaatcaggccactgatatcatcaatttgtggcaacagagtggtggcaacttatcctgaactcattcatgtgccaacatatttcaatgatgtttttccttttcatgttatgtttttctctt

SEQ ID NO: 14628 - DNA, 365 bp, Glycine max
cacacgcgttcgacttcacccaatcactgggttagtacggacacaaactaagaagccatactcacatcacacaacacaaccatcctcaagccaacaacaccttctcagatcttacaatgatatttcaatcgtgttttatgatgactgcaactctgctattatttgttatagcacaatgtgttgtgggagttaattcactttcacaagctgataagataagcactttgccagggcagccaccagtcaaattccagcaatatgctggttacattacagtggacgacaagcagaagagagccttggtttactactttgttgaagctgaagtggaaccagcttcaaagccactagttctatggttaaat

SEQ ID NO: 14629 - DNA, 687 bp, Glycine max
ctcgagcgattcggctgagattcccattacctaccatataccatcaaccaatatcttctttgtcgcttttattatctgtttttccggcgatggattccggcgcgtggctcctgttcctggtggtcgtggctgtctcaacgtccggccacattcactctgaagcgatcctgagactcccgtccgagagcgaggagatctcgcgcgactactgcgacagctggatgctggcggtggagacgaacaacgccgggacgtggaaccgcgtgccggcgagttgcgtggacttcgtggcggaatacatcaccggagatcggtaccggcgggactgcgacgtgatccggaatttgtcggcggcgttcgcgaagagcgtgggattggccggagacggaagagacgcgtgggtgttcgacgtcgacgagacgcttctctccaatgtgccttactaccaaggcgtcggattcggatctgagatcttcaatgagacttcctttgataattgggtggacttagctgctgccccagctttgccagccattttgagtttgtataacgagcttaaggaattgggcttcaagatattcttcttaactgggagaagtgagtttcaaaggaatgccacagaaacaaaccttctgctttcagggtacagagattgggagaggctcatcttaagagggtcttctgatc

SEQ ID NO: 14630 - DNA, 557 bp, Glycine max
actctctctctttctgtgcgacccaaacaaaaccacttttgatgttgttttggtttggtttttaaaaaatccgaaagttgaaaaggttgtcaacaagggaagacacatagttgaacctccaacacacacacacacacacacacatatactgccaccacccctcgaaatacaccaaacaaaagtttgttcttttctgcacacagaaacctgcttgctattactgtaaggattggattctggcaaggatttctatatgggagaagcacctacattcatacctcaagacctgcagaatggaacatgcaatgggtttgaattaaaaagtgggacttttgaaactgatactattgttggcaataaaaagtatgtcattggtggaacctatggtgaaaccttttcggttaaagatcaaattcttgacaacaatggtctaggggaatgggttgatctcattcagctaggtaccaaacccatttcatgcaatggccactcagccgtgcttttgaaagaccgaatactaattcttaagaacaatgccaagccagatgattgtatat

SEQ ID NO: 14631 - DNA, 559 bp, Glycine max
tattaagatatctaatcatgtgtaaattttttaaagttaggtggtatctgcatagtatgttcactgacagctttgaaacattactggcgactaattgaactcaaatattcacggaaactcctggacatttttcatgggatcaagtgatgatttacataaatttggataagcttcttggtgggaaagaaattttttctgatgatcatcagaaaaggagcagcagaaattttcttatcacgccaggtctacttgaccacagttcatcgctgcttctttttcgaattgcatgaggtcaataggtcacagatacgaggacaaagcaggggtatttattgtattttaacttgtaaatagcacaattggctttgaaagaaaaagaacggttgcagagtcgctccaattacttcgatgtcttgctaacttatagtcttatgttctaaggaaactactgcagaacgatcattgagaaatgtggggctagtgaaaataaattgtgttataaacttataattggtaaaactagtattgtattagttacttatataattgaagccattag

SEQ ID NO: 14632 - DNA, 456 bp, Glycine max
tcgcggacgcgtgggcggacgcgtgggcggtgtggtggtgggaatcgccgttggggctgtggcggttcttcttgtgttgagcattctctgcatatgttgccggaagaagaagagaagacgtgatgaagagtactatgctccgccgccgcaaccgccgcggggacctaaagatgatgcatatggtggtcccccacgtcaatggcaacacaatgttccccctcctcaagatcatgtggtctcaatgatgcctccaaagccatcgccaccacctgctccaccggcttatgctgctcagcctcccccaccaccgcctcctttcatcatcagcagtggtgggtctggatcaaactattcaggtggtgaatttcttcctcctccttcgccaggaattgcattgggattctctaagagcacgttcacgtacgaggagttggcacgtgcaactgatggcttttc

SEQ ID NO: 14633 - DNA, 571 bp, Glycine max
gctcagtcttggttccaaatgttgatgctactgtagcttttaatgggagttccttcttctgaagcttgcaaaccctgcccaagccaaggctcctgttcaggcccactttggagagctggataattctgttggcttttctgatgttacggctgccaaggccttagaggagaagttgaaggcatctggtgttccacatgaggtacacatatatcctggcaatggacatgcattcatgaacaggtctccagaaggaatcaagaggaggaagaatatgggaatgcccgacgaagacgaagctgcagttcagcttgcatggtctcgcttccagtcatggatgacacattacttatccagctaaatagtttcttagtaatgccacaatggtatgataacatgatatacttctaattctgcatttgattagtagtttggtataactcttaatggccccatcaactctaaatatggtgctttgtttccttatgggtggatacatacacccttgagaaatttggcttggaaaaaaatagtttgtctaaaaaaaggaaaaaagggctttggttaatgggtg

SEQ ID NO: 14634 - DNA, 1407 bp, Glycine max
ctcgagccggttatctgtttcccgccatatatccaataagctttaaccatgtctgcctttgttggaaagtacgcagatgagcttatcaagaatgccaagtacatagccacacctgggaagggcatcttggcagcagatgagagcactggcaccattgggaagcgcctatcgagcattaacgttgagaacattgaggccaaccgccaagctcttcgcgagcttctcttcaccgctccagatgccctccaatacctctctggtgtcatcctctttgaggaaactctttaccagaaaacctccgatgggaagccttttgttgaggtccttcaagagaacaatgtcatcccaggcatcaaagtggacaagggtgttgttgagttggctggcacaaatggtgaaaccaccactcagggattcgactctctcggagctcggtgccaacagtactacaaggctggtgcacgcttcgccaagtggcgtgcagtcctcaaaattggcccaactgagccctctgagctttccatccagcaaaatgcacagggcttggcacgctatgccatcatttgccaggagaatggccttgtgcccattgttgagcctgagattttgactgatggggctcatgacatcgccaaatgtgctgctgttactgaaactgtgcttgcagctgtttacaaggcactcaatgagcagcatgtccttcttgaaggaactcttctcaagcccaacatggttactcccggctctgatagcccaaaggtaccaccagaggtgattgctgagtacacagttcaagcactccgcaggactgtcccagctgcggtgccaggggttgtgtttctgtctggtgggcaaagtgaagaagaagctaccctcaacctgaatgcaatgaacaagttggaggtgttgaagccatggactctctcattctcattcgggcgagcactgcaacaaagcacactcaagacatggggtggaaagaaggagaatgtcgccaaagctcaagaggcatttctggcaagatgcaaggccaattctgatgctactctgggaaagtatgttggtggaagcggaagtggcttgacttctgagagtttgtatgtcaagaactacaagtattaaacttctaaagagggtggttggttctccctttggaaacgtcaatccatgcttttggttcagtcacgttgaggtgcataagaaagcgtgacaagggagaaacaaacatactctaaatggacttggggactgatttgggctaagtgcattgtggcagatgtatgatacagcctaaggatttgcttctgattaacatgcttatttttgggttacatattttttacaaacatcagttattatgttataggagccaattttaatgtcaaatggtgatagcgtaccactcaa

SEQ ID NO: 14635 - DNA, 599 bp, Glycine max
acgaggtttcccgccatatatccaataagctttaaccatgtctgcctttgttggaaagtacgcaggtagtatctcatatctcctcctcttctcttaatattactcactcttacatctctcacccacacgtaaacaagaacatttcttcattgaatgaagtacaagcttgtcaaacattccactttaatgcactgattaacaagaaacgagtagccgagaaatgcatcatcatattctcattagttattggaacataatctcaaattataaaagattcattcatgtctaagaagctccttcgaagtcttttatatgtttacaactcttagactttggtttccaaatgggatgtatgttataacttgcaccaattccagatgagcttatcatgaatgccaagtacatagccacacctgggaagggcatcctggcagcagatgagagcacgggcaccatcgggaagcgcctagcgagcattaacgttgagaacattgaggccaaccgccaagcccttcgcgagcttctcttcaccgctccagatgccctccaataccctctctggtgtcatcctctttgaggaaactctttaccagaaaacc

SEQ ID NO: 14636 - DNA, 1631 bp, Glycine max
  unsure (1)..(1631): unsure at all n locations
gatagttntatataataataagggggtggcaacagaacacacagctcttactttcttccgccatattccacaagaactctccaaggatcctccttcccacgagattctttggtgggaaaaatccaagaggtttgaaatttgaaggcagggaagatggattatttcaatgcaccaggaagaaaccatctctttgttccagggccggttaacattccggaccagatcatccgggccatgaacagaaacaatgaggactaccgttctccagcaattccagctatgacaaaaactttgcttgaggatgtcaagaagattttcaagaccactactggaaccccatttctcatccctacaactggtactggtgcttgggagagtgctctcacaaacacactgtctcctggggatcgaattgtatcgttcctgattggccaattcagcttgctttggattgatcagcagcaacgcctgaagttcaatgttgatgttgttgagagtgaatggggccatggtgctaagcttgatgttctggaatcaaagattgcttcagatacttcacacactattaaggcaatttgcattgtccacaatgagactgcaactggggtcaccaatgacttggccaaagtgagacaaattctcgattcctaccggcatccagccctccttattgttgatggagtgtcttccatttgtgctcttgatttccgcatggatgaatggggagttgatgtggcaataactggctctcagaaggccctttcccttcccactgggataggtattgtggttgcaggccctaaagctattgaggcctcaaaacatgctaaatcacttagagttttctttgactggaaagactacctcaaattctaccagctaggaacctattggccatacactccttccatacatttgctgtatggtctgagagctgctcttgatctgatttttgaggaaggactcgaaaatgtgatcgcaaggcacagtcgtttaggcaaagcaaccagacttgctgtagaggcatggggtttgaagaattgcacccaaaaggaagagtggtacagtgacactgtgactgctgttcttgttcctgcttacattgatagtactgaaatagttaggagggcatggaagagatacaatttgagcttaggtcttggactgaacaaagttgctgggaaggttttcagaattggacatcttggccacttgaatgagttgcaactgttgggatgtctagctggtgtagagatgatactcaaagatgtgggttatcctgtaaagcttggaagtggagttgctgctgccagtgcatacttacagaacactattcctatgatcccttccaggatttgagtcacaaatcattcttgtctttacttcctttttctgctctttcagaaattctgtaaaatatatattaccctcttttacactcctttgaagatgaacgtactttctactttcagctttaatgcattgcttcttttattgtcctgtatatcaaaaatcattgcatcttatgatcttatttgtcactgtgttatggtcatcaaattcatcagcagcagggttattgtattgtatatggataaagagaaatgctagtaacatgcacattccctcct

SEQ ID NO: 14637 - DNA, 802 bp, Glycine max
taatgatcaaaatcacaaggaaatgaaagagcaagaaaattggaatatggatcaccctttaagagatgaagctaacaaaaaaatgttgatatgatgtgcaatctgagagcaaacccaagccaaaactgagaggctccctcttcatccattcccagcctcaaggagattcttcggtgggaaaaatccaagaggtttgaaatttgaaggcagggaagatggattatttcaatgcaccaggaagaaaccatctctttgttccagggccggttaacattccggaccagatcatccgggccatgaacagaaacaatgaggactaccgttctccagcaattccagctatgacaaaaactttgcttgaggatgtcaagaagattttcaagaccactactggaaccccatttctcatccctacaactggtactgcttgggagagtgctctcacaaacacactgtctcctggggatcgaattgtatcgttcctgattggccaattcagcttgctgctgccagtgcatacttacagaacactattcctatgatcccttccaggatttgagtcacaaatcattcttgtctttacttcctttttctgctctttcagaaattctgtaaaatatatattaccctcttttacactcctttgaagatgaacgtactttctactttcagctttaatgcattgcttcttttattgtcctgtatatcaaaaatcattgcatctgattaccataacacagtgacaaataaggtcataagatgcaatggtaatcaaattcatcagcaggggttattggattgc

SEQ ID NO: 14638 - DNA, 457 bp, Glycine max
acgtggcggagatgggatcgaaggtgtggaactggatgacggcggaagagtgggagtgggagagaatggcgtagagagaaaaaaagggagggaaagaaggggagtatatgagacggcgccaagagtgggagattgagaataacaaacaagggttgatggatgagagacataattgggctatgtggtcagggagacctgggatcaaaggttgttcttcttgttgatgaatatgttgttcttgtttttggcgtttggttgtggaagaagaagaagaagaagacgactcaggcatggctatggccatgggatgggcctgtggtgtgtgtggattggatgcttttgttgggtgtttgtttttatgaaggggaaaggaaaggatagaaagtggggttagcccggccggtgtcgtgaggaagacagttactgtaatgttgggattttgaaataaaaagctaaa

SEQ ID NO: 14639 - DNA, 305 bp, Glycine max
tgaagctcgaaaaaaaacatgttgatatgatgtgccagaactgagaggttccctcttcatccattctcagcctcaaggaaattcatttggtgggaaaatccaagaagagggtggaatttcaagccagggaagatggattatttcaatgcaccaggaagaaaccatctctttgttccggggccggttaacatcccggaccagatcattcgggccatgaacagaaacaatgaggactaccgttctccagcaattccagctatgaccaaacactgcttgaggatgtcaagaagattttcaagaccata

SEQ ID NO: 14640 - DNA, 483 bp, Glycine max
cccacgcgtccgcccacgcgtccgcggacgcgtgggttctccttttgtactctcattcacattcttataggctaattaacatacactctcttccaaagttgagtactttgccaaaaaaaaaaaaaagttttccctttgagaaagaaaacccaaagacagtcttttgatcattttgagcagttgcattccttgttttcttccattttgggtcccctcaaaagtagtttcaaaagggttcctcttcctccacagatatcatggcagatcataccccgggttcaggaaccgtttctgttgaagcttcttcacaagaaagaaggaaacttccaaactttctcctatccgtgagacttaagtatgtgaagcttggttaccactacttgatctccaatgctatgtaccttttactcataccccttcttggtgtagcttctgctcatctttcaacaatctctttaccagatggtgtccaattttgggaaa

SEQ ID NO: 14641 - DNA, 723 bp, Glycine max
ccgcgatatcccatcacgcagcagcctagtcaatagtcaaaccccactctcatctctgcaaccaaaaaataaagcgaggccgaaaaccatttgaacccaatttatttatttatttaaaaaagagaaaaacccactctctggactacccactggaataacgacatctccgctcgaaatcacggttcttcgattcgactcagctatggcgagcttgactcggagatcactgtctcaactcggaactatattatcgatgaagaaaattccgggtttggatccacctttcttttcagctattacttgctcctagtgttgcttcagccatctctcgccgttgatttcgtccaaatcccctagatctgagccgttagggggcaatcaacggcgtctgtcatgtcaattggtatattgaaaaaggttcaaggcttggtgcagaaatggatgcttatattatcttgcttggtatttgtgattgaggctggtgaaaatgataaaacaatggagcccccttctttatatgattctggatcacctttgccctttgttgttgttcatgatctacctctaccagcaaatctccatgtgtcgaagcatgtgctttctcatggtgcaccaattgctgcactgtcaccagtcaagcctccttcatatggtcctttcacaagtaatggtcacccccctgcaagttcacatttatccatactattcaagaagagtgaaatg

SEQ ID NO: 14642 - DNA, 671 bp, Glycine max
aacacattgaacagtacttcagtcaagttgttgccacacatggctctgctaggaatttgcctcaatcgtgcacttcaagacttagcccaaggctgtgctttttcccacaatatttggtgtcacgtatcactacaccaatcttctttgtaaacgcggcttacgactcatggcagattaagaacattttggcaccgggtgttgctgatcctgaaggccattggcatagctgcaagcttgatataaacaactgctcacctgatcaactcgatctaatgcaaggcttcaggacagaatttttaagggctataactgtgcttggcaactcttcatctaaaggaatgttcatagactcttgctatgcccactgccaaactgaaatgcaggagacatggttgagaagtgactctccagagctgaaaaagacaacaattgcaaaggctgtagcagattggttttatgaaagaagacctttccatcagatagattgcccttacccttgcaaccccacttgtcacaaccgcgttttcgatccacaagaagaccacccaggagtatagatattcatttcatcaaaatttagcacacatttaatatttccatcattcttataaaaccacaatttattggttaacatgtgatagaataagaaaaaaattatcatttctattttt

SEQ ID NO: 14643 - DNA, 1293 bp, Glycine max
attagtcgaatggttttacaagagatccttgctcgcgcagttggggaagatatcattatgaatgccagtactgttgttaattttgtggatgatggaaacaaggtaacagtagagctagagaatggtcagaaatatgaaggagatgtcttggttggagcggatggaatatggtccaaggtgaggaagcagttatttgggctcacagaagctgtttactctggttatacttgttatactggcattgcagattttgtgcctgctgacattgaaactgttggataccgagtattcttgggacacaaacaatactttgtatcttcagatgttggtgcgggaaagatgcaatggtatgcatttcacaaagaacctcctggtggtgttgatgagcccaacggaaaaaaggaaaggttgcttaggatatttgagggctggtgtgataatgctgtagatctgatacttgccacagaagaagaagcaattctaagacgagacatatatgacaggataccaacattgacatggggaaagggtcgcgtgactttgcttggtgattccgtccatgccatgcagccaaatatgggccaaggagggtgcatggctattgaggacagttatcaacttgcatgggagttggagaatgcatgggaacaaagtattaaatcagggagtccaattgacattgattcttccctaaggagctacgagagagaaagaagactacgagttgccattattcatggaatggctagaatggcggctctcatggcttccacttacaaggcatatctgggtgttggtcttggccctttagaatttttgactaagtttcgtataccacatcctggaagagttggaggaaggttttttgttgacatcatgatgccttctatgttgagctgggtcttaggtggcaatagcgacaaacttgagggcagaccactaagttgcaggctcacagacaaagcaaatgatcagttacgtagatggtttgaagatgatgaagcactcgagcgtgctattaatggagaatggattttattaccgcatggagatggaacaggtctttcaaagcctatatctttaagtcgaaatgagatgaaacccttcataatcgggagtgcaccaatgcaagataattcaggcagttcagttacaatttcttcaccacaggtttctccaacgcatgctcgaattaactataaggatggtgccttcttcttgattgatttacggagtgagcatggcacctggatcattgacaacgaaggaaagcagtaccggggtacttcctaa

SEQ ID NO: 14644 - DNA, 376 bp, Glycine max
gagaatgaaaaatatggtgaaatgacactcaaattgaaataattaaatgcacaaattcattcttgcttcccttactctgcagtttttgactaagtttcgtataccacatcctggaagagttggaggaaggttttttgttgacatcatgatgccttctatgttgagctgggtcttaggtggcaataggtaacgtttagagcctatttttctttgctcatagtctttctttcatattgtcttcatctgatcttcttattcacatgcatgtagaaatctgagccactggataaatgatgagaactaagaagttcaagaaattgataattgaaaacaatgtttactctttacttggacaaacaataaagaaatatttatg

SEQ ID NO: 14645 - DNA, 817 bp, Glycine max
attattttgaagaattggaagaggagtctcttagggataactttgttgttgtgtatgaattacttgatgaaataatggactttggctacccgcaatacactgaggcaaagattcttagtgagtttatcaagacggatgcctatagaatggaagttacgcagagacctcccatggctgtgactaatgccgtgtcgtggcgcactgaagggataaactataagaaaaatgaggttttcttggatgtggtggagagtgttaatatacttgtcaatagcaatggacaaataattagatctgacgtcgttggggcattgaagatgagaacgtatttgagtggtatgcctgagtgtaaacttggattaaatgatagagtattattagaggcacaaggtagaacaaccaagggaaaatcaattgacttggaagacatcaaatttcatcagtgtgtgcgtttggcccgatttgagaatgatcgaacgatttcatttatccctcctgatggatcatttgatttaatgacatataggctcagtacacaggttaagcctttagtttgggtggaagcacaagttgaaaaacattcaaaaagccggattgagattatggtaaaagctaggagtcaatttaaggaacgcagcactgccacaaacgttgagattgagttgcctgtgcctgttgatgcaaccaatcctaatgttcgaacttcaatgggatctgcatcatatgcacccgaaaaagatgcgttaatctggaaaattagatccttccccggaggcaaggagtatatgttaagagcagagtttcatcttcccagtat

SEQ ID NO: 14646 - DNA, 891 bp, Glycine max
ttttgaacatgccacaagatatcatgtatggctgggacatctcacaatggtgctttttactgtccatggactcctctatgttattgcatgggcaatggaaggccaccttgtacaagaattagtacaatggaaagatattggtgttgccaatctcccaggagttatcagccttctagctggtttgttaatgtgggtgacctctcttcccggagtgcggacgtggaactttgagttgtttttctacacccaccaattatatgtagtctttattgtctttttggccctgcatgttggtgactttgttttcactatggctgctgggggaatatttctctttgtgcttgatcgatttctgaggttctgccaatcacgaaggacagttaatgtgatctcatctagatgccttccatgtggcactgtggaattggttctgtctaaacctcaaagtttgagatacaatgcactaagtttcattttcgttcaagtccgggaactatcatggctgcagtggcatccattcagtgtttcttctagtcctttggatggaaagaatcaccttgctgttctcattaaggttcttggcaaatggacagaaaagttgagacacaggattactgatgtcgatgcacaaaaagattcatctgtcataacaacttcagttgaggggccatatgggcatgaagtaccataccacttaatgtacgaaaatcttatattagtggctggtggtattggactttcacccttccttgctatattgagtgacattctccaccgtgttagggaggggaaaccctgtcaaccgagaaatattttacttgtttgggcggtgaaaaaatcaaacgagcttccacttctctcaaccattgacatgcaatcaatttgtccatc

SEQ ID NO: 14647 - DNA, 642 bp, Glycine max
cccacgcgagaccaagaacacaaaaaccacttaattagtccttctcacatccaaaatcttgtgccagcaaatcaaacatggcatccatgactatgcttcagaccatgattcctaagaatgcaccgaacctccctcctcgtgttggtgcttcttccaacaacactactaagatctcatttggtggctcaggtagggtactgtggaccgggattcagaggaacaggaataataggtcttcttcgattgtagttgctgcagttggagatgtttcatctgatggcactgcgtaccttgttgctggtgccattgctgtggctctagttggaacggccttccccatcttcttctctcgcaaagacacatgccctgaatgtgatggagcagggtttgtgcggaaggctaatgtgacattgagagcaaatgcagcacgaaaggatcaaacccaaatcgtttgtgctcgctgcaatggtttgggcaaacttaaccaaattgacaaatagacaacattatgctccctacattgcccctttctttcttttcttattactatgtaattatttaaggataatatattattgatatcccctcctcgtgtctcttcgtcctatgagatgaacattataatatatcatgataggagag

SEQ ID NO: 14648 - DNA, 764 bp, Glycine max
gaaaagcatagctaaaccctttctaaagtccaaagtcatttttagaaatttttttttatcatttggaataaactcctattttgattcctgaaaatgaaatacatggtcattattttctaaaactatttttttttcctgaaataacaagtctttaaaatgttcagttctttgatctaaatttaataatttattatgattttgttttcttgatagtattacttaagaaactcatggaatgatggtagtttactcttgagtcttgagtctttctttaccatccatcccttctattatatatattataaatacaaatggtggaatgaagtcatatatacataataagtaatacagaaccgtggtcgacatggattggttctcatggctttcaaaaagtgggcttgaggcatccctagtgtatgagtatggccttacctttgctcacaacgagcttgaagaagaagacatgttttacttcaaccacgagtttctccaaagcatgggaatctccatagcaaagcacagactagagatcctcaagcttgccagaaaagagaagggaaagaggccactcgcggtggcaaggctcgtggcggcaatcaagaagactaagaacacctttgctaactatgttaggactttgctgatgcacaaaccagaatcagcacttgctgtggtgccggtgccagtgcctactagaagtggtttggggacaagatggaacaagagtgctatgatgaagagggggcgtaaaaagcaagagacac

SEQ ID NO: 14649 - DNA, 1184 bp, Glycine max
ggcacgagcaaaactttcccccacactaaaaacaaatttatatatatacatccctttcccacactttttccaccctcaaacacgtaactactatttcgaactccgccatggctgccaccaccgccaccgccacgtcatacttttttggcacccgcctcaacaacccgacaaccttaaacaacggaagattccacgcgctcctcaacttcggcaaaaagaaggcggcggcagccgccgccgaagaaaaaggaagtgaaagtgaaaccctccggcgaccggctggtgtggtttcctaatgcggagccgccggagtggctcgacggaagcatgatcggcgaccgcgggttcgacccgttcggtttcgcgaagcccgcggagtacctgcagttcgacctggactcgctggaccagaacctcgcgaagaacgtcgccggcgatgtgatcggaaccagggtggaggtcgccgacgttaaaccaacgccgtttcagccctactcggaggttttcgggattcagaggttccgcgagtgcgaactcattcatggaaggtgggcaatgctgggtgctctcgtcgctttggccgttgaggctcttaccggagtcgtgtggcaagacgccggaaaggtagagctggtggaaggatcatcttacctggggcttcctctcccattttcattgaccacactgatctggattgaggtgatagtgatagggtacatagaatttcaaagaaatgcagaacttgacccagagaaaaggttgtacccaggtggcaggttctttgatcctctgggtttggccaacgaccctgaagaaaaggccagacttcaacttgctgagatcaagcattctcgcttagccatggtggtcttcctcatctttgcaattcaagctgctgtaacaggaaaaggccctatcagttttcttgctaccttcaacaagtgacatcatataccaatattatataactttataaatgaaaacttcccaccgtattctcattctcctctattaagttactcacctcctcatctaattttattaattcttttctgtacacccaaaagatgaaaactgctacttataattatgtatgtatgtttgtactctgttgtatgcttctgtatgatattcagtattggtactttgatgaaacctatgcttcttaaaaataactttggaat

SEQ ID NO: 14650 - DNA, 384 bp, Glycine max
tttttattttttcaccaaagtagaaacaattctgaatatcacacagaagcatacaacagagtacaaacatacatacataattatacgtagcagttttcatcatcttttgggtgtacagaaaagaattaataaaattagatgaggatgtggataacttaaccgaggagaatgagaacaaggttgaaagttttcatttataaagttatattatattgttatatgatgtcacttgttgaaggtagcaagaaaactgattgggccttttcctgaagaaaaagccagacttcaacttgctgagatcaagcattctcgcttagccatggtggtcttcctcatctttgcaattcaagctgctgtgacaggaaaactgattgggccttttcc

SEQ ID NO: 14651 - DNA, 366 bp, Glycine max
gacggcggtttcggctggtcagagcacctgcaccagcaccagcagcagaccctccactcgcaggagcagcgattgctctatgctggtggtaacagtggccacggcggtgggtttggggtcaacacgccggcgccggtgcaggtgccggcgtttggccagcttttttctcagaggggaccccttcagtccagtaacaccccttccattcgtgcttggatagaacccttccgtcgatcaccaccaccaccaccatcactacctatcacaggtgatccaccaaggatccgtcgccggtggtcggcggattctccggcttccgcattcctgcacgaattcagggtgaagaggaacacgacggcgtgtccg

SEQ ID NO: 14652 - DNA, 408 bp, Glycine max
  unsure (1)..(408): unsure at all n locations
ggtcttaaggctctgggagtcagagacctcaactatcgtgtagcttttatcgccaactctgttcagatttgtgatggtagaagagaaatagacatcaggaacagaaagaaggatgttgatgaagacaatcaacagtttactgatcaggaactggaagaaattaaacggatgaggagcacaccagattttttcaccaaacttgttgaaagcattgctccaactgtttttggtcatccagatattaagagagctatccttcttatgcctttgggtggtgtgcacaaatttactcatgaaggcttcaacctcagaggagacttaaacgtttgtgttgttggagatcccagctgtgcanaatctcaatttcttaagtatacttcaggcatagttccaagatctgtgtataca

SEQ ID NO: 14653 - DNA, 1374 bp, Glycine max
ttcttagcagagaaagcagttggttaaggacaactttgattgctttgtctcttgcaaaacaacaattgatgatattgagtcaaagttaagacaaattgaggatgaccctgaagggtctgggacttcccatttgtttaatattattcaggatgttagtttgcaggctaatcgtgccttgaagcctttatttgagagacaggctcaagcagaaaaaattaggactgtccaaggtatgctacagaggtttcgaacacttttcaacctaccaagtactatccgaggcagcattagcaagggtgaatatgatttggcagtcagggagtacaagaaggccaaatcgattgttctgccctcccatattcaggtaggtatcctaaaacgtgttcttgaagaggttgagaaagtgatgaatgacttcaagactatgcttttcaagtctatggaagatccacaaatagatctgacaaaccttgagaatactgtgagattactgttggatttggagccggagtcagatccagtatggcattatttgaatatacagaatcagagaattcgtggtctgcttgagaagtgtactttagatcatgcggctagaatggaaaatttgcataatgagttgcgtgaaagggctctttctgatgtcagatggaggcagattcaagaagatatggatgaatcattcagatatcaacaactctcctattggtaatacctatcctgcggtccactctcatccatcgaatctacctggtgaggaggttgatggtttaagaggaaggtatatccgcagattaactgctgtaatcatccattacataccagctttctggaaggttgcactctctgttttcagtggaaaatttgctaagtcttcccaagttcccactgattcaaattccaacagttctgcaaataaaattgaagaaaaagctggagatgggaaatactcaagtcattctcttgatgaagttgctgcaatgatatgcagcacaatatcactgtacggagtcaaggttactaatatttttcatgatctagaggaatcaaatgtcctcaggtcctacatgagtgaggccatagaagatatatctatgccatgcacagctttggaattgaaggaagctgctcctccgattgctgttgctgctatccgaactctgcaatcagagattataaggatttacgtactgaggctttgctcttggatgcgggcatcggttgaagaggtttcaaaggatgtgacatgggttattgtttcaattcttgaaaggaacaaatccccatatgcaatctcattcttgcctttaacattccgttcagttgtagcctcagcaatggatcaaatcaattcgatgcttcggtccttaagga

SEQ ID NO: 14654 - DNA, 610 bp, Glycine max
ccaccattagacacacactttagcccaatatcaactataagtacccttctacccctcccttggtagttcaatatttgtccatttcccatgtcagcgtgaacacgcacacccgtgagagcagaaagatagtcatggacacaagaacattgctcctgaaactactcatcactcttgtggctctttcaggatgctcttcttcggcttcagatcatttggttaatgtatccaagttggagaagttcgtggatgagcttcctcacatgcccaaaatccttggctatcatctttcagatggcgtcccaaaatctaagtccttgaagattggcatgttcaagaagaaatggaaattccacagggatctggctccagcaacagtgtacgcttttggaacaaccaaacacacagcaacagttcctggtccaacgatcgaggccctctatggcgttgacacccacgtgagatggcaaaatcacctccctccaaagcacatacttccctgggaccctacgatccccaccgcgatgaccaactccacacgtggcattcccacagtggtccacctccacggtgggatccacgcgccagagagcgacggaaacgccaacgcatg

SEQ ID NO: 14655 - DNA, 556 bp, Glycine max
gcttcttcaactggctccaacactatgatatcgaagattgtacgcatggttgaggatgctccatcacgtgaagcacctgtacaaaggcttgcagattcaatagcagggccatttgtatacagtgtaatgactttgtcagcagcaacatttgcattttggtattttgtaggatcacacatatttcctgatgttttgctcaacgatattgctggcccagaaggagatcctttgttggtgagtttaaaactatccgtagatgttttggtagttctttgcccatgtccactgagccttgcttctccttcattactaatttcttgccccctaaatttatccagaaaaggaactttttcttcggtttccggtcccattttaacccttacctaaattgaccctttcacctcgcctaaattatgcggaccttccttagttcatttggacaccagtatactcacaaagttaatatatatgtgtaaatggagggtttctatgagaatagggttgaatccgattttaagtctatgtcattatattttaatttccgttattttcaggg

SEQ ID NO: 14656 - DNA, 613 bp, Glycine max
acgggctcacagtttcagcaggaactataaattgggatggtcctttaaggattgaagcttcttgaactggcgccaacactatgatatcgaagattgtacgcatggttgaggatgctcaatcacgtgaagcacctgtacaaaggcttgcagattcaatagcagggccatttgtatacagtgtaatgactttgtcagcagcaacatttgcattttggtattttgtaggatcacacatatttcctgatgttttgctcaacgatattgctggcccagaaggagatcctttgctgttgagtttaaaactatccgtagatgttttggctgtttcttgtccatgtgcactgggtcttgctacgcccacagcaatcttggttggcacctcacttggggcaagaaaaggacttcttattaggggaggggatgtgctggaacgcttggctggaataaattatattgctctagacaagacaggaacccttaccaaaggaaaaccagttgtgtcggccataagctctatcctttatggagaatctgaaattcttcggcttgctgctgcagtggagaaaacagcatctcacccaatagcaaaggctattgtcaataaagctgagtc

SEQ ID NO: 14657 - DNA, 550 bp, Glycine max
gattcggctcggagaatagaccatgaagagaggcaagggcggttaagagatataagaagaagaagctagattatgttccattcactcacataataatccgtgacccatttcagatttcgtcttaacgcacataaattcaggttcaaaatctcacctttgttgattttggcgaggattttgagaatggttgtggctgggggtgctaagttcaatttgagaagaggcaatggttcttctcataatgttgtcaatggctatagcagtgatggagatctttgcagaattagcaaaagtgggtgtttttcgtcggtggctgaggtggatagagacccttcttgcgtttcattcaccactttcaacattctggctccgatttacaaacggattgacccacagaaccagggcctgcgagaaagtgacttcagagcattctggttggccaggaatgagaggattcttgattgcttgctttctgaatcatcttccattatgtgccttcaggagttttgggttggaaatgaagaacttgttaacatgtatgaggagagac

SEQ ID NO: 14658 - DNA, 601 bp, Glycine max
gacaacctcaaaccacacaaacacacacacctcttcttccctctctctctctctctctcaaccaatgcaatcattcattcactaaaaaaaaaattaaaacaccatgcaacaagcaattccttataggtcatggcaacctctcatcacacccaccaacgccaacaccactcacttcacaattagcccacacacattagtaaccttttccacagtgtctacaacagaattatctctaaaagacgatattggttcggaaccgaataacaacatccataatagtgataatcctttctttgtttcctccaaaatggtgcccaacatggtcttagagagcgcgattatagtcttcgctaggcgtggttgttgcatgagccatgttgtgaagcgattgctgctgggtcttggggtgaaccctgcggtgcacgaggtggaggagagtgatgaagtgggtggtgttagagaattggaagcaattgtgggtgccaataatggagggaataagatgcaatttccagcagtttttattggtggcaaattgtttgggggattggataaggtaatggctactcatatttcaggggaattggttccaattctcaaa

SEQ ID NO: 14659 - DNA, 429 bp, Glycine max
cactcagctacacacacctcttcttccccttctctctctctctctctctctctctctctaaaccaataattcatattcactcaaaaaattaaaacaccatgcaacaagcaattccttataggtcatggcaacctctcatcacacacacctccaccaccaccaccactcacttcacaattagcccacacacattaacctattcgacagtgtctccaacaggattatctccgaaagacaatatcggtttggaaccgaataacaacaataatggtaatagtcatttcttcatttcctccaaaatggtacccaacatggtgttagaaaacgcgattatagtctttgctagccgcggttgttgcatgagccatgttgtgaagcgattgctattgggtcttggggccaaccctgcggtgcacgaggtggaggaga

SEQ ID NO: 14660 - DNA, 388 bp, Glycine max
caactctccccaaccatttcttttcatctgcacattcctattctattttctcacttcaacaggatctaacaatgtttagaatccactagtactcgaggagggccttccaagtttgagagattagaaaaggaacttgctgacaatggaacttcaaatgaggagtttaagaggagcacaagtttgccttctcgggctatgggttcaacctttcgagacatcaatctacagagaaaccccacaaaaaatgccaatagtaaacctaaggagaagaagagtcacccactcttcagcttctttgatcttcgccggaagaagaaaacaacagctaggcctgaatttgcgaggtatcttgagtatgtgaagggaaggaggcatgtgggatttgaat

SEQ ID NO: 14661 - DNA, 504 bp, Glycine max
acgagaaaatgtcagtggtggttgtggttattggtgtcggtgtttgcactgtaactgatgtaaaagttaacctcaaaggtttcatgtgtgcctgtatagcagttttgtcaacatctttacagcaaatttcaataggttctcttcaaaagaaatattcaattggatcttttgaattgctgagtaaaactgctcccatccaagcgctttttcttcttattcttggtccatttgttgattactacctcagtggcaaattgataaccaactataagatgtcttctggtgccattttattcattcttctttcatgctcgctagctgtattttgcaatgtgagccaatacctttgcattgggcgcttttcagctgtttccttccaggttttaggccacatgaaaacattgggctgtagagcttgaaaagcagtcaaatgcaaagaccttacctcacgcgaaaaacagcatgacggaagaagaaattagattattgagggatggagtagat

SEQ ID NO: 14662 - DNA, 681 bp, Glycine max
gtcggtgtttgcactgtaactgatgtaaaagttaacctcaaaggtttcatgtgtgcctgtatagcaggttttgtaaacatctttccggcaaatttcaataggttctcttcaaaggaaatattcaatggaatcttttgaatggctgagtaaaactgctcccatccaaccgctttttcttcttattcttggtccatttgtcgattactacctcagtggcaaattgataaccaactataagatgtcttctggtgccatttaattcattcttctttcatgctcgctagctgtattttgcaatgtgagccaatacctttgcatcgggcgcttttcagctgtttccttccaggttttaggccacatgaaaacagtatgtgttctgacgctgggatggctgctatttgattcagagctaactttcaagaatatcatgggaatgattatcgcagttgttggcatggtaatttacagttgggctgtagagcttgaaaagcagtcaaatgcaaagaccttacctcacgtgaaaaacagcatgacggaagaagaaattagattattgaaggttggagtagaaaagagtcccctgaaggatgttgaacttggtgaggcccaaggatagattgactcagatttggtggtgaaattgatgagaaatgatgcaggcaattatattgtgtattgctt

SEQ ID NO: 14663 - DNA, 1109 bp, Glycine max
acgagcacaccttcagccacggaatggggagacatgactttgacaaccgcgttttcttgttcgctcgccgctgcttctctctccaccgccgccagtttccgccggaataaatgcaccaccagcaagatttttcattcctcttccacgtgcatgccctctttcttgcatgatcatcactaccactctttcttattgcgagttgccaatgatgctgatagaagtgaagtgtcatctgatactgcaatcaagacatcgtattcagaagccgataagatggttgatggtatggactttggtgagctttgcaatgagtttgagtgcatcagcagtcccttggtagaatccactgcaagacaacttgcacgagatatacttgagctaagggagggaaatcgagcacttggaatctttgctgtttctgtcgcatacaaggatcctattaggagctttaccggtcgtgaaaagtataaaagacgactatgggcaaccggtgcactagacaacccatctgtgactgtgcaggaaatggtgatgctgtcaaccagtgttttaagtatcaagtggacaataagagggaaaccaaaatctgtgttaggaggagatctgataattagagttacttccaaatttactcttaaccaaattagtggccaagtcattgagcatgaagaattctgggacttatcagcttcatctgctagtgctcaggcatttttctggacatcacgtgctctctttgctgctgttgaatctgtcaaagatttgggtgacagtgctaagaatttgagtagtaaaatgtcaaccaaaaaagagaacttggagatgtatccagatccttcaggtgatccaaccaagttcttccagagggacgacagttttcaacaggatgcataccagattgcactactcctggcagttatttatttggtggtacaatttctaaggacaactttgtaaagctagcctgccattttatcaactgaacttgtatgtctttgttctccaagagttatcattataaagtgtgactatcagctcataatcatcaggtgtcatcaggttgttttgtcaaagtaaaaatgttcacatttgtaagtgtacctataaaa

SEQ ID NO: 14664 - DNA, 757 bp, Glycine max
tgctaagaatattatgtggtaccagtcacattaagacctttttatgactgacaaacacttgatattgttgcagatttggttctgccagagctgttaaccggcgttatatcagtgattgtgtgccattaaaaattcgcatgcaagcatcagcaggttttgttagtgctagtgctcttggaatggcttgtggtcctgcattagctggcatactgcaaattaattttaaaatttccaagcttacatttaatcagaataccttgcctgggtgggttatggctgttgcttggctgatatatcttgtatggttgtggatcacttttaaggaaccttctcgtgaagctgaagaggatcactccccacatcaatcaaatgatgaagtaaacaatgcacttgagaaaggcttaaaacaaccattgctgattagttcagagaataaggtagatgaagatgccgaccaagattgtgatgatagcgaagaagccccagaggaatctcgccagccagtgaattcaattgtaatggcatacagactccttacaccttctgtaaaggttcaattattgatatatttcatgctcaaatatgtaatggagattttgctatcggaatctagtgtcgttacaacatactacttcatccggtcaacaagcacagttgcagtttttcttgcttgccttggcctgacagttcttacctgtaaacattcatgttggaagctatataagcaacatgttccaggacaggcaaattctgttgg

SEQ ID NO: 14665 - DNA, 414 bp, Glycine max
ccacaatcatcttgaccaaaatttttggtatttccgtcacgaacacatgtcaacgccaccatacgccgcgtaagccgcaccgttcgaggacgaggaggatgttgtgtgcaccgttgcacctcactgtcctgaaaccctcgtcaccatgtcaaggcttcttgcttgtggaaacgttagaaggtttacacgttctgttcacaagacaggctgcttggaagtattttatcccatggggcccccttactcaagatacaattttttctcacactatagacatgtacacaaaggacaatttctattcatgttatttaaatcgaaggttaactttttgacgagttgcggggctaggaacttgtataccctccctgcaaataatgtaaaatatcatcatggtcaagttgtttggaacatgat

SEQ ID NO: 14666 - DNA, 391 bp, Glycine max
attccaaacccagaaagaaacgctgcctagaagacacattttcgctattttccgcctttcagagtctctcgtctctctcgggtcatccatcgtacgctaatggccgccataatttcgcgaaggttaaggttatccaccttaacctcctcactcctaaaaccctcttcttattctataaccaatttcatctccaacaaccctaaacccccaatcttcaaaccctcccaattccttccacccatcaggtttctctcaaccaacaacaaagactcctccactttagattccgacgaaacccaaaagcccagcccaggcccaagcccaagcccatacccgagccaaaacccaaacttcaagcaccaggagatagaaggcccaacagtggagcgcg

SEQ ID NO: 14667 - DNA, 656 bp, Glycine max
  unsure (1)..(656): unsure at all n locations
ggcaaaggaagttgtatcattcgaaaatgtgctgctggaggaagttccagcttcttcaattttaaaatctctgacaacttttattcaaaaccaaggattttattctcttcctcagtattatctgacgcctcggtgctgcccttttggatattgttcaatccaggccttctagttttcctatatcttcccaagagttgttcagtatcctagatgattctagtgaaaaaacatttttggttggatcagcagtgtcgatgcaaagatatgtttttgatggagaggctggaaagattggtcttgaaccaaaaaacctagttgcttgcacaagtttcttgctagagcagaaactggtgaaggcctggcttgctgacaaggatgctgaagcattgagatgccagaagctgctggtggaggaggaggaagctgctcagaaaagaaaagctgagattttagagaggaaacgccaaaaaaagcttagacagaaagaacacaaggccagggaacgactcgaagatgacacagaaattaaagagaacataagcagcacaggagaggatgttttgccagctgaagcttcttctggtacatgtgactttgaagcacagaatccagatatatttgcggatcattctcctncaccacatgtaacttctcgc

SEQ ID NO: 14668 - DNA, 359 bp, Glycine max
ccttgtgggactgacaagcgagtaacaagagggagagagtagagtgcataaattgaattgcaagcacgagcaagtacttggttttggcttggggaaacgaaggaagaatggcgcagcaacttggagttccatttaagttatcatgcaaaccctctcacattcacgctcttaaaccctttcactctctccctccccttcgcaccttcaccaccaaaccttctcttaatgccaaatcccatcatcatcatcatcctttattaacgcttcttcgttcccaccgcactctcgcaccctgctgcaactccaacagatcagatataatgtcacaattggagcttgggaaaccggagcaaaagggg

SEQ ID NO: 14669 - DNA, 444 bp, Glycine max
gtgaggtgaaaaaactttttgaacgctctcatgatggtcaaatcactgagatagtttacaagggaacacatgatcatcctaaacctcaatcaagctgccgatactctactggtactgttatgtatattcaaggagagagatctgataaggcttctttggctggccgagatgacaaagcatccactatgtatggtcaggtgtctcatgctgctgagcccaacagtactccagagtcatcacctgtagccacaaatgatgatggtttagagggtgctgggtttgtgtcaaacaggaataatgaagaggttgatgatgacgatcccttctcaaagcgaagaaaaatggaacttggaaatgttgacatcactccagtagttaagcctatccgggaaccacgtggtgttgtacaaactttgagtgaggttgacatattggatgatgggt

SEQ ID NO: 14670 - DNA, 535 bp, Glycine max
ttatggtgacctggcagcgatgagattaccagaagacgtggaaggacttgggtgttgtgagtacacgatggataggggagtggttcacgcgtgccatgcatgaggagtggtacatagccttgaaggttggtctcatcacgaagttggggccatagatgttaacagaatcgatcttgtgtgggaagcagcactcaaacatggcctaagaccagtgtcaagtttcacacagaaagaaaattaaaatcagcttcagtcaaagtatttttctcaagttgtttcttatttgttttggtgtattgcatgcacatcacagtgaccttataagtgtgattatattctttcaagtctgtgtattacatttctaatgtttcctcttgtatgttcatatgatcacattgacagtgattcattcatggtataaattaagccaaagcaagatagctttgcttcctcttgtatgttcaattcctattctgattgctttgttattttcaatatttccttatatattcatttaatgcatatattatcacag

SEQ ID NO: 14671 - DNA, 1137 bp, Glycine max
tctcgagccgaatcggaacatttccttatctatcttcacctccatcttttaacagttcccctcgaaacttctgaagatgggtggcattgcattcggacgcttggatgattctttcagtttaacctcaatcaaggcctatattgctgagttccattcaaccttgctctttgtttttgccggtgttggttcagccatagcctatggtaagttgacatcagatgcagcacttgatcctgctgggttactggcagttgctatttgccacggttttgcactctttgttgcagtttctgttggtgccaacatctctggtggccatgtcaaccctgctgtgacttttggattggctcttggtggccacatcaccatcctcactggcttcttctactggattgcacagcttcttggctccatcgtggcatgttttcttctcaactatgtcacaggaggcttgccaactccaatccacagtgtggcttctggggttggagctgttgaaggagttgtgaccgagatcatcatcacatttggtttggtgtacacagtgtatgccacagcagcagaccctaagaagggatcattgggaaccattgcaccaattgccattggtttcattgttggtgccaacatcttggcagcagggccattctctggcggctcgatgaacccggcacgctcctttgggcctgcagttgttagtggtgacttccatgacaactggatctactgggttggacctcttattggtggtggtttggctggccttatctacggcaatgtcttcattcgctctgaccatgcacctctttccagtgaattttgatctgattcaagtcatggcctttgtaattcatgtttctttttctatctctcttttttttctctctctccattctatgctttttttttcttctcttaatttatttgtaaagtgtgctaccactgtttaatttggtgagaattcaagaggttggtggtgtgcaaaagtgctttatatataattatctggggttaacttttttggctttccttttaattttggatcccgtgcatgaggactattgaaccactggcatttatcattatggaaaagttcacacttcctaaccttataatactgaaaattaattaatgcat

SEQ ID NO: 14672 - DNA, 444 bp, Glycine max
tcattgggcacaattgcacccattgccattggtttcattgttggtgccaacatcttagcagcagggccattctctggcgggtccatgaaccctgcacgctcctttggccctgctgttgtcagtggtgactttcatgacaactggatctactgggttggccctcttattggtggtggtttggctggtcttatctatacctatgccttcatccccacccagcatgcccctctcgcccctgatttttaatttcatgatcccccctgtgttcccttgtgttaatttctgatctgtaataaaggaggaaaagtaattaactcttgcttttccttcttttcatctctccgctttaccccttttttttttttttttttgcttttaatgtaaagttggagtacgtcattgttttctagcttataaaaattcatcaggttggtaatctaaccc

SEQ ID NO: 14673 - DNA, 391 bp, Glycine max
acgaggctcgatgaacccagcacgctccttcgggcctgcagttgttagtggtgacttccatgacaactggatctactgggttggacctctcattggtggtggtttggctggccttatctacggcaatgtcttcattcgctctgaccatgcacctctttccagtgaattttgatctggttcaagtcatggcctgtgtaattcatgtttcttgatgataaaaggaggaaaagccggtcctgcttttctttctttttctatctctcttttttttctctctctccattctatgctttttttttcttctcttaatttatttgtaaagtgtgctactactgtttaatttggtgagaattcaagaggttggtggtgtgcagaagtgctttatatatat

SEQ ID NO: 14674 - DNA, 609 bp, Glycine max
gaggagcaaacaaataccctcttttcgtgccatttgattttccgtcgttcaaaatcccttccaatccacagatcaacatttttttttttggtgggtagcagtgaggataaaaaatggctatggccacagctgtcgtgtgtcctcagaacatcaccggagccatcgtgagctcacctagcaagaccaagaagagagtggtacacgtgagaggcataaattcatttgggggactgaaggctagcaatggtgttgtctctttggggattcctatgagcactgagaagtgctttgctaaggttgtgagctcagtgaaagcagctacatcaaatgggaaaggaaaaggaggggctctttcttccacgtgcaacgctgctggtgagatattcacgattgctgctatcatcaatggacttgttcttgtcggggttgctgttggctttgtgctcttgcgagttgaagcatgggtcgaggagtccgaggcagagtgaaaattcaatcagataagcaagcaattaattaatatccagaatagttgtatgttcctatattgatgatgtggctgttcttgttttcgttatgacttgtatatttatttgtcaagtttcatca

SEQ ID NO: 14675 - DNA, 1476 bp, Glycine max
agtttgggtctatatcacctgaccttgggaagctagagaatctgagggttcttgctcttcataacaacaacttctatgggtcaattccaccagagttgggaaattgcactgaattggagggaatatttttacagggtaattaccttagtggagcgattccaagtgaaataggaaacctttcacagcttcaaaatttggatatatcaagcaattccctcagtgggaatattcctgcatcacttgggaagttgtataatctcaaaaatttcaatgtatcaaccaattttctggtcggacctataccttctgatggtgtccttgccaactttactggaagctcctttgttgggaatcgtggtttgtgtggagtgaaaataaattcaacatgtagagatgatggttcgccggataccaatggtcaatctactacctcagaccaaaatcaaataggaaagaagaaatattctggccggctgctcatcagtgcatcagcaactgtgggagctctacttttggtggcacttatgtgcttctggggttgttttctttataaaaagtttggcaaaaacgacagaataagtctggcaatggatgttggtgcaggtgcatcaattgtgatgtttcatggagacttaccatattcttcaaaagacatcatcaagaaactagagactttgaatgaggaacacataatagggataggggggtttggaactgtttacaagctagcaatggatgatgggaatgtgtttgctttgaaaaggattgtaaagttgaatgaggggtttgatcgtttttttgagagggagcttgaaattcttggtagcatcaaacaccgttatctagtgaatttacgaggatattgcaattcacctacgtcaaagttgttaatatatgattacctaccaggtggtagtcttgacgaagcacttcatgaaagagctgatcaactagactgggattcgcgcttgaatataatcatgggagctgcaaaagggcttgcctacttgcaccatgattgttcccccaggatcatacaccgagacataaaatctagcaacattttacttgacggaaacttggatgctcgggtctctgattttggacttgccacacttctggaggatgaagaatctcacatcaccactattgttgctggaacgtttggttatctagctccagagtatatgcaaagtggcagagcaactgagaagtctgatgtgtatagctttggtgtgttgacactcgaagtgctgagtggaaagcgaccaacagacgcagcattcattgaaaagggcctcaatattgttggttggttgaattttctaattacagaaaataggccgagggaaattgtcgaccctctatgtgaaggggtgcaaatggagagccttgatgccttgctctctgtggctattcagagtgtatcctcaagtccagatgatcgacccactatgcaccgagtggtgcaattgc

SEQ ID NO: 14676 - DNA, 376 bp, Glycine max
cacaacaacatcaaattttacaaaataattaaaaaaaagaaatggtgattattcattattcagcagcgtcttgttgttgcgtgccatcgctgcaccgctcttcgccttctcgctcgattctcgcacccgcaatctttttcttccgcgacgccgctccgaacctcaggctcgtctcggtttggtcccaacctccaggctcggagggcttcggcgaacccaacaaacactcttctcgtgatgcctccgttgggttctccgcttcttcttcgtcggtcattgattttctcactctctgccaccgcctcaagaccacaaaaaggaaaggatgggttaatcatgggataaaaggtgctgaatcgattgctgaccatatgta

SEQ ID NO: 14677 - DNA, 343 bp, Glycine max
cagtcaaatagtactaagaagagagccgtcgctgaattcaggggacatatacacacattattatgagcggagggccagcagccaatcgtcaagggataaagctcttgcagatgtacaccagatgcaaactgttcatattgagaagcttagtgatacacagtgccagcctgaatcacagcttaagttcataacagaggcctggttacagatagttgaatgcaggagggtgctgaaatggacatattcatatgggtactatttaccggagcatgaacatgctaaaaaacagttctttgagtacttaacaaggtgaggcagaatctggtttggagagacttcatca

SEQ ID NO: 14678 - DNA, 673 bp, Glycine max
acgagctagattgcaataacgtgtaccctttcaaccgcacaattcatctacaaaccacaattctcaattctgccactttgttcattctacctcatcatatctttcacctttctaaccatacttttgtatttctcgatttccaaggaacttttggattcttagctgccaccctcatatgatatttcttgaaaccttgtgttaaaaattgtgtccttttgaacttcaataaaaatttgattttctttttcttagtttcatacccacatacccattgttggatttgaactagttttacttgcctcatggcccttcatataagcagcggttgttttactgtgatgtgtaactcaagagttcacagaataagagctgttgcttcagagggttctgctactcttaatacagttgtggaggagaaggtgaaattgggtggctctgatttgaaggtatcaagggttggaattggagcttggtcttggggtgataccacttactggaacaattttgaatggaatgataggaatgagaaggctgctagagctgctttcaatgccagtattgatggaggtctaaccttttttgacactgctgaagtctatggctctgggcttgctttaggagccgtaaattctgaggttcttcttggaagatatattaaggaaagaaaagaaaa

SEQ ID NO: 14679 - DNA, 358 bp, Glycine max
gtctgtcttgcgcatgctctctactcacctttgtagtcccggccgtcaaaatacccattcccatcgcctttctctctccttcttcctctgccccccaaaaaaatgaagcgcttcatgctcccaagaaaccctctcagcgacgcagcagagcttccttcttcgccaagcccaaccccaactaccagctttgccaaactccgtccctcttctcacaaacacaaaccctccaaagagaacgaccttccctccgatcccaatctcgttactccctcccctgccaaattgaagagccccttgcccccaagacccccttcttccaaccctctcaagcgcaagctcaccatcgttgatgccctaa

SEQ ID NO: 14680 - DNA, 522 bp, Glycine max
cccacgcgtgcgcccacgcgtccgctggattccagctagcaaccttgaaagtgcaactgcaaaagagaatcctgatgcttttaaggcatcatggacgttattaaagggtgcacatggtgttcttgttcctggaggctttggagatagacgagtgcaaggaaaaattattgcagccaaatatgcccctgaaaacaggattccattccttggcatttgtcttggaatgcagattgctgtcatagagtttgcacgatctgctcttggtgtacaagatgctaacagcactgaatttgagccccataccaaaagtccatacatcatatttatgcctgagggatcaaaaacacatatgggaggcaccatgcgccttggatctaggaggacatatttccagaccaaggaatgcaaatctgcaaaattatatggctgcaaaagcttcattgatgagagacatcggcatagatatgaggtgaatccggatttagtagcctgccttgaaaatgctggtctttcttttactgg

SEQ ID NO: 14681 - DNA, 441 bp, Glycine max
cccacgcgtccgagaaaggaggccaccagaaaagcatggcaattttctgcatcaagtatggatgcaacttatgagcctttaatttgtggtagcatataacaatcaactttggttcatcaaggtctgtccaaattcaatcaccaaatttaatcctctccctatttatgtaagtccacccactttatataccaaattgaaatttggtttgttcaaatttatcagtaagttatggtcaaggtgaatttctgcacccttttgctaccatgtttgaaaggttgagtagactaagccatgatctattgcagcttctgatttgttagtggttgaaatcctaaagggtgatgatcaaaagggtatcatgcttcaaactagaatcaggactggtcatgccacaagtttggttctattggtactagtgttattattatattattatactac

SEQ ID NO: 14682 - DNA, 546 bp, Glycine max
ggcaattttctgcatcaagtatggaagcaatttatgaggcattaatttatagtaacatataacaatcaactttggttcatcaagctctatccaaattcaatcaccaaatttaatcctctccctattatgtaagtactttatataccaaattgaatttggtttgttcaaatttgtcaacaagttaggatcaaggtgaacttctgcatccttttgctactatgtttgaaaagttgataccaaattgaatttcgtttgttcaaatttatcaacaagttaagatcaaggtgaaattctgcatccttttgctaccatgtttgaaaagttgagtagactgagccatgatctattgcagcttctgatttgttagtggttgaaatcctaaagggtaatgatcaggattggtcatgccacaggtttggttctattgttactagtattattattattattattatactactggtgagtaaattaaagtaactagagcttgaaatttcaactgcctttactggggaagaagcctaattgagtattgaaaagtaagaa

SEQ ID NO: 14683 - DNA, 1110 bp, Glycine max
ggcttgtgacaaaatgacacaggagaatttgagccatcctaagcaagcagcatgagtcacagatttcattctctctccaactgataagaaacgtagttccatgtgggctcttaggatccactcacttaactctaaactcgtcgtgtgtgttccttctttccacttcaaacttgtgacccagaaaaaagaccctttccattctcctccttttcttcctcctccactggctgcacctcgctgccgtgtctctgcctagcgtgaaattggcctcatttcccatctgggtcctgtgaattgcgattggaaccgcgttttccccgcttctgggcttggctcagaagtagtcagaatgatgtctgtcacaggcaaaagcattgattttgctggcaaaaacttggtctcttgtggctgctcttccaatgcttcttcgtttgataggtacactgtgaggaactatgccaagctgaatagtaataattctaaagggtgtggcagagatcatggggctcgtaaattggtttgttgtaagaggaggagcactcaatgtcgggtttcttctatgaagactgcacagcctactgtgaatggggggactcatgcaattgaaggccttaccacaggattggacttgaagggttattcagaagcccccatttcccctgctaggctttttgaagtggttgccgatgatctgctaactctcaataaaaatcttcagtcgattgtaggagcagaaaatccagttttgatgtctgcagctgagcagatttttagtgctggtggaaagaggatgagaccagctttggtgttcttggtgtcaagggcgactgcagagttacttggcttgaaggaacttactgcaaagcatcgacgtttagcagagataattgaaatgattcatactgcaagtttgatacatgatgatgtactagatgagagtgaccttcgacgagggaagaaaactgttcatcaaatgtttggaacaagagttgcagtgctggctggagacttcatgtttgcacagtcatcatggtatctagccaaccttgaaaatattcaagtcattaaactcatcagtcaggtgataaaagattttgcaagtggggaaat

SEQ ID NO: 14684 - DNA, 399 bp, Glycine max
cggcttgacccagaaagaccctcttttttttttactttccattctcctccttttcttcctccaatggctgcacctcgctgcctaacgtgaaattagtctcattttccatctgggtcttgtgaattgcgattggaaccgcgttttctcgcttctgggcttggcttagaagtagtcagaatgatgtctgtcacaggcaaaggcattgattttgctggcaaaaacttggtctctggctgctcttcaaatgcttcgtttgattggtacactgtgaggaactatgccaaggcgaatagtaataattctaatgggtgtggcagaagccatggacgtaaattggtttgttgtaagaggaggagcactcaatgtcgggtttcttctatgaagactgcacaacctact

SEQ ID NO: 14685 - DNA, 313 bp, Glycine max
ttttccaccctacacttcttcacactcactcaccaataaacttcttccgaggtcaatcatcgtgcgactcggtggctggtggattttgagagtggctttgatttaatcccagcacttgtggatggtttacatggcagcatctcgaggaggggttcataaacttgtatccttctctcagattgaaaaactagtttcctttgtacattgcaaacaatatctgccaccattgcttgagactgtgcgccattttagctttaccgatgattgcagtggcagaagcaaacaacctgttggagaatccgatgactttttt

SEQ ID NO: 14686 - DNA, 573 bp, Glycine max
  unsure (1)..(573): unsure at all n locations
cacgcgtacgtaaggtgggaattcggctctagctatcagctactctcagttcgacgtcagcgaagccttcattgtttgttggaggcaattcgattcgatttcgcagagtagaatgtttgggacggcgattcgatgtttggcgaagaaaccgaagccgaagatgggacccgtgatcctgaaaacgccgccggagcagaggcagacaatcacaagaaccctcttcgatataattaaggagcatggtcccatcactgttgctaacacctgggaacgtgtccaggaagttggattgaaagatttgacaagcaagaatcacatgaaaatagtgctgaaatggatgatagagagacagaagattcggctcctttgcaaccacgttggagcacacaaacagtttctctacaccacttggtttaccaagccggttacccctcccaagaattcctcttgaaagttgaaacttcatcatcagttggttgctgctgttttgtaccatgccttgtcaagagtaataatttcattttagaaccgttaatcaatagagatcgaaatgttttgccttacaaaananaa

SEQ ID NO: 14687 - DNA, 447 bp, Glycine max
  unsure (1)..(447): unsure at all n locations
gtaggaggtagaaagaagaaagggaggaaccagtcccgctgattagtctgctgtttctagctccattctatagtaatggccaagtctgttgctaatcctcctttccttcgtcctctgcatcaactagaatttctgagatgccctcgcctttcttctaaatctcagtttcaccctcgccgcttccgctctcaaacccaaagcatcattcgtgctatatccgcagttgccgcagaatcggagttaggtacacagcaggatcaagcaattgaagcagacatcttcgcttgccctgtatgttatgaaccattgataagaaaaggtccttctggccttaacttaccagcaatctacaggtctggtttcatgtgtaagagatgtaagaagtcatattctagccaagacaggtatctggatctaactgtaactgctggatngagagactacact

SEQ ID NO: 14688 - DNA, 506 bp, Glycine max
gttctgatccctcaaatccatttcttagttctttgcttttgctcagtgagcttccagttgtattcatggacttaccggagaagcttttctttgcagcatttctcattctttcagtggccattgatggaacgcaggcagacaccatggtcactggcactgtcttctgtgaccaatgcaaagacggacagagatcccttttcgattatcctattaatggtgcaaaagtaactctgtcctgtgctgacagtaatggacaaattacaatgtcaagagaagaaacaacaaactggtttggaagctatacaatgaggttcgatggcgcacccgacttgagtggttgttctgcccatgtctcgggcagtggtcaagggtcaacgggttgtggtgaagtggctggtccttcacagaatcccaaactcatgtttaggatgtttgacatggagatgtatacagtggattctctccttgctcagcctgcacaacccatgcagtactgttctacatct

SEQ ID NO: 14689 - DNA, 546 bp, Glycine max
ctcttcaattcaatactcacacacaaagttccctcctctccaaacatggcggcaattttctcttcttcactcttcgcttcctcgcctcttcccaaaccactttcttcctcctattctcgaatccataccgctccacaacttttcagggctcgatcttctctccttcaggataacgagaaaaaagtgatcgtgcatgattccttcccctccaaaacctctcctcttcacaccgctgataaatcaactggtggaaactcaattaacacctctgcgttcgagaaacggattatcaaggtcgaacaatcggtcaatatctttcttacggattccgtgataaagatacttgatactctgtaccatgatagacactatgcaaggttttttgtgcttgaaactattgcgagggttccttactttgcctttatgtcagttctccacatgtatgagagtttgggctggtggaggcgggcggactatctgaaagtgcattttgctgagagctggaatgaaatgcatcatttgctcatcatggaagaactagggggg

SEQ ID NO: 14690 - DNA, 368 bp, Glycine max
gattcttaattgcattggttggtgaaatcattttcttcaattattattattttttcaatatctttattttcaaatcaatttttgtataattcaatctctctttctctttaattatcattatgggagatgctactctggtctgtggcatctaagattttaatcactgtggtggctgttcccgtagatctagcgttcatgaaagtccgctttgttatcttcatatcttggcaaatgcgattcacgtgtcgtgactgaagctgctacccatagatagctatataattcagaatagagcagcacagatgcctcctgcgattaagctttgctgcattggctcgacatttttgaactcttattcttaactgaat

SEQ ID NO: 14691 - DNA, 692 bp, Glycine max
gccgagattcatgcagagaaagcagagttattatcagctgagttgatgcgattgaaggccttactggattcaaaactggaaacagaggccagtgaaaatcaggttatatttaaactgaaaacagagatagaagctctcaaggaagaacttgaaaaggcaaaggattacgatgataagttgtcagagaaagaaacttttattgaacagcttaatgtggagcttgaagctgccaggatggctgaatcttatgcacacagtctgctagaggagtggccgaaaaaggttgaggaactagaagtgagggttgaagaagcaaataagttggagagatctgcatcagtgtctttggaatccgtaatgaaacagttagaaggaaacaaggatttgttgcatgaagcagaatctgaaatttctagtcttaaagagaaggtgggattgttggaaatgacaattgcgagacagacaggagatcttgaggattcagagcgttgccttcatgtggctaaggaagagagtcttgaattgtcaaagaaggttgaatctcttgaatctgaactcgagacagtcaaggaagagaaggctctggctttgaacaacgaaaaactttcagcttcaagtgtgcagaccctattagaagagaaagacaaactaattaatgaattggagatcttgagagatgaagaagaaaagac

SEQ ID NO: 14692 - DNA, 801 bp, Glycine max
  unsure (1)..(801): unsure at all n locations
gggccaagtataggggcatgaagattatgtttgtcggtgactccttgtgctgaaccagttcaactctctggcttgtatgattcactcttgggtgcccaacactagaaccagtttcataaagcangatgctctctccaaaatcacatttgaggactatggccttgagttatttctataccgcacagcatacttggtagaccttgaccgtgagaacgttggaagggttctgaagattgattcaataaagagtggtgatgcttggaggggcatggacgtcctggtttttaacacgtggcactggtggacccacaccggaagttctcaaccgtgggactatgttcaggtgaataataagttgttcaaagacatgaaccgttttcttgcgtactataaagggctaacaacttgggctaagtgggttcagagaaacgtcaatccagcaaaaaccaaggtcttcttcttaggaatttctcctgtgcattaccaggggaaagattggaatcaaccaacaaaatcatgtatgagtgagacacaaccattctttggattgaagtaccctgcagggacaccaatggcttgggtgatagtgaacaaggttttgagtaggataaagaagccagtgcaattcctagatgtgactacactctcacagtacagaaaagatgcacatcctgaaggctacagtggggttatgccaactgattgcagccattggtgtcttccaggactgcctgatacatggaatgtgcttttgagtgcagttctttctggttgaaaacaatcaaatcagagatgacaact

SEQ ID NO: 14693 - DNA, 430 bp, Glycine max
  unsure (1)..(430): unsure at all n locations
cgcaagcacgcgcacgtaagctcggaanncggcncgagggcaacaagcacactcatttgtgttgggangccgncgcagggcacaggagcagcattgtaagaagacctccctgaccagattctatcggtgataccgacggacccacaccagcagcttgatctcgctcgcaagataacctccatggccatcgcctctcgtgtctcttctctcgagtccgacgcctctcgcctccgccagaagcttctcgaaaaggaccgaatcatcctcgacctcgaagaccgcctctcctaccctcacccgcgcctcccaccaaaccgtctccaccctcaacaccgccctcaacgaaaacattaagctttccaaggagagggatcaattgggcgccaccgtcaagaagttaagtcgagactctgcaagccggagacattta

SEQ ID NO: 14694 - DNA, 415 bp, Glycine max
gggccaaggattgacatttatttgagtttgcctcgttgattgcacaaccagctgggcatcaagaaaacccagccaacaaccacaaccaaacagggtggatagggatgtcgcagcagggcacaggttcagtggtggatttcgacctccccgacgagattctgtcggtgataccaacggacccataccagcagctggatctggctcgcaagataacctccatggccattgcctcccgtgtctcttctctcgaatccgatgcatctcgcctccgccagaagcttctcgaaaaggaccgaatcatcctcgacctcgaagaccgcctctccttccctcacccgcgcctcccaccaaaccgactccaccctcaacaccgccctcaacgaaaacattaagctttccaaggagagggatcaat

SEQ ID NO: 14695 - DNA, 773 bp, Glycine max
caaagaactcttgtggaagcatggggtttaattcgagaaacatttgttgatcctacatttaatcatcaagattgggatttgaagttgcagcaaacaatggtggaaatgtttcccctgaactcagctgatgcagcatacacaaaactccgtggaatgctttctacccttggagatcctttcactcgaattatcagcccaaaggaataccaagggtttaaaattggaagtgatgggaacgtacaaggagtgggattgttcataaatgttgaaccaagaacaggacatttggttgtcttgtcatgtgtagatggcagtccagctgctcgtgctggtatacatcaaggggatgaattgattgagataaatggtgagaggcttgatggcattgatagtgaaactgcagcacaaaggcttagagggaatgctggaacaactgttacagtaaaggtcaaagactcaggaacaagatcttttatccgagaggtcaaacttcctagggagtatattaagctctctccaatatcaagtgccatcatccctcatagatccccagatggtcatttcacaaaaactggctatgtgaaattgtcagccttctctcagactgctgctgaagacatgaggaatgccattcaggaattggaaaatcaaggagtacactcgtacatattagatctacggaacaatcctggtggtttggtaaaagccggccttgatgttgcacagatgtggttagatggaaatgagactctagtgaacacaatcgatagaga

SEQ ID NO: 14696 - DNA, 631 bp, Glycine max
gtgccaacttgttgagaaagccctttcatgcaaatcttgcttgagagaaattgtgatccttgcatcagctaatgttgatgaagatattagcattgtctccgaaaaattggccactgctgtaaaggctagcaaagtggctattgtctatgatcagcatgatacttgtgaccttgagctgactttagcaaaaaacttttggaaaattcaagtcagtagattgttaaatggtgtaccaaagcccactatccaacaaattcagaagcatctgaaggagggacaggctatggacatatcacctgaagatcactatatgttgaaacttacgaatgtgaattgcttgggtttgcagtgggcagaactagccaaaaaggtggcaactgattctggggcactcagcctggataaagtttttgaacttgtggtggtaggtgaaaacttgcccgttgacatgaacgaggaactaaggatattaagggcacgatgcatgctttattgcatttgtcgaaagccctttgatccagaaaggatgattgcatgttatcactgtaatgagtggtatcactttgattgcatgaaattgccttgcacagaagaggtctacatttgtcctgcatgtaatccgtgtaccgaa

SEQ ID NO: 14697 - DNA, 432 bp, Glycine max
attaaatcttctcttccacacgccaccacatcatggctttgagaaaatcaagtaaacttcctcagacagcactcatcaagcaaatcctcaagaggtgttcgagtttagggaggaaagatgatcaaggcctcctggacgtgccaaagggtcactttgttgtatatgttggagaaaacagaagcagatatattgctcctatttccttcctaagtcgccctgagttccaaacacttctccaccaggctgaagaagagtttggctttgatcacgaaaagggtctcacgattccatgtgaagaggacgtttttgagtctctcacctccacgctcagatgagaaacttgccttaccacgtatcgatcatttttcgttatcttttctttgattttttgaaggagaagagaaaattaatagctcaagatgaagctggttt

SEQ ID NO: 14698 - DNA, 652 bp, Glycine max
cgcatggggaattcaaggccccctatgcgctaatttacagaaacatggcggttggaggcgtcgaaggtttctccgcactgccccaccactgcttgcagctctgttacgggttcttcgctttcgcggtggcggtgaacatggtcagagacctctcccccaacgtgtttgggaaatggatgccgttgcccatggtgatggcgattccctttctggttggtgcctactttgccattgatatgtgccttgggagtttggtggtttacgtgtggcacaagcttaacactaagaaggcagaggccatgattccagcaactgcctctggactcatttgtggagaaggcctgtgggctcttcccgcttccattcttgctcttgccaaagttaacccgcctatctgcatgaattttcttgcttcctagaacttgatcaactacatcaaaccaatgaatgccataattagttagttaattaatactactatatatgttagcaggtacacttcatacataaccaaaatgctataaatattccaagtgtctggccattgggcttaggaacattgtattattgcttactacaactttgtaggaaaagtcagttcctgcccattgatctctcggaagggaatttcttcttcacaggagtcataatt

SEQ ID NO: 14699 - DNA, 463 bp, Glycine max
tttgtttcattgacgcattactattactctctctgagtcattcactcactcctctctcttctctgtttcattattgcttctttgttgtcaactatgaacgctcttgcagccaccaaccgcaactttcaacgtgcagctcgcattctcggtttggattccaagcttgagaagagcctcctcatacccttcagagaagtcaaagttgaatgcacgatccccaaggatgatggaactctggtttcctatgtgggattcaggatccaacatgataatgcccgtggtcctatgaagggagggattcgttatcatcctgaggttgaccctgatgaagtgaatgctctagctcagctgatgacatggaagactgctgtagcagacattccttatggaggagcaaagggtgggatcggctgcaacccaagggatctgagtatcagtgagttagaacgtctaactcgggttt

SEQ ID NO: 14700 - DNA, 422 bp, Glycine max
gtgttggagcagatcttgctttcttggttccaatgccaaatgttggaggtggaacaacctgtcttattctactataacaaggaaaacaggtgcaaaagctggcgttttccctcatacaacttcagtatgtcacttatttggtcaccattccttgtggaagctgctatttttgaagacgaaaatggtgtttcgacttctgatgttgagctacatctcgacaaactggatagtaaatggacggatcagtaccttgactttgattacattagtttttcaaccgggaaatggtttctcaaatctgcaatctactatgagaatgacaccatattgggctgccactcctgtcctaagaggaacctgacagagctggggtttaacctggcttatcgcaatgccttgaaattagtaatgaacttcatagt

SEQ ID NO: 14701 - DNA, 1034 bp, Glycine max
  unsure (1)..(1034): unsure at all n locations
ctcgagccgctcgagccgaatcggctcgagcttgttttcatgacataaactatcatcaactgttgctttccattttggctataattccacaaaatgtgccattcattgcaagtgtaatattactagcatttccatatatcagtccatggcctccttaatgctcaatggagctcatcaaaatccaaacctcattagtggcatagctccaaatggccttaactttcacaacaagtgtttattccaaaagggtgtgctgtctcatggtaacaagttaagggtggtcagaaaaaacttcactcccaaaggcagcatgtcagcatcatcatcatcatcatctaggcctggttctcagccaaggttcatccagcacaagaaggaaggcattttggttctacaggtttctctctattgtgtatgaccacatcataaacccggggcactggaccgaagacatgagagacgaggcactggagcctgctgatctctacaaccgcaacctgagagtggtggatgttggaggtggaactgccttcaccactcttggtatagtgaagcatgtggacgccaaaaacgttacaattctcgaccagtcgccacaccagctcgccaaggctaagcagaaggagcccttgaaagaatgcaagattgttgaaggggatgctgaagatcttccatttccaactgattatgctgatagatatgtttctgctggaagtattgaatactggccagatccgcagcgtggcattacggaagcatacagagtgctaaggataggaggcatagcttgtgtgattggtcctgtacacccaacattttggctgtctaggttctttgcagatgtgtggatgctcttccccaaggaggaagagtacattgaatggtttaagaaggctggtttcaaagatgttaagctcaaaaggattggtccaaaatggtatcgtggcgtgcgcaggcacggccttatcatgcgttgctcagtcacaggtgtgaagcctntgtctggagactctccnctncagcttggtcccagg

SEQ ID NO: 14702 - DNA, 703 bp, Glycine max
aagacgacagaagggggtggataatttgcagagatcaaagaacagaagaagatggcacaaacgctggcaatgcccgtggcaccttcgctagctatcatctccaattctcgcctctccaagcacactctccgttcccgttctgaacaaaccaaaggttcaagggtcaagcatcaagtgcgttcgtgttggcggtgtggagattccgaacaacaagcgaatcgagtactcgctgcagtacattcatggagttggaaggaccagagcgaaacagattctctgtgatatccaaatggataataaaatcacgaaggaactcactgaggaggagctaatcacactcagggacgaggtctccaaatacatgattgaaggcgacctgagacggttcaatgcggttaatataaagagactgaaggatattcagtgctacagaggaataaggcatattcaggggcttccttgcagaggccagcgaaccaagaataattgcagaaccttgaagggtaagaaggttgccattgccggaaaaaggaaaaagtaaacggctcctattttttgtgatgttgttttctaattgtcaatgttgtaaggaaaagaataataatgttttctatataattcaattgtttttgtttaagtgttacttggaaatacatgacatcctatgaaagtatgaatcactcacacggcttggtcgtgtcgg

SEQ ID NO: 14703 - DNA, 638 bp, Glycine max
cccacgcgtccgctccatcttccaccttcctccttcctcacccccacacaatatcctcaccccttcgctcattttttctttttattattaaaactaaaattatactagtatataaacctatgctcattccactctttatcttttcctccaatacctccgccacctctctctctctctctctctctctctcttcaatcctcacgctcgattatttccctttgatgagtgttgaacggccaagatggtaaacgacgacgagtgggtgcgtgcggcgatggcggacgacaccgtcgtggtggagcttctgctacgcctcaagcaaggtaccgtttcacacaaatctcaccaccagcagcttatacctttctcctggggtgtcaaacagccgcgctcaagatcaaggcttagctccgccgccgtctctcgctgcgacgccgccgtttccaccagatgcagccccaccacgcccctctcttggagcgccggcgccgacagttacgaagactccagccgccaccaccaccaccacgccgccatatctaaggctactgctacaagtggatacactggcaactctgcttctaccaagaggtgcagaagaaaaaagacctttgcagaattaaaggaagaggagagct

SEQ ID NO: 14704 - DNA, 1217 bp, Glycine max
ctcatgggccaaaagtgattaacggaataatccataacttgtatgtatgtagttaacgtggaaggattgggtgaagacgaagggtttggcttagacttagatggagtcgcgtggacactcaaacccgcttctgtcattttccagcttcatccatcaacactgcgtccgcttagggtccgacctcgcgactcgtttggatgacacgaagcgagccctagctcaatctcatcataatcttctattccccaaacacgccctcgcccacgccacttctactctgggctccctgcacgtggctaagtccctcgtcggcacctctgtttacaccgtcagcaattccaacaatgagttcgttcttatctctgacgctgacggagccaagtccattggattgctttgctttcgccaagaggacgccgaagcctttctcgctcaggttcgatcacggagtagagagcttcgaagcaaggctagggttgttccaattactctcgaccaggtatacatgttgaaggttgaaggcattgccttccgattcttacctgatcctgttcaaataaggaatgctttggagcttaaaccagtcaacaagggagggtttgatggaggtcctgtttttcagtcggagcttttggttgtgaagaagaggaataagcgttactgccctgtgtatttctctaaggaggatattgagcaggaactgtccaaagtttccagggcatcaagaggacctggtgtttctcagcatatagcggttggtagcttggaagatgtactgagaaaaatggagatgagtgaaaggaattcaggatgggaggatttgatttttattccaccaggaaaaagtcgctctcaacacacacaagaacttaatgaatgattcccagggtgcgaatttaagctaaccatgatttcatgtggttttcttgagcaaattggatgttactgttgtcacaatttagtcagctagtgagatactaggacctctgccttcaaatagttgtgttcttccttcttctcaaccgaaattccttctgatgcgaatactgcactaagattctcagtggatataaggtaaatgtgtatgtgagaggacatcaacgctaacgtgcatttcaattaagagatcgttcccccatttgttgagcatgctagatacccaatgtgtgaggggggttcttcctcacacatgtacagataatttatttgttttgcct

SEQ ID NO: 14705 - DNA, 535 bp, Glycine max
tgaattttgtgacagcatataagagcgccaacgtcgagtgcaaacgtacatgcactcggaagtcagctcgagattcggatcaagctaatccttagaaagtagtcacaacactcattcacatgcgatgccaatttccagttgaaacttgaaagagaaggatttgcgaaaacagtgtattattttgcgttgctaaaaccctgtaacccgacttccgtttgggtttttcactgtgcctatggcggcggcagcggtggcggaggtgaggaaggccccacggccgggcaagggcgggtacgaagcgcacggcctgagcgaggaggaggcgcgagtgcgcgccatcgcggagatcgtcagctccatggtggacctctctcacaaaggccagaacgtggacctcaacgcgctcaagtccgcggcgtgccgcaagtacgggctctcacgcgcgcccaagctcgtggagatgatcgcggcgctccccgacgccgagcgcgagacgctcctccccaagctacgagccaagcccgtccgcaccgac

SEQ ID NO: 14706 - DNA, 570 bp, Glycine max
cgttctcctacgacggcgagaggctcttggatctggacagcgtgaggagaattatctccggttttgtggagagggagaagggcacgacggtgttcaacgccggcgtcaacttcaacgaggacttctccgccgcgatgcagcgcgtggcgcaaaaccgtcgacacgtatctcgccgagatcgccgcgtacggcgaactctccatctcgaaattcaacggcatcgcaatcctcattcccaaaggctcgagaaaatccgacgacgatctataccgcgccgtcgatatctacctcaaggtgcacccgaacctggacgagatagagaaggagaaagtgtgcagcgtattggacccgttaaaattgtcctacgaggcgcgtgtgcacgcgtcaaagaacaagcgcttgccgctgcagatcgtgcttcacgcgctgtactacgatcagctacatataaggagcgggacggcggaggaaaaggtggcgctggcggtggcggacaaaaaacagctgcaagctgacgtgtccttggtgagggagaacgaggagttgcggtcggagctgatgaagatgaaa

SEQ ID NO: 14707 - DNA, 466 bp, Glycine max
cccacgttccttccttcaacaaaacacaggggaagggaaagtagtagtagtagtagtagtaaggaacgaaacaccaaacatgagtttcttgttaccattaccaaccctcttgttgtgtctctttgttgtgttaatttattccctccaatcaaaggccgatgaatttgatttcgatgagtccttgttcaatgcaaaaaacgcttccagtggcagaaaacttgcaggaagatgcaacttgttccgtgggaaatgggtttatgacccttcataccctctctatgacccttctacatgtcccttcatagatccacaattcaactgccaaaagtacggtagaccagacaaacagtatcagaaatatagatggcaacccttctcttgtcctttacctaggttcaacgcatttgatttcctggctaagtataggggcaagaagattatgtttgttggtgactccttgagtttg

SEQ ID NO: 14708 - DNA, 304 bp, Glycine max
gtccttttcttcccttcaacaaaacacaggggaagggaaagtattactagtagtaaggaacgaaaccccaaaacatgggtggtggtttcttgttaccattgccaaccctcttgttgtgtctctttgttgtgttaatttattattccctccaaacaaaagctgaggaatttgatgagtccttgttgttcaatggaaaaaacgtttccagtttcagcagtggcagaaagcttggtgcaggaagatgcaacttgttccgtgggaaatgggtttatgacccttcataccctctctatgacccttctac

SEQ ID NO: 14709 - DNA, 579 bp, Glycine max
gtccagtgctccacttatcaataaatcagatattatacccgtaattgtccccagaactagcatgaggtcagagcctgtggctgattctagaaaagaagttggtgtttctggaagaacgatgccattcccctcacagtcaaaggcagcagatgtacgtaaatttccgaacaacagagatgatgtggataagcccctctctcctgtaatcgaatctgcagcttctaagggtagtgaattaagtggttttgcagataaaaataatttccctgcttctgtaagctcaacgcaagatgaagctcgaggactgaaagtaaacagagatgtatgctctgtcgaagtacaaaaaggagggagaatgcgctcacttctcaatttagaaaagagggaacgatctcttaattatgagggacctagacaagggatttctcatggaaggatatcatcagttcatgtgctccctttcagtgggtgaaacagagagcacattctatatccactgagaaggctacagtttctgctaccgatgaagattccattgctgatgtgatggaacagcatgacgaatttcttagttcaatg

SEQ ID NO: 14710 - DNA, 429 bp, Glycine max
  unsure (1)..(429): unsure at all n locations
ggtaatttgggtgacccaaacaaaccgtaaaatgactttgtgtttgtgtttgtgtttgttcccaatgtgctaataaacagcgagagacagagagaggatttgatctttctttttttaaattaataaattaactcagaaagggttccttcacttcccttccttttccattccacgtccaacacactcttgtcttgtgattcttcttcttcattctccctttttttgccctagattagatcctttctcttccaatcattaattaattagattagatttgatttgatttgatttaccttaatccttcgtctgctttttccttccctcaactccaccattcctgatttttctgcatcagtctattcaagttcattgtanggtgtatatccttgattttgtgtgggtttgaattagggtgcatgtgaatgaaaa

SEQ ID NO: 14711 - DNA, 738 bp, Glycine max
cggctcgaggacagtcacgcgtagaacagaacaagagtggaagtattcttcactaaaaaaaaaaagagtcgaaaatgtcagacggaacattgcaggtactggacggaacgcacctgagaggcgtcgatctgtccttaggcgacgacggtccattcaccggagctaaaatactcgacattgcccattcccgcgcctcttcttccctcttcggtctctcattacccgattccctcaaagtctctgctctcacgcgcctccgcactccagacgccgatgctttccgctccgccgattactccgccgacaaggcctccgagattcttcgagactacatctccgccatcgcccgatgaactcaaagataatcctcttgttgtatcaatcttggatggaagtactctccgggttgttatcagaggatgaggatgacttcgccatgttagccagaaaatctattcactgacttagatgccgaagacaaggggaaaatcagcaagagtgaaattcggaatgctcttgtccagatgggagttgagatgggcgttcctcctttctcagaatttcctcagctaaatgacttgttgaaaaaacatggggtggatggagaagaaaagttgggccaggcacagtttgcacagcttctgcagtctgtactgcaagatctagaagaggaactttctaaaaagaatgttgtttccatccagaatattcgaatcattaatggctctaagctaagac

SEQ ID NO: 14712 - DNA, 585 bp, Glycine max
cgaagtagaaggaaagaagcaatcatttccaatgaaacagatactactaatggagatgagttggtacactagtcctgaagagggtgctggtgaatctagttcttgtgcttcagacgtttatcgattgggggttctcctttttgagctattttgtccgctcagctcaagagaagaaaagagtagaaccatgtctagccttagacacagagttcttcctccacagttacttctaaagtggcctaaagaagcttcattttgcttatggttactgcatcctgaccctaagagtcgtccaacacttggggagttgttgcagagcgagttccttaatgaacagagagatgatacggaagaacgtgaagcagcgatagagctgagacaaaggatagaggatcaggagttgttgttagagttccttttgttacttcaacagagaaaacaggaagttgctgagaagttgcaacatactgtctcttttctgtgttcagataatgaagaagtgaccaagcagcacgttagatttaaagagattactggtgctgaactggggagttatgcaagttcagcatcaagtttcccatccat

SEQ ID NO: 14713 - DNA, 796 bp, Glycine max
gcagaggttcatgatgtttctgatccaagagtgaatacgctaggagttgatgcacttccagctattgtaggttggctaccaaatggagaaaagcgtgtcctgaaaactgggatatctgtgaaagatttaaaatctgcagttcttgatcttagtaacatacttgatagttttgaaaaagtaagtaaaaaggaatcatcaggtcaggccaaggaggcacaaactgactcagacgagggacgcgtaccattactttctaaatcaaacatcgaggctctatgtggtgagaaaactccagtctgcataattggtgccttcagttcttctaaagctagagaaaagcttgaatcaatcctctctttggtctctcaaaaatctttgtcaagacgaaccaagtcagggatccagcagctctagggactccattttctatgttctcttagatgctgcgaagcaaaaatcatttctaaaggcatttgacaaaacagattataaatcatcaaataatttgttgattgcctacaaacctcggagagggaagtatagtgtatttatgggcgaaatgccaatagaggaggcagagaagttcattagctccgttctcagtggaaatgtacccttcagagaaccaagtaggaagcctgtactaaagtattagatcataaaattgggttttgcactgttttggatgcatgctcatgtacatagtcaaagagatcataaaattgggttttgccctgttttggatgcatgctcatgtacatagtcaaaaagatatataaaatattttgttttgtat

SEQ ID NO: 14714 - DNA, 455 bp, Glycine max
caaaaatgaagaaaagaaaaacattgaagggtggaaacttcggttcaccctcttctcccccactctgttactcagccacagtagaccttctttataaatagcgatgcagagcttagcattcagattccccccaactcttggctctttttcttcttagaaagagagtgttagaattgtaattatatagtactagtagcacttgataaagcagagattctgcttcaagtgtcaatccccatccttttaccacttgttatcatccacacattacactgccaatctctattcaaaattcaataacccacaaactaaaactaatggctctgttttcaaatcaccgacactcttccgaagcgctcttgggctttctactcttcctcgtattcagaggggtttcagtttcaggggcaacatttaccttcgtgaacaagtgcgattacacagtatggccaggg

SEQ ID NO: 14715 - DNA, 614 bp, Glycine max
cacccccaaccactccccatctcttcgctctttttcttcttagaaagagagtgtttgaattgtaattatatactatattgctctatatatactaaaacgtactaacaattgataaagcagagattctgcttcaagtgtaatcatccccatcctttatcaccttttaccatcaacacattaatatactgctaatctctatcttccttctctattcaatattcaataacccacaaactaacaaataatggctctgttttcacatcaccgacactcttatgaaacgctcttgggctttctactcttcctcgtattcagagaggtttcaggggcaacatttaccttcgtgaataagtgcgatcacacagtatggccagggattttaggagcaccacagctaggaagcacaggttttgaacttgcgaagggaggttctaaaagcttccaggctccgaccggttggtccggtagattctggggcagaaccggttgccaattcgacggttcgggaaaaggaacgtgcgccaccgccgactgctgctccggcgaggtcaactgcaacggtgccggagcctctccgccggccacgctcgccgagttcacgcttggcaacggct

SEQ ID NO: 14716 - DNA, 1363 bp, Glycine max
aaaatacactggcctttcagatgcatatctttctgttctgaaggcacttttacatgcttctgttgctcgaaaccgtaaacttattgtggactgggctccagctggggatcttgaagatgctacttataatgaggatcctgaggcgcataaagctgcttggagtcttttaaagggtgctaatggggttctagttccaggaggttttggtgatagaggagtgcaagggaaaattcttgctgctaagtatgctcgagaacataatgttccatttctcggcatttgcctggggatgcaaattgctgttattgagtttgcacgatctgttctcggtctgcatgatgctactagcacagaattcaatcctgaaaccaagaccccttgtgtcatatttatgccagaaggctcaaagactcatatgggaaggacctttccttttggctcaagaagaacttactttgaagttgctgactgcaaatccgcaaaattgtatggcaatgtaagctttgttgatgagcgacatcggcatagatatgaggttaatcctgacatgatatcaccgctagagaatgctggtctatcttttgttggcaaagatgaaactgggaggcgtatggagatagttgagttgcctagccatcctttttttattggcgttcagtttcaccctgagttcaagtccagaccagggaaaccttctccgctcttctcaggattaatagcagcagcaagtgaatctaggaggacaatcatggtgccaagtaatggtcacgccaagttaactaatggaaatggaatgtgcaatggacactcaccaaaactgaaagcacaccaaaagggaaatggcttcaattcatccaatggttccttaaatggtatatataccaatggcaatggggtgtatgtggatggtagttgttaggcctcatatcaagtgtttggtgcatgctaataatcgtggtataactatatccaagggcattcttcttgtcctcggttgcttgtacagttagtgagtggataggtcttttagatagggacttgtctccagcatgaaacaaattttgagtctaacagctttttatatttcctagtgcggttgtgctatggtgtggcggttgcagccaccattggtttcactctttggtcaaatattggccaaaacttcacttgatcatgccaaatatttgggctttggtggcttttaagttgctgtttagggtttttcatcttagtatacaggctgaaggtttaagattttactttcaactgagtgtcttcttttgagtggccattaatgtaaactcttatatattatgaacatttaagttgaattttgtttggtgcacatgcacttgccttgatc

SEQ ID NO: 14717 - DNA, 434 bp, Glycine max
ggaaggggcttggagaagactgaaattgcgtttgggaaaatcaagcaaacatgccactgtgtgttcactactctccatgcaatagcattggtgttatgccgcaattctgcacccccaggaccaggaccaggaccagccataataggaattgggatttgcagagacttagaattgtcgcaaaatcaaattcagatgcaacccaatccacatccacctcccttctctcatttctctgtcccttactcaagctcttctctgcaagagatccttctcaaccacgcaattttactttcgagctagcaacatcttccttggctagcttgtcaaggtttgcatggggaacaaaatccatagctgagagttcactgaacaaagaaatcactttagatctttcttttaggttgcagctttttgaatttggaggatgccccttt

SEQ ID NO: 14718 - DNA, 682 bp, Glycine max
atcccttactaaacacatgataatgtgaggtagctgaactctgaactgaaatcctcagcagttagttcagttatggttgcagagattcctttcaaacacaaaagaacctcagattttggttcctaattgacaaccatggcgggtgcgtgcagagcacccatttgccatcttcctccgcagaagcccaaaaccagaatccagaattctcacagcagaagagctcaacttccaaataggcgtttgttcctcttctctctgcctctctctagtttccttctccttcctgttccaagctttggtgatggtaacaatgcaatcattattgataaacttcaaagtgggccatcttcatttgctgccacaatgtatgacccagtaagtgcggctgaaagagaagcaagtgctttggtttcagagagagtgtctcaggcagtggagttgctggagaaagggagggaattgcagactcagggtgactttagtggtgctcttgattacttttctaaggttattgaaagctacaaagacttagcattctcagaatatgcaagggtaggaagagcattggccctatatgaagttggtgacagagaagaagcaattgcagagatggaagacgtttcaatatctctaaaagggtatccagaaatacatgcagctcttgcagcagccttatatgcag

SEQ ID NO: 14719 - DNA, 1050 bp, Glycine max
gtgtttccttctcactttctctctctacaatggtgtcaaatgcaaatacagttgcacccttttcttgttgaaagattataaaaacagtgtttttggaacctagtattattatcattattactacttgtggtggttgttgtgttctgatcttcctttcccatgtgctgacttggttttcttcgccttgctttgttttttctgtccatttggctctcctctttctttcctttgttttttgggggttgaaaagctcaagttttgaggattgaaggagtgttcagctactgggtttgtgttcatttcattgaggtgttcttggcccttcccggatccagcttcatctggttattgttggtataattcttagtttttagtctaaggaagatgtctgagagagaagggtccaacaattaatcccgaatagtagaggtagaagatggaaaatacatgcctatggattcagaaagagggtcgcagaagaaaagattcattgcatggcttattgaatgatagggaaatatcagaggaagaatcttcaaaatcacagttaaagaagttgattaaaagatcaaactctcatcgggcaatagttgtaaatgctatccaatcacaaatcagcaaagttttcttcaaggatttgttctttcgacgtgtccatggactagacaatcggattccaaaacatgtggtgagtgtggatgagaaatacatccgccgctgcctggaattcatacataacactgcattaaaagcagctcaattcaacatacctgagagcttaagagccacaaacatggagactttatcagaaagcttgaatacagtgaaattttttggtggaaatgcatgtggtttgggacattttgtctttgaatgtcctgtggccactgagaatgggagagtagttataagtgctaatgctggggaccagtggaccttaggttcaataatggggagcaagagcatgataaatatattgaatagtactcttcttcagcagtttggtgcttcacatagaactgacaatttgaacaggatgaacttttctga

SEQ ID NO: 14720 - DNA, 609 bp, Glycine max
cgctgtaatagcatggacaccaagttctgctattataataattacaatgtcaaccaaccccgccacttctgcaagaattgccagagatactggactgctggggggaccatgaggaacgttcctgtaggtgctggtcgcaggaagaacaagagcgtggcttctcactatcgccagattactgtttctgaagcagcccttcagaatcctagaacggacttgccaaatggagcatatcatccttccttgaagtgcaatggtacggtccttacatttggaactgatacacccttgtgtgagtcaatggcatctgttttgaaccttgctgataaaaccatgcacaattacacaagaaatggatttcataaacctgaggaactaagaattcctgtttcccatgccagtggagaaaaaggggatgatcaatctaataaatcttcggttacctccacaacatctgtagaaggtgcaagcaccaatagacccaaagaacaggttatgcagaattgtcagagctttccgtcacaggttccctactttcctgcgaccccttggcccatcccttggaatccagtgcagtggagttctcccgtaccaccgcctgctttttgt

SEQ ID NO: 14721 - DNA, 440 bp, Glycine max
ataccacacaacacaaaacgcaagtcaattggcgtcggcacgattcagagatttggttcgctgcctgaaacctaatggctccgaagcccaaaccggcgccgtcgcagcctgctcctcctcctgccctcgaagatctcttcaccacgctcaaccgccacatccaggcttccgcatacgacaatgccgtcaagctcacagatcagattctcgccattgctcccggcgacgaggacgcgctccgatgcaaggtcgtcgcgctgataaaaaatgaccgcgtcgaggacacactctccgccattcggtcctctaagaagcagctcgatgattttcatttcctcaaggcatactgcttatacagacaaaacaagttggatgaagctttggagtctttgaaaagacaagagagcaatgatgaaacaatgcttttggaatgtcagata

SEQ ID NO: 14722 - DNA, 938 bp, Glycine max
atctttcattaccaacgtcacaaccacaacccctttctcttctcttccaattacaaatcccttcttctctctctctctctttattctcatttcacaactcatcaatcccctctctctctctccaaaacgccaaaccaaaaaatggctcagaaggccgagaaaaacgacaccgactttaaggtccccgaaaccatcatcaccccctgcaccaccaccaccgccacctcgattaccgaaccttctagattcttcgacgcaaccacccccgccacgtcatcgcgctcccccaagcgatccctccccctcgacgacgaatctcagacggaccaaacggcgtcgtcggagcccaaacgcgtcgtgagccgctgctcctgctgtcggcggcgcgtggggctcactggattccggtgccgctgtggcgacctcttctgcgccgagcaccgctactccgaccgccacgactgctcctacgactacaaggccgcagggagagaggccatagcgagagaaaaccccgtcgtgaaggccgcgaagatcgtcaaggtctgaaaaccctaaatcggagaacaaaaatctcccaagagatcgaacaaatcgctgagaagaagaaggggataacacgaaacgacgtcgtttccacgcgatcgcggttcggtgattgattgattaattaattaattaattactcgcgtcgcgtcttttctccgagacgcgactcggcgcgtgggtggaaacctgggaatttgtataatttctaaatttttatgcctttttttgtttaatttgggttggaaatttataaattattatcgtgattgttatgtgaatcagtggaatgaatggtttttcgttgcctaaaatatactgtactgttcgcccttttcttaatttttaattttagtttgttttcttaaatttttttttttaaagagacaaaa

SEQ ID NO: 14723 - DNA, 704 bp, Glycine max
atttctaccaaggtgcaatgttaaagcaaagcagctaacccagtgaacttttccatgagttactcacaagatgaggacgcgaaaaacaatcaacacctttctcaccttgggtttaagaatccttgggttgatgcccagtctatggatcaaattaaaaacaatccttgcatagacatgtcagagaatgcatccaacacacatgaacttgaagcctctcaatgaagaaagaggttgtcccgaaatctgagggctgaagtcaagtcgatgcttattttttgccatgcttttgaaggcaaagtatattgttagtggcattctgataatgcagtaaatacgtgctgtaagattaactttctaatttgagtaaaaatactatggtccttgcccacagcttgagtgctttgataggcaatgagctaagaaatcatggctttaactcaagagtcccagattttggaggaagttgaagccgctttttctgttgcctgatgttgaagactgtattattctggttcttgacatgaaagaaatagtttttgggagataacagcgatgaggacacatggttaggatagcgaaacgaagcaaattaacatagcagtaaaatgaactcctcgtggttttcaatgtgactgtgagcagtcaatgtttcaacgcaatgagtgatggtggcaaatggattaagcaataaaatagtagccatt

SEQ ID NO: 14724 - DNA, 421 bp, Glycine max
gtatctatgttgttttaatcataaaaaaactaataatactgataacatgcatacatgaacttgaagcctctcaatgaagaaagaggttgtcccgaaatctgagggtaaatccttccttaatacatctatgcttattggtatgcttccctctttcaatatatatggatttcctggtaatgcaaatgttttattttattgtcagccattcggatcataagcaagtgcaactatcactgtagaatcctgggaaacagtttcatgcatgcatgttatcagtattattagtttttctgctgttttaaaacatgacaatgtatatcagtatctatgttgttttaatcataacaacaacaaaagtgtcttgcaaagccacttatatgtcaaatttaagtctttgcctgactcacttagaccaggcttt

SEQ ID NO: 14725 - DNA, 450 bp, Glycine max
  unsure (1)..(450): unsure at all n locations
atttttggtaatgttttcattctcctaatcttcgtctggctaaggaagaagaagaaaaaaaaaaaacagaagcgctcactaggtagcaatgccaatttcgcagttatgtccaaatatccattccgttcctcaaatcgtagcgtgcacccgcaacgacaaaacgggatcgaaatccgtttcggggagacccaaggtgagccctcaactgaaccgttggtccagagcccgagccgtacggttcggtcagaaattggaccggtccagtatgcgaacccaacccccggagcccaaccctcctgtacgtccacttcctctcccggtggacccagacggcgccgtcaatttggacggcgcagatgtcatgaccgtcaagtccatctatatagtctccgacggaaccggctggaccgncgaacactgcgttaacgccgctttgggtcagttcgatta

SEQ ID NO: 14726 - DNA, 468 bp, Glycine max
  unsure (1)..(468): unsure at all n locations
ctgggttgctttttgtccatctgggttttggacatcacattctctgccctctctttttctttgtgatagaacaaacaacaccaataagagaacagggagaggaaaaaaaaaaagaatagagctattcttctttttttttatgggttttcgcttacaaatattgttaaatcaatctgttttttgttcaattttgatcccttatatactagttcctctcttgattgcttgatcctttagactatcatcaccgtctcattcatcgtggcttcgtggggtgtgataaagttgctaaattttcgctgattcttccaaccctactttcaaaaacggttcctttctcttgcaccctctgtctccatccatatagaaacaagagagtgtccgcttctgttcatttagccattcttgcatacccgntattcttccccattcttgtgtttctctgtttgngagggaaagatttttttt

SEQ ID NO: 14727 - DNA, 1609 bp, Glycine max
  unsure (1)..(1609): unsure at all n locations
gcgcatcctaaggcagaaaagatatttttgtatccatcatcccatccaagtttgaaggcgtgtttgttgtgtgggtggcgtttagggtttctcgatcttcgtcaataatcgtcgtctccatttcagtcagggttttagtcttcctctcctcccaatacacactgcatacagggtgatcgcttggaagcatgcgaacttcatgggctgatttggctgccaattcggcgtctgaaaatgcgggaacctctaactccacagctccttcgcggccggtttatgtgcctccgcatctgaggaaccgtggaccatcggaatcccctgctccaccacctacatcaaataataataataataataataataataataataataataataataataataataataatgcgggatcacggtggggtgctctgccagccagaaacggatggggtaacagaagttgtggtagttgggatcggcgcgaagtgaatcccttcggggatcaggaggaggcagcagcagcgtttggcggcgaggagcagcaggaaaacacgggaattaacttcgatgcgtatgaggacattccggtggagacgagcggtgaaaacgtgcccccggctgtgaatacttttgcggagattgacttgggcgacgcgcttaatcagaacattagacgctgcaaatatgtgaagccaacgccggttcagcggcatgccataccgatatcccttgcgggacgggatttgatggcttgtgcgcagactggttctggaaagactgccgcattctgtttcccaatcatcagtgggattatgagaggccaagcccaacccctccagaggccccctcgcggcgtccgcatagtctacccacttgcccttgttctctcaccaactagggagctatccatgcagatacatgaagaggctagaaagttttcataccagacaggggttagggtcgttgttgcttatggtggagctccaattaaccagcagctccgggaacttgagaagaggggtggatatccttggtgcaactccaggaagactggtagatttactggagagagctagagtttcattgcagatgatcagatatttggccttagatgaggcagatagaatgctggatatgggttttgagccgcaaataaggaagattgtagagcaaatggacatgcctccaccaggtgccagacagactatgttgttcagtgcaacatttccaaaagagatacagagattggcttctgatttcctttcaaattatattttccttgctgttggaagagtgggttcaagtactgatttaattgtccaaagagttgagtatgttcaagagtctgacaagagaagtcacctaatggaccttcttcatgcacagagggcaaatggtgtacaaggaaagcaagctttgactttagtttttgtggagactaagaagggagctgatgcgctggagcactggttgtgccgtaatggttttccagcaactactattcatggtgacaggtcacagcaggaaagagaattggcattaaggtcatttaaaagtggcaacacccncatattggttgcaacttgtgtggcttgacgtggtcttgatattccctatg

SEQ ID NO: 14728 - DNA, 422 bp, Glycine max
cacttccccactctctcacatattgcctctctctttcctctttccattgtccatggcgtccctcatcgaatctggctggcagtacttgatcacacatttcagtgactttcaactggcgtgtttgggaagtttctttctgcatgaaggcgttttcttcttgtctggacttccctttatatggcttgagagggcagggtggatgagcaagtacaaaattcaggccaaaaataacacccctgctgctcaggagaaatgtattgttcgcctgttgctttaccattttggtgtcaatctacctgttatggttttttcatatcccgtcttcagatacatgggcatgcggagtagtcttcccctaccgtcctggaaagtagttctaattcaaataatcttttacttcattttggaggactttatattct

SEQ ID NO: 14729 - DNA, 503 bp, Glycine max
ctttataaagcatgattcatcatatcatatatgatatatcttctccttcacaagtctttctttatcaattatcatgctatctttttatatatgtggtttgtgtgatacaggaaagcttaagatatttttaatccatactttggaaaagatgatgaggtgtagttggaccatcttatagcttgataatgacaacagaatttggattctttaactgttctttatgtttgaacacattgagttgcttcaaccttcaaacgggtcttgtttcagtgtgatgattagcaatctgtactattttagcactcatgttgtaccagtatcttccaccaaagaagacacaacgtcttcgtttctccctggaagtgatctgacctaaaccatcatcatcatgaattcatgatcatcatctttttgcagatagaatatgaagcatcttatgagcaagctgtggctgggaacatgcacacacactcttgactctacagtctacaccttgaaattag

SEQ ID NO: 14730 - DNA, 508 bp, Glycine max
gtttgagcattaaaggctaaaatcatggcttttcttctatccaacctgaaaccctcactgctaccccaaaccaaatcaaaacccattcctcaaacgccttcaccatcatcagcaaaacccacttctcaaagtccttcattgttcttcttcacttcatctgctccactttccgcactccaaagttccactgcacaggttgctcaggggcacacaccaacaacaggtgccagagacgagcttcagcagcagaaggatgagttttacctcaatcttggccttgctgtcaggaccctccgtgaggacatgcccttcatcttcgtcaaagacctcaattatgacatttacagggatgatataacattcaaagaccctttgaatacatttactggtattgagaagtacaaattgatcttctgggcattgaggtttcatggtaaaattttgttccgtgagattgctctagatgtgtataggatatggcagccttcggagaacgtgatattgatca

SEQ ID NO: 14731 - DNA, 719 bp, Glycine max
aaattagtgattcaattgaaattcgagtttcctttttaatcacctggtttttttttttaaaatttgaaggagatccaatccaaatgcatcgaatgccaatcacctgaaattccgccagatctctccctcttacacgctcttgataaaccgaaacgaagcaatagctatagcatcacacacacacaccaccgctagggttagggttagggttgggggtgttccgaagtaacaacaatggcggtctccgacggcgtcgtgaagaaaatcgtcctctcctacacctacgtcgcgatatggatcttcctcagcttcacggtcatcgtgtacaacaagtacattctggatcgcaagatgtacaactggccctacccgatctcgctcaccatgatccacatggcgttctgctcctccctcgcgtacattctcgttcgcgtcttgaagctcgttgaaccggtttcgatgtcgcgtgatctctacctcaaatccgttgttccaatcggtgcactctattcactttccctctggttttccaattccgcgtatatatacctctctgtttcgttcattcagatgctcaaggcgcttatgcctgtcgcggtttattcaattggtgttattttcaaaaaagaggcctttaagaacgagaccatggcgaacatggtttccatctcgctcgtgtagcggttgcggcttacggcgtaccaaattcgatgcatggg

SEQ ID NO: 14732 - DNA, 278 bp, Glycine max
actggtttgagttttgaaggagatccaatccaagtgcattgaatgctgatcacctgaaattccgccagatctctccctcttccacgctcttgatcaaccgaatcgaagcaatatccatcacacaccactgttagggttagggttagggttagggttagggttgggggtgttctgagaaacaacaatggcggtctccgacggcgtcgtgaagaaaatcgtcctctcctacacttacgtggcgatatggatcttcctcagcttcacggtcatcgtgtaca

SEQ ID NO: 14733 - DNA, 420 bp, Glycine max
gttatagttttctgcttccttaaaatcttcactagcaatgaagattgagtttgtccagtttttcactttacattaccaaaagaaagaactaggaagaatgggagttcagcaaaagctcatttctttcctctttcatacttgtcttgttttcattatgttttcccttgtaagctcatcacaagagcaccaccaaattacaagcagcccttcaaaaaccaaagatagcaaccacattaagatgagtcctggacttcagtttcagattacattacatggctttctcctgtgggcttcaatggggttcttgatgcctgttggtatacttgcaattagactgtcaaacagagaggagagtccataaaggcatagagttttgggctatgttcattcaattttgcaggcaactatatcttagtccat

SEQ ID NO: 14734 - DNA, 524 bp, Glycine max
cggctcgagcggctcgagcggctcgagtgcgaatatgttgcttttgtgataaacctttctctgtctctcgctcttatcgaagaagcagcagaaaatgggtttcgcgatgcaatgctcaagctatggcacttgtatttctatttgtgtccctcatcgattcccccaaacccctctatcttttcacgttccagcttatcactggaaccgattcaagagtgcgcgaaagaatcagaggatgatggttctttgtagcgtggacgaccggagcaacaacctaggttcccagaggaaaagaaaaattgtggaacacgtttgtctcctcaaagcaaagcatgatttatctgaagaggaagagaacgacatgcttggctatttgtacacaacgcagtaccaaatgggcggtgttgttgcaatttcattagggcgcatttcttctccaaatcctgagcgctacacgcatgctctctatatgcggtttcagaagaaggaaaatcttgaaaagttttacgagaatcccttttaca

SEQ ID NO: 14735 - DNA, 286 bp, Glycine max
gtgataaacccctctctcttatcgaagaagctgagcgcaaagcagcagaaaatgggtcttgtgatgcaatgctcaagctatggcacttgtatttctatttgtatctctcatcgtttcccccaaacctctctatcttttcacggtgagttccttgctccttcaatcaactaaccgaacattacacttaattcgtatttctttccagttccagctcaccactggaaccgattcaagagtgcacgaaggaatcagaggatgatggttctttgtagcgtggacgaccgaa

SEQ ID NO: 14736 - DNA, 570 bp, Glycine max
aattcggctcgtgactcgagccgattcggctcgaatctctctttgatacccttttgttctttttggtgctttaatttgcactagcaagggggttggttttatttctgtttgcttgcaacaatggctgtggctaataagttactttctgttttgatcattgccctcattgccatttccatgcttcaaacagtggttatggcatctcatggacatggaggccaccactacaatgacaagaaaaaatatggacctggcagtctcaaaagcttccaatgcccatcacaatgctcaaggaggtgtggcaagacccagtaccacaagccctgcatgtttttctgtcagaagtgttgtaggaagtgcctatgtgtgccaccggggtattatgggaacaaagcagtgtgcccttgctacaacaactggaagaccaaggaaggaggacccaaatgcccttaataaccttatgctatgttcttcatcaaattaacaaagatataatatagctttaatttattatatccatatcatataattttcatggtcctttctatgtcttaattaaccagaaaatgt

SEQ ID NO: 14737 - DNA, 573 bp, Glycine max
caaaccgtcactctatttcttttactccttctcaaaccttatctctttagttatcctcagccatggcgtctctactgctagcatcacctcctccactctccgttcaattgcacagttccacctctcacctttccttctctcactcccaaactctctcttcaccactctccacttccttcgcttctctctcagcctctgcaacctccactctttccccaaccccttctgtgtactgtggcagaggggacaggaaaactgcaaagggaaagcgcttcgctcattcatttggaaatgcgaggccaaaggacaagaagaagggtagagggccaccgaggccttatgctccaccggcaccttccaagaaagacaggttcgaagataatgaggtggtgaagattgaaattgacgagtctctcttctctggttgattttggtggtgaattgtaattttgtgtcttccatggtttagttgttgacatatgattccattgttacattaaaaatttcgctttgtcttatgctaatcaattttctatttttaatgccccttatccacgtcaatggtctttcctt

SEQ ID NO: 14738 - DNA, 416 bp, Glycine max
  unsure (1)..(416): unsure at all n locations
ggaattaggatcctncgaaacaaaacatacaaaatggtccagcctggttttcaaccgggtggaaatccttcaaccacaaaaaacagaatggggaaaccttagcgccagaagaatcatcatgccctctctgtcatcgataacaaccttcattcttcaccctcgtcactcgtcatttctgcttaccacgcctccccttcaaaacttgacaaatttgatttgaagctggggaaggagcatcgggtttagattaacgcaatgctgcaacaagagccaaatctcattcagcattccatacgtacagaagacctggtgaggttgaggagtacgctggatggtacctggtcctggccagtggcgaaacggcggaacctcgtgtgcctcagattgaagggtggagagtttcaatggaaaagtga

SEQ ID NO: 14739 - DNA, 662 bp, Glycine max
  unsure (1)..(662): unsure at all n locations
gcacgcacgcgtacgtaagctcggaattcatcncgagttttatttacncaacagtgaatttggcgtctcagatggggcgtagaaagagagtattcattcatttcgtgattggaggataataccaatttgcactttctttcaggatgccagactagtttttaaagcagacagtcttggtcgggaaattttgtcaattgcattgcctgcagcaatggctttgacagctgatcctattgcttcactagttgacacagcatttattggccaaataggtccagttgagcttgctgctgtaggagtttccatagctctcttcaatcaagtatcaaggatcgcaatattcccacttgtcagtgtcacaacttcttttgtggctgaggaagatacccttagtggagcaaaccctcagacagaggagggtagatgcttggaagcaggtcaacctacggatactgaaaccaaagagttattaccacagacagttacaggtggaaatgttcacaattcagattttgttggcgaacgctttaatatagctaaggaggaacgtaagacaaggcatatcccttcagcttcatcagcaatatttataggtggcatccttggactcatccaggcaatatttcttatatctgcagcaaaacctttattgaacttcatgg

SEQ ID NO: 14740 - DNA, 424 bp, Glycine max
aggtgttagtacacctcagaaagggcatctaaccacatacttatcgagatattattcagtaccaagacattgccgccggtagtctgatgtctttaactgttaatgctcaagttaaaagtttaattcatgcaagatattggagctccttcagtatcacttcagttatgtatcactagcctcaataagttgcctttgttcgtttggtttctcaaacaacacaacagtgaatttggcgtctcagatatggctgagaaagagagtattcattcatttggtgattggaggagaataccaatttgcactttctttcaggatgccagactagtttttcaagcagacagtcttggtcgggcaattttgtcaattgcattgcctgcagcaatagctttgacagctgatcctattgcttcactagttgacacag

SEQ ID NO: 14741 - DNA, 692 bp, Glycine max
ctgacgcgtgggcttattagtacagtagaaggttttagttctgcaacatttatcattgactagtagtcttccatgttttgaagatccaaaaacaataggaaaaaaaaaatgatggctcactgtgttttccctgttaatgcacttcctactccttcaccatgtttccactccaaagttggaaagcaatggcctcagggatttgccttgagtgtgaggccaacgaatccgaagaggctttcaagtgcctgcaaagtgagagcaactttgggtgcttctgataaatcaattggaattcccaaccaatggtacaatgtaattgcagatcttccagtgaaaccacctccaccattgcatcccaagacttatgaaccaatcaaacccgatgacttgtcacccctttttcctgatgagttaatcagacaagagatcgccagtgacagattcatagacataccagatgaagttcttgatgtttacaagctttggcgcccgacccctctcattagagccaagaggctggaaaagcttcttgatacgccggctaggatttactacaagtatgaaggtgtaagccccgctggatcacacaaaccaaactctgctgttccacaagcctggtataatttacaagcaggtgtcaagaatgttgtgacagaaactggtgctggacagtggggaagtgcattggcctt

SEQ ID NO: 14742 - DNA, 440 bp, Glycine max
aaggaatcaaaccttaataaaaagtcccccaaaatggctccaacaagaaaccaccttcttcacattgccatgttcccatggtttgcaacaggtcacatgactccattcctccacctttcaaacgagttagccaaaaggggtcacaaaatcacgttcttgctacctaaaaaagccaaactacaactccaacacctcaacaaccatcctcacctcatcacattccataccctcacaattcctcatgtaaaaggccttcctcatggcaccgaaacagcctcagagatccccatttccttgaaccatttactagtcatagccatggacaaaacccgtgaccaagtggagcacacacttagtgcaacaaaccctgattttgtgctctatgataacgcttattgggtgccccagatagcaaaaaagctgggcatcaaaaccatttg

SEQ ID NO: 14743 - DNA, 456 bp, Glycine max
aatccaaacacgcccttagcagaatggagactaatccccgcacgatccgcagcctagtctcgaagctgagcgtccgtttccgaagccgcccgcgtcgacgccctctcccaactccgcctcatgtccaaacagtcccccgaaacccgccccctcatcgccgacgccggcgcaatccccttcgtcgcagaaaccctctattgctcttcgcaccccccccaagaaaacgccgctgccacactcctgaacctcagcatcacccaaaaggagcccctcatgtcgacacgtggcgtcctcgacgccatcgctcacgtgatctctcaccacaacaccaccttctcccccgcggcggtccagtccgacgtcgccaccatccacagcctcctctcctccgtggactcctaccgccccgtcggccggtccaagcgcgagattgtctacttcctcatcgacattctt

SEQ ID NO: 14744 - DNA, 617 bp, Glycine max
gtttgtggggtcccttgccttccaagattgacaggttctggtcccttgaagtgatgaactttagctcaaacttcatttatggggaaatttcaccatcagtttcctctttgaagaatctaaaaagtcttgttttggctaataatcttttcaatgggagtgtgcctgatcttggaaaactagcttctcttgaagagctcaatttgagtggcaacaaattaggccctgagttcccttcattgagcaagaatcttgtgagggttatcttgagaaacaactctttgagatgtagaatccctcctcaactcatgcatgtttataaacttgagctgtttgacatctcttccaatgtgatatttggaaatatcccgtcatttattttctctcttccttccctcaagtacctaaacttggcttcaaaccaattaagtggttccctttctttgaatgtgtcatgtagttcttctctgacttttgttgatatctcacacaacctcttggtgggaacattgccatcttgcgttggttcaaaggcttcaaaccgaacaacactttattatgggaattgtttgataaacagaagcttaagtgatcaatatccatcttcttattgccagaaa

SEQ ID NO: 14745 - DNA, 517 bp, Glycine max
ctaatttctggaaaaagaaccagttgcggggatgaagatcctgattactttggagtttctaaaggaaaaattccttttggtgaacaatcttctagaacactttttgttagaaacatcaatagcaatgtagaagattctgagctaaaggctctctttgagcaatatggagatatccgaaccatatatactgcctgcaagcatcgtggatttgttatgatttcttattatgatataagggcagcacaaaatgcaatgaaagcacttcaaaataggtcattgagatctaggaaacttgatatacattattcaattccaaagggcaattctccagagaaggatattggccatggtacactgatgatatccaatcttgattcatctgttttggatgatgaactaaaacagatttttgggttttatggagaaattagagaaatctatgaatatccacaattgaatcatgtcaaatttattgaattttatgatgtccgggctgcagaagcttctcttcgtgcat

SEQ ID NO: 14746 - DNA, 575 bp, Glycine max
  unsure (1)..(575): unsure at all n locations
gggaggatccgaatgagttcagaccagagaggtttatgagtggggatggggttgaggttgacgtgacggggaccaaaggggtgaggatgatgccatttggtgtagggaggaggatttgtccagcgtggactctggggattttgcatataaatttgttgctggccaagatggtgcaggctttccactggttgcccaatcccaacgctccacccgacccgactgagaccttcgctttcactgttgtcatgaaaaaccctctcaagccacttattgtgcctcgatccatttaacacttagttatgtgtgaaaaataacatttgagcagaagggatatatgaggtagatttatttttacagggtattttaatttggatgatatgtcattggtctgctagctcattgcagttagttgccatggaattccaaccttctatgtatctatcattattatttacttacatataggctntatcgcataaaatattgcacaattttattgtagaggagctgaattcgttccaatttgcgtccctactatataatataagtgaaggtgcctatgtgctgtgctatct

SEQ ID NO: 14747 - DNA, 670 bp, Glycine max
ggatgatgatgcgttggcagtggtggaaaccaaagacgggaaatcggtaacgttgtctataatgagacagggtgttaacggctagaaacgaaggaaggagtaacataaaatggaggttcaatttgccctcccattccactaacacacatcacatctccctctcgcacgcgacgagggagctccgcttcggaatctcactccctctttctgctaattgacaagatggttgctcagaaattcgttgttgatttgaacaagccccttgtgttccaggttgggcatcttggggaagcctatgatgagtgggttcacgatcctatcgtaagcaaggaaggccctcggtttttccaaaatggttttctcgagttgttcacgcgcaccgcgtggtgggtgattccaaccgtttgggtgccggttgcaagttggttcatttccaactccgtaaaatcaggcctcccttctcttgatgtagctctgctcgtctttcttggcatcttcgtttggactttggccgaatacacattgcaccgtttcctcttccatgtcaaaaccaagagctactggggaaataccttgcattatcttctccatggctgccaccacaagcaccccatggatagctatagacttgttttcccccctgtagctgcagctatattagccctcccga

SEQ ID NO: 14748 - DNA, 495 bp, Glycine max
  unsure (1)..(495): unsure at all n locations
gttttctattataagacagggtgttaacggctagaagccaaggaatcagtaacataaaatggaggttcaatttgccctcccatttcactaacgcacacatcacatcataccagagactccatctccctctcgcacgcgacgagggagtcccgcttcggaatctcaccccctctttctgctaattcgcaagatggttgctcagaaattcgttgtcgacttgaacaagccccttgtattccaggttgggtatcttggggaagcctacgatgattgggttcacgatcctatcgtaagcaaagaaggtcctcggtttttccaaagcggtttcctcgagttgttcacacgcactgcatggtgggtgattccaaccgtttgggtgccggttgcgagttggttcatttccaactctgtcaaatcaggcctcccttctcttgatgtagctctgctcgtctntctcggcatctgtggttggactttggctgaatacaccttgca

SEQ ID NO: 14749 - DNA, 716 bp, Glycine max
acacaacatataaatctttaaaaatgggagaaaattccagggtccataggagggtgctgcggttggttcatcgcgttcgtcattctggctctcgtcgtcggtgccattgtttttaccgttaagaagaaatttagtcactctcggttccgataagcctgctcctgttcccggtccccctggcgccgttgaccaaaaatactccactgcactcaaaaccgcaatgcaattcttcgatgttcagaaatctgggaggttagttgacaataaaatatcttggagagggaattcggctcttaaggatgggagccaagcgaagttggatctaacaaaagggatgtacgatgctggggataacatgaagtttggttttcccatggcttttacggcgacggtgctgtcgtggtccattctggaatatggagatcagatggatcacgttggccagttagacgctgcgcaagattcgctcaagtggatcactgattatctcatcaatgctcacccttctgagaatgttctctatattcaggtgggtgatcctgttgcagatcacaagtgttgggaaaaaccagaagccattactgaggaacgaccactcatacaagtgaatgcatcttgtcctggatcagacgttgcagctgaaactgcagcagccatggcctcagcatctttggtctttaaaaagactgatcctacatattcaagcactctactca

SEQ ID NO: 14750 - DNA, 444 bp, Glycine max
gtggaaatcactgtcaactaccttcatcctggatgaattatgacaaatattctgcgataccatgattatattaatgcccttgctaacatggtgggcaagtacttccttaaaaatgtgcaacagggagctgcaactcaatgttatgtggcattgcatccacaagtcaagggaatatctggtgaatactttatggatagcaataagggaaacccggcctctctggctaaagattcagagctggcaaaaaaactatgggaattcagcttaagcctgactaatccaaagtagcttaaaggtttgactagaggaagcttcataaatgccaacattattgtattggaaaacaagtttcaccgaattagaaatttatagtggtgtaagcttacaacttgaaggtttctattaattattacagctcagactactatccattacagtattgtt

SEQ ID NO: 14751 - DNA, 832 bp, Glycine max
accgggtggaccacgcgtccgagcaaatatggcatactctcaacttcaaaaggtggaaactagcctgcagatcaaggcttctgctgaacagttctatgatgttttttgcaacaagccacacactattgccaacatttcaccagaaaatattcagtcagttgaagttcataaaggtgaatggggcaaagagggatcaatcgtctcctggaactatttacatgagggaacagtttgtgtagccaagcaagtgcttgaaggcatagacaaggaaaataacaaaatgacaatgaaggtcatagagggtgacgtgctgggactctacaagagcttcaagtctaatttgcaagttactccaaaaggaaagggcagcgtagtgctttgggcaatggaatacgagaaacaagaggaccacattcctgacgctcataccttgttgcaactggctgttgtggttagcaaaaaaattgatgcttaccttactcaggggcacaactaaatcatcaaattaagctcatgttttactctactaatgctatctaagaaataaaaattgatgtattatggggcttaattgacccttaattccatcaatttcatatgttaaaagctgaataaagtgcatcagccacgactaggcgtgagttgggcacaagtgtgttatgttgttctattgtgtttcgtgtgattgtcgttgattgtaacctgagactgaaaagtcatttgctttgaaatctcctttacttttgtgtggaattctcttcattttttttaagttttgtgaggaattctcaattgaactactgctatctatgaccagtaaagagattgcaat

SEQ ID NO: 14752 - DNA, 720 bp, Glycine max
agccaagttcaacttatccacaaagaaacatcgtggttccctcgcatcagcagctttcgtaattttcttcactgctatttgccattgtcacactctcattctcgatggcggcgaagatttcattggcaattggtttgagaactctcttcactgttttgggacttcttatgcttgctatcgttctttacactgtcttcaccgatggtcttccgtttcgcaaagaacttctcacaccgtggatggcagcaactttgattgatttttatatcaacgttgtagctttggcggtctggattgcttacaaggaatcaaacttaatcagctcaattctgtggattgttttgcttgtctgccttgggagcatctctacatctgcctatattgttgtgcaatttctgaagttgtcatctcaagaatcttcacaggatcctatgtattatgttctgttgcggcatccaaacaagaatggcacagcaccacaaagacagcgttcatctgttgtgactctaagaataattttcagcattttgggtgttgtcatgcttggaactttggtgtacactcttgtcaccaatggttctcctttccgtaaaggggttctaactccgtggttggcaacaacactagttgacatctatttccacattgtgatttatgcagtctgggttgcctacaaagaatctagttggatttctgcagtcttttggataattctattga

SEQ ID NO: 14753 - DNA, 439 bp, Glycine max
acgacataacggtgagaagtcaaaaaatggtcaggtgttcttcttctggttgctaaattttgtgttataaattactgcatatacatgccatgtaaagtgtaattcctgctgtgttgaatacttcaatatatatatgtgaataaaagaagctggatgatatgtatagaatcctatttcacggtctactttgctgtgtgattttatatataatctttagactttcattatcagttctgattttacataggaacggcacagcacctcaaagaaagcattcatctatcgtgactctaagaataattttcagcattttgggtgttgtcatgcttggaactttggtgtacactcttatcacccatggttctcctttccctatagagcttataacatccgtaagtgcttcatacttttttatttttagcattatttgacgttatta

SEQ ID NO: 14754 - DNA, 779 bp, Glycine max
ccgaattccggtcgaccactcgtctccaattctataataaaattcctattcttcttctcatttcaactctttgcaattgcgatctttcattccttttttttactcttggtaagcgtagttcggtgttggagaaccagcttccagttccagaatactgctgaacagagttcggcttcgctttattgggactcagttgtgtttctactaggttatcttctctgaattgcaaatgaatgatcgttgaaaaaccatgaagaaggtgaggagaaagatcggcaagtatgaggtgggtcggactattggcgaaggcaccttcgccaaggttaagttcgcaagaaactcggagacaggggagagcgtggctattaaagtcatggctaagaccaccattctccagcacagaatggttgaacagattaaaagagagatatccattatgaagattgtcaggcatcctaatatagttagattgcacgaggttttggctagccagaccaagatctacataatccttgaatttgtaatgggaggggaactatatgataaaattgttcagcagggaaagctttctgaaaatgaatctaggcgctactttcaacaacttatagacacagttgatcattgtcatagaaagggtgtgtaccatagagacttgaagcctgaaaatcttcttcttgatgcttacggaaatttgaaggtttctgactttggattgagtgcattgactaaacagggtgttgaccttcttcacaccacttgtgggaccccaaactatgttg

SEQ ID NO: 14755 - DNA, 566 bp, Glycine max
tgtttcttcttttctttccaattctagaatattcctattcttcttctcatttcaactcttggttcttttctcgtcacgctagtaagcgtagttcggtgttggagaatcaggttccagtcccagaatactgctattctcgaataactgaattgtgtttctaggttatcttctctgaattgcaattgcaaatgaatgatcgttgaaaaactatgaagaaggtgaggagaaagatcggcaagtatgaggtgggtcgaacaattggcgaaggcaccttcgccaaggttaagttcgcaagaaactcggagacaggggatagcgtggctattaaaatcatggctaagaccaccattctccagcacagaatggttgaacagattaaaagagagatatccattatgaagattgtcaggaatcctaatatagttagattacacgaggttttggctagccagaccaggatctacataatccttgaatttgtaatgggaggggaactatatgataaaattgttcagcagggaaagctttctgaaaatgaatctaggcgctactttcaacaacttata

SEQ ID NO: 14756 - DNA, 503 bp, Glycine max
ctctctgctctcattactctttttctgtgctctgtctctttctctggacaaggagtcaattaccctgttcacgtttgttttctcactaccacaaacacaaagcctacaaaccaagcaaatcatccccttcttcttcaatcatgcccctgtcataacacatcgacatactagacaacctagcttccatggcagctttttaaccttcctctatttctcacacctagaacaaacccctaccccaccaaacaacactttattattcccctcttcctcaccctccaatctctcatcattctctttcacccgtgctgctccaattttattacacacccaacatgtacacaacaaagagagaacaacaaaggttcaggttccaaaacgactctaaaaccccctccttctcttcaactctactcgataaagtctaccgttccatcgaccagagcaacgacatgaagctctacaacgaaacgatggggaagaaacagagcagagtcgtcgtc

SEQ ID NO: 14757 - DNA, 1020 bp, Glycine max
tgctggctgcagataacttgtgttgcatccagtttatggtgcctattgtttttgcctaactccaggttaaggaagaagttgaagccgccctaaagaggcatttaaccagcatgaaacagacctgtggaaaggagttccatactactgaattaagaaatttgcagctgcagtttgaaaacagcatttgtcttcctgtctttacaggagctcgaattgaaggagaggatggctccaacttaagaataagtttagttgatgccctaacagggaaggttgttagtacaggacctgaatcgtcagctaaggtggaaattgtagtccttgagggtgattttgaagaggaaagtgaaacttggatgcctgaagagttcaagagcaatattgtgagagagagggaaggaaaaaagccccttcttacaggagatgtaattttatatcttaaagatgggattggtatggtgggtgaaatttcatatacagataattcaagctggacaaggagccgtaggttcaggcttggggcaagagttgtggacaactttgatggtgttagaataagagaagcaaagacagaatcattcattgtcagggatcacagaggagaattgtacaagaagcaccatcctcctagtctgtctgatgaagtttggagattggaaaaaataggcaaggatggagctttccacaagcgcttgagtcgggaaaagatccttactgttagagagtttctcacacttctcaatctggatccagcaaagctgcgcagtatactgggcactggtatgtctgcaaagatgtgggaagtaactgtggagcatgctcgaacttgtgtacttgatacaacgaggcacgtgtacttcccttctaattctcaagaacctggtgtggtcttcaatgctgtgggacaagtgacaggactgctttctgaatgcgagtatgtcacagtagaaaagctgactgaaactgaaaaggctgatgctcaaaactcagttactgctgcattaagacaaggggagaaat

SEQ ID NO: 14758 - DNA, 576 bp, Glycine max
  unsure (1)..(576): unsure at all n locations
tttaacttaattaaccaaactgctcgtctcgttccgcgtcgtcgtttcctccaatcatcacaacaacacagtgatggtggcgctgtcgctgttgggggaaaaaatccgaatccaaaggtggtagtagatgacgagaaaagccgaaggcggagaagcatcccagacgcaaacaaactcggacaatggttagaaacatgacacggaagtactgcaaaaagtagaaggagggaagaagaacgctctcatcactttattcatttcatttttggaccttacggagagaccccttttcttgtcccttccctctctcgacaccactatttattcttactttctgctctctatctctctcgcgccgcatgttgctcgatttctatttccaacaacaccgcaccgtcgtagaattcctactctctttccttcctcggccttttggtccctcttccggccttgtggttaaagcgccgccccgatgatgggaagactccagacgacaagcgtagaaagcctcctcctttctccagtgtggtgcgtgacgtgatgaanttacaatcactcgggcatttgctggagcca

SEQ ID NO: 14759 - DNA, 693 bp, Glycine max
tgcccctcaacacccagtgatggtggcgctgtcgctgttggggaaaatccgaatccaaaagtggtagtagatgacgagaaaagcccaaggcggagaagcatcccagacgcaaacaaactcggacaatggttagaaacatgacacgcaagtactgcaaaaagtagaaggagagaagaagaagcgctctcaccgctttattcatttcatttttggaccttacggagacacccctctttcttgtcctctaccctttacttctctccacacagtatatatgttactttctgcttggtttcgtcttcctctccatctctctcgcacctcatgttgctcgatttcatcaccaccgctgcgtagaacgctctttctttcattcgtctggttcttgcttagaccatgtcgctcaagcgcccccccgatgatgggaaaactccagacgacaagcgtagaaagcctcctcctttctccagtgtggtgcgtgacgcgatgaagttacaagcactcgggcatttgctggagccaattctagagcccttggttcgtaaagtggttaaggaagaagttgaagccgccctaaagaggcatttaaccagcatgaaacagacctgtggaaaggagtttcatactactgaattaagaaatttgcagctgcagtttgaaaacagcatttgtcttgctgtctgtacaggagct

SEQ ID NO: 14760 - DNA, 405 bp, Glycine max
cttattctcatcctcgtataaatttatatcactcctgtgattaatcaaagttctgaatgataaacattctaataatgtctagaaatagctaagcactacctttctcttgggcaaatgaataaattcattgcttggaaatgtgcagatactgggcactgggatgtctgcaaagatgtgggaagtaactgtggagcatgctcgaacttgtgtacttgatacaacgaggcacgtgtacttcccttctaattctcaagaacctggggtggtcttcaatgctgtgggacaagtgacaggactgctttctgaatgcgagtatgtcacagtagataagctgactgaaactgaaaaggctgatgctcaaaactcagttactgctgcattaagacaaggggagaaatacacaac

SEQ ID NO: 14761 - DNA, 972 bp, Glycine max
ctgttttggaccatggacttggtttttaccaaatcaagaaaaggatgaggtttcaatttttctattaccataaaacaattttgtttcttaatatggtgaggctgggggaatcaattggggataggtggatgaataaggaaagcttggtctgattagtctatactatatgccttgctattccactttttctgagtttctctctgcactcctttgctagctaccctctcttttggggtatttcttttcattctccaaaaactctttaattttccttcccttttctgtgctattctctcctcactggtcaaaaggtttgtgggattttgctaatttggtgcaaatctgattcctttgacaaatccctcttgatctcctggcttattgaaaactactacaattccgagttgctttttttccctagttgcttttctgggccttgaaatcttgcttggagaaggctcaattttggtggaaacctctaccacaagaaagcatagtttttttgggttaatcatacttgaggtgtttagagatggtgagaggaaagactcagatgaggcgcatagagaacgccacaagcaggcaagtcaccttctcaaagcggcgtaatgggttgctgaagaaggcctttgaactttctgttctttgtgatgctgaggttgctctcatcattttctctccaagaggaaagctttatgaatttgcaagctccagcatgcaggacacaattgaacgctaccgcaggcataacaggagtgctcaaacagtgaacagatctgatgaacaaaatatgcagcatttgaagcaagaaacagcaaacttgatgaagaagattgagcttcttgaggcttcaaaacggttcaagatcttgcttttcaatccatcttcgcaacttgtttatattcactgttagatttatctcacaaagaatacaaataaaaaatatattctgtgtactattcatccctcagg

SEQ ID NO: 14762 - DNA, 496 bp, Glycine max
attttgtttcttaatatggtgaggctgcgggaatcaattggggataggtggatgaataaggaaagcttggtctgattagtctatactatatgccttgctattccactttttctgagtttttctctgcactcctttgctagctaccctctcttttgggcttttttgggccttcaaatcttgcttggagaaggctcaattttggtggaaacctctcacacaagaaagcatagtttcttttgggttcattctacttggtgtttagagatggtgagaggaaagactcagctgaggcgcatagagaacgccacaagcaggcaagtcaccttttcaaagcggcgtaatgggttgctgaagaaggcctttgaactttctgttctttgtgatgctgaggttgctctcatcattttctctccaagaggaaagctttatgaatttgcaagctcaagcatgcaggacacaattgaacgataccgcaggcataacaagagtgctcaaa

SEQ ID NO: 14763 - DNA, 1350 bp, Glycine max
cccacgcgtccgcccacgcgtccgaaaaaaacaatctccataaccaaacacaccacatggaaatcagccaaatcccgtttttcacccaagaggactactctcacttctacaacctctacgaagacacagactctaacaacagtctcaacaataacaacagcaacaacaagagaaagcgtaacaacagaaaagaagaaggtagtggtggaggtgcagaacaaaaagggcataatggtaataataataacgagaacagtgaaagtaacttgaaggacttacttgcttcgctgattatgttagacgaggaagaaattcaagaggaacggaacagaaaagttgagtacgaacagcatcgcaacatgtacaacgccaacttcgagaaccagacccgggccatgaacacctacaaggcccaattcgaggcccattacgcgcagtcagaagagttcgaacaaacaataaccaaaaaagctcgtcgcgcggttgctgctgctacaggaactggttcggttatgttatatgaatccggttcggttcaggttcaacctcgaaccgattcggaacccggttcgacggttcagaggagactatgggtgaaggaccggtcgaaggactggtgggagaagatcagccggaaggacttcccggaggaggagttccggcggtggttccggatgagcagaagcacgttcgacatgatctgcgacgagctcgacgcggcggtgacgaagaaaaacacgatgctccgcgacgcgatcccggtgcggcagcgcgtggccgtctgcatctggcggctcgccaccggcgatccgctccggctagtctcaaagcgcttcgggttaggaatctccacgtgtcacaagctcgtcctcgaagtctgctccgctatacgcaccgttctgatgccgaagttcctgcaatggccgaacgaggaaaaaacgaagcaaatcaaagacgagttcgagaaaatctcaggaatacctaacgtaggaggagcaatgtacacaacgcacgttccaataatcgctccgaaaatcagcgtctccgcgtatttcaacaagcgccacacggagcgtaaccagaagacgagttattcgataacggttcaaggcgtggttgattcaaaaggcgttttcaatgacgtgtgcatcggttggccaggttcgatgccggacgatcgcgttctggagaaaagcgcgttgttccagagagcgagcagacggaacttaaagggcgtttggatcgttggaaattcaggccatccgcttatggcatgggttctagctgcgtacacgcacgcgaatctgccgtggacccagcacgcgtttcatgagaagcttgcagagattc

SEQ ID NO: 14764 - DNA, 434 bp, Glycine max
  unsure (1)..(434): unsure at all n locations
ctcactctgtagctatctccttccttcatccatttcctgaacgaaaccaacttcactttccttccgccatttgcattgctcactttctcttctgaatgggcactgcactgcacctctgcgttagtttcaatcctgctcaaggtagaaaatgcaagtacgaagcccaatcagtgagagcacttcctatacgtatattatcagtggggaagaagcgatcacgtggactgcaactcatggttgatgagtatgtggataagctcaggtactattgcagtgttgaggatgttcaaatacggccaaatcctcaaaatgcacgtgaccaaagggctcaggttgatgccgaagatgaagcagtgatgaaccttataaggtctgatgattgggtatagtctncaacatgcatgaatttgaattacagtagtaaatgatttttt

SEQ ID NO: 14765 - DNA, 207 bp, Glycine max
agagaagataggtatcgggtaggtcgaacaacatgctgtggaggccacctcttcccgtgcttcgagactgatgatctgctgcttgctcttcaggttgacctgagattcaatctaacggatcgtgatttacattgtgagacatgtaaggtgtgtgcctctggacaaagtgctaccagtatcggtgaagagcattccaagacgagctgg

SEQ ID NO: 14766 - DNA, 496 bp, Glycine max
ctttgctttggctctctctctctctctctctcgcggcgatggaatccaatagtcggcgacgctttcactctctccggcgacgatgaactcatcgccgacgaaatgagtttgcgccggtttcttctctctcctcgttccgtgagttccttcctctcactccttctccgttctccggtcgccggaaaatttatccggtgttagcgatacggaaaactcatcgcgattccgttttcttcttcgcttcgttttctacttctctttatctttcacttacattacctctctcattcggttgtttccgatcggatccatttcgccgtcgccggcgaagttagtcggaacaggctttagctacgttgtaaacctcagacattattaatctagattatcggaatttagtagttagtacggttcttagctacttaaccgtttaacgatattcatgtacctattaagagaagcgcgacgatgatagatcttaagcttaatgcgtagt

SEQ ID NO: 14767 - DNA, 2678 bp, Glycine max
tgtgatatgtgagatatggtttgcactgtcatggattcttgatcagttccccaagtggttccccatcacacgtgaaacctacttggaccgtttgtccttgaggtttgagcgcgaaggggagacaaacgaactagctccagttgatttctttgtgagtacagtggaccctttgaaggaacctcccattataacagccaacactgtcctttcaatcctctctgtggactatcctgttgacaaagtcagctgctatgtctcagatgatggtgcatctatgcttctgtttgattccttggcagaaactgctgaatttgcaagaagatgggttcccttttgcaagaagtataacattgagccaagggctcctgagttttacttttctcagaaaattgattacttgaaggataaggtgcagcctacatttgtgaaggaaagaagggccatgaagagagaatatgaagaatttaaggtgaaaattaattctttagtggcaaaggctcagaagaaacccgaggaggggtgggtgatgcaggatggaactccatggccagggaacaacactcgcgatcatccaggaatgattcaggtatatttaggaagtgccggtgcgctagacgtggaaggcaaggaacttcctaaacttgtgtatatttcacgtgaaaaacgtcccggctatccacaccacaagaaagcaggtgccatgaatgctttggttcgagtttctgctgttcttacaaatgcaccattcatgttgaatctggattgtgatcactacgtcaataacagcaaggcagtcagagaggccatgtgctttttaatggaccccaaccttgggaagaagctgtgttatgtccaatttccacaaagatttgatggtcattgatcgccacgatagatatgctaaccgaaacacggtgttctttgatatcaatatgaaagggcttgatgggattcaaggtccagtatatgttggtactggaactgtgttcaacaggcaggcattgtatggctatgatccaccagtatctgagaaaaggccaaagatgacatgtgactgctggccatcatggtgttgctgttgctgtggtggttcaaggaagtccaagtcaaaaaagaaatcaggaaaaggtctcttcagtgtgttctccaagaacaagaacaagaagaaaatgatggggaaagactatgttagaaaagggtcagggtccatgtttgatcttgaagagattgaagaagggcttgaagggtatgaggatctagagaaatcatccctcatgtcccagaaaagttttgagaagcgattcgggcagtcaccagtgttcattgcttccaccttgatggaaaatggaggacttcctgaaggcacaaatagccaatcattggttaaggaggccatccatgttataagctgtggctatgaagagaagactgaatggggcaaagagattgggtggatttacggctcggtcacagaagatattttgactggattcaagatgcactgcagagggtggaaatcagtatattgcatgccaaagcgaccagcattcaagggatctgccccaataaatctatcagatagattgcaccaagttctgaggtgggctcttggctctgttgaaatttttcttagtcgtcattgcccgttgtggtatggctatggaggaaaacttaagtacctacagaggatggcttacaccaacaccattgtttatccatggacttccatccctctgcttgcatactgcacaattccagctgtgtgtctcctgactggaaagttcatcatccccacactaaacaaccttgctagcatttggtttatggctctatttatctccatcattttaactagcgtgctggagctccgatggagtggtgttaccatcgaagccctttggcgtaacgagcaattttgggtcattggaggtgtttctgctcaccttttcgccgtgttccaaggcctcctcaaagttcttggtggagtagacaccaacttcactgtgacagcaaaagcagcagaggacactgaattcggagagctctatctcttcaagtggaccactcttctcatccctccaactactctcataatcttgaacatcgttggagtcgtggccggagtctctgatgccatcaacaatggatatggttcatggggacctttgtttgggaagctgttctttgccttctgggtcattgttcacttgtaccctttcctcaaaggtctcatgggaaagcaaaacaggactcctaccattgtagtgttgtggtcaatccttctagcatctattttctcattgatttgggtcaggattgatcccttcttgcccaagcaaactggtccagtgctcaaacaatgtggggtggaatgctaataagactctgtggagaggccatgttgatgtcccaatgataagagttaattgcacttgtgtgcatgcttttattttcttactgctattgagtggtttgccttaattagaagagttatctgtgtacatagtcttaaaagaggaaagttgggtctgattggaatgtattcatttgatgatacaacaaaaccatatattgtagtatagccattgtcattgtttgggaaaacatgttctgtgttttggtgctactagatgatttttcatctattgagaataagaatatatatttttgccaacttc

SEQ ID NO: 14768 - DNA, 440 bp, Glycine max
cacagaactacaatggtaggagtcctgtggtcaattcttctagcatctattttctcattgatttgggtcaggattgatcccttcttgcccaagcaaactggtccagtgctcaaacaatgtggggtggaatgctaagactatgtggagaggccatgttgatgtcccaatgagaagagtaaatggcacttgtgtgcgtgcttttttattgtcttactggcattgagtggtttgccttaatgagaagattaatctgtgtacattgacttaaaggggaaaattgggtctgattggaatgtcttcatttcaagatccaacaaacccatatactatagccattgtcattgtttgggaaaacatgttcttagttttggtgctactggatgatttttcatctactgaaacttgattcttgagaataagactaatattttttgccagag

SEQ ID NO: 14769 - DNA, 711 bp, Glycine max
cctgcttctcgacctgcatttcaagttcgcttagtacaggtatatccttttggtggtgcaaattatgccgattccatacatttagatccttcggagaacgaagatgcacagagttctcttaactattctttaaagcagggaattcatccaccacctacatttggttcatcctctaatcttgaagctcttgcacttcaaacaaccaaaaataacattgaagacgggggaagtgctatgagcgtaacaccttatttccggcccatgcacgagattaccttttcaacagttgacaagcctaaactccttagtcagttaactgcaatacttggtgagatgggactgaatattcaagaagctcatgcattttccaccactgatggattttctctggatgtctttgttgttgagggatggcctaatgaggaaactgaggagctgaaaggtgtgttggaaaaggaaattttcaaggttaaggagcaaaatatgtcaaatcagggtatacattatgctaccaacgaacaataccaggcaaggatggaaccctcccctcattgcattctaataccatctgatggagctgatgtctgggagattgataccaaccagctgaaatatgaaaacaaagtcggctctgggtcatttggtgacttgtacagaggtacatattgtagtcaagatgtggctatcaaagttcttaagcctgagcgcata

SEQ ID NO: 14770 - DNA, 917 bp, Glycine max
atgagaatcacctaacatcggaccttaaaataagagaaagagaacaacgaagaagttgttgtgtcttaagaaagagagagatggcggcggagataccgtgctgtggaacaaagttttcactgtacgttttggtgatcataggtttggtctgcttcgcgggactaatggctggtctcactctcggactcatgtctttgggactcgtcgacctcgaagttctcatcaaatctggtcgtcctcaggatcgcatccacgcttcgaaaatttatccggttgttaagaaccagcatcttctgctttgcacgcttttaattggaaactccttagccatggaggctcttcccatttttcttgattcactggtgcatcccgctgcggcaatcttgatttcggtcacgctcatcctcatgtttggagagatattgccccaagcaatttgtacaagatatggattgacggttggagcctcgctggctccacttggtcgggttcttcttatagtgggtcttcccgctgtcttatcctatcagcaaggttcttgattggatgttgggcaaaggacatgctgcccttttgaagagggcagagctcaagacttttgtgaattttcatggaaatgaggctggtaaaggaggagatttaacccacgacgagacaaccattataaccggtgcacttgaattgacagaaaagactgcaaaagatgccatgactcccatatcaaaggcattttcccttgatctggatgcaactctaaatttggagacactgaattcaataatgacaattggtcatagtagagttccggtttatgcaggagaaaaaaccaatattattgggcttgttctggttaaaaatctatttatggttgattcaaaggttgcagtccctctaagaaaattgctcatcagaaaatt

SEQ ID NO: 14771 - DNA, 600 bp, Glycine max
gggccattgaaggaatccacatccttgattgagcaccgtaagcagcatggattatattatcttccttcggagaagagtgagattgtttcagaccgaaaatttatctggtggttaagtaccagcatcttctgctttgcacgcttttaattggaaactccttagccatggaggatcttcccatttttcttgattcgctggtgcatcccgctgcggcaatcttgattttggtcatactcatcttcatgtttggagagatattgccgcaagcaatttgtacaagatatggattgacggttggagcaacgctggctccacttgtttgtgttcttcttatagttttcttccttttttcttatccaatcagaaaggtatgcttataatgttgatatgtatgattactatcaacaagggtatgtttaacgaaagtggttagtcttcctcaacgtaacaaatcaaggtttgaataattgcaagaggtgtccatgtttcctgtttgacaatagtgtctcagataggattgccttaaaaaaaggatatgtgtgaaaacaaacaaacaaaaatgtatgatagctatgtgtaacaagatacctgatggagatt

SEQ ID NO: 14772 - DNA, 372 bp, Glycine max
tgaacatccatgtgagtagtagtagtaagaaagaattaagaagcggaaggactcgaaaaagcgtgatcacatgagaatcacttaacctctgaccttaaaataagcttcaccttcgagcgagatggcggcagagataccgtgctgtggaacaaagttttcactgtacgtgttggtgatcataggattggtctgcttcgctggcctaatggctggtctcactctcggactcatgtctttgggaatcgtcgacctcgaagttctcatcaaatctggtcgtcctcaggatcgcatccacgctgcgaaaatttatccggtggttaagaaccagcatcttctgctttgcacgcttttaattggaaactccttagccat

SEQ ID NO: 14773 - DNA, 1341 bp, Glycine max
atgtcacagttgggtttatgtgcttttcgggttggactgatttctgaagcccatggctgcctgtctgaactgtactctggtgggagggtgaaagagttacctgcacaaggtgtgtcacaaagtcgctatcatgagaagactccagaacaggaaaggttggaaagaagacggcaaatgccttatcatatgcacatcaatcttgagctcctggagacagtacatcttgtatctgctatgctgctggaagttcctaatatggcagccaatgttcatgatgcaaaacgcaaactcatatctaagactttccgtcgcttgcttgaggtgagtgacagacaaacattcactggtccaccagaaaatgtaagagatcatgttatggctgccacgaggtttcttagcaagggagacttccagaaggcttttgacattattgtgtctcttgatgtgtggaaatttgtgagaaatcgagacactgtacttgaaatgcttaaggacaaaatcaaggaggaggcattgaggacatacctctttaccttctcttcatcttatgaatccttgagcctggatcagctcacaaaattttttgatctctctgtttctcgcactcatagcattgtcagtaggatgatgatcaatgaggagcttcatgcaagctgggaccagccaactgggtgcattcttttccaagatgttgaacactctaggctgcaggccttggcattccagttgacagagaaattatctatccttgcagagagtaatgaaagagcaacagaggcaaggataggtggtggtggattggatctgcctctaaggcgcagagatggccaggactatgccgctgccgctgctggtagtggaacagcctcgtcaggtggtagatggcaagacctgtccctttctcagccaaggcaaagcagtgggcgtgcaggatatgttggtggtggtggaaggccaatggcattaggccaagggagtggctattccagggatcgatcgggacgaggatcaggtgctggctatcagagtggacgatatcaggggggttcagcattgaggggaccccatggcgatgtatctacacgcatggttagccttaagggtgttcgtgcttagagaggtgcaaaattatcttctgtacgccacgttttgataatttgactaaatgcactatagcatttctggttttcatttctgtaacattttacttatggattttgtctaaatttgcattgaaatgtatgatcggagcttgtggattttgtctggatttgttataatcggagcttgctttcatttttaaaaaaaaaataggcaaaaagagaaataaaaaaaaacaaa

SEQ ID NO: 14774 - DNA, 477 bp, Glycine max
  unsure (1)..(477): unsure at all n locations
atttaattttctgcttttgcattctctctctcggcaccaaacaaaggtagttgtgattgcagcaaacaatgggtgtctccttcctctcgacttgcccttccctgcttccactcgttgcttatgatacaccaccctccaccagataccaacctcgttcagtgtccatttgttgtaataaaaccataagcaatgttagtgatgaagagccgttccattggagaaggagagaaattcttaaatgcgccggggcaaccgttggcctgttgtatctgttttcaggaattaattggaagctccggatctcttgttgaaatggctaatgctgctgacctgatacagcgcagacagcgttctgaatttcaatctaagattaaggaaacactttttacagccataaagggaaatcctgatcttattccatccttactgacactggctctaaatgatgncttgacttatgataagttgtaggcaaca

SEQ ID NO: 14775 - DNA, 469 bp, Glycine max
gcaaactgaatatttgctcgacaaactaagtgtttctttgactggtgaagaacttgatgtcattgaaaagctttattaccaagcaatgaagcttgaaatagatttcttctctgctcagccactctttcagccaactatagtacccttgactaaaggacataagcctgcggaagatcatctcatagttttttctgattttgatttaacatgcactgtagttgattcgtccgccatcttggctgaaattgctatagtgacggcaccaaaatctgatcagaatcagcctgaagatcaaattgttcggatgttatcttctgacctcaggaatacatggggttttctatctaaacagtatacggaggagtatgagcaatgtatagaaagcattatgccttccgatagattgaacaatttcgattataaagaattgtctatggctcttgagcaactttcaaaatttgagaacact

SEQ ID NO: 14776 - DNA, 685 bp, Glycine max
ggattcccttattgctgttcagttgaccgttgaccttaagccaaatcttccaagggaagaagagaggatcaagcttcgtagaggaagggttttttcccttcagaatgaacctgatgtggctcgagtttggctgcctaactctgatttccctggtcttgctatggctcgggcatttggagatttttgccttaaggactttggattgattgctgttccagatatctcatatcaccgccttaccgagaaggatgaatttgtcgtgttagcaacagatgggatttgggatgttttatcaaatgaagaagttgtggacattgtagcacctgctccacggtctagtgctgctagagcactggttgagtcagctgttcaggcatggaagacaaaatttcctttttgtaaggttgatgattgtgctgccgtatgcctcttctttgattctgattcagatttcaagtcaacagataccaaagacaagttgataccggaggcatctattgaccaatctgagaagtcatctttacttggtgaaaagggagttggaatggaagctgaaaaacagcagcaatagctcaagttttgtaccatgtctctcccaaaccttgctggttttatcgagaaggttgggtaaatggtgctgcaacaacagtcaacagagaaaggatcattattttgatgatttttc

SEQ ID NO: 14777 - DNA, 751 bp, Glycine max
ctattccacttcattgaaagctagtcccacttgagctttctttccacaaatctctctttgcatatcttcaatgaaaacctgagtgtcaccaactccatctttcagtttcatctttcacacatacacacttaaaaaaccacttcttcttctagtgcttctgatccaaaccaccaccatacacaaaattcatattgaaactgtgttctgtttgtttgtttgttactctactaatctttagaacaattcagtctttggatttgtttgtgtcctttttatcaatcaaggccacactcaaaatcccaagttttataaatcaagcataatggaatctgaaaatggagttgctatggaggacgagaaacatgtcattggggaaacaaccaaggagaacataaacaaagaagctgaaaacagttgtaattctgaaattcagaccaagaatgaggtatctgaagctgttgtaaaagttgaagggcccaaatctgcagcaagtaaaatctcaaaacttgccaaggaacatggtggcaaaggtggtgttgcttcaaagaacaacaaatctgccaccaaagacaaacccaatttgaagtctacaacttcatctcagacacacaggccaaacctttccaagagccttgctttcccagccacatcagctgagtggagagggcgtgaagataagcactaatggaactctcgcgaaccagaaactaagcatgctaatggggctaaagctgaggcttccattcgccgt

SEQ ID NO: 14778 - DNA, 491 bp, Glycine max
gcgggcacgcttccgcccaagccttccgtatgtgtttgaagatttccactttgttctgctttcgattgtgatggtgcacacaacaaattctttagtgctcggtacaagattcgtgaggggccagcaatgaccacatctcttctactcccatctccttcttgtgctgctatactgagcaaagggactaatagaatttgcactcgtgcttcatttcactcacttaaatcccatgtgaagaagggattcagagtgagagctcttaaagaaaaaacagaggaaattgaaagtccttcacagccatcttcacctgaggaagttacaaagaagtatggccttgaagctggtctttggcagattttcagctcaaaagaggaaggaaaggataattctcaacagaaatcaaagggtgatcgagccaaagaattgctagcaaaatatggtggagcatacttagccacctccattactctgtcattaatctctttcgcact

SEQ ID NO: 14779 - DNA, 372 bp, Glycine max
gcgttgcccacatctcttctactcccatctccctcttgtgctgctatactgagcaaagggactaatacaatttgcactcgtgcttcatttcactcacttaggtcccatgtgaagaacggattcagcgtgagagctcttaatcaactgtcagaggaaattgagagtccttcacagccatcttcacctgaggaagttacaaagaaattttcagctcaaacgacgactgaatggatgtttctcatcagacatcaatgggtgatcatgcctaggaattgctagcaagatatcgtggagcatacttagccacctcgattactctgtcattaatcgctttcgcactgtgttatgcattaattaacgcttgaattgatg

SEQ ID NO: 14780 - DNA, 541 bp, Glycine max
ctcgagccgattcggctcgagggctacgctggccaagtgaagagagtgtgtggataataatgttgataacggttagggaagcttcttcttgttcttcttctcccctcagcttctggcttaatcgtttcaacgcaaaaccctccaaaacactcaaaacaacatccatttgccaagctagtttctctgtccaaagaagacccactcattcatggaatactcgccatctctctaccagcagtgagctagcaaattttgatcccttgggtattaactcagatttatcttctggtctgaattctacctggaaaaatctggtgtgctcaattacacaaacatttgagagtacttcaagtgcagaaaagggaaaacctaactcttctcaaggggtagcagctgcaatagaggatagttcaatagattttggtgacttttttaagggcccactgccagggaagtttctcaagcttttagggtttcttgccttgtcaaggcttggagtgtacatacccctaggtggaagtaataaggaggcttttgttgg

SEQ ID NO: 14781 - DNA, 615 bp, Glycine max
tgcatatgcttcagaaaacgcaggcgagcattcatccaaacgactcgaatcgtctctagtacctcaatcaagcgttgttcatgaactccctcaagttacagacactacctttctggctttgttctcgtgcaatcccttgagaaaagtttctgttctgtgcttggtgacgcatgcgcactttttcatttggtgggtatcgttaatttctaagatttcctgagaattgaaagaaagaagaagaaacccttgaatttgggagcgttggattgaattgactgtgctgtgttgtttgattgtagcatttaagaagggggttttgggaaatggggaagcctttgttctatgagatcttggaaaaacctgccacaagttgcatcataggcatatgcagcatgatttggttctacatacagaagaaaaatattgggtattcacatgtgggtctcagttatgagactgctctagaagggcatcattggaggataattacttctgctttttctcatattagtgttattcatcttgtttttaatatgagtgcactttggagtcttggggtggtagagcagcttggtcacttgggtcttggtgttgagtactacttgcaatacacac

SEQ ID NO: 14782 - DNA, 284 bp, Glycine max
tgcacttgcttcagaaaacgcaagcgagcattcatccaaacactcgaatcgtctgctagtacctcaatcaaggtgagagcattcttctcatccccgattcttcgttgatctcttcacaaaacccttttattgaatctgaatagaagccccacaattattatttcatacaattgaattgaacttcttcagcgttgttcatgaactccctcaagttacagacactacctttctggctttgttctcgtgcaatccttgagaaaagtttctgttctgtgcttggtgac

SEQ ID NO: 14783 - DNA, 920 bp, Glycine max
gcaactttcttcttaataatgtgattgaaaaaatattgctattgacacggagagcagaaagatacttggttgttggtgctgtccggttcgttcgaactattctctctcgccatgatgagcatctgataaattattttgttaggaataatgttctgaagccaattattgatgtctttgtttctaatggcaatcgctacaatctgctccattctgctgttctggaactttttgagtttattcggaaggaaaatctgaaattattgctgagatacatagtcgattctttttgggaccagctggtgaaatttgagaatttggcttcaattcactcactgaaagttaaatatgagcagtgtttggataatggtgggacaaatgatgatgccactactgcagtggaccttcgaaggcgaaatgatgagcgtgctctggagagagaagaagaacggtactttaatgaggacagtgatgaggaggatagtgcttctgcatctgttccacgcaatcagaaaggtcaccagcaacctaatctatccaatggagttgctgcaagctattcacagttaagtccaaggtcactggttgactatgaggatgatgaggatgatgaagattataagccacccccaagggagcagccagaaacttctgaggaagatgatgggataatggagtctctcaggctgaagaggaaattaccttccaaagataaggagcctgaacttgagaagaaacagaagttatcaaagaattctaaatctaaagatagcgtttttgctggcttgtgttcaacattgagccaagctgtgctacctagcaagaaaacatcaatcgacattcatacatgtgctccaacagatgggaggatgagctcaagcgaagataatcagggggatgtacaaaatatttctagaagcagc

SEQ ID NO: 14784 - DNA, 530 bp, Glycine max
catctgtacccccgtcaagttatcgattgggtgtgaaggcagcaaacctccatcaactctttcccattcatgtaactgaagctttgaaacattcacttgtaacatttgacaaggagttaccaggatttatctgcaatgatgctctccttcatggtgctgagactaggactagttccccaatccaaattccacgcaatggtgacacttatgaatgcacttcggtaaaaggactatatccagttggtgaaggagcaggctatgctggagggatcattagcgcagcagtagatggaatgcatgctggttttgctgtggcaaaaaaattcagcttgtttcatggagatgttgagtctgttctgggcaaggctcaaaatgttggagttgtcaagtactaggaagatctaagtttcttcagacactgtctttggtgggaggaacgccaacttaaacaagttatcttctacatttttgagttgtcagtttcagcttgtcgtggaagaacatcgatgataattgccacatctctctct

SEQ ID NO: 14785 - DNA, 988 bp, Glycine max
actcgagccgattcggctcgagtttttattctgtcattagagaggacataagttgactagagaacagggcggagaaggctgttttgtgcatcaacaaaaccagctcctggacttgcttgcatactctctctgttctttctattcaaagatctgtaaatttatatattatcttttatcatatatagtattagtatagtccacttgtttaaaccacctgtgttgcatattctgaatcctatcatcttgtggctttgatgtctagagcattggaacatgattacatagggttggcagagaatccgtcaatggatggtaaaaactcatcatcactgaacttgaaggagacagagctgaggcttggcctccctggttgcgagtctccagagagaaaatcaggttctgcactctgtctttttggcaaagagttgcagaacaacaataacaatgtttgttctttgaaggctggggccaagaggggcttctctgatgccattgacacctcttctgtcactgagggatctcaaggagcttctgctttgttctctccaagaggtggcaatgttgggaagcctcttattggtttagacactcaaactaacaccaccatcaaagaggttggtgcagttcctcaatcagccaaaccggttcaggaaaacaatgatcagtttgctgcaacaaatgcccatgcaattgctcctgctgctaaggcacaagttgtgggatggccaccaattcgatctttccgaaagaacacgatggcctctaatttgacaaagaacaatgatgaagctgagggaaaatcaggatttggttgtctctatgtgaaagtcagtatggatggtgccccttatcttagaaaggttgatctcaaaacctataacaactatatggaactttcctcagctcttgagaagatgttcagctgcttcaccattggtccaatgcaattgctcctggacttgcctgggggaaaggatggacttaagtg

SEQ ID NO: 14786 - DNA, 982 bp, Glycine max
ggcagagaaggttcttttctgcatcaacaaaaccaactcctggacttgctgtcaatatcacaccataactgctattgaagctctgctctctgacttgcttgcatactctctctgttctttctgttcacaaagatttgtaaatttatatttatcataccatatatactatataatatattgtatgctccacttgtttgaagctgtgttgcatattctggatcctatcatcttgtggctttgatgtctagagcattggaacatgattacatagggttggcagagaatccgtcaatggacggaagctctgacaaactgtcttctgaggatggtaaaacctcatcactgaacttgaaggagacagagctgaggcttggcctccctggttgcgagtctccagagagaaaatcaggttctgcactctgtctttttggcaaagagttgcagaacaataacaatgtttgctcagttgtaagccctttgaaggctggggccaagaggggcttctctgatgtcactgagggatctcaaggagctgctttgttctctccaagaggggccaatgttgggaaacctattattggtttagacactcaaactaacacccaacaacaggctaacaccaccatcaaagaggttggtgcagttcttcctcaatctactaaaccggttcaggaaaagaatgatcaggttgctgcaacaaatggccatgcaagtgctcctgctgctaaggcacaagttgtgggatggccaccaattcgatctttccgaaagaacactatggcctctaatttgacaaagaacaatgatgacgatgagggaaaatcaggatttggttgtctctatgtaaaagtcagtatggatgggtgcccctatcttagaaagttgatctcaaaacatataacaactatatggaactttcctcagcccttgagaagatgttcagctgctttaccattggtcaatgcaattctcctggacttcc

SEQ ID NO: 14787 - DNA, 666 bp, Glycine max
ctgacgcgtggggggaaatgcagcaggcttggctgccataactgcaatgctggtgaccacttgcttaatgcctctagctatagtcttgtgctggcacaagaacatactgctagcagtttgcttcatagtgttctttggctccatcgaagcactctatttctcagcatccctcatcaaattccttgagggggcttgggtccccattgccctctccctcatatttctcattgccatgtatgtgtggcattatggcacattaaagaagtatgagtctgatgttcataacaaggttccaatcaactggctcctcagtttaggcccctctctaggcattgtcagggtcaagggaattggcctcatacacaccgagctcgtatctgggatcccagctattttctcccactttgttaccaatctccctgccttccaccaagttgttatcttcctttgcattaaatcagtccaagtgccacatgttagacctgaagaaaggttcttggtgggaagagttggcccaaaggagtatagactttaccggtgcatagcgcggtatggctaccatgacattcacaaggatgacattgagtttgagagggatcttctttgcagcatagctgaattccccagatcagatgcatctcaatatagcttaggatttgggagctt

SEQ ID NO: 14788 - DNA, 893 bp, Glycine max
ctgctttacattacattacctctctctcactcctgctcttgtcctgcttttccatccatttatgtgaaaaaggaaaaattgcctgaggtggttcaatcactatggaatcctgcaattgtattgacccacaagtgccagctgatgacttattgatgaaataccaatatatctctgatttcttcattgcccttgcttatttctcaatccctttggagcttatctactttgttaagaaatcagcagtatttccatatagatgggtccttgttcagtttggtgcttttatagttttatgtggagcaacacatctaattaatttatggacctttagaattcattcaagaactgtggctgttgtaatgaccactgctaaggttttaactgctgtggtatcatgtgcaactgccctcatgctggtacatattattcctgatttattaagtgttaaaactagggaattatttttgaagaacaaggctgcagagcttgatagagaaatgggcctgattcgcacacaagaagaaactggtcgacatgttaggatgttgactcatgagattagaagcactcttgatagacacacaatattgaaaacgactcttgttgaattaggtagaactttggcactagaggaatgtgcgttatggatgccaacacgaactggtttggagcttcaactctcttacacattgcgacagcagaacccagttggatacacagtacccattcatcttcctgttatcaatcaagtatttagtagcaacagggcagtaaaaatttcacctaattgtccagttgctagattacgaccttatgctggaaaatacatgcctggggcagtagtagctgttcgagttcctctcctacatctttctaatttccaaatatatgat

SEQ ID NO: 14789 - DNA, 939 bp, Glycine max
acgagcgagccggaacaacagtgattccagatctcaggctcatggagaagatatggatgttgggtatgaaggaaatcatttatcacaatcttttgaaggtcttgagcagaattttcatgatgacattattaaactcaccaaagaacagaatgacgctgaagatgcagaatatgccagacacagagagatgaacccataatcatgcaacacccttgatggactggatccagttttgcagacctcactaggtttaaattacctcttgggcatcagcacactgaaaacgggacaaataatgagccacatggaaagactgcttgttggaaaataaatgcaatcaatgctcagtatgaggaaaaactggcagcactccgagctcagcatagcagccgcagagctgaatttcttcaaagggaatcacatgctaggcaacagcagtaccagcaaatcataagggatccttaccccagtggtggcatggcacccggagaccctcatggttacaacaatgtgaatgcttcaggtacaggtgaagtgcaacgaggctattctgccgatcaccttgatccttaccgagagagagctcgatttcttgggggtggtagagatcaaggatttgaacctagaggtccatatcctggtggccgtgtctatgacactggttcacgctattacaattgagttttgacccaaaggtttatctctcattttgggtttttactgcaggtgaaattgcttatattgacataatttatgctttgtcatcttttccatctttttattacactgttcatggaaattattgtttcttagcggttgttatttatatagatcaacattggaggtgcacacctttacattggtgttgtgcattaaaacgtaggaccactaggatatttcttgtttgtgtttatgaaaacctataacattgaaccctgt

SEQ ID NO: 14790 - DNA, 1440 bp, Glycine max
caactgcacccctcctccagtcacttccttttccatggcccaaacactttctccctgcatttattacctaccactgtcactatgaatgctgtcttttgtttttcatcttcaacttcatctaaacctttcacacatatcttcggcttagaacaaccaacaacaagttcacattgtaggaacctttgtcttgtcgtgtcgggtagtggctcatattgatattggtatggtctttctttgaaccccatttgcaaaaaggaagaagaagaacatgaagattcagtgtgatgtgtgtgagaaagcccctgcaaccgtgatttgttgcgcagatgaggcagctttgtgtgccaaatgtgacgttgaagttcatgctgcaaacaagcttgcaagcaagcaccagaggcttctccttcaatgtctatcaaacaagcttcccagatgtgacatatgccaagacaagccagcattcatattttgtgttgaagacagagcactcttctgtcaggattgtgatgaaccaattcattcagccagtagcctttctgcgaaccaccagcgcttccttgctactggtatccgggtggctttgggttctaattgcaccaaaggcaatgaaaaaggtcacgtggaaccatctaaaccaaaagcacaagaagttcctgcgaaaattccttctcagcaagtgcctagcttcacatcctcttgggcagttgatgacttgttggaattaacagactttgaatcaccagacaaagttcagaagcaatcccttgagtttggagaacttgaatggctagcagatgtaggcctttttggtgaacagtttcctcatgaagctttagcggcggctgaagttcctcagcttccaatgactagcagtgttggctcacacaaagcccccaaatccttgttgtcttacaaaaagcctaggattgaagtcctagatgaagatgatgatgagcacttcaccgtaccagatctcggataaagcacatggtcatgtaaacaattgcctgaatcagtaggcagtaggttgacgagttgtatatgcatactaggtgcagatgttaatgaactcttcaatgtgcctggtctagctgaagctcaggaccatgaggactattgcatgaatctgtagattgatgagctgtatatgcatacttctcttaggacagtaagtaatgaagtatgttaactagcttgtggagttgataaatatctcattttaggagctatgaatggtttgatttttagaatatagcataaattaaaccttaggggattaaattttccttgctctttgtgatcatcactgtttacatcctataggtgctcacaccacacaacaatccacgtgaacttgaatggttaattatgtatgcttgtgttgaagatcattctggcctaatagctacgataaggcacgcgccactacttgtagtt

SEQ ID NO: 14791 - DNA, 954 bp, Glycine max
agtcacttccttttccatggcccaaacactttctccctccatttattacctaccactgtcactatgaatgctctcttttgtttttcaccttcttttttttgtttgtgcgttcatcttcaacttcatcctaaccttttacacatcatattttcggcttagaacaaccaaaagcaagttcacattgtcttgtcttttcgggtagtggctgtagaggaaacactcctgttttgtgcgcatattgatattggaatagtctttctctgaaccccatttttgcaaaaaggaagaaagagaaagagagagagagagagagagaagagatatacactgccaagaagaagaacatgaaaattcagtgcgatgtgtgtgagaaagccccggcaaccgtgatttgctgcgcagatgaggcagctttgtgtgccaaatgtgacgttgaagttcatgctgcaaacaagcttgcaagcaagcaccagaggcttctccttcaatctttatctaacaagcttcccagatgtgacatatgtcaagataagccagctttcatattttgtgttgaggacagagcactcttctgtaaagactgtgatgaacctattcatttagccagtagcctttctgcaaaccaccagcgcttccttgctactggtatccgggtggctttgggttctaattgcaccaaaggcaatgaaaaaggtcacgtggaaccatctaaaccaaaagcacaagaagttcctgcgaaaattccttctcagcaagtgcctagcttcacatcctcttgggcagttgatgacttgctggaattaacagactttgaatcaccagacaaagtaaggcagttttgtttcataattctagctgcatatattagctaaaaaattagagtgattttgataaaggaacctagtatggttatgatggaccatttctgtttgttgccacccaaaatatacattt

SEQ ID NO: 14792 - DNA, 540 bp, Glycine max
cttcccacattaaataccaactgtgtagtatagtactgcgtcaaggttaactatgttcttctttttttgttctcatctccacaccatgtcctaatctttctgcaccatcgttctccatttttggctttacaaaaccactgtgtctgattaagggttctttaatatttccaatatttcttgtagtgaaaaagttgttagctaaaagaagaccaagtttttggtgttgtagaaggaagagaagaattaacatgaaaattcagtgtgacgtgtgtgagagagctccagcaacagtgatttgttgcgcggatgaggctgctttgtgtgccaaatgtgacgttgaagttcatgctgcaaacaagcttgcaagcaagcaccaaagacttcttcttcaatgtctatcaagcaagcttcccacatgtgacatttgccaagacaagccagcattcatattttgtgttgaagacagagcactcttctgtcaggattgtgatgaaccaattcattcagccggaagcctttccgcgaaccaccagcgcttcc

SEQ ID NO: 14793 - DNA, 767 bp, Glycine max
ttcattatgcgaaccaccagcgcttccttgctactggtatccgtttggcatcgagttctaattgcaccaaggacaatgaaaaaagtcacttggagcctcctactaggagtgcacaacaagtttctgcgaaaattcctcctcagcaagtgcctagcttcacttcctcttgggctgttgatgacttattggaactaacagcctttgaatcacctgagaaaaaggaatctctgcagtttggagagctggaatggcttacagatgtgggtatttttggtgaacaatttgctcaggaagccttggctgcagctgaagtacctcagcttcccgtaactcataacagtagcagtgttgcttcatacaaaacctccaaatcctacatgtcccacaaaaagcctaggattgaagtcctaaatgatgatgatgatgatgagtattttactgtgcccgatctcggctaagtacgtggcttgccatatgggatggtgcatgcatgattggaaaagattaattatgggaaaataatttgttttttctttttttaaaagctatttagtaaattgtcgaaaaagattattgttttctcaaaaaaactattccattcagacatgttgatatgttgtatattcaattattcatacttcactaagaacaacaattttcacaagttgtgtggagttgataagtattgtacttgaggtgttttttttgctggatagcatagaatctatgcctttggggaataaattatccttgtccttatgcttcat

SEQ ID NO: 14794 - DNA, 388 bp, Glycine max
cagacacttccttttctgtgttcaacagtttcttcccacattaaataccaactgtgtattgtactacaaatgttaactatgttcttcttctttttttgttctcatctccacaccatgtcctaatctttctacaccacatcgttcttacatttttggctttacaaaactaccgtgtctggtaaagggttcgttaacatttccagtgaaaaaagttgttagctaaaagaagaccaagtttttagtgttgtagaaggaagagaagagttaacatgaaaattcagtgtgatgtgtgtgagagagctccggcaacagtgatttgttgtgcggatgaggcagctttgtgtgccaaatgtgacgttgaagttcatgctgcaaacaagcttgcaag

SEQ ID NO: 14795 - DNA, 848 bp, Glycine max
atcaaaattacacacatttagctacccttactttctatggcttccaacagactcctggccaccatgttggtgctttctctcctctcttactcaacattcactcatgccaattgcccaccacccactccatctccaaagcccacaccaccaactccaataccaacaccacccacaccaaagcccacaccacccactccaaagcccacaccaccaactcctaagcccacaccacccacaccaaatcccacaccacctactccaaagcctacttgtcctcctccttctcctccttcaccaccatcaaacaaagcctcatgccccaaggacacattaaagctaggtgcttgtgctgatctcttaggacttgttaacattattgttggaactcctccttcgagccagtgttgtgcattgatcaagggtttggcggatttggaagctgcactttgcctatgcaccgcaattaagagcaatgtgcttggaatcaacttgaacgtacctgtgacgctcagcgtgatccttagtgcttgtcaaaagactgtccctcctggtttccaatgtccctcctgagataatcaaattaggttcatgagatatctctcgtcatcagagaaatgtttagatatgcacttaacatgaaattgattgactgcctatgtaagcatttctttggcaatttgcagagtgttatatatgtttttttttatgtattactgtagttgctgtttttttgttgggggtttatatcgttgttaatgctagtgcacgtacatgttctaaataatgttgtattgttttgcttcgttaaattatgaattgggcaagcttgtttgccttaatttgtcaaa

SEQ ID NO: 14796 - DNA, 730 bp, Glycine max
accaaaactgaagtagccatggttatggttcatctcactaagctactttcttcttcttgctcccattttctccctagttttttgctgcttcgcttgacattattgatattactagtttcttccaaaacaaagggtttggtgaaactaccagcagatgtgtcggttccagcagtgtttgtgtttggagattcggtggtggatacaggcaacaacaacaacagaacaacatcatttgctcgctccaatttcccaccatatgggagagatttccagggtggcatcccaactggtcgatttagcaatggaaaggttccatcagaccttatagttgaagagttgggcattaaggagcttctgccagcatatttgaaacccaatctccaatctagtgatttgatcacaggggtctgttttgcttcaggtggctcaggctacgaccctttgacatcaatattagagtcatcgatgccattaactgggcaagtggatttgttgaaagaatacatagggaaactaaaagggctggttggagaggacagagcaaagtttatcttagccaacagtctattcattgtagtagcaggcagcagtgacatttctaatacctatcgcactagatccctcctctatgatcttcctgcttacactgatcttttggtcaactcagcttctaatttcttgacggaaataaatgagctgggtgcacggaggattgcagtattcagtgcac

SEQ ID NO: 14797 - DNA, 463 bp, Glycine max
ggaagacgctcaaatttcccattaacaaaaaacacagcaaagtgatggaagtgacaagtgctgttcaccttcactcagttgggtttctgcatttacagacacacgttgaaaggctcaacggtagagctttcttcctctccacaagaccaagaaaagtgaaggttcatcttccttgtcatcaccatcatcatctaaaccacttaagcaataccaacggtattggtgcttgcagtgatagaacaagtgttatactcaactccacttctgttacttccacaacttcttctgctgcgagggtccctctctgaagtggaaaagataaagcagaagtgccttacatggcagtggaagggtcaatattccatcaactactttgtctcttctgattctcctcagcagttgcatggcagccaccctcctctcttacttgttcatggcttcggtgcctccattcctcactggc

SEQ ID NO: 14798 - DNA, 380 bp, Glycine max
gtctgaatttcatgttaaacaggatttcgtgactagtaaagatggtaccaagatcccaatgttcattgttgccaaataggatattactttggatggttcacacccatgtttgttatatggatatggtggttttaacatcaatattacgccatatttcagtgtcagtcgcattgtactcacaagacatttaggtgttgttttcagcatagcaaatattcgtggtggtggagaatatggggaggaatggcataaagcaggctcccttgcaagaaagcagaattgctttgatgacttcatttctgctgctgaataccttgtatctactggttacactcaacccaaaaagttatgcatcgaaagtggaagcaatggtggacttc

SEQ ID NO: 14799 - DNA, 334 bp, Glycine max
gcaagagtgggaagtcaagctggaatattcagccctcgctttaggcattgttgggtatatttgcttagccttattgttctttccggtcacgagagggtcttcaattttgcggttcattggcttaaacttcagagggaagcatcaagtatcatatctggctaggacacattgcaatgaccctcttcacagcccatggtctaggttatattattttttggggaaagacacatcaaatcttggagatattcaaatggaacaaaattggcgtctcaaatgtggctggagccggttctttggtaactggaataaaaccgtgggctggtaccctaacctt

SEQ ID NO: 14800 - DNA, 416 bp, Glycine max
cttgtttggctgaacgaagaaccctaacctctcaccagcgcaagcttctcctgcaaccctccagacgatcaactgggatcccaaccgctctctcgccctcgccaggtgctgagtggctttaattgtaaatcttggcgctccatgtgtgaacctttgttgggtggtttaggctcagacttgctttgtttgcagatttgattggatcggcttcctgcatacttggactcgggaatttggaccagaaacagttctcgaaatcttgcttgcatctaagtcgagggcctgtttctaagtcgttaatgccagtgccttggaagtatttctggcaaggtggtagtacaaggtccgtcaatggggcaagggaagggaagggtccaaatttgggctccaaataacccgggttaaccaatttgggg

SEQ ID NO: 14801 - DNA, 487 bp, Glycine max
  unsure (1)..(487): unsure at all n locations
cttcactantccaacacccaattccactgcttttcaatcccaaaggggtgtagcattgaattgggttgatgtgcaatgcagagatcacggaaagctcttctggaaagaagggctatacaggaggctacaagtgggaggaactatgtctatctgtataaagtttctctgtcgttggtttttgttttgtggggtctggtcttcctcttcagcttatggacaagccatggccatggttatggagatcatgaatctagagaagttccagttggtgtatcaaattggaatgaagatgaacacagacaatgtaaaaactctaattctgctgatgaatatttaactaaagagactgatgatgtctacattccttctgagactttctgctctgatggtgctaaaactgatggtttaatcggtgagtcactttccagtggagaaagcataaatcgtgtagaaccgggtgataaagaaagttccatttctcctgata

SEQ ID NO: 14802 - DNA, 256 bp, Glycine max
tgatccctcttagattttagagccttattttatgtgtggcactttgctgatctcaaaagttaattggtacattaacataccctttggcttttgcatcttattgatgagctttgaatgagggaaaaagatgtgttgcctgttgttgcaggggtgtagcagtgcattgggttgatgtgcaatgcagagatcacggaaagctcttctggaaagaagggctatacagaaggctacaagtgggaggaactatgtctatctg

SEQ ID NO: 14803 - DNA, 683 bp, Glycine max
ggctcatcccgtcaaagaaaaaaatgacgggaaagctataaatggaggtaagaacgaacgaagttgcaaagcaaagaatagaagacgaagggtatagagctcataacaatccatttggtcttaatttgtttctgcatttctttcgtcttaatttgttctcttcagccatggcgatggtgcaagatgaacgatgcgttcagaaaagctactggattgaacatacgacggacttgtccgtagagtcaatgatgctcgattccaacgcctctgatctcgacaaggaggagagacccgaagttttgtccctactaccaccatatgaaggaaaatcagttgtagaacttggagcaggtattggaagattcacagttgaattggccaagaaagctggccagttacttgctgtggatttcattgagagtgctataaagaagaatgaaagcattaatggacaccacaagaatgtcaagttcatgtgtgctgatgtcacttctccaaacttgtatatttctgaaggatcggttgatctgatattctcaaattgggtactcatgtatctttcagataaagaggttgagaatttagctgcaaggatgatcaaatggttaaaagttggtggatatgtattcttcagagaatcatgtttccaccaatctggagattccaagagaaaatacaaccca

SEQ ID NO: 14804 - DNA, 612 bp, Glycine max
gttctttccatggatgcaaaagagcatactgtaaaggtacactggagaactgttcccacatctgagacagataatttagctggagacacaatgattgaaactgtgagtgcctatgaacttgtcgagcacccagattactcctgttgttttggtgatattgtgttcaaggaggctcaaaaacagcttggctaccaagctgataaagataatgcgaagtcagtgactgacttgaatgtggaagttcctctgataaactgggaccaaatcagtcatccgaataagtatgcagataacagttacctctcctgcattggcaatgttactggttttgaagatggtgacatggaggtgaaatgggctactggtttaacaaccaaggttgcacctgatgagatttttcgaattgataagcacgaaggttcaactgcaacccctgtttcttatgaagcaaatgttgaggagttgactcaagagatgattgtaagtcaaccatcagacaagaagggaaagggcttgttagattgtgatggctatagagataattgtgagcatccaggagaaagtagttcctcttcccttccacaagctgcctttgaccttttctccagtatt

SEQ ID NO: 14805 - DNA, 1297 bp, Glycine max
gtttgacacacacgccgtgcgttttgaaagttccataccattaatcaccgaaaagcggtgggtggaagtggcgacgtggttggtggtctctgcgcacattttgttggttggtttcaactaccgcgtgcactgacgtgtaacttttctactggctcccaagagaatatgaatagctccctctctggcatggtggttccacaacaatggcggcagaaaacgaagattcctgcggaatccgcgtcaccggcatgcaattctcctacgacgtgcagcaaccgccgctcttcctcgacttcaacctcaacgtctctcccggatcccgctgcctcctcgtcggtgccaatggatccggaaagacgactttgctgaagattctggcggggaagcacatggttggaggaagagacgttgtgcgcgtcttgagtggttccgcttttcacgacactcagctcgtttgtagcggagatctcgcttatttgggcggatcttggagcaaaaacgttggctccgctggagaaattccgctccaaggagacttctctgctgaacatatgatctttggagttgagggtgctgatccagaaaggagagataagttaattgagctgcttgatattgatctacagtggcgaatgcataaggtatctgatgggcagcggcgtcgagtgcaaatctgtcttggtcttcttcatccgtacaaggttctcttgctggatgaggttactgtggatctggatgttgttactcggatggatttattggacttctttaaggaagaatgtgaacagagagaagctataatcgtatatgcaactcatatttttgatggactggagacatgggcaactcatttggcatacatacaagatggtgaactgagaagagcagaaaaaatatcaaatgttaaagagttgaaatcttcaactaatctgctgtctgttgttgaggcctggcttcgcgctgaaacaaagcttgaaaagaagaaccctgtccaaaagacttctgttgccagttctcctttcttttcatctagacacatggcatactatagatagtgtttttgacacagatttcttatgaaaataatttgggtggcaaatacaagtaattcattctttcatgcttgtcaagtttgtggttgcttatattttcaacattttgttttggagtagttatacgtttaaacaagcatgattaaatgaatcatagccttataatccccatgaagtcatatggggctggctttggtcgataacatgtattcctttttcataccataaatgaaacataattgctg

SEQ ID NO: 14806 - DNA, 875 bp, Glycine max
tcacacagcgcttatgagaggctcttgttcatgtcaaccaagcaataacgataaagaaagaaattttatggttatggaggtctcagcatacatttgcaacaacaacttcatcttctcttcttctcgtgccataacacaaaaatcttctgcttctttctcatcacctatgcttgtcaaatccatggccactcccaagcctcttccctcagtctctagaactgtaggctctagaaagaactcaactgtgttcccacttggggaacaacctaggagcagccccgcgacagccacgcctcccataaagcttttgacaaggatggagcagctgaagctgctgagcaaagcagagaaagcagggttgctatctgcagcagagaagtttggattctccctctcaacaatagagaggcttggactcctctcaaaagcagaagagttgggtgtgctatctgctgcaactgatcctggaactccagggacactcttaaccctcagcttggggttgctgatccttggacccttgtttgtttacttcgttcctgaggacaaccttggagtggtggggttgcaggttgtggttgccttggccggtgtaattgggggttctgctggcttggctgcctcaaattttgtatccaacttgcagaaattgaaataaatttgatgaccttttaatgtctcttaatagagccgaagacacgagtatgcagttatgttgaatatttgaagggagaactttgtcaattgtaatgatcttacctagttcgagtaggatggtctctcgtagaggatgatccaattatgttgaatatttggagagaaaactttttcacatataaatagtcttacctagtttgagtaggatgacttcttgt

SEQ ID NO: 14807 - DNA, 1382 bp, Glycine max
attttaaactttcaaactaatcagtacctcaccttgaactggttgcaggtgggaccaatatgatgtgcaagtttcatcggtcgatatagacaatgcccgtgcagggatctgttggggtttttgttcaaccagttcaagctgaggttctgattttaaactttcaaactaatcagtacacctttccaaagttcctgaaagacatgagtaaactaaaagttctgacagtcatacatcatggtttccatccttctaaaatgaacaattttgagttacttggctcattatccaacctaaaacgaatcagattagagaggattttggttcctccctttgtcacattgaagaatctaaaaaagtcatccctcttcttgtgtaatacaaacaggcttttgaaaatggaaacatgctaatttcagatgcttttccaaatctagaagatttgaatattgactattgcaaagatctgatagaattgcctaagggggtctgtgatatcacctccctgaagatgctcagcattactaattgccacaagctctctgcactgccgcaagaatttggaaagttggagaatttggaactcctaaggctcagttcctgtactgatttggaagggttaccagattctattggaaggctttcaaatctacgacttcttgacatctcaaattgcataagccttcctaatttaccagaggactttggtaatctgtctaatctacaaaatctctacatgacaagttgtgcaaggtgtgaattgccaccctcaatcgccaatcttgagaatttaaaggaggtggtatgtgatgaagagacggctgcttcatgggaagatttcaaacctatgcttcccaatctaaagatagatgttcctcaagttgatgttaacttgaattggcttcatacaatttcctcctaatacttgcttcatgcagttcaggttgtctttccaagaagtcaatgaaagaactaaatacacttttcacattggattggattgtggtaaacggaaacgtcccttattaatcagtgctgaaggggaatctctgttaaggaactcatcaaacacaaaacctttatgaatcccaagttcaacaacgaaattctaaatgttgtgattagcagatatccatccttttatatatccatcaatttgttgggtgtcaactcactaccatgcctgaagtatctactggtatagcataactgagcaagaattctggggtctcattcaaatcttcattctagtagcgatgtgcttgtttctatgtaaaaagctggaatattttggaacatataatgccattgagtgttttagggacctatgtatttttattcccgaagaccagatgatctcaatcatgctggtgcaacagagaaaa

SEQ ID NO: 14808 - DNA, 404 bp, Glycine max
ggctggctttctttcacaaattctggaaatccagttatggcactggttgcctttttagcctctgctgttggaccaagagtagctgcaacttgtgctcatgcagctttagctttcattgtcagggaataattctgggagcacggcacatatagaagcagtggaaaatgataatcggacaaattcagaaagtatacataatagagatggtggccatgatggagaggttgcaaattcaaatcagaaaaataaggacatgtcaaaagtacttggttcatgtggtcaacatgagggagggtcaatcctcctatctgctgaaaaagtcaaagatgctgccaaaagcaggcctatccgttgcagcaatgaaagctaaatggtttgctgatcatgaaaagcgggaaattcaa

SEQ ID NO: 14809 - DNA, 1177 bp, Glycine max
cgacaatatgataaggtgctcaagcttgggtgcacaccatccattgacactcaaataccttaacatcccaaaaaagtcaaacctcccattcgtgaatttgaccagcaattccttccttcttccatctcttccccctaaagcacacaacaaccctcttcaaatcccttcacagaagcttgcaaaacccttaaactctacaccaccctcatcgatcatggcttcaactaccacagaagacgacagcgaagtaacctacgacctttccccggtcctcaaagtctacaaaagcggtcgcatagagaggcttgctggcacagcggttcttcctgcgggcctcgaccccgaaaccaacgtggaatcgaaagacatcgtaatctccgaagaaaacggaatatacgcgcggcttttcgttcccaaaagaaccaccttttccccgccgccgcagcaaaagctccctctccttgtttacacccacggcggcgccttctgcatcgaaaccccgttttctccgaactaccacaacctcctcaacaaggttgtttccaaggctaatgttgtcgctgtctccgtccactaccggcgggcaccggagcacccggttcccaccggccacgaagattcgtggattgcactcaaatgggtggcttctcacgtgggtggaaacggcctcgatgtgtggctgaacgaacacgtagattttgagaaagtgttcctcgccggtgacagcgccggcgccaacattgcgagctatttgggtattcgggttggaacagaagggttgcttggtgtgaagcttgaaggggttgttttggtgcatccctttttctggggaagaggaaccgtttgggtgtgaagcaaaccaggcctgaacaagcgaagaagatacacgatttgtggcggtttgcgtgccctagtgagagtggatccgatgacccgattattaacccgagtaaggatccgaagctggggaagttagcttgtgaaagattgcttctttgtgttgcggagaaggatttggtgagggacaggggtttgtactataaggagttgcttgagaagaatgggtggtctggtgttgcggaagtggtggagacgaaggatgaggaccatgttttccatttgcttctatgctttatttctgtttgacaagaatgggtgcccttctatggttcgaaca

SEQ ID NO: 14810 - DNA, 498 bp, Glycine max
ccctttttctggggagaggaatcgtttgggtgtgaagcaaaccgacctgaacaagcgaagaagatgcacgatttgtggcggtttgtgtcccgattgttaacccaagtaaggatccgaagctagggaaggtagcttgtgaaagattgcttctttgcgttgcggagaaggatttggtgagggacaggggtttgttctataaggagttgcttgagaagaatgggtggtctggtgttgcgaaagtggtggagacgaaggatgagggccatgtttttcatttgttcaaaccgaattgtgagaatgctcaggttttgatcgaccagattgtttcctttctcaaacaggattgaacattattatgcgtgcatgctttattttgtttgtgtttaaattgtcctttttagttctcagttggatgatagtttatgcattctcccttttatatattaaaaattggatcctattaaagaaaaaaaaatttaactatttttttttgtcctt

SEQ ID NO: 14811 - DNA, 767 bp, Glycine max
ctgaatcaaaccaaaccgctaaccaatttaggttctcttaaaacaaaggcccctcaaaccactttccccacactcttttagtgtgtcgtattttttcctctctttctccacaattaggtcttggaccgacccttttgtgtaagtgcaatggccatggctaagcttgtatgtgttctgcttctggcattccttggcatttccatgatcacaactcaagttatggcaacagattctgcctatcacttggatggaaggagttatggacctgggagtctaaagacctcacagtgcccttctgaatgcacaagaagatgtagccagacacagtaccacaagccctgcatggtcttctgcaaacaatgctgcaaaacgtgcctttgtgttcctcctggctactatgggaacaagtctgtgtgcccctgctacaataactggaagaccaagcgtggaggacccaaatgcccctgaaaattgaaaatataagcataatttcacctacaatttcatatatactactcaaagtggaactataaactatatatatatatataggccattgctatatgtttaggtatcacctactacaatagggtataccatcttgttctctatcatgaaattaattcaattattaatttaatgaaaaaacctatatgttattccctttcctaaacaaatatgagaggggtgttctccttattagtcaatcatctttgtcattgttctttttggagtattatatatagtgaatttggagtattatatat

SEQ ID NO: 14812 - DNA, 653 bp, Glycine max
attaaactgcttatcccggaaaatcacgacgacaacacaacacccaactggtctgtgactgaggcagcaatggtgctgatgacagcttcataagtataatgggcttggtcactgttacatggacaaattatctaaaaaagcgtattccactaagaataaggtttcttcataccttgaaaggtaatcaaataggccaaattttaatgtctccacctcttgcatctctggaccttcctgacatctggagtcctatttcttcatgtcggagtattccagcaatacataaaagctttaatgagcagactactgtagtgcttgatggaaagttgatatccatggaaatcagatcaaaaatagctgctaaggtaagacaaatgaagaaaggcctaggaaaagttcctggattagctgtaatcttagtgggccaaagaagggattctcaaacttacgttcgcaacaagataatggcctgtgaagaagttggaatcaagtctttggtgactgaattacccactgattgtgcagtaacagatgttcaaaatgccatcatgagatttaacaaagatccatccattcatggtattcttgtgcaacttcctctaccgcaacatctagatgaagaaaaagttttggatgctgtatgtctaggaaaa

SEQ ID NO: 14813 - DNA, 413 bp, Glycine max
ggaaaatcacgacgacaacacaacacccaactggtctgtgactgagttaatgagcagactactgtagtgcttgatggaaagttgatatccatggaaatcagatcaaaaatagctgctaaggtaagacaaatgaagaaaggcctaggaaaagttcctggattagctgtaatcttagtgggccaaagaagggattctcaaacttacgttcgcaacaagataatggcctgtgaagaagttggaatcaagtctttggtgactgaattacccactgattgtgcagtaacagatgttcaaaatgccatcatgagatttaacaaagatccatccattcatggtattcttgtgcaacttcctctaccgcaacatctagatgaggaaaaagttttggatgctgtatgtctagaaaaagatgt

SEQ ID NO: 14814 - DNA, 887 bp, Glycine max
aatctccaatgggattcatatttgagtcagcctgggcaaattgcgggtaaaccttctcatttttgtgcttgctagtcatgttgttggctcttgctggtacctcttcggtcttcagagggttaaccagtgtctgcgggaggcctgccatagttccaatatacctggatgcatgaagttcattgattgtggacgtggccatggaaacaatcagcctggcttaagatcagatcagtggatcaacaatacccatgccgtcgcttgtttggatccctctcctgatggtttctcttacgggatttatgagaatgctgtaccacttactatagaaactaatgttgtcaagaaatacgtgtattctcttttttggggattccagcaaatcagtactctagctggtaatctagaacctagctattttgtgtgggaagtcctttttactatggccatcataggaatgggactcttgctttttgcaattcttattggaaacatacagaactttctgcaggctcttggacgcaggaggctagaaatgcaacttagaggtcgggatgttgagcaatggatgagccatcggcgcttaccagaagatctaagaaggagagtaagacaggctgaacggtatagttgggcagcaacaaggggagtgaatgaagaaatgcttctggagaatttgccagaagatctccagacagacataagacgtcatctcttcaaatttgttaagaaaattcggctctttgccctgatggatgagcctatcttagatgccatttgtgagagactaaaacaaaagacgtacatcaaaggaagtaaagttttgagtcaggggggtcttgtagagaagatggtctttgttgtacgtgggacattggagagctttgggg

SEQ ID NO: 14815 - DNA, 532 bp, Glycine max
caaagagttttagaaatctatataccagtcatccacacccccttttttttatttcattaatggaatttcgtttgttgattcgagcaaagttcaccaaaactttgtccaccccatcatttgtcttctcaattctcatcactaacacacaagtgtgcgttgtagatttctcagtttgcaacatatggcttccatcatcatgtcatttgctccagcaactggtagagtctttgcagccacagcggcaaagggtgctggtggaagcaaagaagagaagggtcttcttgattggatccttggagggttgcagaaggaagaccagctgctagagactgatccaatcctcaagaaggtggaggagaagaatggaggcaccaccagcaacactggccgcaacaagaactctgtggcagtgccacaaaagaagaaaggtggctttggaggcctctttgcgaagaactgaaggagcagtgatttattaccttatatttgtttcacctgttttttttttctcaaatgcatgcgttgttgtctt

SEQ ID NO: 14816 - DNA, 603 bp, Glycine max
cgtaaaatagccacaatcaagataagactcttgtggagaactcgtgctatagtgttccatatgtgtgaggtgcagccacaagagaagatatatattcttatcattacatagacacactttattcttcaaagttcaccaaaatattgtccaccccattatttgtcttctcattctcatcactaacacacaagtgtgcgttgtagatttctcagcttgcaacatatggcttccatcatcatgtcatttgctccagcaactggtagagtctttgcagccacagcagcaaagggtgctggtggaagcaaagagaagggtcttcttgattggataattggaggattgcagaaggaagaccagctggtagagactgatcctatcctcaagaaggtggaggagaagaatggaggcaccaccaccaccaccactggccgcaacaagaactctgtggcagtgccacaaaagaagaaaggtggctttggaggcctctttgccaagaactgaagcagcagtgatgatttgttatttaccttacaattgtttttacctgttttcttctgaaatgcttgcactgttgtcttgtccacttagattccaaccacctga

SEQ ID NO: 14817 - DNA, 498 bp, Glycine max
ctcgagccccttcttattcgtcgttcagttcaatttctcgcgagtttttcttccatatgctaccaatcgttgccgttgatccacgcgccggcgaatttcagttttgattctccgccaccgttttggctgttgttactttggttcttccgagagaagggagccatatatagaaagtattttatggtgcgccgatgagcagaactgatgttattggcagtagaaggaggaggattcttctctgcttcggcttcagggtatactaagggcctgagccttctcctcttgggtcagaggaatgaggataaacccatgagagtagcgccgtggaaccagtatcagttggtagaccaagaatctgaccctgagctccagctggcttccacaaagaatcgcctctcccgcggctgtgcctcctttgtttgctttggtcgcacttccgcaggacttgatactccgtctcctcttaaagtgggccctgctcaacaacatgatgtctca

SEQ ID NO: 14818 - DNA, 497 bp, Glycine max
gatgcaacaccagcaacaaaactatccatgtgtggtgcctaacaccaattctcaaagtgaaaaatgcacatatgttggtatggagcagtttcttcacaatcccagcaagttctcctctgatgtccagcctgtactgcaatcatcagggtatacgcctccactatatgctacagcagcagcagcttatatgacctcagcaaatccattttacactaatttgcaggcttcgggtatatattctccgcaatatataggtgcatacccttttagtcccacagctgttcctccatatattgctgcataccctcctcatggttctgtaccacttgttgacggggctactggttctagttttactccccaagcaccagggatttcttctactgcaagaaacatttcacacggagctggaatgatgcatgcaaacaagttttttggacaatttggatttcctctgcagccttcttttagtgatcctatttacatgcaatatcatc

SEQ ID NO: 14819 - DNA, 706 bp, Glycine max
tttttggggtctttctctcctttcttctccttctcgcactgccatttgaaacccctgacccgaatcgtttcctttctcctcatcctctgcctcagtctcccaggatccaatataaatggaaatggaagcttcaaaatttatggctacaacgaactgaagcctctatcagacttagcttgcccgggttagtggaagaatttggggtgaagtaaagtgaaaaattgccttacgttagaaacgtgatcaagttccatggaagaagagcatcaatgttctggaagtggtgaagaaccacagacacaggaaccagatggagaagatcaacagctgcagcatcaatgccaagtacctcgagctgaagagaaatttgtattgcaatttatggattcgatggataactacctatccctctttgatgcagtgtcctccacacttcgacagggatggtttgacttagcaagtgctcgacattccatgggtgcttctcgcattaatagttctttattggacctgaaatttcattcagctgctacaacattgaagataaccaactatgatggtacacagccatgcttcatgttgcgtaaatgggtatcctctgaacatgaaagttctcagttagaagatgagaatgtgcagtcacaagatggtagtagtgtcaaatcttctggtatggttttcttatccctatgcataagcataatac

SEQ ID NO: 14820 - DNA, 912 bp, Glycine max
atgcagacttatgggtggggagtccgtgagttcccaagacatgtgtatgatgctgtgttgttcagtaatgaattggaaatacttaacttgcgctggagagaattgtatccttacataacacagtttgttctcctcgagtcaaattccacatttactggtaggccaaaaccttttgttttcaaaggcaatcgggagcagttcaaattcgtggagtctcggttaacttatggaactattggtgggaggtttaagaaaggagaaaacccgtttgttgaggaggcgtatcagcgagtggcattggaccaactccttaagatagctggtattacagatgatgacttgttgattatgtcagatgttgacgagattccgagtgctcacactattaacctcttgaggtggtgtgacgacgtgccttcagtccttcatcttcagctgaagaactatctatactcctttgagtttctcatggatgatggcagctggagagcttctgttcacagatatcagagtggtaagactaggtatgcacattaccgccagtctgatgacttattggcggatgctggttggcattgcagcttttgcttccgccatatcagcgatttcatctttaagatgaaagcctacagtcataatgacagagtcagattctctcattatttaaatcccgaaagaattcaagatgtaatctgcaaaggggccgatttatttgacatgctgccggaggagtacaccttcaaggaaatcattggtaaaatggggccgataccccattcctattctgcagctcatcttcctgcttatctactggaaaatgctgagaagtataaatttctgttgcctggaaattgcttgagagagtccagatgatccaacagttttattgtgctcatgatggttttaactggg

SEQ ID NO: 14821 - DNA, 681 bp, Glycine max
tctaatacacgcgtacgtaagctcggaatctcgctcgagatgtagagcccttaatccttcatctgcagctgaaaaatatggggattgagttgaatttcggttttgtttgtcactgctatagtgctggaagcatggccatgcattcgcgcaagctaccgtatgccccctctccgaatgaaaacgggctatggtgagcgtcctccggaggtaaaatgcgcaagttttaggcttgcagcgatttcattttcaagatgaaagcctacagccattatgatagagtcaggttcgctcactatttaaatcctgaaagaattcagaaggtaatctgcaaagggaccgatttatttgatatgctgccggaggagtacactttcagggatatcattggtaaaatgggaccaataccccattcctattctgcagttcatcttcctgcttttcttctggaaaattctgacaagtataaatttcttttacctggaaattgcaagagagagagatgatcttggaaagtcatttatgatactggcttgtttctgagcttctagcttgtacagctcaagtgactctcctctctcggaggtttttaactgaggttgtgatgattgtatgtcactcgtatagctgtaagctgtgtcattgtccagtaccatattctttgggaattaattaatttcagat

SEQ ID NO: 14822 - DNA, 531 bp, Glycine max
ccgcctgaataccgggccgcccacgcgtccgcccacgcgtccggcaccccacattgagtatctagtccgtaccaaccaaattcctcgcgaaaggccccagcagaagtacccatcatggctgttagttcttggtgctggcacccttccatttggcaccttgttcattgagctcttctttatcatgtcctgcatttggatgggtcgcgtttactacgtctttgggtttctcttcgttgttttgatccttcttgtggtggtttgtgccgaggtatctctagttctgacttacatgcacctgtgtgtggaggattggaaatggtggtggaaatcgttctttgcctccggttctgtcgccatatacatctttttgtactctgttaactatcttgtgtttgacctcaagagtttgagcggtcctgtgtctgcaactctttacttaggctactcactcttcatggttctagcaatcatgctttctacaggtacaattgggttcctctcttcattctggttcgtgcattacttgttctc

SEQ ID NO: 14823 - DNA, 612 bp, Glycine max
cacatggtatcctgtttttctatatgatactcggtattgctgctggttatgtctcagttcgtatgtggaggacgatcggctttggcgaacagaagggctgggtgtcaatcgcatggatagctgcgtgtttcttcccaggcatttcctttttgatcctcacaaccttgaacttcctattgtggggaagccacagcactggagccattccattttcactctttgtaatactaatcttgctttggttctgcatatctgtaccccttaccattgttggtggctactttggagccaaggcaccccacattgagtatccagtccgaaccaaccaaattcctcgcgaaattccccagcagaagtacccatcatggctgttagttcttggtgctggcacccttccatttggcaccttgttcattgagctcttctttatcatgtccagcatttggatgggtcgcgtttactacgtctttgggtttctcttcgctgttttgatccttcttgtggtggtttgtgccgaggtatctctagttctgacttacatgcacctgtgtgtggaggattggaaatggtggtggaaatcgttctttgcctacggttctgtcgccatataca

SEQ ID NO: 14824 - DNA, 509 bp, Glycine max
agcattacacctcgcgctcgagccgctcgagagctgcgtttgtggttcatatgaatcctgccctgtaagtatcatatcatggcaaccttaacttgacaacatattcctacgatcagtttccaaatggaagcgttttacacaactctctcctcccctgcgtccacgtctgttctcaattttcagggctctgaattgcctagaagaaatctttgtaagaaatcttcacacactatttttgcatcacctacgctgcctaaaccgtttcttcagatttgtggtagacctcagacattgatttataggtcaacccgactctcttctggagcacatagagtaacaatatcagctgaagctggcagacaaaattgggattttggaagatttgttaaaacactgttcttcttcaatgggttcccatctcctgctcagttctttgattttctagttgagaaactatctgatccttcctcaagtgaagtggtcaacacaatgggaacttctgatattgt

SEQ ID NO: 14825 - DNA, 1171 bp, Glycine max
taatactcgttcccacacccatcttctcctcaacctaccctctatgatcattcaccacatttcatttacacaaatcatcaatggcctctcttgcatcctcaagtgttcttttacacctcttgctcatagtttccgcgctccatttgggcgcagcagcaagaattctgagtgaaaaggaccaacaacaacaattgcagttccaataccacaaaggccctcttctcagtggcaaaatctccgtcaatctcatctggtacggtagcttcaagccttcccagcgagccatcatctccgatttcatcacctccctttcctcttctccaaaatccacagcccaaccatccgtcgccacgtggtggaaaggtacccaaaaatactaccaactcataaagtcatcaccaaaactcaccctcactctcggtacccaaatcctcgacgagaactactccctaggaaaatcactcaccaacgacaacattgttagtttagcatccaagggtgcctcgaaagacgccatcaacgttgttctcacatcctcggacgtaaccgttgaaggattctgttccagtaggtgcgggacccatggctcctcggtgggtcctcgcaagttcgcttacgtgtgggtggggaactcggagacgcagtgcccgggccaatgcgcgtggcccttccagcagcccatttacggcccacagagcccgcccttggtcgcgcccaacaacgacgtgggcctggacggaatggtcatcaacgtggccaccctattggccgggaccgttacaaacccttgggggaatggctacttccaaggacccaaagaggctcctctcgaagccgcttccgcttgcacagggctgtacggcaagggcgcttaccctggctacgctggggaactcttgctggaccccactaccgccgctagctacaatgctaacgccgtcaatcaccgcaaatatttgttgccggcactctttgaccctaccacttcagcttgttctactctgccgtaactctaaaactcgggtgcttagcttctatgttagggatacactatgacacatgagattcttttatttgtttattgatggagggttatccggatgaataaatatatgaagttcaatgtaccaaagcaaaacatatagtatatgtgaattcaatttatataaat

SEQ ID NO: 14826 - DNA, 328 bp, Glycine max
ttccacgcgtgcggggcgcttaccctggctacgctggggaactcttggtggaccccactaccggcgctagctacaatgctaacggcgtcagtgaccgcaaatatttgttgccggcactctttgaccctaccacttcagcttgctctactctggcgtaacacaaacgcacggttttagctagcttaatattattgctgttccatgttagggatacactatgacacaagagattcttttatttgtttattgattcattgttatccggatgaataaatatatgaagttcaatgtaccaaagcaaaacatatagtatatgtgaattcaatta

SEQ ID NO: 14827 - DNA, 693 bp, Glycine max
gtttcgtggcagtggcgagtgaagaagctatgcctgatgagtgagtcatttttttctctctggtgggtcccatcctcttctgctctgagaacctttataagtgttatatgagtcattgagaagtgaccccaggaaaaagaaaagaaaagaaaaacttcacttcacttgcatgccaaatgagaacaacctcttcttagaataatttcctcggtgtttaagccttgtcgatttccgaacaccaatccgagttaattaaacaatgagagtttcgacagaaaagttagagacagagccggagagcaaaaagataaaacgcattcgtggcggcggcggcggggactcgagcaataagcaccctttgtaccgcggcgtgcggatgcggaactgggggaaatgggtgtcggaaatccgcgagccgcggaagaagtcgcggatatggctaggcacattcccgacgccggaaatggcggcgagggcgcacgacgtggcggctctcagcatcaaaggctccgccgccattctcaacttccctcactttgccaactcgctccctcgcccggcttctctcgcgccgcgcgacgttcaagccgcggcggccaaagcggcgcacatggacccttcttccctctcctcccttgtctccgcaatggacttgtcctctgcctctgacgagttgagccaaatcatagagct

SEQ ID NO: 14828 - DNA, 546 bp, Glycine max
tcggtttcgcgtacgaaaagaaaagaaactgggagctattgaatttcacttcacttcacttgcatgccaaatgaaaacaacctcttcccagaatcttgtcggtatttaactccctcgatttcacaacaccaataacaatgagagtttcaacagagacagagccggagactaaaaagataaaacgcattcgcggcggcggggactcgagcaagcaccctttgtaccgcggcgtgcggatgcggaactgggggaagtggggtgtcggaaatccgcgagccgaggaagaaatcgcggatatggctaggcacattccccacgccggaaatggcggcgagagcgcacgacgtcgccgctctcagcatcaaaggccccgccgccattctcaacttccctcacttggccaactcgctcccccgcccggcttcgctggcgccgcgcgacgttcaagctgcggcggcgaaggcggcgcacatggagccttcctccctctcctccttggtctcgcaatggacttgtgctctgcctctgacgagttgagcaaatcat

SEQ ID NO: 14829 - DNA, 1399 bp, Glycine max
cgcttccttctgattccacaaccgaccttcaaattccggccaccggagttctctctcggttttccgaccggccagccaatctgcaattccgattttgcttagatctctcacgaatcccctttctgcaccttcctagggtttactagacaccatgactctttcggacgacgaggacgagaatctggctcaatttctggaatcagaagtcctctcggaggtatctgacaaggaagaggaaaatgtggaggaaccgaaagcaaagagagcgcgcttagaagaggatgagattactaagcaaaaacaaagttctgattcattatctgcgccgaagaacattgttgtcaacaacggggtggtgcccagaaggattgagactggttatttcagtcaaattccaccggagcttttcaatcatatccttaaatttttgtcctccgaggaccttgtttcttgttccttagtttgtaggtttttgaattatgctgcatcggatgaggcattatggcgtcgcttgtactgtatgcgatggggcattcttccccctacaaggaagttaagggaatgcccatggaaaaagttatacattcagcgtgatggagaggacatggttgaacttgttagaagctgccaaaatgagtttaaggagtactacattcaaatgcaagcagctaagcgaagtcaagcacctcatcttcacagttgaaggacgataggataatccttgacaaaacattagctgatcaagtgtcatcatggaaaagcagcaggggtctaagtgatacagtggtgactgatcatgcttgttctggggaaacgtgctcttactaccatattggagatgtatttatttgtgagaagactggacaagttcatgtttgtgacgatacatgtagagaagtagttatggatcccacaaacgagcttttggtctgtacaatatcggggcactgttttgatagattattgtcaccttcggaaatggagcctgatactgagcagcagcaaggtggtgtgactgatgaggccgagccatttatgggatctggccgttttgcacgagcttattcactgggatacaattgtgctgatgaaaaggagcttgaagctacattgaggttttgctgatccccactttgagctttcagtagtgtggatgatcctatgtctcatcatttacctatctagtatttaacattaaatattttacaatttctcatggctgaagaatatttgcttagtctcagattgtaaaactccgcttttgtgttgtcttttatatcaatagtgtatcatgtatgccttaatgtatagttgaatttcagtaggcaatagttaattttctcgatactgctattgttgattctctatgttacaaaagtgatcattcctttgacatttt

SEQ ID NO: 14830 - DNA, 486 bp, Glycine max
  unsure (1)..(486): unsure at all n locations
catcaatcacctatcctttttggccgttcctttctgatcgaaagccgtccttcaaattccggccggccaatctgcaattccgattttccttcgatctcttgcgaatcccctttctgcaccttcctagggtttcattgacaacatgactctttccgatgacgaagacgagaatctagctcaatttctggaatcagaagtcctctcggaggtctctgacaaggaagaggaaaatgtggaggaaccgaaagcaaagagaaagcgcgtggaggaggatgagattactaagcagatacaaagttctgattcatcatctgcgcccaagaacattgttgtcagtaatggggtggtgctgagaaggattgagactggctatttcagtcaaatcccacctgagcttttcaatcatatccttaaatttttgtcctccgaggttacctcttggcactntttttttgtgcgcgtgtggaaatgtgtttttttaatagt

SEQ ID NO: 14831 - DNA, 574 bp, Glycine max
gacagagccacgggtgtggggttcacacgtgcgaggatgggagtcggtatgttggggagggtaagtggggggttaagcatggccatgggcattaccatttcagaaatggagatacatatgcgggtgaatactttgcagacaagatgcatggttttggcatatatcgttttgcgaattgccatcgttatgaaggagcctggcatgaaggcagaaggcaaggacttggaatgtatacatttagaaatggtgaaacccaatctggtcactggcaaaatggagtccttgacattccaagcacacggaacaccacttctccagtttctcctgttggtgtctattattccaaagtactcaatgcagtgcaggaagcaagacgagctgccgagaaagcctatgatatggctaaggtagatgaaggggtgaacagagctgtagcagcttctaatagagcagccaatgcagctagagtagctgctgtaaaagctgtacaaaaacagaattatcatgttagcagtgaaagcttctcaattcctgttgtgtaaagagtatctcagctgcttttatattagaagag

SEQ ID NO: 14832 - DNA, 412 bp, Glycine max
ctctagtggtgctaaagtcgaacttaatcactctgtttctctcgttaccgttctctatctatgcccatctcttcaggtaagcaataatttctgtttgttgtttatatgtcgttttacaccactttctgctctcatactcgttcatcgatgggtataaattagtgtgttgaaattgcaaaacagaaaatgaaaaactggtgttgtgaattgaggcatcgtaaattgactctttaagttgtcctcaatgaccaaacttaaggccactcctattcttctattctgttattaaaattgtcggagtatttctttgtggttattgtaatattctcattgtatctcttaattagagagacaactccatggccatgagtttcttgtcagcatatagaatacaatgatgcttaatatcata

SEQ ID NO: 14833 - DNA, 340 bp, Glycine max
cttgaatattcattgtcaaaggttgtttttgtgagatagaaagaagagaggaagagcaagttaagcaatcaatcatatcaaggaagcaattatggaaggtttgatcccatatcttattcatgcaatcaagaagcaaaagcctcatcaccacaactacaggagctactctcattctgaaagctcaaaccgcagctaccacatgctattggcgtctgaatccttcacaggatcttctcacagaagaacaaggtctgattttcagccccccacaagtgagttcttagagcagagatatggtgttgatggattcttggtcagccccagagcccaagttactact

SEQ ID NO: 14834 - DNA, 616 bp, Glycine max
acgagggcatttccatgtgatctctagaggttgaaaaaatcaatgcgaggtcgacaggaaatcctcgcctccctcgcatgatgttcctgagtttcaacatgattagcggcggcaacacactccaaaggtttgaccctgtcgcttgcgtttcttctgtccctcttctcctcgcacccaccacacgacctactttccattttccttccccttttctctccaaacccaaacccacttacctcttcacttctttttcttcttcttcttcttcttcttcttcctttttctcttccaccacgccaccgcgatccaccatgctgcaccacgaccctcttgtctctgacgtctacgccaccgccatttccggcgtcgttgccctgtccttcctcagattgttccaagatactgcaaaacgagacctcttcgaccaggtgggtcttaatgtgtgaaagattgagttgtttttgatctagggtagggttaagttgaaggaaaatgatattggggtgtcgaaatttgttgcaaattacaagcttggtggaatcgacagtttttgcattcaatttattgtacacgtgttggattgattacagacaagcattagtggagtgtttttcat

SEQ ID NO: 14835 - DNA, 503 bp, Glycine max
tccaaacccaaacccacttacctcttcacttctttttcttctgggtcttcttcttcttcttcctttttctcttccaccacgccaccgcgatccaccatgctgcaccacgaccctcttgtctctgacgtctacgccaccgccatttccggcgtcgttgccctgtccttcctcagattgttccaagaaactgcaaaacgagacctcttcgaccagaaattaaataggaaacttgtacatataagtattgggctgatattcatgctctgctggccgctattcagtactgaaacttgggcatctttctttgctgctctcattccgggaatcaatatatttcggatgcttgttattggacttggaatattgaaagatgaggccacagtgaaatcaatgagcagatttggagattacagggaacttcttaaaggacctatgtattatgccgcaactattactttggcagccataatatactggagaacttcacctatttccattgctgc

SEQ ID NO: 14836 - DNA, 640 bp, Glycine max
cccacgcgtccgcccacgcgtccgtacagtttcggagtgttgctcttggagctgctcacaggaaaggctcctacacatgccctcttgaatgaggaaggagtggaccttccaagatgggtgcaatcagttgttagagaagagtggagttctgaggtgtttgatattgaactccttaggtatcagaattctgaagaggagatggttcagttgttgcaacttgcagtggattgtgttgttccataccctgataaccgtccttcaatgtctcaagtgattcaacgcatacaagagttacgtaggcctagcatgaaagaggctactcaagaccaaatccaacaacgttgatttgatcaatgatatagatgatgcgtcttctagatgagtttgttatgggtttgtgtacaaggataaacttctacatggtcattattgtcttggacaatctctatgtgacatataatcacatttttctcaatttatgaaaaaaaaaggttaataacgtgttacatgaagatcagcctagaactatatgatttcagaccatgtaataatttctccaaaaacatggatcttcttggctttgtcaagagccccatattttgcttcctaaatcctgtgcttatgttttattttgtttttt

SEQ ID NO: 14837 - DNA, 436 bp, Glycine max
aggaggaggagaacgtagagtgaaagagaggttaacaataacaatggcggcgacagagagcacagtaacttcaaaccctagcaacagagaacgaccaaagccaaagccaaagctactagtcataacgggccccaccgcttccgggaagtcgaagctagccgttgatttggcctcccacttccccgtcgaactcatcaacgccgattccatgcaggtctaccgcggcctcgatgttctcaccaacaaactccctctctctcaccagaacggagttccgcatcatctcttgggtaccggaagccccaacgtggaattcactgccaaagccgttcgggattccgctattcccgtaagtctctaacgctgaagaatgaagagaattagtaacttattattattattattattattttagtcctttgattggtttatatct

SEQ ID NO: 14838 - DNA, 828 bp, Glycine max
  unsure (1)..(828): unsure at all n locations
gtgtctatgcaaagttctggaatcaacccctaaggtccccccactccttcaaaaatcctctctttttatcctacactctaatcatagtcatcatccaccacctccatcttcccccagtaacaacataacataacattcagagaaaaacaaaactatcatacccacatggatttgcaatgaaagtgagagagtccaattatgcgaacgctttgtgatgcttgtgagagtgcggcggctatagttttctgcgccgctgatgaggctgcactttgtcgtgcctgtgatgagaaggttcacatgtgcaataagctagctagtaggcatgtgagggttggtcttgcaagtccaagtgatgtgccacggtgtgacatatgtgagaatgcaccagctttcttctattgcgagacagatggaagttccctttgtttgcagtgtgatatgattgttcatgttggtggtaaaagaacgcatggaagatatcttctgttcaggcaaagagttgagtttccaggagataaatctagtcatgctgaaaatccggcttcacaagcattggaaccaggtgaggctaaaagaggaccaaatccacttcccaagctacaaaatgggagagaagcaacaaaatcacaggatgcctatgggtccaacaccaggacctgatgctgatgggcaaaccaagatggaaactaaaatgattgatttgaacatgaagcctaatagaatacatgaacaagcatcaaataaccagccatanatggtgcaactaggcaaatgagttctgacaggatcctaaaccaaaaatctaccaatggcaaaaggcttcgtttg

SEQ ID NO: 14839 - DNA, 411 bp, Glycine max
gagatggaccatgggaaatgatgagggaatttgatgataacatcccttctcgggcatttgacaattttcagtttgtgaattttactgaaataatgacaaggaatgtagattcaaccagaaaagagacagattttgccctttcagctttgatggagataccttcccaatacaaggcaaccctagagcttggcatattgggttcacggagggggcattcaccagatagggttgctctacccccacctctttatagtagaacctcttccagcatcagcacaaactctacagggtcaaacagttttcaccaggggacacctacacatactagctatgatagcggtgttcacacagagacatcatcaagttctttatacgataataaggtttgccccatttgtcttaccaatgcaa

SEQ ID NO: 14840 - DNA, 431 bp, Glycine max
gtgttcatattgtattcttcctctcattccctttccccctttgggtccccctatttcaatcccttgcaaagatgtgtaattgaatttgcatcatggttcgtatatttagaattatgcgaaccagttgaaaactcgaaccatcctgtttgtgtatcatgatgatgtttctagtttccccactttcccctttttggtttgtggcgcggggaatgtcatttgtgtaatattttatttgttttcaagttgttgagccatacagctattgtgaatggttactatgtagtgtacatgagaattttgagttctagggcattgtctatagtggagttgatataaccgacagttcaatacatgcatgaaaaaaaactattagtaattcattagggtaatgattgttagtataacttaatgttatttttctatgtaagaat

SEQ ID NO: 14841 - DNA, 365 bp, Glycine max
aaactttcaaaccccatttttattttttttatctctccttctcgtgtgcctttctagtgtcttggatttcctggttttctgtttctttctgggtctttgttgagagatatttctcccttcgcagttgtggtgtgatgctttcagatccttcaacagtgttggttgattgacaccattgttctcttatgcaaaatattgtcatcaaaggctctcatcattgctaagctcctgattcaaaaaagacgtccatgaacaacaaactactttagactacaactcagaagccaaggtgagactattttagccaacaaatccttcatagtgttccattgtttgctatcttcaagcatatcagatgccaagat

SEQ ID NO: 14842 - DNA, 828 bp, Glycine max
agacatgataatgcacagccacacaaaatagaatagaaagagcgatggatgtggcgaagaacggttagcggtgtgggacttgttgacatggcttcttctacactcgctctgactctcagcctctccaccaccaccaccacctccaccacctcctactcctatcaacaccggtttccatgtcctagaataaagttattctcttccaagcaccgctccttctccgtctcagcttctgcttccacctcaaattcgcttcaggctctcatattcgactgcgatggcgtgatcctcgagtctgagcacctgcatcgccaggcctacaacgatgcctttgttcacttcaacgttcgctgcccctcttcttcttctccgggcccactcaattgggacgttcaattctacgacgaactccagaacctcattggtggaggcaaacccaaaatgcgatggtactttaaggaacatgggtggcctacgtccacgttgttccagacgcctccgactaatgatgaggatcgggccaagttgattgacactcttcaggattggaagactgagagatacaaagaaataatcaagtcaggaactgtaaaacccagacctggagttctgagattgatggatgaggctagagatgcagggaaaaagctagctgtttgctcagcagcaactaaaagttcagttattctctgtcttgaaaaccttataggaattgagcgctttcaaggccttgattgcgtccttgctggtgatgatgtgaaggtaaagaagcctgacccatcaatatacgtgacagctgccaagaagctaggtatatcagagtatgac

SEQ ID NO: 14843 - DNA, 434 bp, Glycine max
tccacacaaactataatagaaagagtgaccactcactaaaacgatcgatgtggtgaagaacggttagcagcacatggcttcttctacactcgctcccactctcagcctctccaccaaatcccactgctatctccccaacaccaaacaccggttttcatgtcccagaataaagttattctactccaagcaccgctccttctccgtctcagcttctgcttctgcttccacttcaaattcgcttcaggctctcatattcgactgcgacggcgtgatcctcgagtctgagcacctgcatcgccaagcctacaacgatgcctttgttcacttcaacgttcgctgcccctcttcttcttctccgggcccactcaactgggacgttcaattctacgacgaactccagaacctcattggtggaggcaaacccaaaatgcgat

SEQ ID NO: 14844 - DNA, 455 bp, Glycine max
attggttcctgtatattaaaatggtttctcatgaaaagttagaacttgaagtccaataaatgcattgttttggacaaggtgctatactaaccacctacaaaattggtagcagctctaaacgaaagcaaaatagaaataagaacttttgaaatactttgatggatatggttctgtctctatccatctgtgcatgtgttgtctggattttgtatatggctaggggccatgttcactgttgaaaatgttgttatttccatatatattaatatattggaagtttctgatcacaaaacatagctttggctgctaatgggtgagaccatttgagttgttttatatggctgaatatggaacacattatactttagtaatagttactggctattgtttgtaggtgtcagagaagctcccagagtcctatgtgtgggcaacctatcagcttgagggatgctacc

SEQ ID NO: 14845 - DNA, 843 bp, Glycine max
gaacaagagagagggcatcaccaaagaacacgttcactctcgattttgccttgcaaactgcgatttctctgcagtttcttctaccctccaactctgacctttctttacgcgattttggctttcatcaacttcttattgaaatccttcctcagtcttctcccattttccagagttcttaaaaattgatgcttccttacaagtctttctgagcattccgtttccttcctccagggaaaagttagcgtgtctttaggtcacaggattttgagagatttactttttaatctgcctctgaatcaattctgcaagaagatatataatgtttggttcaaagaaatctcctttgaaggttgctaaacctagctccgttgagtcttggacgaatccatttgattctaatgatgagggaatggataccaaaaagtatagttcctctagaaaaacttcttcggagcgcgcacttgctacactggaagttaacaccaacccctttgatgatggcactgatgccaataagaaatcttcatcaacttcgtatgcctttcaatctgccaaccggaacaggtataagaatgatttccgtgattctggtggactagagaatcaatcggttcaagaattggagagttatgctgtttacaaggctgaagaaactacaaattcagtcacacactgtttgaagatagctgagtacatatgagaggaggcttcccagacacttgtcacccttcatcaacagggcgaacaattttccaggagtcaccatgttgctgctgtcatcgatcatgatctaactcggggagatatactcttgggaagccttgtgggctcttttccaaactt

SEQ ID NO: 14846 - DNA, 538 bp, Glycine max
aagctgatgcagtaattttatccatggtacgatcaaacacattgggagctgttggattccttggggatagcagaagaatcaatgttgccatcacaagagcacgcaaacatttagctttggtctgtgacagctcgactatatgccacaataccttcttagcaaggcttctgcgtcatattagacactttggtagggtgaagcatgcagaaccaggtagttttggaggatatggacttgggatgaatccaatattaccttccattaattagtgtgcaacagtagcacgaaacaagttcctatttaatccaatattacttggaggatatggacttgggatggataggttttttctttaaacttgtatagttgtatagcaattcataaattcaaaattgtgtagcgtatcaagtacgtacagaaaagttcattgaaaccccaagattggtatatgacgtgatacatttaatgcatgtttggtttcacaattgaatttgagtctaaatatttcgtatcaggtataattgtaaaaaaaaattga

SEQ ID NO: 14847 - DNA, 1293 bp, Glycine max
tgttccatttagctagatctattttattctagctacacaccaattatatatattcccagaagatttattcgcttaccaataagatttggagattctgaacatatatttggttcttattatatagactcatcttccttcttttttttccatttttcaattccatttctcggtgttatgaaacctgttatcagatcttggttgccccacctccatttcttgctgtgttgttgttcccctcctcataaggaccattgtataatacagattcttcattcttcattgaatgacagctgtttaggttgactgcacggttgtgttgctgttctctcctctttattggaagccaataggagagagagagttagcattattaagctactgtgtgaggcttatttccatggttcattcgtgtggctgtctacctaatttgttctgatctaactttggcctaggaggcccaccattgggttttggtgggctttcattgaaccaataaaaaacccatctttaaaaggtgttttgttttgaaggttccaatttgcttcctgtgtttctttccaacaaggaagggagggtgtgtaattaatttgtgtcaagtagtgagtgaggtcatttttggttttgcttttccccttgttagccattggtgttgcacaattggcattaaggttctattatcacatatgccaaacttgacctgtgaaagatatcctaattcctaagtgctaatgctactctactttatcacttgcatctccttccttctgtttttaaagcctctcctctctctcaaaccactcccgtcatgggcaagtgaagtgaggttgatctcccctttgttttacaaagacttgtctgtgaagtccatctctaagttgtttaggaaccgcctttggcttggttttctttgtcaaattcccacaagaatgtctctaatgaagaagtcatgccaggtggagaatattgaggactcccaagacatgtcagtgttggacttgccagagctggtgttagaatgcattcttgaaaagctccctccagcttcactttgtcaaatggccggggtttgccgttccctaagggagagctgtgtgagtgatcacctttgggagaggcacatgaaacagaaatggggcagagttattggtcaagctgcttatagggagtggaaatggcatgctgcttctaaagggaatgttggaactcttagacatggcaagcaaaggagcttgttgaggctggtgtcacttagttggcctttttcatggatgagaaccaaggtagatgcaaata

SEQ ID NO: 14848 - DNA, 437 bp, Glycine max
cggctcgaggtcaatctaaacagctgttattcaatgaagaatctgtataaattgactgcacggttgtgttgttctctcctctttattggaaaccaataggagatagagttagcattattaagctactgtgagacttatttccaaggttcattcgtgtggttctctacctaatttattctgatctaactttggcctaggaggcccaccattgggttttggtgggctttcactgaaccaataaaaaacccatctttaaaaggtgctttgttttgaaggttccaatttgcttcctgtgtttctttccaacaaggaagggagggtggtgtgtcattaatttgtgtcaagtattttggttttgctttcccccttgttagccattggtgttgcacaattggcattaaggttctattatcacatatgccaaacttacctttgaa

SEQ ID NO: 14849 - DNA, 398 bp, Glycine max
caaaattcatcagcctttcacgtaatcttctctcctcttctctacgcgcactttgcgagatactcactttcgaaggaatccactattacttcgtaagctaaacaaaacaaaacaaaaattactgtgttttctttgggatcgctctgaatatctcttaagaaaagcaacacaacacgcagatacggtaccctttcgttgggaaatagcaatgggggatggtaactatgatagaactttgagggagttctgtattccggattacatattagtgccgggatctgacgtgagaagtgtttcacatgtacctgcttgccctgtgattgttttcattaacaccaaaagtggtggccagcttggaggggagcttctggtttcctatagtacactttcttaacaga

SEQ ID NO: 14850 - DNA, 506 bp, Glycine max
gaccctttaacaatgtagtccttaaatttaacatggtatcagagttggttgatctcgttctacttattgttgccctctgtcatctgctaccgtctgttatctccggccagctagtgttacctttctccagcgggttggtgcgccttgtcaagcacagtcgaacccaagtgttttggatctagattttgacccagtaatgaagagtgggttctcttttttcttctcttgtcattttcttttctttgtcagatctacttttcttcggtaggcctttgttgtcaccaatgccaccattgtactcgtctccctttagcaagtctaacctagtggtcagttgctattgcctttgccagagccgtcacaccgatcgctagagttgccgtcgaaattgtcattgtttgactgttattttgttgttttcacctaaagattccacttctactttttcctttcttggtgttagtttgggggtttttcaatcctccatttacgcaaatatagacggt

SEQ ID NO: 14851 - DNA, 497 bp, Glycine max
cagccctttggattttggccacacatctctgatcactctatagaccacttcgttgatctatcattcttcatcaaccaaccagcctccaaagtcagtgaatagtgagtgagtgagtagcagctagcaatggaaattactgccatggcttcttcagctactcctccacgaccttctcttccaactccttccacttctccacacacagtagtcaccaccacctttagcaaacctcaactcagacgctctcacgtagcactaccaacttcaaccaccatttcattgctcgctctcttcgcccctccaaacgaagccaaagccgctgtcagcatcgccaaggaccagattgtctcttctctcacccaagtggagaaaacgctggatcaggttcaggaaatgggttcgggtgtgctggacacggcacagcgtgttgctgaagtgatagggaacgctttgaagcctggcatcgaaacggcgttgccaatagttcagcaggccgg

SEQ ID NO: 14852 - DNA, 345 bp, Glycine max
  unsure (1)..(345): unsure at all n locations
gaaaactctagcagcccttaagattttggccacacatctctgatcactcgttgatctatcatccttcatcgaccaaccagtctccaaagttagtgagtgagagagtagcagctagcaatggagatttctgccctagcttcttctgctactccaagaccttctcttacaactccttccacttctccacacactgtagtcaccaccaccttcagcaaacctcaactgagacgctcccacgtagcagtatcacttcctacctcaaccaccatttgagtgctcgctctctcagtactcngaagcgcaagcaaagccgctgtcagcatcgccaaagaccagattgtctca

SEQ ID NO: 14853 - DNA, 329 bp, Glycine max
tagctgtagttcactgcttgaaaaattgatgagacacaagcatggttgggtgtttaattctcctgttgatgttgagactcttggtttgcatgattattttactatcagcactcatccaatggacttgggaactgtgaagacaaggctgaacaagaattggtacaaatcaccaaaggagtttgcggaggatgtgagactcacttttcgtaatgccatgacatataatccacagggacaagatgttcatattatggcagaggttttatcaaagatattcgaggacagatgggctatgatcgagtcagattacaatcggggagatgagatat

SEQ ID NO: 14854 - DNA, 387 bp, Glycine max
gaaaacgacgccgacaaacagcgtcgttccaccagcgtcattgccaagctcatgggcctcgagcccctaccagattcggagcccggacctgggcccgggcccgtggcgaagctccagagatccgcgtccgagtccagagtccccagagatccgcctctgcccctaacaacgcagtgtcgtttcttcgaccccaacaatttcttttctgcccagttcacaaccaatgtggtctacgagaataacaacaacaacaacgctgccatcgaatcacgattcgttaatagcagagtcgccgcagatccaccgaaacagaggttaaagaagagtttctacgactccgcggatttcttccccgagccgaaacacaccgtttcggtgtacggagag

SEQ ID NO: 14855 - DNA, 493 bp, Glycine max
caaagacaatgttggattttttctcttccactagaactacatactacccttctatagttctgttgttataggagctaattaactgctccaacaaccacaaagagactgaaagaacagcaatggaagctgcattatgcagtgcacttgctctttcacccaatcaagtattcaatgcagcaaatcctggagataaaaatgttcctttgaaatatagcaaagatcggagtgttgtaatgacagtggcagccactggaatattagggaaaggtggtgggttgttggagaggccaaccatagagacaacatcacctggtcgggaatctgaatttgacttaaggaaatcgcggaaaacatccccaccttaccgagttttgctgcacaatgacaacttcaacaagcgagaatatgttgtgcaagtgttgatgaaggtgatacctggaatgacaattgatagtgcggttaacatcatgcaggaggcacattataatggact

SEQ ID NO: 14856 - DNA, 404 bp, Glycine max
  unsure (1)..(404): unsure at all n locations
cacttgtttcttccctctgttcctgttctctaattcctttttcctcatcatttccgttgacatctaatcactatggttttgccaacatattcagggcccaaatccaatcctcagcttccaccaatatttgcacccaaaaaatcgacaccaatctcttaaccatcgctgaatccttctacgaggatgagctctgggccgctgcctgtctccgcgtccgttccttcaatcagttccgccccgacgccttcggaatcctattgtgttaggatcatacgaggtacttggctgaccgcgagttcgaagcactgaaggagcgtgtttcaagganaagaatgggcttcagaagagtctcttgcataaatgcttcgcttccattgccccatattgccaccctctccgatgat

SEQ ID NO: 14857 - DNA, 350 bp, Glycine max
ttgacaacaaaatcctctctgcttccaacaacatctcaaccatgggtacttgggttcttcaacaagtgacctctattgattggaattggaaccatgaatcctacccagactttcgtgatttctctgttatacccttcttcgctctcttcttcccctcccttcgcttccttctcgacacgttcctattcgagcaagtggccagacgattgatttttggaaagggacacaagaagatggattttcaaacacttgagagaaaaaagaagattagcaaatttaaggaatcggcatggaaatgtgtttattttccatctgcagaaatttttgctttgggagtaacatatgatgaa

SEQ ID NO: 14858 - DNA, 698 bp, Glycine max
cttgctttgtcagctagagattctgtagtttatttaggaggaccttcttgggaagtggggttggggagaagagattctactacagcaagcagaagtgatgctaataatagcattcctgggcctttcctcagtctaactgctctgataaacaattttgctaatcaaggcctctcagttacagatttggtggctctttcaggggcacatacaattggcctggctgaatgcaaaaatttccgagcacacatctacaatgattccaacgttgatccctcttaccgaaagttcctgcagagcaagtgccccagaagtggaaatgataaaacactcgaaccccttgaccaccaaactccaatccattttgataatctatactttcagaatttggtgagtaagaaggcccttctccattccgatcaggagctgttcaatggcagttctactgacaatctggtaagaaaatatgctaccaatgctgctgcattctttgaagactttgccaagggcatgctcaaaatgagcaacatcaagcctcttacaggaagccagggccagatcagaatcaattgtgggaaagtcaattaaacgttagcaagtgatgatgtataatatgtttttaatataaattttatttccctcctccaaagttatgtcgaataatttgatcctcgaaccgtcaagcaacctggtttatcatc

SEQ ID NO: 14859 - DNA, 501 bp, Glycine max
ctcgagccgaatgagtttcttcgatttcatcgtgttgatgatagggtcgctctttctgttcaaagctttcgattttactttctgtgtctccttcttctgcttcttttgattcccccaaatcttcagttttaaaaaccctaatctgctgccatgaggaagaagctcgatacccgtttccctgctgctcggataaagaagataatgcaggcagatgaggatgttggaaagatagcactggctgtgcctgttttagtttctaaagctctagaactatttttgcaagatctttgtgaccgcacttatgaaataactcttcaaagaggagcaaagaccatgaattcattgcatttaaaacattgtgtacaaagctataatgtctttgactttctgagggacgttgttagcagggttcctgactacggccatggccatggccatgctgaggctggtcctgatgatcgggtcattacaaaaagaaggaaagctattggtgatgatggt

SEQ ID NO: 14860 - DNA, 406 bp, Glycine max
actgcctacgcgtccggctgaatcaatagtaatagaacctcgttggtttctgagacagccagagccaccttcggatctgagagatcgccacgcacgcacgcacgcttcctttgattttgtcttccgcttcgtcatttcctattctcagcttccaattctcctcctccttcttctaattctacttcttttcgagggttttcgttcctctgtgcctgattgatccctaattcgataccatgcggaagaagctcgatacccgtttccccgctgctcggataaagaagataatgcaagcagatgaggatgtcggaaagatagcgttggcagttcctgttttagtttctaaagctctggagttatttttgcaagattcttgtgaccgcacttatgaagtaacccttcagag

SEQ ID NO: 14861 - DNA, 418 bp, Glycine max
ctttttcccttgaaagctcaaaattgttcatgaaagcttcgtttccgattaacaattctttgaataatagagactttactttctgaggttttaacccctttaaggctttccctaacttgaggctgtgctcatttgctgagagttttgctgcaaggacttgacacaaattgtgtaaatgtctgtggcttttaccaacctctcttggtggttgtggagtggaaagcatcaagagccaagaatcccaaatgggccttctataaattcttcggccgattcaaatttgtgggaatcggatgttttgaggtttcctttggttcaggcgaatgtggggtcctcatctagaaaggtgaagcgcaaatggcatagtaggggggagaggaaggtggatagggaatatgatgttgttctggttccatct

SEQ ID NO: 14862 - DNA, 591 bp, Glycine max
gacttcactcaattaactcttccgttccttctttctttatcatcaccagtgttccatatttcagagaaaatggctttatcatctccctctctagtgttcaccgtacagaggtgtcaaccggagctggtggctcctgctaaacccactcctcgcgaagttaaacccctctccgacatagatgaccaacagggcttgcgtttccaaattccattcatactattctatggtaatgaaccatcaatggcagggaaagaccctgctaaggtcattagagaggcacttgcgcaaactcttgttttttactacccttttgcgggtaggattagggagggacctggtagaaaattggtggtggattgtactgagcagggtgtcatgttcattgaggctgatgcagatgcaacacttgatcaattgggtgacacacttcaacctccattcccatgcttcgaacaactcctttatgatgttccaggctcggagggagttattgactgtcccctaatgctctttcaggtgacacgtttcaagtgtggtggttttgccctagccgttcgcttgaaccacactatgagcgacggagccggcata

SEQ ID NO: 14863 - DNA, 435 bp, Glycine max
  unsure (1)..(435): unsure at all n locations
caaaaaaaaaatcctccactgaaggttagggtttggagagtggcacttaatttgcagcaatcacgaacaccacctcaaactaatgcagcttctcgatactcactccattcttccaagccctaattaagttcgcttaatccaatcagcaattacaagcatcgaagttcctccacagttttaatctgctatggcagcgagactcgcgattgagaggagcaccagatggagattgagcagcgttttagggttcaataggttgattcagtcggtgccccaatctcctcctttagctggaagcattgatcttggggttcggcgccgcaacccgttttgcccgagttttcccccccaagtttctcttatgggagctccatggagctcatggctgtcncanaacggcaggtttctccccataaaagaggaataaggaatgga

SEQ ID NO: 14864 - DNA, 334 bp, Glycine max
  unsure (1)..(334): unsure at all n locations
ggaatccacgacgaaacttatctctcacaccgccggaaacttcgccggagtcttttgccatggcaaggcctccgctattcgaccaatcgccccgccaattcttcccttcgttgccgaacctctctttcgatctcgccacggtgtcttcttcgaagctctcggttctcttctctccttgctccactccggagcacgagatgcttaccgccagtttttcgtcgattccatgtcgctcagtcaagatattctaggggtggtcgtcactcaggtgttaatggatcctcgagatccgcngtgacgctcaagtgtggttcggattccttctcgggagttg

SEQ ID NO: 14865 - DNA, 401 bp, Glycine max
catgacttcaacttcaacaaccagctctttctctctcacttcttctcttgctcttatcaaaacaaaccactatgactaatactaacgataataatagttacaacaatacactctagcttctagcctgctacctttccttatcaccagcaccaatggcttcagacgccaaactctcctcttctgagtccctcaacggtttgaaattcggccaaaaaatctattttgaggatgttggtcttgctactccagccacctctcttacttcttcttcttcttcttcttctgctgctactgttacttcttcttcttcttcaaggaaaggaacaagtgggtctgttcaaccagctcaacctcccaggtgtcaagttgaacggtgcaaagtagatctgagtgatgcaaaa

SEQ ID NO: 14866 - DNA, 1039 bp, Glycine max
gacaggtaaatgtttcatctttatgcttatcacttccttaggacgctcgtttaagcttcttctatgttttgaaagcttgctacgtcagctgatttcccctttctccaggaatggcttatgttccacatggaaatgcaaatttcaactctttattcctaaaatttgcaatttctcatgtgggtatttcttctttgcccttcttgcacccgggactgaaatcttgtacagtcttcaacagaggaacactcattcgccagtgtttaaatggaaagcggaatttttctctatcagaaaagcgatttaattgcaagttttcaaagaaagacagattctttatccctagaagtagtagttcttctaactctagtggaagtacggatgaaccctctaatgagacagatgtaaagacaccatttggatatacaaggaaagatgtcctattaattggacttggagttactttacttggcattggcttaaaaagtggactggagtttgttggagttgactcactgcaagcaggaaatgtagttcagctagtgctggttttgggccttacagttgggtggatctcaacatatatcttcagagtttcaaacaaggaaatgacatatgcacaacaactacgtgactatgaaagcaaagtgatggagaagcggttagaatccctaacagaagcagagctacaagcactgcttgaagaagttgaggaagagaagagtcgctagctagtggtacgcaggtgaattggagtagcttgtttgtatatatacactgaaatgaagttttgccaaagtaattgaaacagaaatttcaatctatatggactagttcagaaaggttttagctatgctttcttcaatttactcagacaaaaggatgagacttcaaaatccttagtgttctgctcacaaaaaattccagatggaagcaactctgtaagatatgatgataatgcttcttttaagttcagataattttgtgactttttttggagccgttcaccactgcacctcatgctatgatgaataatgttgaa

SEQ ID NO: 14867 - DNA, 321 bp, Glycine max
gggacacgtttgaacattgaacttgaacttgaacaacctcatctccaatgagttaacgttctccactcgtccctgcttctgcttctgctcattcttctccttccacagggatggcttatgttccacatggaaatgcaaattgcaactctttattccaaaaatttgcaaattcccatgtgggtatttctgctttgcccttcctgcaaccgggactaaaatcttgtacagttttcaacagaggaacactcattcccctgtgcttaaatggaaaggagctttgctttatcagaaaagggatttaattgcaagttttcaaagaga

SEQ ID NO: 14868 - DNA, 1686 bp, Glycine max
cgttctcttgggcggacgcgtgggcggacgcgtgggcaaacaggtctctttaccaactgctactcttgacggacccataccacctgtaggagccttgagtagcgctctcagtagattacaatcaaataggcctcttagagaattgagagaggttgccaagggagttactaaacgaattggaggtcctatgcatgaattggctgcaaaagttgacgagtatgctcgtggcatgatcagtggttctggatcatcactttttgaagagcttggactctactatattggtcctgttgatggtcataacataaatgatcttgttgccattctcaatgaagttaaaagcactaacacaaccggtcctgtagtgatccatgttatcactgaaaaaggccgtggatacccatatgcagaaaaggcagctgacaaataccatggggttgccaagtttggtgcaccagctgggaagcaattcaacatccaaggctaccactcggtcttatacaacatactttgctgaagctttgattgcagaagccgaagctgacaaagacgttgttgcaatccatcgctgctatgggaggtggaactggcatgaatctcttccatcgccgtttcccaacaagatgctttgatgtggggatagcagaacagcatgctgttacatttgctgcaggtctggcttgtgaaggtcttaaacctttctgtgcaatttactcatcattcatgcagagggcttatgaccaggtggtgcatgatgtggatttgcagaagctgcctgtaagatttgcaatggacagggctggattagttggagcagatggtcccacacattgtggttcttttgatgtcacatttatggcatgcctgcctaacatggtggtgatggctccttctgatgaagccgaccttttccacatggttgccaccgcagcagccattaatgatcgacctagttgttttcgatacccaaggggaaatggcattggtgttcagctaccaactggaaataaaggaactcctcttgagattgggaaaggtaggatattgattgaaggggaaagagtggctctcttgggctatggatcagctgttcagaactgtttggctgcagcttccttagtggaatgtcatggcttgcgcttaacagttgctgatgcacgtttctgcaaaccactggatcggtccctgattcgcagcctggcaaaatcacatgaggttttaatcacagttgaagaaggatcaattggaggatttggttctcatgttgctcagttcatggcccttgatggccttctagatggcaaattgaagtggcggccaatagttcttccggatcgttatatcgatcatggatcacctgctgaccaattgtctttagccggtcttacaccatctcacatagcagcaacagtgttcaatgtactaggacaaacaagagaggcactagaggtcatgtcatagaaatattaaggggttcaatttttcacttcacacgatgtacaaagtataacatgattcaccatgtgtaatatgaaaaagtaatgtaatattgtgaaattttgaagtatatgatgcaggtcgtcatatggtaaaacaactagttataaaggagaaaaatctgaacttttatgtaagtgcaaaagaatagcctttctgacatggtctaaactgaatttgaaatctgac

SEQ ID NO: 14869 - DNA, 517 bp, Glycine max
ttatttttttttttatttttttttttttttttttttttttttttttttttgtcaatctgcattttccatttctattattttttaacaaacacatttgtattacactgggtgaatcacgctactttgtacattgcagggaacaaaaattgaacccctttgcatttgttttatgtcatgacctctagtgcctctcttgtttgtccaagtagattgaaaactgttgctgctatgtgagatggtgtaagaccagctgcactcaattggtcaaccggtgatccatggtcaatgtaacaatcaggaagaacaattggcctccactttaatttcccatcaagaaggccatcaagggccatgaactgaacaacatgagatccgaatcctcctattgacccttcttccacagtgatcaaaacctcgtgcgattgggcaaggctgcgaataagggaacggtccaatggcttgcagaaacgtgcatccgccactgttgcgcgcaagccatgatgttccaacaaggaag

SEQ ID NO: 14870 - DNA, 330 bp, Glycine max
ataacttcaaaaggaagcctaacgaggttcagtccttgatggaattgatgcgggaaaagattgaagagttacttcaacaagaaagtcttatcaatgaataccgtgttcgattacatttcattggagacttgcaactattgactgagcctgtcagggcttctgtggaaaaagcaatgagagttactgctcacaacaaccagagagttcttttgatttgcgtagcctatacttctcgtcacgagattgtgcatgccgttcaagaatgctgcaaggaaaaatggaatgaagttcaagcatcaaaagaagcaaagcttacaaatggtgcatttg

SEQ ID NO: 14871 - DNA, 772 bp, Glycine max
  unsure (1)..(772): unsure at all n locations
aanggttccccttccacctcacatggttccgacggtaagggggttcactctctttttgtccaaattcagggtttgtcttagtaattatccatttattcatgtgggttttcctttgccttcaattttattgaaaattcggcgtgatcgaggctaaaaatgtgtatatgtcactctgggtacccctagtgcttcgtttctttgacaaaaggaaaactttttcttaacaatttcgcaccttttcccatgtttggggggtttttgttaatcttgtgaggggtttagagcaattggggaagtgggaatggactgcaagaggctttaagaaagggggggttgacgatgtcgtttaggagtatcatccttgaaaggaagggatttgaggtgaagtttggatatagcatgagatccaggtcacagtcacacagtgatgctattgcccaggatagtttggtggtgcttgatggattgaagcagagttgttgggctaacatgccccctgagcttttgagggatgtgctcatgagaattgaggcctctgaggattcctggcctgcccggaaacatgtcgtcgcctgcgccggagtttgccgcagttggagagaaatcatgaaggaaattgtcaagtcccctcaactatccggcaagctgacattcccaatttccttgaagcagcctggtccaagggactctcttcttcaatgctatattaaacgaaatcgcagtaatcaaacatattatctgcttcttggtttaaaccaagcctcaactgatg

SEQ ID NO: 14872 - DNA, 174 bp, Glycine max
caactgacccttggagtattgcttatttctcgtagttttgtgtgccttgcgcagctacactttcatttgctacaatgctggtgcagcactgcatgtatattttgagtggtaacatttagttgtaactagaatatttaaggaacttgcctaaatgattgaattgctgctttaaaa

SEQ ID NO: 14873 - DNA, 1789 bp, Glycine max
tcacagttcacattcacatgttgttgaatctcaagataagtgtcccttcgtacatgtggcatctgtgtgttcccacaactgctcctattacaaacacaattaagagagactcataactcattgatataaatcatcacacacacagcatcagtgtattacaaagagtgatagatagaatacagcatttcatttctcatcatcaatggctttctcttgtaaacttgacagcttcattctctctgcctataaaccccaaaactccattctcccactttcaatccaaccttcctccttccttccatctccttcttctttgaagcctcagaagcttcccttcagaattcgctatggttctaccatcagagccacgtcatcatcctcaaccccttccgcaaccattgccgaacctgaaggcattaagattaaatcgattccaaccaagcccattgatggacaaaagactggaaccagtgggcttcgaaagaaggtgaaagtgtttatgcaagacaattaccttgcaaattggatccaggctctgtttaattcattgccaccggaggactacaagaatggtttgttggtgttgggaggtgatggtcgatactttaatcaggaagctgcacagataataatcaaaattgctgctggaaatggtgttggaaaaattctggttggaaaggaaggtattttgtcaacaccagccgtttctgctgttataagaaagagaaaggcaaatggtggatttattatgagtgcaagccataatcctggcggacctgaatatgattggggtattaagtttaattacagcagcggacaacctgcaccagaatccatcactgacaagatttatggaaataccctgtcgatctctgtgataaagatagctgacattcctgatgttgacatatcaaaagttggggttacaaagtttggaagcttcagtgtggaagtaatagacccagtctctgactatctggagctattggagacagtattcgattttcagctaatcaaaggtcttctttcacgtccagattttaggtttatatttgatgccatgcatgcagttactggtgcttatgctaaacccatcttcgttgataaactcggtgctagtctggattcaatttcaaatggaatccctttggaagattttggacatggccatcctgatcctaatctaacatatgcgaaggatcttgtcaacattctgtatgctgaaaatggacctgattttggagctgccagtggtggggatggtgatagaaatatgattttaggaagaagtttctttgtaactccttcagactctgtagcagttattgcagccattgcaagagaagcgattccatacttcaagaacggagttaagggtcttgctcgatcaatgccaacaagcggtgctctggaccgtgttgctaaaaaattgaacctccctttctttgaggtccccactggttggaaatttttcgggaatcttatggatgctgggaatttgtccgttgcggggaagagagttttggaacaggttctgatcacattcgtgagaaagatggcatctgggctgtcttagcttggctttctattattgcacatcgcaacaaagacaagaatcccggggagaaattgatctccgtatctgacgttgtgatggagcactgggcacttatggaaggaatttcttctctagatatgactacgaggaatgtgaatctgaaggtgccaataagatgatagaatacctacgagatattttgtctaagagcaagcctggtgatcagtatgg

SEQ ID NO: 14874 - DNA, 437 bp, Glycine max
ctatctttacgaatcttcttcattacatggcttcttcagatcccatctcttctcgccactacacttacaacagaaaacaaaaatctctaggccttctctgcactaatttcttgagcttgtacaaccgagacaccgttcacttgattggcctagacgatgctgccacccgattaggtgttgagagacggcggatctatgacattgtgaatgtcctggagagtatcggggtactctcaaggaaagcaaaaaatcaatacacatggagagggtttgccgcaatccctctcactctacaggatctcaaggaagaggggttgaaggagaattctaattccctacgtgggcctggaaaccatgataaagtttccgacgacgaagatgacgaggaaacacagtccaatccccgcgctactggaagtcaaagtgacaagttgaac

SEQ ID NO: 14875 - DNA, 915 bp, Glycine max
acgtcgcacgcacgcatacgtaagctctcggttcagggcctaatgaaaatccgtctggacaagaaaatttcaaccaatggcaagggaaatggcccccccaagaatgatcctaaacgttcccttgggtcctgttgcagcctatgcttttgcttttgccatctcgagtccaattggtgtggccattggaattatattggatgccacaactcagggtcatgtggcggattggatctttgccatatcaatgggtctggcttgtggagtatttatctatgtatcagtaaaccatctgttggcaaaagggtacatgccccacataccaacaaaggttgactcagcctatttcaagtttcttgccgtgttgttgggtgtgggagtgatagcggttgtgatgatttgggacacctaaggttgttccaagataacttctctttacagcatttgcagaatctttttctttttcttttttttatctttttgataatgaatacgtacattacagaaaaagttgtggtagttcctaggtcagatttggtatttggatattcttgtcagaaatgatttcgtcaatcatttataaggtagaaaagatgacagaaatttgcctcaaatgatagaaaagatgagcatgtattgagaattaagaggacttataaaagtcttgggaagaagggtagttcacatggagggtagcctaaatcattataggcaaagggggaccggagaagaaatatatacaaagctatagaaatgaatttatagatcaatagtttgtctgtagacatgatttataatagaagctatgctgttatttaattcatgtagcctataccaccttgtggggaaaaaggttggttggtggtggtgtgtatactttattgattgaataattattatgagttttgttcgtaatac

SEQ ID NO: 14876 - DNA, 503 bp, Glycine max
ctagttctagatttgcgagcggccgctcggatctagaccctattcccttctctttctctgaaccttcttcttctctctttcacattctcataagatataagacccatacacacacacacacacatatctgcttcttgtagaacaagttaagtttgttttgttttgtcgtttgcttaaggattaatcaatcaattatctgatgatggaagagccggttgtggttaacaaaggagattatgatcatgatcatgatcagcctttggatttacctccaggtttcaggttccaccccacagatgaagagatcatcacttgttacctcacagagaaagtcctcaatagagccttcagtgcaactgctattggagaagctgatttcaacaagtgtgagccttgggacttgcccaagaaagcaaagatgggggagaaagattggtacttcttttgccaaagggataggaagtacccaacaggcatgcgaaccaatagagcaacccaatctg

SEQ ID NO: 14877 - DNA, 668 bp, Glycine max
gcaaaaattatgattccttaattttcttgattgcgagagtcactcgcgaaatccccccgaaatgatgaagggtctttctttacattgattgtcagtttgccactttctactttccatcatcgccttgggacttatccttcttaaacccatttccttcacttccatttcatgcgaaaaagccttacttgattcttcgaaaaggaaggaacttgggacttgtttctctcagagatggcgttgcctaaggttgatttcgaggttggagctgatggggttgctgtcatcactatgtgcaacccacccgtcaatgctttggccattccaattatcatggggttgaagaacagatttgatgaggcagctaggaggaatgatgtgaaagctatagttttgactggcaaaggtgggagattttctggtggatttgatatcagtgttatgcagaaggttcaccggactggggattcctcgcatctccctgatgtctcagtggaactagtagttaattcaattgaagattcgaagaagcctgttgttgcagcagtagcagggcttgctcttggaggtggcttagaactggctatgggatgccatgcccgtgatgcggctccaagagctcaattgggtctaccagagctgactcctggtattaatcctggatttggagg

SEQ ID NO: 14878 - DNA, 1463 bp, Glycine max
tatttgtcaagagatggaacctaagcataataaccttagcaaggaggctgcttccaataatggtgatggcaatagaattggaaacgattcaaatgaaatggggtggttagaagttgtaagttctttagttgatgattatgatgccactacaagtcacagattggaagaatgtgaaacatacttgattgagttggaaacttcagaggctccaaaagtttgtcatgttcaaggcgatgcattaaattataaagatagtcttcaatcagaattggttgctggttcttctagtactggtgacaatactagtgatgtcgaagatgatattggtgcaaagaatgcaggtagccaatatagtcatgtatgcaggattgatctgcttgaggaaatcattgatgaggcaaaaactaacaagaaaatgttgttttcatcaatggaatctcttatcaacttaatgagagaagtggaagttcaggagaaagctgcagagcaggctaatatggaagctgctactggagggtctaatattctggccaggatagaagagtacaaaactatggtggtgcaagctaacgaagcaaatgacatgcatgcaggagaagtttatggggaaaaagcaattcttgcaactgaactgaaggaacttcaatcacgcttgctcggcttgtctgatgaaagggacaagtctcttgcaattctcgatgagatgcgccacattcttgaagaacgactagctgcagcagaagaattaaggaaagcagctgagcaactaaagctggaaaaggaggaatctgcacggaaggctcttgttgaacaggagagactggtggagaaggtagtacacgaatcacaaagactacagcaggaggcagaggagaattcaaagttacaggagttcctaattgatcgtgggcgggttgttgatatgttgcaaggagaaatctctgttatatgtcaggatattaagcttctaaaagagaaatttgatgcaaatcttccactgagtaaatccttcacctcaagccagactagttgcaagttagcttcatcaggatcttcccacaaaacattggcatctgatgcaggttccgagcatagtgagtcatctgaaatacggaagacaagccggacagcctcaattgaaagcctttcttccaagagtgggcacgacgaggaagaaaaatccaaagctgatcacaatgctcttcttgatgatgggtggtatattttgtcggactgaattccggagtttactgactatttgttctgctgagagtggaaaaacataggagttaatgctatattgtttatacaacaaaataaaaccttagaatccttggatgattttgctttatgtttcagtagcatactagcatgcatacaatttttatatacgttctcgaggttgggttctcattgttttccagattttgtatagaaaacgtcacagggaattactagattaa

SEQ ID NO: 14879 - DNA, 502 bp, Glycine max
  unsure (1)..(502): unsure at all n locations
cgcgtacgcccacgcgtccgcccacgcgttcgcccacgcttccgtccacgcgtccggacgaggaaaaagccaaagctgatcacaatgctcttcttgatgatgggtgggatatttttgagaaagatgcagaactgaattccggagtttgctgactttttattctgctgagagggggaaacatggggagttaatgctaatgtttatacaacaaaataaaccttagaatccttcgatgatttttctttatgtttcagtagcatactagcatgcatacaatttttatgtagtcctcttggggagttaatgctaatgtttatacaacaaaataaaccttagaatccttcgatgatttttctttatgtttcagtagcatactaagtagcatactagcatgcatacaatttttatgtagtcctcttgagtttgggttctcattgttttccagattttgtatagaaaacaacccgggggntttttttcacagcaaattacttgatttctt

SEQ ID NO: 14880 - DNA, 1081 bp, Glycine max
  unsure (1)..(1081): unsure at all n locations
tgcacgccgtacgtaagctcggatttcggttcaggctcagccgcatagttaaggaaccgaaactccacataggaatcacttggtttctttgctctcccccaacccaatggctacttccattaacagcagtgctctggggtggaaacattcatccttcttcgtacaatccaataatggcttcaacgttgcttcgcctcctttcaaaccaaagccgncacgctcctccaacttttctctctattgctctgccgcctcctcttcttctgatccactgttggttaaggctgctaggggagatcctgttagtcgtcctccggcatggatgatgcgccaggccggaaggtacatggctgtttacaaaaagcttgctgagaaatatccatccttccgagagaggtcagagacaactgatctcattgtggaaatttctttgcagccttggaatgctttcaggcctgatggagtaattatcttctcggacatccttacaccacttcctgcgtttggagttgattttgacatagaagaagtaaggggacctgttatacattcgcccattcgttctgaggaaggattaaaggttttacatccaattgacctggacaggcttaaatttgttggagattcactaaagatactgcgccaagaggttggtggtcatgcagctgttttgggttttgtgggagcaccttggacaatagcaacatatatagtggaagggggcaatagctgattacgttattttccaagtggagtctngggctcattgcatacaaatatttgattcatggggtggacaactaccacctgaaatgtgggaatgctggtcaaagtcatatatcaaagagattgtaaatttggtcaagaaaaaatgccctgaggtaccaattgttctttatataaatggaaatggtggtcttcttgagcgtatgaaagacactggagttgatgttatagggctagactggacagtggatatggcagatggaagaagaagattgggtagtgggataagtgttcagggaaatgtggaccctgcctacttgttctctcctcttgatgccctgactgaagaaattca

SEQ ID NO: 14881 - DNA, 419 bp, Glycine max
atttgttggagattcacttaagatactgcgccgagaggtaaaacttggttgcatctcctcatttatgtctcaaccattcttctaatctgtttccctggctaattcttttttattcaggttggtggtcatgcagctgttttgggttttgtgggagcaccttggacaatagcaacatatatagtggaagggggtacaacacgcacatatacaaccattaagagcatgtgccacactgccccacatgtattgaggactttgctttctcatttgacgcaggcaatagctgattacgttattttccaagtggagtctggggctcattgcatacaaatatttgattcatggggtggacaactaccacctgaaatgtgggaatgctggtcaaagtcatatatcaaagagattgtaaatttggtcaa

SEQ ID NO: 14882 - DNA, 458 bp, Glycine max
tggcccgattccacttccggactttcggctcgattgtccaaccacctttggggcttaaattcggtccagtccttccccaacacgctctccatcctccccatcgcgtacgtgtggtacgtcacgaaccaccccttcccaaccctagttccgtccggcaatacgtcgtcgtttaggcactccatcgtgtcaaccggcactggcgggtacaacctcatcggctgcgaaatcgccgcttgcagtctggaggacagaatccagaaaaaccagctcagagcagacgacgtcgtatcacgccccgccagaataaaacttatcacaacgtcgcgcagaaactccggtgaggtattctctgttctgatgaaacgtgatagtaaatcttcatctccgatttggtccttggattccaatctggaccgtatgattgaatcagcaaattggtgaacggtggtgattgattc

SEQ ID NO: 14883 - DNA, 594 bp, Glycine max
atagaagatctgaacgtcgtgtgcacgcgtccgtaagctgggaatcggggttggagcagatcttgtatgggattaaacaaggacgccttgtgatatgcgctttggcattcccttcagtgatggaaccacctcaaaatataggagcttatcaaagtcgctggtaatataaagaggttcattccatcaggatttggcgcggaagaagattcagtaaaacctcttcctccattccaagctgttcttgataagaaaagaaaaattagaagggaaattgaagcagctgggatcccttacacttctatatctgcaaattgttttggtgcatactttgtcaattatttacttcacccatatgaaaatgtgaaggatattactgtctatggcaacggggaagcaaaagctgtgctaaattacgaagaagacattgctatgtatactgttaaagcggcaaatgatccaagaacatgcaaccgcgtcgttatttatcggccacagaagaatatcatatcacagaatgagttgacatcattgtgggagcaaaaatgtggtcagacttttcacaaggctttccattcggaagaagaaattgtcaag

SEQ ID NO: 14884 - DNA, 629 bp, Glycine max
cgagatactcgcaccgatcaaaacggtgcgtttgacgaggaaccgcgacgagggcgcgaagtccctcggaagggtgctgaaacatggtgacctggttgtgtgccccggagggaccacgtgcagagagccctatttattaagggtcagccctttgttttcggaactgtgcgttgaaataatccctgtggcaattgattgtcacgtgacaatgttccatggcacaaccgcaggaggtcttaagtgcttggacccatttttcttcttgatgaatcccacaccttcttactctggtcagttgctagagaaagtgtcaccttccattaccgctagtaatgttatcaatggcgattatgcgggatttgcagtggctaatcacgtgcaaacgcatattgggaaggccctgggttttgaatgcactcaacttaatagaaaggacaagtacttgattctggccggtaatgaaggtatagtttcgaccacaaagagtggtaaatagttaatagggttttgattttgctcatgctttgtttaaatcactaataattagcaatgcccttgtgatggaaaacatagacaaggaaaatacggcaaaaatgacttcccttgcttgttgtcattattttttggcc

SEQ ID NO: 14885 - DNA, 453 bp, Glycine max
aagaaattaatagttgtcattatatattaatcaatccaatacacagcacacaggaaaaaggccccaaagaccatttttacccctatgtgaaagagggttctcctctctcttgaaaacaaataaaaaaattcaaggtttttaaattaaaacctatatatacacgtgtttccatcacacgcgcggacaccagccattggagtcctgtatagttaggccaaaactcatggccaaaaataggaaaaaatatataaacagctcccgcaaagaaaaaccaagaaaaagaaaaatcacacgtacacacttcattggcacgcaccagaaccgactgcacacgtgccaatacccaacaaaaaaagtccacgatttgtagccaaacttcaacttattgcccttcaattgttctttactgttgagggtcccatcaaagtagtagtaacgtggatgatgaagaag

SEQ ID NO: 14886 - DNA, 962 bp, Glycine max
aaatttctccaacgctatcgagccaaacccaaacgttaactcagacgaagcaccaacagaagaagaagaaacaaaaccgaacctctctaaactctccaacgtcgccacccgattcatcgcatttcgcaggctgcaatggcgacgttcgaactgtaccgcaggtcgacgattggaatgtgcctgacggagacgctggacgagatggttcagaacggcactctaagccccgagctcgcgattcaggttctggtccagttcgataagtccatgactgaggctctggaaacgcaagttaagagtaaggtctccatcaagggacatctccatacatatagattttgtgacaatgtttggaccttcatcttacaagatgctttgttcaagagcgaagacagccaagagattgttggacgggttaaaatagtggcgtgtgattcgaagttgctcacacaataatgtgcccaattctgctaccttgtcaacaaggagaaattgttgtcatctgctggtactatggaaatggtggccagaccatagttacaatggtcttaaattcttgccggaactagcaactactgtatgttattatagatttaaaagccatcagtcttcatatcattaggtaattaatgatgctatattgagaataccgcttgggaattggatgagtctactctcttcttttaagtgtattctgttctattcttctgtgagtaccagtaagtaacctagtttatttttcattggctaactagtaaggttggacaggctatgcatccctaaaatttcttatgcacccagcctccacctataaccaccaaacaccattgttgcaaccacccaatgtcacctccacaccacaccaaacccaccattgtgttgccacccaaccaccacaatcgccatgtgatccacgaccttgtgcgaggtcgcatcactcccacatagtcaccaattgattg

SEQ ID NO: 14887 - DNA, 647 bp, Glycine max
ctctctctctctctctctctcacattcttgtttcttattatttatatttgtcttttccatgatgggtcattgaacagaaactgtagaagcctgtcgaacagtgaattgtaatagtggtaaaatgaaagaatgaatgggtatatatatgtgtgggagtatacagatatagatatagatatggtggtgcagctgtggtgatttggcattttctggtttttgttcggtgcttgttggtattggttggtttgttggttccatttgatgtttacatagaggagctagcttagccactttcggcaaaagaactcacagagatacatttacacaaagaaagaacgcgtttactgtttagagaccaaaccccatcttttgtaccactcaatgaatcattagtccatactcaaactctgaaagcgagtgtttttttagagctgagacaaatagtatatatttgagtttgggtgattggagaagaaactgaagaagagagatcgcaaaatgagagtgtgctgtcttgcttggttgagcattcttgtcaaatgaggtttccctttccgaggtgatttatttggacacgcagattaaactgcatgcaattgacgcgcaagatgttttaaaagaccacgcaagaaagagaacaaaagaaa

SEQ ID NO: 14888 - DNA, 360 bp, Glycine max
  unsure (1)..(360): unsure at all n locations
cccaaaggtgcttttatgttgcaaagtcatacagtgtggctggaaagagggctgaagcatatgcattggactggccggctcgcaatttggcagatgatgccttaaaaaagttccaaatggtggatgggggataataggactatgatgaaggagttggagggtttgtgcaatgagtgccgatctaacagttgtatagagcatgcattggggatcatggaggagaagaagactcaagaaaatctatctgaaagggtctccaatatatcattgactggaactgatcgggtggagaagttncttcttgagaaactagatgtttatgagtctgctgtgggtggatcaaatgtgaagtgtacacca

SEQ ID NO: 14889 - DNA, 1352 bp, Glycine max
cccaagacacccttcagaaccttcctcactctttctctcttccttctttttttctttttttttctataaacctagccgggaccaaaaaacccttggcagttattcttcattcatttattcttattcatcttttcattcactcactctcactcatggctgaagatgggaacaacaacgatgtacccttacacaaattcaaagacagcaatccaaaccctgaagagttcgatgcaaagggttacagcctcagcggaaaaatcatgctttcagcaataatccttcttttcttcgtcgtcgttttgatgttgtgccttcatatctacgcgcgctggtacctccggcgtgctcgccgccgccagctccggcgccaacgcgagctccgccgcacccagcttgtcttttacaacgacgacgccacccccgcagccgtgtcacgtggcctcgacgccgccatccttgccacgctccccgtcttcaccttcgacccggaaaaaaccgggccggagtgcgctgtttgcttgtcggagttcgaacccggtgaaacgggtcgggtcttgcccaaatgtaatcacagtttccacatagaatgtattgacatgtggttccattctcatgacacgtgtcctctttgtcgcgccccggttgaacgcgcgccggaaccggaagttgttgttataacagtacccgatccggtttccgaaaccggttcaggcgaaaatgagaaccgaaccggttcttcttcttcttcctcttcggttggattgagtaagcctaagccttcgttggttggtgtgacaattgaggtgcctccgagggacgagaattttcaaaacgagttgcaaccgagttgcgactcatcctcctcgtttcggtcgccgatgagtcgcatgctgtcgtttacgaggatgctcggcagggaaaagaaggggaacgtgtcgccgtcgtcgtgcggcggcggcgattgtagctccgccgcggagcgaggtgagcgagaggagactcagtgagtcggtgactcgggtgctgacgtggcacttgttggaagcggaaaaacttgggttgttggcgcgtggcggtgtgtaatagtgacgtttctggattttaatgtaggcggtgagcggcgcgtgagttaggtggcgcgagatactgacgtagaatggttttgggatgaacataaatgatgtacttattcgttgatatatatattttttctttatttgtttcttatcttcgggttccaaaaatagttaaatagaatacgaaaattgctaattgtaatgcttgcttacatagaaatgaaaccaattttaaaaaataaaatattttttaaaaaaaaaaaaaaaaagggcggc

SEQ ID NO: 14890 - DNA, 815 bp, Glycine max
  unsure (1)..(815): unsure at all n locations
cccacgcgtccgcccacgcgtccgcggacgcgtgggtgcgtttcaaaaaaacgtgtctctctattttgaatctggatccagcgccttctattcagcattcacccaaaccctatttctctctctctttcttccctgtttggtatcagcgagcacaatgaggagaggagctaagagaaagacgaagcaggaccaagaagccaaacacgtcgcagccgaagataacaagaccgaagctcagcctcgagctaaacgggccaaaacctccaagcctcaatccgaacctgagtacttcgaagataagcgcaacttggaagatttgtggaaggaaacattccccgttggaactgagtgggaccaattggatactgtctatcaatacaagtgggatttctcgaatctagaaaatgcgtttgaagaggatggcgtgttgtatgggaaaaaggtttatctctttggttgcactgagcctcagctggtcatgtttaaaggggaaagcaaagttgtcttgatacctgctgtagtagctgttgtatcacctttcccaccatctgataaaattgggataaactcagttcaaagagaggctgaagagatagttccgatgaagcaaatgaaaatggactgggttccatacattcccttggagggcagagatagccaagttgatagactgaaatcccagatatttatcttgagttgtacccaaagaaggtctgctttaaaacatctgaagttggatagattaaagagatatgagtactgcttgccttatttctatcagcgatnntaaggaagatgaacttgaacagagtact

SEQ ID NO: 14891 - DNA, 852 bp, Glycine max
gattgataattttataaagagcccctaacggttttgttggagtgagatcaaggaaacagagaaaaaatggcatcctcaagagcttgtaccaaacccatcatcttcctctctgccttcaccaagtcaaagttctctcatcaatatcatgtctccttcatcaacaccacctcccacatacccatctacccaaagctctctcagcaacgttccttggtggtcaacaacgtattgaaaacagttgagccgacagaaagctctttgcggagctccaactccgaggaatttgggtctctgggtgaaaagcccaccatcctggtctccgagagacttggagaggcaggactgcaggtgttacgcggtgttggacacgtggaatgcgcgtatgagctctcgcaggaggagctatgcacgaagatctcgtgctgtgacgctctgatagtcaggagcgggacgaaggtgacgagggaagtgtttgaagctgggaaagggaggttgaaggtcgtgggaagagccggcgtggggattgacaacgtggatctgcaagctgccactgaatttggttgcctggtcgtcaatgctcccactgccaacactattgctgctgccgagcatgggatcgctctccttgctgccatggcccgcaacgttgcccaggctgacgcctccaccaaagctggaaaatggcagagaagcaagtatgtgggagtttccatggttggcaagacattggcggtgatgggttttggaaaagttggatctgaattggctcaggctcgcaaaagggttgtgcatgcacgtgattgctcatgacccttatgctcctgctgacatggctcgtgctattggtgtgga

SEQ ID NO: 14892 - DNA, 435 bp, Glycine max
ctggcggttttgttggattggaacagagcgagcgagatcaaaaaatggcatcctctgcttgtaccaaacccatcttcccctctgccttcaccgtctctaagtcaaagctctctcgtcatgttcatgtctccttcacctcccccaaacccatctactaccactacagaaagctctctcatgcctctcaacgttccttggtggtcaacagcgttttgaaaacagttgacccgacacaaacctctttgcggagatccaactccgaggatgttgggtctctgggagaaaagcccaccatcctggtctccgagaaacttggagaggcagggctgcaggtgttacgtggcgttgggcacgtggaatgcgcgtatgagctctcacaggaggagctatgcacgaagatctcgtgctgtgacgctctgatagtcaggagcggga

SEQ ID NO: 14893 - DNA, 603 bp, Glycine max
cctcgagccgctcgagcggctcgaccggctcgaggtttctctctcttcggtcagaaacatgaatttggaaacgcaaccaggaacggcgtcgtattggtgctacagctgcacccgtttcgtgcacctctctgtccaaagcaccatcgcctgcccccactgtcaaagcggtttcgtcgaagagatccgtgccggcgccggagccgaagcctcgccacgccatcgactaagtcctttccccgatgatcctcttttgctccggcgacagggcttccgccgccgtaggagagaagcttccggcaaccgctccccgttcaaccccgttatcgtcctccgcggccccggcgacgactccgccgccgccgaccacgacggcgtcagcacgttcgagctcttctacgacgacggcgacggcaccggcctccgccctcttcctcccaccatgtcggagttgctcctcggctctggctttgacagacttctcgaacagttcgcgcagatcgagatgaacggattcgggcggccggagaatccgccggcgtcaaaggcggcgatcgagtccatgccgacggtcgagatcgaagaaacgcacgtggaaaccgaagc

SEQ ID NO: 14894 - DNA, 799 bp, Glycine max
tgcaaacgctctttcttacaaaataaaactgtcaacttcaattttttcttcaaaagcttcctctgtgggggaatttattgttccttgcaatatagataggaaacaccaccatagtttttgtgtaacttaaacgtagaaaatattatcaagttgttgcacaaatcattatgggtactctcatgcttctcaagaagttcaccctcctctttctcctcatttctggatcacttttatcaacttcctttgcaggtagagtacgatccaactctatcaagaacttcgctaaagatgtgaatgcaatcgaagagggaacaccaaggaaaccactgaataaggaagaagtaagaaccatccatgagaggcttcttagggctaacacaaaagattatggacgatatgatccatccccatctctttcaaagcctcctttcaagctcatacccaattaacgtaacgttcaatatgtgaatctgggaagttggtattggcataaagtaccataaataatcggctgtttatcttaatcttgtaatatagtatgtcaaatatagaaaaagaaatacgggccatgtttggaaccctaataagttagtagcataattatatagatattagaagatgtacgtgtgttttacaaattactgctagttcaagttttgttgtatgagtccatatacatatatacttggtattgtgttatgtagatatgatcctgatcatcagtgtaatactatgaataaagtaattaattaatgagataacgtatatatgttgtcttcaagaaagaatagggcacaaa

SEQ ID NO: 14895 - DNA, 679 bp, Glycine max
ctagctcctagcacaagtagaagaactatctcactagtcactaccagtatcaaccaccacttcctcttatattcctcaccctctctctcactctattcaaacatcaccatagttcagcacttgagttattagtatcaaccacgaatgtccacaagttgagaagagaccaaacgtagcaaaagatggaagctgttaagttggtgtctagtgatccaagtgagagaccagacacataccgagtcgcttacataattcatttcttgcttggtgctggcaacttgcttccttggaatgccttgatcactgcagtggattactttgcctacctctatccaacaaaacacatagaaaaggttttctctgtggcctatatgatttcatcagtgatggtgcttcttgggatgatcagttgggggggttggagcaaaacaacattgaggctgagaatgaacttggggttctccatgttcgttatgtctcttatggtagcaccagtcatagactggacctcaagcagcaccaagctcaatgagcgaccgagtggcgcctacagcttgacggttgcagcagtggtgatatgtggtttagcagatggcttggtgggtggaagcttgataggatcagctggaaagctcccaaaacagtatatgcaagcagtttttgctggaactgcttcttc

SEQ ID NO: 14896 - DNA, 436 bp, Glycine max
ccgagtcgcgaactcggccacgccacataatcatcacgccctctcttccacttctatcatcctcggatcgcataaattccccaatggggctttcgcggaagtccaagcttccacatttaaccaactttttcacctctgaaacccgcttttcttgtttcagtggaaatggccgaaactcgagacgccgccgccgatggggtgcccggaactcccgccataagggaaatgagacccgagaccgcgacccatgcgggaatcgggtcgggtgggattcggagggtgaatttccgagcggagattgatacgtcaccgccgtttgggtcggtgaaagaggccgtgacccgttttggaggtagcgggccttggataccgtttttttttactttctgatgtagaagaagattatgattagcagaacaacattgaaaattttgac

SEQ ID NO: 14897 - DNA, 746 bp, Glycine max
ccctaactttctctctcctctctcattctcactctctcacctcaatctctccgcgttttctcttcaaattatccagaattggattcaaatttccttcaacacgattaacacagatcgcgttcgttcttgttcagacttcacaattcgcgcgcgcacttcatgaatggaagacaaagacagagcagcctcctccgatccagctgagttcgccggcgacacgagttggacactcgccaccgatgactccgacggtgcgtacctgttccccggcgaccgggagcggagcatactcagggaattcgggtggaacctcgaaccggaccagccaaaccggatcggcaccgacgacggatcgtggaggccggttcagtcctctctgaccggttcgatcgaaccggccgccgccgcgccgtcgcggtcgaataaccaatcgatgtcgtccagctccagcgaggatccaccggagaaatccaccgtctccgacgataaaccgcctgagataccgagtaaaggtaaaaacaaggggcaaaagcgaatacggcagccacggtttgcatttatgaccaagagtgaagttgatcatcttgaggatggctacagatggcggaagtatggtcagaaggcagttaaaaatagtcctttccctaggtttacagctaccttcacatcaaactaaactttaattatattaccaaaattcctgccaattattataaatatccaaaaaatatcatatacaattgatt

SEQ ID NO: 14898 - DNA, 1044 bp, Glycine max
cggcggcgccactgtcgaagaggtttccgccgttccgccccttgaaatctctatcaacgattctagccagctcacgctctcgtttcgcggccaagtctatgtcttcgacgctgttacacctgataaggttcaagcagtgttgttgctgttgggaggaaatgaactaacttcgggttcgcaatgtgcggagctatcatctcaaaatcagactggtgaggaggaatatcctgcaaaatgtagtctaccacagcgagcagcgtcattgaataggttccgtcagaagaggaaagagcggtgctttgataagaaagttagatatagtgtacgtcaagaagttgcactcaggatgcatcgaaataagggtcaatttacttcatcaaagaatcaggatggaactaatagttggggttcagatcaagagtcagggcaggatgctgttcaatctgaaaccttgtgctgcacacattgtggaataagttcaaaatccactccaatgatgcgtagggggccatctggtccaaggtcactttgcaatgcttgtgggcttttttgggcaaataggggcactttgagggatctttctaagagaaaccaggaacactctcttgcaccacctgagcaggttgatgagggcagtaataataatgactttgactgtcggagtggcatccctgcacaacataacaatcttgttaatgataacaaagctttggtatctgatcgttgagttttccactcacaggaaatgcaagtccttgactgtgacattcgcaggtttttagtaattccattcagtttgacctatagaatgtacagtatatagcaaagctctcgtcaatacaagagaggtctatttctatactctctgatcagttgcattaaactgtttatctatgactgtacaaactggaatttggaatgacttgatcgaatacaagagatctattcctatactctcggacagttgcattaactgtttatctatgaatgtataaactggaatttgaaatgaaccttggccctaatccatggtttggtggtttt

SEQ ID NO: 14899 - DNA, 1620 bp, Glycine max
gccacatagcatcactgcacagcaaattggctcaggttatcacggacttgggattggtgccttcacacttgattgggcagggatttcagcttatcatggcagtccccttgtctcaccatggtcttccattgttaatgtgggaattggatttatcatgttcatctacatcattctacctctctgttactggaagttcaacacttttgatgcccacaagtttcctatattctctaaccagttgttcacggccagtggacataaatatgacaccaccaagatcttaacccctgagtatgtccttaatgttgatgcatacaacaagtacagcaagttataccttagccctctgtttgcattatctattggatcaggttttgcaagatttacggcaaccctcactcatgtagcactcttttatggaagagacatttggagacagagtagatcagcaatgagtaacgcaaaattggatatccatggtagactgatgaaagcttataagcaagtacctgaatggtggttcctcagtatattgtttgggagcatggcgctatccctgctaatggcttttgtgtggaaaacggatgtgcaactgccatggtggggtatgctctttgcttttggtttggcttttattgtaacccttcctattggtgtcattcaagcaactaccaaccagcaacctggatatgacattatagcacagttcatgattgggtatgtccttcctggacaaccaattgcaaacttgctcttcaagatttacgggagaatcagcaccgtccatgctctctctttcttgtcagatctcaaacttggccactacatgaaaattcctccacggtgcatgtacaccgctcagctggtgggaactctagttgctggtgtagtgaacctggcagtggcttggtggatgttggatagcattaaggacatctgcatggatgataaagtgcaccatgacagtccttggacatgccctaagtacagagtgacctttgatgcatcagttatatggggtctgattggaccaaagaggctatttggacctggtgggctgtacaggaaccttgtgtggttattcctgattggagcagtgctgccagttcccatttgggtgttgagcaaaatcttccctgagaagaaatggataccactgatcaacataccagttataacctacggctttgctggaatgccaccagcaactccagccaatattgcaagctggctagtgactggaatgatcttcaattactttgtgttccgctacaacaaacgctggtggcagaagtacaattatgtactatcagcagcactggatgcaggcacagcttttatgggtgttttaatattctttgccctgcaaaatgctggccataatctcaaatggtggggaagtgaattggaccattgcccattggccacttgcccaactgcaccaggcgttcaggttcagggctgtccagtattcaaatactgatcagccataatgataatagctaaagggtaaaaggaatacccaattgctcagcaattctgtaaccttttgtgtttggatcataaatctcaaaatttcaaggaatttgaaatgtccataacctgaattgctttgatttt

SEQ ID NO: 14900 - DNA, 293 bp, Glycine max
gttttatagatgaagaggaaaaggttgcagaaagcaccatagatacgccggagaaaggtggtgggtcttcacctttagagccccaggttgttcccgcatagatatagttgtttaatttgtgtttgttattgtacatggctttcatcttttttcaatttgctgacagagggacaaacaaaacgcatatgataaccgctaaataagaattattcgtttctgatttttcttatatgaatataccatagactggccaatcccaatactattttcagctggtcgagccttgttactct

SEQ ID NO: 14901 - DNA, 416 bp, Glycine max
cttaaagccaaattactaaccctctcttcgccttcgccgcatctacccacttcctgttgtatccctagcttcctgccattcttcctcttctcaacaaggtttggggtgtttgtttggtttctttctgattgtttaatcagtagaaagaaaaagaaaaaaaaattgtcgacttttctgggtagtgttgtggcgaaagaaagttcagtttttttaggagaatggcgggttgttcttcaaattttgctgtggctcgttttgccaatgtgaggaaagaagttgttttggggaatgaagagacaaatttgattaggttgagtttcaggggtgtgttgaatgaatctgcatttcaagttctacgtgggagtaagtgtggtagatcatgtgtgcctatgcaagagaaagcaatgtttcttata

SEQ ID NO: 14902 - DNA, 352 bp, Glycine max
gcaaaaagcactttcaaattttacggctgcagaatggttggatggaggggagaaggagtaccattgtcagcggtgcaaacagaaagttaaggctctcaaacagctaacaatacataaggcaccttatgtgctaacgatccacttaaagcggtttcatgcccatgatactggacaaaagattaaaaagaaggttcaatttggctgtgcactggacttgaaaccttttgtcagtggctcaaatgatggagatgtgaagtactctctatatggtgttctggttcatgctggttccagcactcattctggacactattactgctatgttcgcacttcaaaataacatgtggtatta

SEQ ID NO: 14903 - DNA, 432 bp, Glycine max
tttacgcgtccgaattaagagagataggcatacgatgggttctgaaggaaaacctatgcttcctgttctagatttcaccatagaagatttgaagccagggaccaattcctggttatcaacatgcacaagtgtgcgccaagcatttgaggagaatggttactttgttgctgtgtatgataaagcttctattgagctacaaaatggtgtatttggctccatgaaggagctgttcgatctcccaacagaaaccaaacgaagaaacatatttgagggcatgcccttgaaaggctacgttggacagcaccccaagattcccctccacgaatgcatgggcatagatccgggaacaacactagagggaattcaaagtttcgcagaaaaattgtggcctcatggacatgatcaattttgtaaatatatatttgaatatgc

SEQ ID NO: 14904 - DNA, 422 bp, Glycine max
ataaaatccttgaatcaccaatgttcagtaatagacctctgttaccatatgaagaatggaatattgatttcacagaattgactgttggaactcgtgttggaattgggttcttcggagaagttttccggggcatatggaatggcacagatgttgctatcaaggttttcctagagccagatttaactgctgaaaacatggaagatttctgcaatgagatatccattctcagccggctccgacatcctaatgttatcttatttcttggtgcatgcacaaagcccccacgcttgtcaatggtgactgaatacatggagaatggatctttggtttacttgattcatgtgagcggtcagaagaagaagcttagcttgcggagaagactaaagatgttgcgagacatatgccggggcttaatgcacata

SEQ ID NO: 14905 - DNA, 319 bp, Glycine max
ggggaaccaaagtgctacagttcacaattttcaataccaagaaaacgatgataaaagatcccgggtggatgctgcttgattcttttccttacgttagaagctgttcatcccaacaaggagaaaactaatgcgccatctcccgttttgtttgtaataaatttgtatttatattttatactcctataggctgctacaaacttgagttctttgccccatcggggtggtttatgcatctttatattttatggttgtagccacccttatacaagccattggaataggtgaatctatacagttttacatgaatggttatctgttg

SEQ ID NO: 14906 - DNA, 526 bp, Glycine max
actcaaatgaggaaggaaaggaagaagctaagaaagaatgccgctaaacctgtagtaagcacttctaggaactttattagagctaagaaggatgaaaattcttttgagaaaaatggggcttttggcagaggaaatgagtctgagggaaagttgaagaaaagggggaattttaaaggaatgcgatcgggtgaagaagttttggagaggggaaagttgaggactttggattctggtgggaagaagaagaggatatatgctaagaaaggaggggataaaaatgtgaagttagagaatggtatggaagtatctaagaagagaactttgattaggaacggtgagaagcgagtgaaagatgtacccgttgaaggaaatgatggccaccatacaatgtgggatcatgataagacaaggaatggcggctttaaagtgaagcgatcgactcaaatgaggaaggaaaggaaggaagatgttgtgttggctattgcaaagcagaaaggcaaggcggaggatgcggggaaaattggat

SEQ ID NO: 14907 - DNA, 661 bp, Glycine max
gacttttcccggaggactgacatgtcaggtactttctattccaatgttaatggaggattaccaatgtgggaaagctatccagttttttcaactaagccaaaaaaagaagagaaagtcggccttgcagaggctattactaactgcattctctcaactggtcgcatagacatccagagaaaattattttgtagcatacaattgactggcggggtggctttgacaagtggcttaattgcagcagtagaagaaagagttttacatgccattcctccaaatgaagcaattgatacagtggagattcttggtgcccttgatttaggcagggatgcatggattagtccggagggctggattcacaatggggtccacgttggaagtaacagaaaatacaaggattcatattatcttcaggctcaagctatgtgttatatgaattcttgaaaggctgatgagacactacaatggaatcaggggaaaaaaagatgtaaagaatggttgaaggctatttgagtgctaattacatggattacaattccataatttccagctattttttttaggccataggacatagtcaattcaaatgggtttaaaccattgtttgggatctccacttctatctatgtatgtcagatcatcttgaacctggaaaaaaaaaaaa

SEQ ID NO: 14908 - DNA, 490 bp, Glycine max
tcttgtccggtgggaaggaaatagttgctgttggagtggcaacccattttgtcccttatgagaaaattgttgagctagagaagcgcctgattagcttgaattctggtgatgagaatgctgtaagatcagtaattgaagaattttcttcagaagttaaactggatgaagagagtatcttaaacaagcagtcaataattaatgagtgcttctcaaaggattctttagaagaaattataaaatcattggaagctgaagcatacaaggaaggaaatggatggatagatgcacgtttaaaaggaatgaaaagatcatcaccaactgcattgaaaatagcattaagatcggttcgtgaaggaaggaatcaaacactacctgaatgcttaaaaaaggaattcagattaacaatgaatatactgcgaactacaatatctaaggatatgtatgagggtattagagctctcaccattgacaaggataatactccaaagtg

SEQ ID NO: 14909 - DNA, 585 bp, Glycine max
cacaaaaccaagcatcttcaataattcatcgcctctttattaataataagtatagtaaatacgctagtctatggggaacactacttcttgttcttgtatttgtatctctaatggtgttattagtattgggaatattttgaagaagagaagaaaagctaagaaaacagcgatgctgttggacagtgatggaaacactcgggagatcaagctacccataaaatcaggggagctcatgatcgaagaattcggccacgtcgtcactccggtcgacgaactccgtagaacgggacgggtttcggctttattggccgacgaggaacttgtagccggtaaggtttacctgctactgccggtgaatagggtcaattcgaaggcttcagagtttgagatggctcttgcggaaaaacagagtggccacacaaagaggacgaggggtaataatatggcgaaggtttcaccctctgtgtgtccgaggtttgggaaccaagtacgatggaactcccgttttggatcctatctttgaataatagaatcgccctcatctctcaaccaatttgtcttcctcctgcacttcaccttgacact

SEQ ID NO: 14910 - DNA, 299 bp, Glycine max
cggctcgagctcttcactcccatcttccagaacacaacacaaaacaaagcatcttcaataattcatcgcctctattattaagtatagtaaacacgctagtctatggggaacgctaattcttgttcttgtatttgtatccctaatggtgctattttgaaaaagataagaaaaggaacgaaaacagcgatgctgttggacagtgatgagaaccctcgggagatcaagctacccgcaacatcgggggagctcatgatccaagaattcggccatgtcatcactccggtcgacgaactccgtag

SEQ ID NO: 14911 - DNA, 532 bp, Glycine max
  unsure (1)..(532): unsure at all n locations
accgtttaagacaccacccccacacacacactcactcgctccctcggaatcccaatggcggagaacggtgaaggcggcgaggagtacctgttcaagatagtgctgattggggactccgcggtggggaagtccaacctcctctcgcggttcgcgcggaacgagttcgatagcaactccaaggccaccattggggtcgagttccagacgcagctcgtcgagatcgacggcaaagagatcaaggcgcagatctgggacactgcgggacaagagaggtttcgagctgtcacctctgcttactacagaggcgctgttggtgcgctcgttgtttacgatatcagcaggaggggcaccttcgacagcatcaagcgatggctccaagaactcactactcaaaatgatagcaccgtagcaagaatgttggtgggaaataaatgtgacttggagaatattagagaggtgagcacagaagagggcaaaagtcttgcagaagaagaaggtttgntctttatggagacatctgcactcgatgcta

SEQ ID NO: 14912 - DNA, 550 bp, Glycine max
ctagagttaagagaggagatgggagaaatagaaagagaggagatgtcgtcgacaaggtgggagaaggaggaggaagaagaagaagaagaggcccaaatggatatctggaagtacatatttgggtttgtggaactggcagtgataaaatgtgcgattgagcttggcatagctgaagccatagagaagcatggaagtcccatgacactatcggagatatcatcaagtttagggtgtgatacttcacatctgaagcgcatcatgaggttcctggtgcaaagaaagatattcaaaggcgacgggtgcagcaggggctattctcaatcagctctgtctcgtcgattgatgagaaacggcgaacacagcatggctagttttctcttgctggagagtagtcctgtaatgctggcaccttggcacagtctgagtgctcgcgtcatggccaatggcaacccctcatttgcaaaggctcacggtgaagacgtgtggcgctatgctgccgcaaatctcgatcacagcaacctcatcaacgaagcaatggcatgtgatgcta

SEQ ID NO: 14913 - DNA, 472 bp, Glycine max
cgtttctccttggttcagtacccccgcagttcccttctcttcgactcggatcggagtaaaactctcctctgtcttcaatcttctgtttcactctctctgaaaccctaacactccgaaatgcccgaaccggaatctcagaacggacacgaaccagcgcccgaaccagaaccggagccgcagccgcagccagaaacgaaaccagagccaaccgagcaaacgcaaccacatttggaaccgaaatcggaatccgtgcccgaactagaaccaaatccgcagccagaatcggagccagtgccaacagagcaaacgcaagcaccattggagccgaaatcgggatcagaagctgatcccgtggtaaacgacgcagatcgcagagaaacgacaatccattccaatgaggcgaacgcgaatccttctcccactccgaagctccgaaaagacgaaggaagccgaacgttcaccatgagagaat

SEQ ID NO: 14914 - DNA, 415 bp, Glycine max
ctccatttaccgtttctccttcctgcagtactcgcagttcccttctcctcgactcggatcggagcaaagctctcctctgtccacaatcctccgtttcactctctctaaaatcctaacactccgaaatgcccgaaccggaatcgcaaaacggacacgagcaagacccggagccgcagccagaaacagaaccagtgccaacagagcaaacacaaccacaattggagccgaaatcgaaatccacgcccgaaccagaaccaaatccgcagccagaatcggagccagtgccaacagagcaaacgcaagcacaattggagccgaaatcgggatcagaagctgatccagcggtcaacgacgcagatctcagggaaacgacgattcattccaatgaaacgtatgccaatccttctcccactcc

SEQ ID NO: 14915 - DNA, 442 bp, Glycine max
ccttgagctttgtcgcaggatcatccgttgatgaacttggtgacaccactgctgacctcaacctgtcgattttccaagctggggatccgtccctcagataatcaatcgcgtccattattgtgcaggtactctgtcatggtggtcccttctctagtaaagcttacggaaagaaggtctggatgggcatgagaagattaagagttatatatggtggatgtcatttggctttgcaattctggaagctttaatagtggcttgctactcacttccatattcaatttatgccgccacttatagggtcaagcatgtaatggtgacatctgttttattggtttgtggtgcaatgactattacatggatatgtgataccatatcagaatctggatttggtcaaggttcatctctaataatatgcgtgggaatacttacgggatatatggag

SEQ ID NO: 14916 - DNA, 457 bp, Glycine max
tctgaaccaacttcactgcacaacacaactacacaagagggtttcaactatctactcctcttcttcacactctctgtgtgggataaagcaatctcaatctcttcttataatggaaataagtattgcaaggtctcatctcgaaacacagggaatattcttttcaaatatttcaagaacaataggatgggaaagcattaggaaacttccatgtaatgtggctgcccagggttcaagacgggattttcacagattggcctcttcctgtcaagcttttactgcagtgtatcctagaaggtcttttatctgtagagcaaattctatgccaattagtttacaggaatctgcatcatatggagataattctattgaggatgaggatccatctacagacttggaagaggaagctttggcaaaaccaccttccagtgaacagataatgacattgcttgctgacaca

SEQ ID NO: 14917 - DNA, 589 bp, Glycine max
tcatgacgctcgagctcgagccgctcgagccgttggaattggataatagccaccaaccagaatcaaaataagaaaaacagagtaattttgcatcgtcgtcacacatggagatctccggcaccgttctccgtcaggtcagctacgtctccggctatgggacccacacgcggtcccgcggcctggctcctcgttttggggtgaggatggggatgggttctggtttctgtgacgaggggcatttgcggtattaccaggacaccaaaaaggttctcaccccaaagaagaagttgaagctgctcaagggtttctccaaattagggcttgcatcggatcccgagaaactcgccatgttctatgatcttcaacaaaacctcacctcggatgctggagatgtattactgagagagttagaagcagcaagagcaaaggagaaggaagtgaagaagaaaaggaaacaagagaagaaggccaaactcaaagctgccaagatgaattgtgaatcttcttcatcttcatcgtccgaatcaagtgacagcgattgtggctgtgatcaagtggttgacatgaacaccttcagagctggcgttgg

SEQ ID NO: 14918 - DNA, 629 bp, Glycine max
tttgtgcgcactggagctgagcagttgcagactgcgcggaagcaccagaagaataccaggacatggacctgctactgtatcttacttcttctggtgatcatcttgtttgtggtgctcttcactgtgaagccgtgggaaaatagcagtagtggtggcggcaatgggggtggtcagcctgcaccagctcaaacacctccatcaccttcacctcctgttaatgcttaaccttgggggactatgagtctatatttcacgaagcatattggtttcatttattttgatttgaagattgagcttttatattttgggatgcagcacgggtgattggcttatgatttggtaggaaatctgttgggttgaccagcagtgtcatttcaatccatggaaaggttggatgattaatctgagtttgtaatctgagggaagtgaatggctgattgttctgttgaggtaggttcttggagatcattattttgagcatcatattctttttctgtaagtagtttatctgtttgaacagttgtattgctgaccgatggttataaaaacatatgggatctttccctaaatatgatgtacagtatcttactgttcccttatgctatattactgtacccttattagtaaaa

SEQ ID NO: 14919 - DNA, 402 bp, Glycine max
tttgaagttgcttcatgcatgagatactgtagccggttattgcggaatatgcctatgacacctgactctgcattgctttatctggagcttccttctagtgtcttaatggctgatgcaatccaaccattgactgatgctgcgaaaccagtatcttgctggtcgatacaaggatataaccaagttccaggaagaggttattgcctttgcccctagctggagtagaggcaatactgtctagtgatgatctccaggtcgcatcagaagatgctgtatatgattttgtgttgaaatggtctcgacagcagtacactaaactggaagacaggcgagaagtcctgggtacccggcttgcacaattaattcgctttccttacatgacctgccgaaagcttaagaaggtct

SEQ ID NO: 14920 - DNA, 488 bp, Glycine max
agagctatgacgtcgcatggccgccttccttaacctcggattttcatcataactggaagaacctcttcacgaaggtgcgaaacttgatcagtgttggacgcgcttcctcctcctcctccgccgccgccaacgccatgggtgacgttcagatccacaagaccaaactctgcatcatcggaagcggtccctccgcccacacagccgccgtctacgccgctcgagccgagctgaagccgatcctcttcgagggctggatggccaacgacatcgcccccggcggccagctcaccaccaccaccgacgtcgagaacttccccgggttccccgacggcatcctcggcggcgagctcatggaacgctgccggagccagtcgctccgcttcggcaccgagatccacaccgagaccgtctccaaggtcgatttctcgaaccgtcctttcagggttttcaccgattcccgaaccgtcgaggccgaatccgtcatcgtc

SEQ ID NO: 14921 - DNA, 417 bp, Glycine max
gagagtgttcaatggaagacattttgatgcttttgaagaaagaaatgatatctccgcggaaggggaagctagctcagccacctgaaggcaatgaacatggcaggattgaccaaaaggggcttgctctgagatgttgtgtcatgtaattcaggcgagaaccaaagaataataatgtaaataattcaatagataatccttttgtgggttaactcatttataaatgtaattatggaccagtcgctctttaattgctcctcgagccgattcggctcgagctgccctaatcatcataactggaagaacctcttatcgaaggcgcgaaacttgatcagtgttggacgcgcttcatccgccgccttcgccaacgccatgggtgacgttcagatccacaagaccaaactctgcatcatcggaagc

SEQ ID NO: 14922 - DNA, 912 bp, Glycine max
caccttcatttttccacctctttattttcccaaatctccatctgggtcattagtttctgagcctctcttgttttttacaaccttttactccattcctcataccaacagagaaaaagggttggttccttttttattcttgtctccttattttgtttcttctgccactcattgcttgctgagtgagagagccttttgttctgagttcttggtttctttggtgagtgcttctgacaatatattggaacttggtttttggggattggtgcttttttgggggtacccaattgaacatttttttcttcttcttcttcttcttcttctctaacccataaagtcaaagctctcatctttgataagttgtgaacaaggtctatgagttgttccttgtagtgcagagaagggcatggtctttttgcagagtttgagtgattctgctacttactatactagttagtttgacatcttgagcgggtgtagaatgggatctggaaatgaggttcactcaattgtggagttcaatttggatgctaagtggcttatagatcccaagcaactatttgttgggcctaaaattggggaaggtgctcacgccaaagtgtatgaaggaaaatataaaaatcagaatgttgctgttaagattattaataagggtgaaaccccagagcagatttctaggagagaggctcggtttgccagagagattgccatgctatctagagttcaacacaaaaatctagtcaagtttattggggcctgcaaagaacctgttatggttattgtaactgaacttctcttaggtggaacattgcgcaaacacctgtggagtatccggccgaagtgtttggatatgcgcatagcagttggatttgctctcgatattgcccgtgcaatggaatgcttacactctcatgg

SEQ ID NO: 14923 - DNA, 419 bp, Glycine max
tgggtcattagtttctgagcctctcttgtttttacaacctgttactccattcctcataccaacagagaaaaagggttggcgttccttttttattcttgtctccttattttgtttcttctgccactcattgcttgctgagagagccttttgttctgagtttttggtttcttggtgagtgcttctgacaatatattggaacttggttttggggattggtgcttttttagggtaccccaattgagcattttttttcttcttcttaaacccataaagtcaaagctctcatctttcttatgttgtaaacaaggtctatgagttgctccttgcagtgcagacaagggcatggtctttttgcagagtttgagtgattctgctacttactatactagttagtttgacatcttgagcgggtgtagaat

SEQ ID NO: 14924 - DNA, 517 bp, Glycine max
tagtgtacgagttcatgcccaatggaacacggagtcagcatttgcagaaggagagagggagtggtcttccttggccagttcgactcacgattgccactgaaactgcacaagccatagcacatcttcattcagccatttgtccccccatttaccacagggacatcaagtccagtaacatactcttggactacaatttcaggtccaaagttgcagattttggtctttctagacttgggatgaccgaaatatcccacatttcgacagccccacaaggaacccccggctacgttgatccacagtaccatcaagactttcacctctctgacaagagcgacgtgtatagcttgggtgttgttcttgttgagatcataacgggacagaaagtggtggacttttcacgcccacataacgaagtgaacctggcttctcttgctgcggataggatcgggaaagggcttttaaatgagattatagacccattccttgaagccgaagcaagaagtgacgcatggactct

SEQ ID NO: 14925 - DNA, 431 bp, Glycine max
ggtacaaatccaacacagcctcatctaaatctagagcccccaaaaacgaaactacattgcactttcagatattttgttcgttactctctctctctctgcgacaccccaatttccaaaaacacaaacaagtggcctcattctgaactctgaaactcaaccttctttcttctcttctctctcgtgtttaactgttcagggcatcctagtttctctcagttagccaaaatggtagctgcaaatgagagggtcgtcgctgtgatcatggttggaggacccactaaaggtactagattccgaccattgtcattcaacgtacccaagccactttttccattagcaggacaacccatggttcatcatccaatttctgcttgtaaaaggattcctaatttggctcagatttatctgcttggtttctacgaggaacgcga

SEQ ID NO: 14926 - DNA, 752 bp, Glycine max
gcttcttcccctcaagaggtgagaggatatcttgacccaatctgacataattgactggaagactccttgtgtctggctgcattgcttcaaagctggagacacgtcttaggttagctctgtctttccgctgagtagaaacaccctcaatggctgtaaagatatcgggtgtaaatacgtacacaccgcagtttattcgatcacttacaaaagtttcgggtttctctgtgtaatgcaatagttcattagtggttggatcagctactaattccccgaactcgctcgctgactctgcagaaaccttcacaactagtattgttcccatcccaccatatcttttatgagcatccagcatttctggcagtggaaaactgcagcatacatcacagttcagcaagaagatatgtgacggatcctcttccatgatcagatctctaaaatgataaagaccaccagctgaaccatgtggcctgtcttccttcaagtatctaacagggactttaagctcatttgagatagaagatacatataaggcaaattcgcgttcctcgtagaaaccaagcagataaatctgagccaaattaggaatccttttacaagcagaagttggaggacccactaaaggtactagattccgaccattgtcattcaacgtacccaagccactttttccattagcaggacaacccatggttcatcatccaatttctgcttgtcaaaggattcctaattagcaggaccacccaaggttcatc

SEQ ID NO: 14927 - DNA, 716 bp, Glycine max
tttttgtttaaaatagtgagtcaactcgataaatttaatcccatcccatgataaggtcattttttgaatactaaggtgaaattaagtttaaatcccagtatctgatccgatctgatgattattgagtaaaaaggaagcagagtaaccgaatagggagagaacaaagtttagggttgtgttgttgggatccaacacgaacacgacacaaacaaagaacaaaggatgaggatgaagagggttttcgttgtttacagtgttttgttgctgctggtccagttttggcttggtgaggctgagacattctcggtggatggaaaggttttggttttggacgaatccaacttcgattccgccatagcctccttcgatcacatcttggttgacttttacgctccctggtgtggccactgcaagcgtctctctcccgagttagatgcagccgcccctgtacttgcaaccttgaaggaacccataatcatagcaaaagtagatgcagacaagcatacccgccttgcgaaaaaatatgatgttgatgcatatccgaccattttgctgtttaatcatggcgtccccacagaataccgtggaccaaggaaggcagatttacttgttcgttatctgaagaaattttctgcttctgatgtttccattctggattcagattctgctgtgaatatgttcgttgaagaagcaggcacttttttcccgatttatat

SEQ ID NO: 14928 - DNA, 821 bp, Glycine max
ctcgagcgaatcggctcgagctcccaatttcagagcctattctattattcttattcttcttttcgtcaattcaggaagcgcccacaattaccaggaggcattgtccaaggcaatcctattcttcgagggccaacgttcgggtttcttgccgcaagaccagagacagaactggcgcgccaattcgggcctcggcgacggctggacctacaacgtcgacctcaccggcggctactacgacgccggcgacaacatcaaattcgggtttccgatggcattcaccaccacaatgctgtcctggagcgtcatcgaattcggagacatgatgcctcccaacgagcaccggaacgccttggtcgcaatccgttgggcaaccgattatttgctcaaaactgtttctcagccaaaccgcattttcgttcaggtgggtgatccaatctctgaccacaattgttgggaaaggcctgaggacatggacacaagcaggacagtgtatgctgttgatgcaccaaacccagcttcagatgtagctggtgaaactgctgcggcactagctgctgcatcaatggcttttcgttcatcggatcctggttattcagacactttgcttcgaaatgctgctaaggcctttcaatttgcagatacctataggggtgcctacagtgacaatgctgatgttaggagtggtgtttgcccatattattgtgacttcgatggttatcaggacgaattgttatggggagccgcatggctaaggagggccactcaggatgaaaatttcctcaactacattcaaagcaatggtaaaacccttggtgctgaag

SEQ ID NO: 14929 - DNA, 419 bp, Glycine max
gcctatcctctgaaccttctctctcttacatacttttcttcgtagtgctaaattttctattcatcttacattcttactttcctcaattctttttcttttctcttctctcttcttcaacttcattcaaaactttcacctttctctctcttcacaaacggtgccggaaaagtccattctttttctcaattccccggcaaaacaaatgcgacccactttctagaacctcgccgtgtgccggaaagttcactcctttctcacttttccgcagcaatgtcaatcttcgacggagctttcatgaacacgcaactctccaagcacacttcgatcttcggcctccgtctctgggtcgtgatcggaattctcatcggagtcttcatcgtcttcacgctcttcctcctctccctctgccttgtctctcg

SEQ ID NO: 14930 - DNA, 421 bp, Glycine max
cttcggccaagccttccaacaaaaccaggaggcagcctttcctcaacactctttgctggcctctctgtctctcttacatagggctcaatttcccattgttctcactctccacaattctcttctctttcttcttcaactccattcacaaacggtgccgggaaagtccattccttttctcaattccccggcgaaacaaatgcgacccactttctagaacctcgccgcgtgccggaaagttcactcctttctcacttttccggcgtaccattaccctctttttcttccccgcagcaatgtcaatcctcgacggagctttcatgaacacgcaactctccaagcacacttcgatcttcggcctccgtctctgggtcgtgatcggaatccctcatggagtcttcatcggcttcacgctctttctcct

SEQ ID NO: 14931 - DNA, 364 bp, Glycine max
ggcgagtacattgaggaagtttatgcagcatatgaacaacacaagttggagacaatggtgattatgttaatgaccaatgtgcatgatatatattacaacttaacagcataattgtttttgtcttgtataatattcatccatcaattgtttattgggtgattagttttataagaatccatgaattttttgggagcatggcctgtgtggtttgaccgagccagtctgggctcccatataatttgttgagggacccattaaaatggtattctgtaggaaaaagcactggaaaggccctaatgggctgataacctgaccatggtcccctcttctgttttcattaagtgttttaaatatatgatgtctg

SEQ ID NO: 14932 - DNA, 681 bp, Glycine max
aaataccttccacacactctacgactttcgtgatttcattgcataatccattgactagaaatcccatattttccccccacattaactcacccaacccctctttctaaaaggcctcaaggatacactccggacttaattacgttattttgttagggtcaccgtttcgagatattctaaacttgtactgaaaaatatggagggaaaagaagaggacgtaagagttggagccaacaggtacggagagaggcagccaatagggaccgctgctcaggctaaagactacagagagccaccgtcggcgcctctcttcgaaccgggagagttgtcatcgtggtctttctatagggctggcatagcagagtttgtggccactttcttgttcctctacatcacagtgctgactgtgatgggtgtgttcaaatctaagagcaagtgttccactgtgggtatccaaggcattgcttgggcttttgggggaatgatctttgctcttgtttattccactgctggaatctcagggggtcatattaacccagcagtgacgtttgggctgttcttggcacgcaagctctctctgacaagggcaattttttacataatcatgcagtgcttgggagctatatgtggtgctggtgtagttaaggggttcgagccacacctctatgagacgcttggtggtgg

SEQ ID NO: 14933 - DNA, 440 bp, Glycine max
  unsure (1)..(440): unsure at all n locations
gcaaaaaaccaattcaagatgaagataaagtctcatttttccgtctccctaatgtttcttataggcatagccattagccacacacatgtttctttagcagaatgtgacaatgtgaaggactattgccctacaattcctccccaaaagcaaaccatattcctcaatggcttcccctgcgagaacccaaataacacaattgcacaatgatttcaagagcatggaactaagcaagccaggttcaagagacaagttagggtcattagttaaaattggtacagcttccaagtttccggggctcaacgcactcggccttgcgattggtagaagtgacattgaagtggatggccttgtgaacctncacaatcatccaagagccactgagatgatctatgtcagccaaggtgatgtagtcgctgcgtttcttgacactcggaaccagc

SEQ ID NO: 14934 - DNA, 421 bp, Glycine max
ctcgagccgaacaaacaccaccacccattgattggtttttgcttcatccaaactcaatgggtgccgacgaagactacgactacttgttcaagctggtcctcatcggagattcgggtgtcggcaagtccaacctcttgtcccgattcacccgaaacgagttcagcttggagaccaaatccaccatcggcgtcgaattcgccactcgaagtgtccccgttgatagcaagctcgtcaaggcacaaatctgggacactgcaggccaagaaagatatcgcgctattacattttttttttccatcaatcgttatctttcgagatatgcatgtgtgattgagtgatctttttgttggatgtgacgttcttgctttgatcttgatgatcatgaagtcactgatcaagatacagatgatccatttattta

SEQ ID NO: 14935 - DNA, 453 bp, Glycine max
caatgggtgccgacgaagactacgattacttgttcaagctggtcctcatcggagattcgggtgttggcaagtccaacctcttgtcccgattcacccgaaacgagttcagcttggagaccaaatccaccatcggcgtcgaattcgccacgcgaagcgtccccgttgatagcaagctcgtcaaggcacaaatctgggacactgcaggccaagaaagatatcgcgctattacaagtgcatactaccgaggagccgtgggtgctttggtcgtgtacgatgtaacccgacacgtgacattcgagaacgtggagagatggttgaaggagcttcgggatcacacagaagcatacgttgtggtcatgctggtgggaaacaaagcagaccttcgacatttgcgtgcagtgtccacagaagaagccacagaatatgcggagaaagagaacatctattcatgga

SEQ ID NO: 14936 - DNA, 876 bp, Glycine max
ccacaatccacatcctcacaaacactcttctcataagctctagcacttaactagtaatatttattagaatttgctagagaattagaagaataaacataataccccagatggcttcaaaaacttgttcctcccttgcccttttcctcacactcaacctcgttttcttctcacttgtctctgcatgcggttatacaccatgccctggtccaaacccaaagccaaggcccaaccccaaccctaaccctaaccccagcccaagtggctcgtgcccccgtgacgcactcaaactaggtgtatgcgccaatgtgctaaacttggtgaacgccactttgggtcaaccaccagttaccccttgttgctcccttctcgatggtctcgttgaccttgaggctgcagtgtgcctttgcactgctctcaaagcaaacattttgggcatcaacctcaaccttccgatctcactcagcttgcttctcaatgtttgctcaaggaaagccccacgtgatttccaatgtgcctactaagcttatactataagtataacatatcatcttaaatcttcttttgcttcgggtttgctctagttgtggctttccattttttcttcttcaaattctattgatcagagtgtggttctaattgtacgtgcatggggggggattaacttccgatcgctattccttcctttttagtgattttttttatttgtattgttagtgttgcgataaataaagttcctgatgctggcttatgtaaatcgctagggaaccaaaaagatgatgaactagtgtgttatttatttaatttgattgagaaatgattatgtattgcgtacaaagaatccttcttaatatatttttggcttttgtcttttttggt

SEQ ID NO: 14937 - DNA, 554 bp, Glycine max
ttctcttaagctctagtagttaagaaacattagttgaagaaaataagaaacattatacctagctattagagtttaagatggcttcaaaaacttgttcctcccttgcccttttcctcacactcaacctcgttttcttctcacttgtctctgcatgcggttatacaccatgccctggtccaaacccaaagccaaggcccaaccccaaccctaaccctaaccccagcccaagtggctcgtgcccccgtgacgcactcaaactaggtgtatgtgccaatgtgctaaacttggtgaacgccactttgggtcaaccaccagttaccccttgctgcacccttctcgatggtctcgttgaccttgaagctgcagtgtgcctttgcactgccctcaaagcaaacattttgggcatcaacctcaaccttccaatctccctcagcttgcttctcaatgtttgctcaaggaaagctccacgtgatttccaatgtgcctaatcatggcccatgagcaagttgctacgtgcttattcctagttgtgggtttccgttgttttttttttt

SEQ ID NO: 14938 - DNA, 496 bp, Glycine max
  unsure (1)..(496): unsure at all n locations
ttaagctcccgtagttaaatctgcgagccattagttaaagaaaaaaaaaaccctaaaaagtttaagatgggttccaaaactcgctctttccttgctcttttcctcacgatcaacattctcttctttgcccttgcctctgcctgcgggacatgccctagccctaagccaaggcataataagcacaagcctgttaagccaagtccttcaggtggctcaggtggttcgggtggttcaggaggctctggtggttcaggtggctctggtggttcaggtggttctggtggttcaggtggctcgggtggttcaggtggctcaagtacctcttgccctcgtgacgcactcaaactaggagtgtgtgccaatgtgctaaacgggttgttgaacgtgactntaggtcaaccaccagttaccccttgttgctccctcctcaatggtcttgttgatcttgaagctgcagtgtgcctttgcactgnccttagggcaaacattttgggca

SEQ ID NO: 14939 - DNA, 407 bp, Glycine max
tcttttaatctctagcagttaactaacaatattagcatttgctagtgattaggaatataaagatacgccaaccacaaacagtttaagatggcctccaaaacatgttcatcccttgctcttttcctcacactcaacctcctcttcttttcacttgtctctgcatgcggtagttattcatgccctagtccaaagccaaagccaaagcccaagccaaagcccaaccctaaccctagtccttctggtgcatcgtgcccccgtgacgcactcaagctaggtgtatgtgccaacgtgctaaaagggttgttgaacgtgactttgggtctaccaccagttaccccttgctgcacccttctcgatgggctcgttgaccttgcggctgcagtgtgcctttgcactgccctcaaagc

SEQ ID NO: 14940 - DNA, 398 bp, Glycine max
catcaacctcaaccttccaatctcactcagcttgcttctcaatgtttgctctaggaaagtcccacgtgatttccaatgtgcctaagcttatactatcacatatcatcttatatccttcttctgcttcgggtttgctctagttgtgcttttccattttttatttttatttttcaaattctattcatcagtgtgtgattctgattaatttgtacgtgcatggagggttaacttccgatcgttattccttcctttttggtggtattttaattgtatggttaattggagtgttgcgataaataaagttcccgatgctggcttatgtaaatcgcaagggaaccaacaagatgatgaactattgtgttatttatttaatttgattgagaaattattattgtatt

SEQ ID NO: 14941 - DNA, 322 bp, Glycine max
actcgagccgaatcggctcgaggcgctcgagctcttctcctaagctctagcacttaactagcaatattaattagcatttgctagagagactaggagtataaacataccccagtttaagatggcttcaaaaacttgttcctcccttgcccttttcctcacactcaacctcattttcttctcacttgtttctgcatgcggttatacaccatgccctggtccaaacccaaagccaaggcccaaccccaaccctaaccctaaccctagcccaagtggctcctgcccccgtgatgcactcaaactaggtgtatgcgccaatgtgcta

SEQ ID NO: 14942 - DNA, 491 bp, Glycine max
tcgcctacgcgtccgctttctcttaagctctcgtagttaaatctgcgagccattagttgaagaaaacaaaaaaaaaaaaaaaacaaaacaaaacaaaaacactagggtttaagatgggttccaaaactcgctcttcccttgctattttcctaacagtcaacattctcttctttgcccttgtctctgcctgcgggacatgccctagcccaacgccaaggcataagcacaagcctgttaagccaagcccttcaggtggctcaggtggctcaggaggttcaggtggttcaggaggttctggtggctcaggtggttcaggaggttctggaggctcaggtggttcaggaggttctggtggttctggaggttccggtgcgtcttgccctcgtgatgcactcaaactaggagtgtgtgccaatgtgctaaacgggttgttgaacgtgactttgggtcaaccaccagttaccccatgctgttcccttctcaatggtctc

SEQ ID NO: 14943 - DNA, 800 bp, Glycine max
acagcgggatcaaactacagatgttcagaagaggaagtcggtagtagatgtttctgttagtacaaataaatctgtattgagaagatggagtgccggtatgggggaaacctctgttcaagaccaggcagaacatgttcctgaagatcctgttccagtgacttctaatgatgtggtacatgctgaggctcctacaaattcagaagtaggagtggtgtctgattttattaccgaaagtcacaataataatgataacactgatcccgacgtaaaaccagaaagacaggaaaatataggttcttttgctgcagataatccagatgaaaccaacccaacagtgaaaggggaaactaacaaaaagttagcagcatcagcagagtggaatcaacgaaagcaagaagagttcaaccaaattcttaaaaaaatggtcgaaagcaaacctgttttatttgggaagtcccagcccagcagaaaccagaatatttcatttgagcagagaggagggtcttatgataattataaggaaaaacgtgatgcaaaacttcgaggagcaaaggctggaaaacaagtagacaaagaagcacaatttcaacaaatgcagcaactactcgataagaggaaagttgaaatgcccaaaagtgtgagtgcaagtaaaaaaagttctccaaggatgccccaaaattctcttagaaaatcaactccaccggcaaattccacaaaggaaacctctagacctttaactacgaaaaaaatatcatctagaacatcacccatgcctgctacacgtaagtcttggtcagcaa

SEQ ID NO: 14944 - DNA, 234 bp, Glycine max
cttcaatctcaccctatttttttccctcaaaacgacactgtttattcactacttcttagggttagggttaggtttccgcattatgatgtgaaaccctagcacgcctagagcctctttgtataaaacctctcctccgccgcgatctcctctcccatgggcaactgctgtagatccccggccgccgtggcccgcgaggacgtgaaatcgagcttctccaacgccgaccacggaaag

SEQ ID NO: 14945 - DNA, 468 bp, Glycine max
ttctcgagccgaatcggctcgagcagaaaccctaatttcctcgttatttcgatactctctccctttggaaaaaatcaaaggtgctcgcagtcgcagcgattagttcaaagattgtaagcgatcgtgaatcgtcgacaaaggttcgtgtctgaattgaagtagtgtcatcaccatgagattgagaaagggaaataaggtggagatccgtggcaatgctgatggacttagtgtggaatggtgttgtgctcgtataatttctggtgatggacacacctacagtgtccagtatgactgttctagcacaacaagcgaggccagcatagagagagtttcaaggaaggccatcagaccatgcccccctcttattaaaggtattgagagttgggcagcaaatgatcatgtggaggtttacattgcccgttcttggagagcagccactgttttgaaagtcattggtggagatttcta

SEQ ID NO: 14946 - DNA, 688 bp, Glycine max
gtcacttaatgttgagatacccacatatccaccctccacccccccacaccgtacaacatgggaacgttacacagtagaagatgcatatgaaattgtcagcttcgccaaaatgagacgcataaatgtcctcgcaccagtggatgtccctgggcatgcagaatcatggggtgctggatatcctgatctttggccatcaccttactgtagggagccacttgatgtttcaaagaactttacttttgatgtcatttctggtattttgacagatatgagaaagattttcccatttgagctatttcacttgggtggtgatgaagttaatacagattgctggagtagtacttctcatgtaaaggaatggcttcagagtcacaacatgaccactagagatgcctatcaatattttgtactgaaggcccaagagatggctgtttcgaaaaattggagtccagtgaactgggaggaaaccttcaatacgtttccatcaaagctccatccaaacaccatagtgcacaactggttgggccctggtgtttgtccaaaggttgtcgcaaaaggtttcaggtgcatttacagtaaccagggtgtctggtatcttgaccatctggatgtaccttgggatgaggtctacactactgagccactacagggaatacatatagcttctgaacaagagcttgtaattgga

SEQ ID NO: 14947 - DNA, 487 bp, Glycine max
cccacgcgtccgctccacccgcaaacaaacaaaacaaacattactctatctccaatctcccttctccgccgcgccactcatcggaaaattcaaaccaccgccggaggttatggacgctccggcaatcgctgctgatcttgatttcccaagcaacaaccatcgcttgtttaagagcaccaatcttcttatctggtagaaaccaaagcctaagcaaaagcgattttacttagcagagtttacaagttattctatgcttatcgctgcataaataatctgaaaataaaataaaaaaagaccagaaaagcatttatttattactatatagtagtattatttatcgttcttgtatctttttcatttagctaaaattagcggtttctagtcaactactgcaaagtttcgcgtgcagcttctgcagagtttcagtttcagagattaaattcgcttagaaatactagtattttttcctgttctgactcgcaattta

SEQ ID NO: 14948 - DNA, 463 bp, Glycine max
tttgcctgtatgtaatcctcaaatacttctctagatcgcggctggccttgtgcaactattctgtctgtatgggtattccctgtttgtctttattccagccctgtgtatgtccgttgtgccactggatatatttagatgggtggttgcaggtgtggcagggttcatgtcagcaacatttgtggcactgaacctccgggcacatatcaaatcagcaggtgaaaggtggttcttgattgttgctggcatttctctgttgcagctggctctagctgtggtactaaagctttacctcttcactgtatcagtttaagaggaaactggacagtatggatgaaatatacagaatgaaggtatagctttttggcattgtaggttttcatggatacaatttgtagctgaagcatgattcacagattaaaccatcgtgtattcattcttttgttgcaatatagaggcgaattac

SEQ ID NO: 14949 - DNA, 401 bp, Glycine max
aggtctatgcacaatgcagatgcaaattcaattcttgctgccaaagccaaaacaaaactgagtcatttctttgtttaggagtttggttctgcaaaaagccaaaaagaagaagaagaataaatggaagcagagacctcaaacggtggtggtattggaggcctttacgtcaaagttatgaccgacgaccaaatggaactgctcaggcaacagatttctgtctacgccaccatctgtgaacagctcgttgagatgcacaaggccgtcactacccaacaggacctcgcagggctgaggctgtgtaattagtactgtgatccgttgatggcatgctctggacacaagataactgcgaggcagcgctggactccaacgcctctgcagcttcaaatacttgagcgtat

SEQ ID NO: 14950 - DNA, 448 bp, Glycine max
tcgaaattcaattcttgctgccaaagccaccaaaacaaaactgagtcctttccttgtttggttctgcaaaagcaaaaatggaagcagagcatcatcaccagacctcaaacgctggtggtattattggaggcctttacgtcaaagttatgaccgacgatcaaatggaactgctcaggcaacagatttctgtctatgccaccatctgtcaacagctcgttgagatgcacaaggccgtaactatccaacaggacctcgcagggctgaggctgggtaatttgtactgtgatccgttgatggcgtgctctggacacaagataactgcgaggcagcgctggactccaacacctttgcagcttcaagtacttgagcgtatttttgacgagggaaatggtactccgagcaagcagaagatcaaggacataaccattgaacttggccaacatggcca

SEQ ID NO: 14951 - DNA, 917 bp, Glycine max
ctcgatggcaaggtccttcaagttatgcgcccttaattctacctcagggagtggtttcagtgcctgggtggtgtgcatacagtggtcaaatggggtcaatctctacttcagacagtccacagcaagcaatgagaaacggtcaaacatatggaacttctcgtcaaggtgagcttgcaggatcacaaggggcatattctcaattccgttctggcaccgttcctgtagggttttatacattgcagagggagaacatatttcctgagagacctggtcagcccgaatgccaattctacatgaagacaggagattgtaagtttggcgcagtctgtcggttccaccacccacaagagaggctagttcctgctcctaactgtgtcttgagtcccataggccttcctttacgtcctggagaacctttgtgtgtcttctattctcgttatggcatatgcaaatttggcccaagttgcaagtttgaccacccaatggaaattttctcttacaatatcacctcatcaccttcagctgatgccccaagcaggcatttgttaggatcttcatctggaactgctgcattgaatttatcttccgaaggacttgttgagtcaagctcagcatagcccaggccgctctcattatcagagactagactgattccttctggtgatgataacattgatgatgatgtagcttgaaaatggcttatgcggcttagacaattctagttcttgtgaggggtgaaatcattgatctgtaaattgattttcccattgctggagatgtacagaggtcatgtcaggttgattctgtcattctgaaattaaatgcagttgacagattcaattattctggatttcatgttacctggctgatttgataaatttaagcaaatgttgtcacgtttggtcaatcccaacgtg

SEQ ID NO: 14952 - DNA, 377 bp, Glycine max
gttaggatcttcatctggaactgctgcattgaatttatcttccgaaggacttgttgagtcaagctcagcaaagcccaggccgctttcattatcagagacaagacagattccttctggtgatgatgacatcgatgatgatggatgatgatgtctcttgaaaatgggtcatttggctttgacaatttttttttttctgaggggggaaatgattaatctgtaaattgattttcccattgccggagatgtacagaggtcatgtcaggttgattctgttaattcaatctgaaagtaaatgcagttgacagattcaattgttctggatttcatgttacctggctgattgaataaatttaagcaaatgttgtcacatttggtta

SEQ ID NO: 14953 - DNA, 575 bp, Glycine max
cggacgcgtgggctgacgcgtgggcggacgcgtgggcgaagagagcgtcgtcatcttcgttatgtcgcgacagagatccagaagagtcgaactacctcccgctcaggagaatattgaaaaattggagaaggttgtaaacgatggaaattattatggagctcagcaaatgtacaaatccgttagtgccagatatgtttctgctcagaggtactgtgaagcattagatatcctacattcaggagcgtgcattcaattgtctcatgggcaggttacctgtggagcagagctagctctattgtttgtggagacattagggaaagggaaaattccttacaatgaggaaattcttgaacgtctcaacaaaatctacaaatcatttcctcgggtttcattgccacaaaacctatgggatgtcgatgacatgcagcagctttctgaaaacattggaagtgcaaagacacgtgttgagggctgctcctcattcttaaaagctgctatcaagtggtccgccggacatggagcaaataagaatggatctccagagctgcacatcatgctagctgagtacatatttt

SEQ ID NO: 14954 - DNA, 558 bp, Glycine max
gttcaaaagaaacaaaacgaatgcgcgtgtagaacaggtgttttactagaaatgagttttgggtttagctaatggctatttatacataaatacacatttggtccgcccgcgcgtgcgttggaattgaaacaaaaacaagtggcattgagaagaacagaaacatcatcaacacaaacacaacaaaaaacagccaaagaggaatacctcaacggaacttcctcgtttggctttcagtgtctgtctctcactccttaccacaaaaccctacgcctttaccccttgcttttatttatccttcaacaacgcccgttccttgttgcttctcgccagaagaggatttggatcggagcgagtgtttttcactatcgatctggtttccttggatttggatttggattgaactctaataatgtggtgtgcggtgagagattccggtggccattactgccctaagaagaccgatgatttatgcggcgacgtttgtggccaggtaattattatcattccatacaagaaaaaaagttccatcttttttatgtgtgcgtgatttttgtgaga

SEQ ID NO: 14955 - DNA, 479 bp, Glycine max
  unsure (1)..(479): unsure at all n locations
gctttttagtctattattgattagaattgcccccttggtgttacgttcaatgattattgaaaaaaaaaacatcaatagatagggaaaatttggcatatggatcatggtttgatttatttacagggtggaatgaagttgcattgtcaagttataatgttgttgtattatctttcttgatgaatgttgacttagatgtttgctctttaatgatacaggagtcaagtcaagtatcgggcatgtcaagagtgcgctgcattttacgcggcgtggatgtaaaaacctgcatatttctttttgctgttgtgccaatgtgcatctttggaatatacttgcatggacagaaaatctcctacttcctgcggccactatgggagaaaccacccaagcctttccatgtcattccacattactacaacactantgtgtcgatggagaatctctgcagacttcacggctggggagtccgtgagttcccgaga

SEQ ID NO: 14956 - DNA, 475 bp, Glycine max
cttacgcgtccgcccacgcgtccggaaagagagagaagaacaaattcaacactcacacacacacaaagtgactcttccgatgatgttaatcggcgacggtgccggtggccggaaagtcctcgtcggcgttaaattagatcctcgcagccgcgaattgctgacgtgggctctcgtcaaggtcgccgagcccggcgacctcgtcattgcgcttcacgtcctcgactccatcactgagggaacggcgtcgctgttatctctcgtgaagacattcgattccgttctcgccgtctacgaaggtttctgcaacctgaaacaggttggtctaaggcttaaagtttgtcgcggtgactcggttcggaaggccttggtgcaagaggcgaaggcgtttggcgtttccaccgtgattttgggaacttcgaaatcttatcatactattcgttcttccgcgtgggttgcgaaatactgcgcaaagaaa

SEQ ID NO: 14957 - DNA, 803 bp, Glycine max
ctctctctctcaacccacaagaatccctccctttctggctttctctctctaaaactatcatgtcctccaccgcggctcccgtccttcccatatccaacccccaaaccaccgccgcaggcggcggcgccatcgaggctccggcgaacaacccggccttccgcgccttcatcaacaacctctccgcgtccctccgacacggcctcgaccagcgccgcccgtggtcggagctcggggaccgctccgcgttctcgaagcccgagtccttctccgaagccaccctccgcgtccgcaagaacttctcctacttccgcgtcaactactacgccgtcgtttcactcattctcgcagtctctctcctcaccaatcctttctctctcatcctcctcgttggcctcctcgcctcttggaccttcctctacctcttccgtccctcggatcaacctctcgtcattctcggccgaacattctctgacttcgaaaccctagccctcctctccgccttcaccgtcttcgtcgttttcctcaccagcgtcggatctgtcctcgtttcggctctgatgctcggtgtcgccgtcgtttgcctccacggcgcgttccgcgtgccggaggatctgttcctcgaccatcaggagaattctcaggctaccggattcctctccttcctccgcggcggaggaggaggaggatacaatcgtggtggcggtggatatggtggtcgtagtggcggtggcggtggcggtggtggataccgtagccgtgacggtggttatggcggtggctatggtggtggtggtggtggtggt

SEQ ID NO: 14958 - DNA, 387 bp, Glycine max
ctaaaaccacaaattacaaaatcccctcatattatctctctctctcttaaaccatcatgtcctccaccgcgcctcccgtcctccccatctccaactcccaaaccaccgcgggaaccaccggtgcaggcggcggcgccatcgaggctccggccaacaacccggccttccgcgctttcatcaacaacctctccaactccctccgccacggcctcgaccagcgccgcccctggtcggagctcgcggaccgctcagcgttctcgaaacccgagtccttctccgaagccaccctccgtgtccgcaaaaacttctcctacttgcgcgtcaactactacgctgtcgtttcactcatcctcgcagtctctctcctcaccaatcctttctctctca

SEQ ID NO: 14959 - DNA, 584 bp, Glycine max
ggacgcgtgggtttcacttgtactcactcaatccgagaccaaaacggcgccatgcctaccgtcagtgtggggcgggatcgcctgtttgcggctctaggaaagacttacacgcaagaggaattcgaagacttgtgcttcagtttcgggatcgagcttgacgacgtcacgacggagaaggcaattgtgagaaaagagaagcatttggaggaagaagaagctgatgaggacgaagaagttatctacaaaatcgaagttcctgccaacagatatgacctcctgtgccttgaagggcttgctcaagccctccgagttttctgtgagttccaggagattcccacttacaaactgtccaagatcagtaaggatgcaatgctgaaaatgcacgtgaagccggagacttctctgattcgtccatatgttgtatgtgctgtattaagaggtataacttttgataaagcaagatacaacagctttatcgatctccaagacaagcttcaccaaaacatatgtcgccgaagaacccttgttgccattggaacccatgacctggatacattggaggggcctttcacctatgaggcttt

SEQ ID NO: 14960 - DNA, 493 bp, Glycine max
ctgaaacaaacgctatgaatcgaagctgaaacgcttcatcaccggattctcgctctcaactcagataccaactcggagtttcggactcatcgcctccgattcaaaaccctaactcggacctcaaactcaatcgatttcatacaacatggcttcggatgctgatatggaggactatggatttgagtactcagatgaggagcaagaggaacaggatgttgatattgagaatcaatattacaattcaaaaggtttggtcgaaagtgatccagaaggtgcacttgctggttttgctgaggtagtgcgcatggaacaagagaaggcagaatggggatttaaagctctaaaacaaactgtgaagctctattatagacttggaaggtataaagagatgatggaagcctaccgggagatgttgacttacattaaatcggcagttactcgtaactatagtgaaaaatgcataaacagcattatggactatgtctctggttca

SEQ ID NO: 14961 - DNA, 428 bp, Glycine max
ggagcacccagactgggttgtgaggacttgcgaacactcactcgccactgctcacgaaacgtcgaaaccctaaaacctcgatttttcccaatccattccacacacaatatggcttcagatgctgacatggaggactatggcttcgagtactctgatgaggagcaagaagagcaagacgttgatatcgagaatcaatattacaattcaaaaggtatggttgaaagtgatcccgaaggtgcgcttgctggttttgctcaggtagtgcaaatggaacaagaaaaagcagaatggggatttaaagctctaaaacagactgtcaagctacattatcgactgggaaggcataaagagatgatgaaagcctatagggagatgctgacatatattaagtcagcagtgactcgtaactatagtgaaaaatgcataaa

SEQ ID NO: 14962 - DNA, 455 bp, Glycine max
  unsure (1)..(455): unsure at all n locations
ttaatatgtttttgttatgtaatagccactctgattccttgctaggtcaaacttattaagatgatcctaattttgatttctggttaaacaagttcgatcgatcgaggttgggcaaacaactggaattgcagagaaaatgaacagcgccatcttcaaagcttcaaacagcaacaatctccattcctctctcagggccgcactcttccattccacctctcccttgcaacgtaaacgccgcaatcattgggactccagagggagcaaccatacctcgagaaggtttagaagggtgcaagcgaaacacagagtaatgaacagtatcaatgattatgcagaatccctgtttcagagctggaagcaaggtattgatagggatgacccatcatcaagtcgaggcacctcatgggttaaaaaacaatattctgatnngggctctggaaggtaccggatagcat

SEQ ID NO: 14963 - DNA, 569 bp, Glycine max
ggcccacaagtagcaggggaaaaaaatagccacactagtctcaaaacccgtaaattcttcgtctctcggtttcatctagttttccctctgttcttcttccgccacagttgatctgtctcgaacctttgtgaccaaggttgagaaacgctcactggtgggctatgagtttgagatatggcagtgtggtcttggttgctttagtgcttctgccacacatggcttctgctgcttcaattgtgaagaacctaccgggttacaagggtgatcttccattcaaacttgaaactgggtacataggagtgggagaagaagaagaggtgcaaatatttcacttatttgtggagtctcagagaaatccattcattgatccactgttaatttggtttgttggaggtcctggttgctctgccctatctgcgttcttttttgaaaatgggcctttagtaatgaatgagaattacaatggaaaccttccaaaacttgagttgaacccatattcatggacacacacgttgaatatgatatacatagacatgccagtaggcacaggattttcatactcagaaacg

SEQ ID NO: 14964 - DNA, 1620 bp, Glycine max
gaaaggtccagactcttctagacattaaatacctctccgaaggcagccaaccgaccaaacaacaataaaatgaagaaagaaaaaactctgcattcaattcgattgattcacaaattgcaactccttctcggcttttcctaatcaacacgaacacaacacacacagagaaagatggattttgaactgagaagagcgagagagaagcttgagaaagagcagagggagaggaaggaaagagcaagattgaagcttctgaaggaaaagaaggccaaagaagaggctcagaagcaaaaagaagccatcgaagctgttcaaagatctcgtcgtattgatgccgcccaagctcaactcaaggctgaccaacagatgcaagaaaacctacttgctggcagaggaatagtgttttaccgactactagaggcttttttttatgaaggtgctggagataagatcaagctacctccttcttgctttgcagaactgtctgagcagggtacttttgataagagacagggacccttatactttcagttgtcgttagttcatgaagaaagcacttcaagcatccaaactactgataaagtgaaacaggggaggaccacccattctggagttttagaattcactgctgatgaaggttcagtgggtcttcctcctcatgtatggaataatttgttttctgaaggcactccaaaacctcccttagttgaaatccgctatgtttggcttccaaaagggacatatgcaaaacttcaacctgaaagagtaggattttccgacttgcccaatcataaggctatcctcgaaacatgtcttcggcagcatgctactctttctcaaggtgacattttaactgtaaactatggagaacttgcttacaaattaagggtccttgagttaaaaccttcttcaagcgtatctgttttagaaacagatattgaagttgacatagttgatcctgatacatcttcagaaaagacagatgagcatgttttaatgccacttgtattcggaatgtcacaaattggaacagtagaagaaggaaagtttgtgtattacaaattttccgtagacaatgtaacttgggagaaactttcttctgggaattcttgtgttgagttaaaattagaatcagagacagatgggggggacactgatcttttcatctccagacatcctctcatatttcctacacgacaccagcatgagtggtcttctcatgatattggctcaaagactttgattcttagctctaatgataaaaacatgggtgcagggacttacagcattggtgtatatggtttcaagggaattactaagtataaaatatcagtcatggtccaggataatttcaaccaaaatgttggtcagcaagcatcatcttccatgtcatctatggaactggataccgaacaatgtaggaactgcaagcattatatacccggcaggactattgcactacatgaagcttactgtagcaggcacaatgttgtctgtcagcatgcaggctgtggagtggttcttaggattgaggagtccaagaaccacattcactgtgacaggtgtggtcaggcgttccagcaggcagaattagaaaagcacatgaaagtttttcacgag

SEQ ID NO: 14965 - DNA, 699 bp, Glycine max
gtcctaatcccaaattcgtagctgagaaatccgtaaaaactaaaaagggttttcagttttgttttgtagcagagaagaacgtaatcataatccaaattccaattccaaaacgagccaccaacaacaacccaactggtgtcgctctgtcacttccctttcctcgtgtgtggttcgtactatgaagaggactatgccatggagtgacgacgatgagtcatcgtcttcacattcagattctgaacgtgatagtgaaactggaggggaaaactccaaaggtaaatctaggaagcagaaaactgagaaaagtggtgtaattgactttgaggctttgaagcgacacgggtatagaggtggaccttctgtcctaaaagtacccgcaccaaaagaagatgactcaaagcaagattggtcgtggtccactggaaaagaaaagcgtgtagacaaggaaattgaagaatcatatgaagaacgaaagaaaacaagagaggctatttccctaggagaggagctgccagctgctctgacttggaatgacaagaagaatctttctttctctcagaaggaaaagaggaagagagagctgggtcaagctagcagaggcaaaaattatgttgaagaatagaagaggtgttgagagagaatggaatctattctggttttgatgctaaaagtgatatgccagcctagatagaatgtcct

SEQ ID NO: 14966 - DNA, 318 bp, Glycine max
aagctttttcatcagaatccaaattccaattccgaaagcagctaccaacaagaacccaaccggtgtcgctgctctctctctctgttacttccctatcctcgtgtgtggttcgtactatgaagaggactatgccatggagtgacgacgatgagtcatcgtcttcacattcagattctgaacgtgatagtgaaactggaggggaaaactccaaaggtattatttcatcttcatcctcttttctctgtctagttgttattatgactctgctgattgctctcaagtttgattcattcaatgtgaaagttatatacatttttc

SEQ ID NO: 14967 - DNA, 643 bp, Glycine max
ctgaactggaaaatgcaacagaaaacttttcatcttccaacctaattggggtagggggaagtagttatgtataccttggtcggctgaaagatggtagcaatgtggcagttaaacgactaaaagaccaaggagggccagaagcagactctgcatttttcaaggagattgaactattagctagacttcaccattgtcatttggttcctttgcttggatactgctccgagttaaaaggaaaacatgttcagagattactagtatttgactacatggccaatggaaatttgagggactgtttagatggagtttctggaaaacatatcgattgggccactcgtgttatgattgcaataggagctgcaaggggcttggagtatctccatgaagcagctgctccaagaattcttcatagagatgtcaaatcaactaacattcttctggatgaaaattggcaagcaaaaataactgatcttggcatggctaaaaacttgagatctgatgacctccccagctgttcaaattctccagcaagaatgcagggaacatttggctattttgcacctgagtatgccattgttggtagagcttctcttgagtcagacgtctttagttttggggtggttcttcttgagcttatcagtgg

SEQ ID NO: 14968 - DNA, 459 bp, Glycine max
ttcacgctttcgcccacgcgtccgcccacgcgtccgggaaaatgcaacagaaaacttttcatcttccaacctaattggggtagggggaagtagttatgtataccttggtcggctgaaagatggtagcaatgtggcagttaaacgactaaaagaccaaggagggccagaagcagactctgcatttttcaaggaggttgtacctaatcttggaatatcagtattcttcggctggtcattttatgttataatgtcccacagtgtctagagaagatgatgagcctaaaacatttttattgctgtacagcattcatagcaattaaccatgcttttgtttgtgcagattgaactattagctagacttcaccattgtcatttggttcctttgcttggatactgctccgagttaaaaggaaaacatgttcagaggttactagtatttgactacatggcaaatggaaa

SEQ ID NO: 14969 - DNA, 410 bp, Glycine max
gaatatagatgcagatgcaaaagtgcccatacaagacattgctagttaccaggtggttttctctagcgaggggaagatagttggtttccaacctttgagtcgtgtggctgtcaatcattgggctgctaatcctttagcaagggagctatatggagggaaaaagctttctccaagcctcattgaaccaggtctcaaggtgccccttcctgaaaaagttatcgttgtagagttattaatgtcgataaatccagatgcatattttgctctagccaggccattccggtgacccttttcttggggtaattgtaagactagaagctagttagtctcctactctactggttgattaaccaatcagaatattgtagatttaaggttatattccccctaagtgaaaattttctggcacc

SEQ ID NO: 14970 - DNA, 472 bp, Glycine max
caattgtcgtttttgcttttgaaagggtctcacttctcttgtgtctgtcacactctctctttttctttttctaattttttgtgattgtccaatctcctgtgatttaagattgatgaaagtgacgcacaacatctgaaggagcccataaatttgttaattttttgtgatcccattgtgaatttgtggggatctgaattgcggaggaagatgattcagcttctgttcacggtgatattttcggaggcttcgatgatagcgttgctgctgttcaagacccctttgaggaagctcgtgataatgggcttggatcggttgaagcgaggtcgtggacccttgatggtgaagaccgttgcagggaccgttctcgtggtgttgttgtcgagtgtgtatagcatgttgaagattcagaagcgtgggatccaagacggtgctgttgttaaccccaccgatcaggttcttatggccaagcacc

SEQ ID NO: 14971 - DNA, 1011 bp, Glycine max
gatttagccttcctgtccccttccgctacgaaattggagcagaggagtggcggaggacgaagtcgacggcgacaatggttaacgaaacggtgcggtggtgtgctttgttgtagtcgtctccgatcatcatcgagaatgcgcaatctggctgcacctcattccttgggggttttcatctttcgccccaataagcctccttttctcactctcccctcactctctcgaagatctctcccttccatccagtgcggtgcagttcaattccgcccctgcatcgatatccacaaagggaaagtgaagcaaattgtagggtccacccttcaagacttgaaaggctccgatcccgtcaccaattttgagtctgataagtcagctgctgaatacgccacgctttacaagcaagatggactcactggtggtcacgtcatcatgcttggtgcggatcctttgagcaaagctgctgcccttcaagcattgcacgcttatcccggcggtctgcaagtcggagggggaataaattctgacaattgtttgagttacattgaggaaggagcaagccatgtcattgtcacttcttatgtattcaataatggacaaatggatcttggacggctaaaagatcttgttcaaattgtaggaaaagacaggcttgtgttggatctcagttgcagaaaaaaggatggtaaatatgcaattgtcactgatagatggcagaagttcagtgatgtttttgttgatcctgatgtaatggaatttcttgccaattttgctgatgagtttctggttcatggtgttgacgttgaagggaagaagttgggaattgatgaagagcttgtggctttgcttggcaaacattcaccgattcctgttacttatgctggtggtgtgactgaaatgtctgatctggagaggataaaaactgccggaatggaccgtgtgaatgttactgtgggcagtgcattggatatttttggggggaacttggcttatgaagaggttgtagcttggcat

SEQ ID NO: 14972 - DNA, 386 bp, Glycine max
taacacattataactcctgtttctttattaattctctctttcaaatatatggcagaagatgcttcaattattccaacacacacaaaagcttggtactactctgaacatggtagtccaggtgatgttctcaaattagatcctaattggcccttaccccaacaactcaaagatgaccaagtgctcatcaaggtcatcgctgcatccattaatcccgttgattacaagaggatgcacggcgagttcaaggacactgaccctcatctgcctattgtgccgggttaatgatgttgctggcatagtagtgaaagtgggaggaggaagtaaaaaaatttaaaggttggagatgaagtatatggtgatatcaacgagcaaggcttgtcgaacct

SEQ ID NO: 14973 - DNA, 968 bp, Glycine max
gtcgttgtgcaggtaccttcatgctccaactagttccccttgcttcctcgtcattatcatcatctgtaatttcgtattagcgtacactacacacactcctcttcctagctgccttcacagcaaaatactggttgaaacctcttttgccttgtctagaggaggaagtggttagagttgggaacgctactacttctgagatgcgtgttggatcaacggctaattgttgttacctgcagctggaagctcctcaacagaataatgtaaccgagtcatcatcagatatgtcagatcggatgatcaagatccagatcgcaaatcaccctctttatccagatttactctctgcatatatagaatgccaaaaggttggagcaccgccggaactggcatgccttcttgaagaaataggccgagaaagccaccgcatgaatgctcgccgtgagattgtggagggtcctgaacttgaccacttcatggaaacattctgcgaagttcttcatagatacaaggaggagttgtccaggccccttcaacgaagcgacgttgtttttgggtgacatggaatcacaactcagcaacctttgtaatggaacactaacaaagtcatcggataacaacaaccgctccgacgaggtagctagtggggcatcagaagaggaattaagttgtggggagatggaagcatttgaagataatgtatcttcagtaacttgtccaagtgatcaaaggcttaaagagatgctccttcgcaaatacagtggccattttagcggtttgagaaaggaatttctgaaacgaagaaaaaagggtaagctaccaaaggatgcaaggatggcactcatgggctggtggaacacccatcatagatggccttatcctacggaggaggagaaagtgaagttgtcagaaattactggactggatcaaaagcagatcaataattggttcatcaatcagagaaaacgtca

SEQ ID NO: 14974 - DNA, 660 bp, Glycine max
gagaattagatatacatattttatttatttgcttaggatgcttggggatggtcctaaaacttacttgcttggaccccagtagttgagttgaggaagtgatggaagcagtttacaggttgaaacctcttttggatgtggttagagttgggaacgctaccacttctgagatgcgtcttgaatcaacggctaattgttacctgcagctagaagctcctcaacctcaagagaataataatgtaaccgactcatcatcagatatgtcggatcggataatcaagatccagatcgccaatcaccctctttatccagatttactctctgcatatattgaatgccaaaaggttggagcaccgccagaactggcatgccttcttgaagaaataggccgagaaagccaccgcatgaatgctcgccgtgagataggggagggccctgaacttcgccacttcatggaaacattctgacaagttcttgatggaggctaggcgtgaagttacactccccttcaacgaggcgactttgtttttgggtgacatcgaatgacaactcgaggagctttgtggagagacactaacaaagtcatcggataacaacaaccgctccgacaaggattcgttgtggggcataattatgaggaattaagttgtggggagatggaag

SEQ ID NO: 14975 - DNA, 473 bp, Glycine max
aaaagaattaatttgttttcgctcttttggtgacatgtcaaagtagagaaataataagtgagatgagtctggcccattttcaaaattttcatcattatagttattattatgattatgatactgagaaagttgggggacctgaaatttggcgtctacagctatcacattgctatatatcttgttttgtttggcaaaagactgcagcatttcactacaaattttgctgtttgtaagatgattgaattgaaattttttcctgttttctgcttatcttttcaactttcctttgctaagtgtatttgagaactgagcttgaggaatgttaattgcatagtcggaagtcaagccatttatttacactgatgcaaggtctacacacaagtggtcgaattttgttttgaattgtataattcatgcattggagaacgattttgtctgtaataaaattctattcaaaagtttatgttatcgtc

SEQ ID NO: 14976 - DNA, 525 bp, Glycine max
gcaaaatcaatagccctcacaagaagaccctatcttcctcttcctctcagggaatgggtggaagatggagaaccctctctttgatctataaccgcataaacacttcttcttcttccaaaccccactttccctccttctaccgctccctctctctcgccgccgcaacttctgaaatacccgacccggatccaatcgggttcggagccccggaactcgacccctgcgtcaaaatccccgtcaaagcttatttcctctccaccagtataaatttgaagggcattcaggctgataatcacagaaacgttgtgcctccatcttcccgctcgtcttcaaactatgttgctctccgcttctgtgacttcaatttggactccaatggacatgggtttcacatgaaagcatgcaactgtcgttacatgttatatcagtatggctcagctgctttctttaatattgaggatcattaagtgtaatagtacctggtattagttaagaggcatgcatcttggtttacttcaatatatt

SEQ ID NO: 14977 - DNA, 595 bp, Glycine max
ccggcgcctcgccttcctttttctcctcctccacgctacgacgtcgtttgcccctcgtcggcgcgttttgcatgctcagtttgggactctccaatctctgcacgcccttccattcctctgccctcaaaacgggatccaagttcggtattcgaagccactccagcaccagaatggaagggagtaactccactgtgccgagtattgttgtctatgtcactgttcccaacaaagaagcaggtaagaagttggctgaaagcatcgtcaaagagaagcttgctgcttgtgtcaacagggtaccgggtattgaatcggtgtaccagtgggagggaaagatccaaactgattctgaggaacttcttattatcaagactaggcaatcccttctggaggcattgacagagcatgtcaaaactaatcatgaatacgatgtgccagaggtgatctccttacccatcactggaggcaatcttaaatatttagagtggattaaagagagcacaagggactgactatcaagtttatagcctgaggtgtggtttccagagttattctgctggtgtgttaaataaagtcagtttgtcatctatgtaaggca

SEQ ID NO: 14978 - DNA, 423 bp, Glycine max
cgacgtcgtttgcccctcgtcggcgcgttttgcatgctcagtttgggactctccaatctctacacacccctcaaaacggggtgcgttcaatctctcttacgatccaagttgggtattcgaacccagtcctgcatcagaatggaagggagtaacaccaccgtgcccagcattgttgtctatgtcactgttcccaacaaagatgcaggtaagaagttggctgaaagcatcgtcaaagagaagcttgctgcttgtgtcaacagggtaccgggtattgaatcggtgtaccagtgggagggaaagatccaaactgattctgaggaacttcttataatcaagactaggcaatcccttctggaggcactgacagagcattgtcaaggctaatcatgaatatgatgtgcccagaggtgatctccttaccca

SEQ ID NO: 14979 - DNA, 447 bp, Glycine max
ggtcggccaagctgggctattctgtaccttttgatgacgacatcaactttcataagacaattgctggggccatcgttattggtgttatacttcatgccggggatcaccttgcttgcgattttccaagacttgtaagtacgtctgaagaaagttatgaaaagtatttgaaaggcgtatttggtgatcgtaaacccagttatgtagacctagttaaaggcgtcgagggtgtgactggagttttgatggtggttcttatgataatagcatttacacttgctaccaaatggttccggagaaatctcattaagctgcctaaaccatttagtaggctcactggcttcaatgccttctggtattcacaccatttgtttgtcattgtctatgtcctcctaatcatccacggaataaagctttacctcgtgcataaatggtacctcaaaacgacat

SEQ ID NO: 14980 - DNA, 709 bp, Glycine max
gaggccttcaaggagattcctttaagggagcccatcttctagcctctgcgtgctgcaagcatttcaccgcttatgatttggacaattggaagggcgtcgatcgctttgtcttcgatgctcgcgtatctttgcaagatttagcggacacataccagcctccgtttcagagttgcgtgcagcaaggacgagccagtgggataatgtgtgcttacaatcgtgtcaacggagttcccaactgtgctgattacggtctgttaacccaaaccgccagaaatcaatgggatttcaatcggtatatcacttcggattgtggagcagtgggggttcatacacgacaggcaaaggtatgcaaaatcaccagaggatgttgtagccgatgttcttcgggctgggatggatttggaatgtggttcttatttgacatatcacgctaaatcagcagtgttgcagaaaaagttaggcatgtctgaaatagaccgtgcccttcagaatctgttctctattagaatgaggctaggcctatttgatggaaatccaacaaggctctcattcggcttgattggctccaatcatgtatgttccaaagagcaccaatatctggctcttgaagctgcaagaaatggcatagtcctcttaaaaaactctcccacacttctcccacttccaaaaacaagccccagcatttccttagcagtgataggtccccatg

SEQ ID NO: 14981 - DNA, 404 bp, Glycine max
gaccacaaatatacagtcccactcttcttattccatttacttctcttgcctctcttgctccttttcgtcatcggcatcaaccaatttgaaaagaaaaaaaagaaaaaaagagcatggtgttcccaatggagctcctgaggcttgcagattggatcttgtaccagctgcttgctaactcatgttatagagcagcaaggaaaatgaagagttatggattccatttggggtatttgtcatctaaaccatcccttcaaccttcctctttccctagtgttaccgaatgtgattgggagggtagaggctcacaaacacttgttgcttgtggcattcatagagtccttttgaggtctcactccttctttccatatttcatgctcgttgccttttgaagtggcagcatttta

SEQ ID NO: 14982 - DNA, 500 bp, Glycine max
atgaattcaaggacaatgtagagaagctggttgataaagctcacattcactatgaaaatctctctctgtcatcagcttgtgaggctgttctggagattggtaatgttgggaatttgtatatggatcagcgtgcaccatggtctctctttaagcaagggggcactgctgctgaagcagctgctaaggaccttgtaattatattagagacagtgaggattattgcaattgcactctttcctgttacaccaagcttgagttggagaatatatgcacaacttggctattccagggaccaatttgatgcagcaacctggagagacaccaagtggggtgggcttaagggtggccaagtcatggctcaacctaaaccagtctttgccaggattgaaaaccaaactgaagtggaagacaaaggagtcgcagttggaaagactaagaaaagcaaagcgaagccgaaacagcctcaagaagtcgtcggagcctagatacccatttttgac

SEQ ID NO: 14983 - DNA, 498 bp, Glycine max
cctcgagtcgaatcggctcaaacttgccttgccatggcctcaaactccatggctggcttgatcaccggttcgaattctcacttctcgcgtgactccgatgagcatcagactcctcctacccgacaggcttcatcgaaaactacttgtcgagtttgtggcgatgagattggatacaaggaaaatggggagctgtttgtggcttgtcatgtgtgtggatttcctgtttgccgaccgtgttatgagtatgagaggagtgaagggaaccagagctgtcctcaatgcaacactcgctataagcgccacaaaggttgtcctagagtagctggagatgaagaggacaactttgatgcagatgattttgatgatgagtttccggttaagaatcatcgtgaagatctagatcggaaccatgatgttaatcatgtggaaaatggggactacaatccagagaagttgcatcccagtggtcaagctttctcttcagctgggagtgttgcg

SEQ ID NO: 14984 - DNA, 1860 bp, Glycine max
tcgcttaccccttcccaaaactcatttctcatctcaatcaatccaatggactctcccaacgctttgtctaccgctccggcagcgggtagtaggaagaacgcgacgctaatttgcgtcccaataatgggagaatcagttgaaaagatggagattgacgtggacaaagcgaaagccggaggcgcggaccttgttgaaattcgattggattctttgaaaacctttgacccctatcgagatctcaacgctttcattcaacaccgttctttacccttgttgttcacttacaggcccaaatgggagggtggtatgtatgatggtgatgaaaataaacggctggatgcacttcggttagccatggagttgggagctgattacattgacattgaacttcaggtagcacatgagttctatgactctatacgtgggaagacattcaataaaaccaaggtcattgtttcatctcacaactatcagcttactccttcaattgaggatcttggtaaccttgtagcaagaatacaagcaacgggagcagacattgtgaagattgcaacaactgccttggacatcactgatgtggcacgcatgtttcaaataatggtgcattctcaagttccatttattggacttgttatgggtgatagggggttgatttctcgtatactttctgcaaaatttggtggatatctcacttttggtacccttgagtcaggagttgtttcagctcctggtcaacctactcttaaggatctattgtatctatacaatttaagacaactggctcctgatacaaaagtatttgggattattggaaagcctgtcggtcacagtaaatcacccatattattcaatgaagtcttcaagtcaattggtttgaatggtgtttatctatttttattggtggatgaccttgccaattttctcaggacttactcttctacagattttgtgggattcagtgttaccattcctcacaaggagacagcacttaagtgttgtgatgaggttgatccagtggctaagtcaataggagctgtgaattgcattgtaagaagaccaactgacgggaaattgattgggtataacactgattatgttggtgctattactgcaattgagaatgggttacgaggtaaacataatggtagtagcacaactatttctccattagctggtaagctgtttgttgttattggggctggtggtgctgggaaggcacttgcttatggtgcaaaagcaaaaggagctagggttgtgattgcaaaccgtacctatgaccatgccagaaaacttgcttatgcaattggaggagatgctttagcccttgctgatttagataattaccatccggaggatggtatgattcttgcaaacacaacatcaattggaatgcaacctaaagttgatgagacgcctgtttctaagcacgctttgaaatattactccctagtttttgatgctgtctacacgcccaagattactagactcttgaaagaagcagaagaatcaggagccactattgtaacaggattggagatgtttatggggcaagcatatggacaatatgagaatttcaccggattaccagcaccaaaggagctcttcagaaaaattatggaaaactattgaagagtgatcggttatctttgcaacacaatcaaagaatctaatggcgaggtactttaaagtgtttaggatgtgaatgaggaggtatcctccccgttctacttccaatttttcaaagtcttgttaattgaaatcaacaaatgattttgtatctcaattagagtgtatttggatagagaattttaactgaggagactaatttatcagagaatttaaattttttttaatttaaaa

SEQ ID NO: 14985 - DNA, 392 bp, Glycine max
cacgcgtccgcccactcttccggtttgatttcattcgtgcttgattggcaacttgtgttgttcccgagccaagagttatgggatgggcctctgttgtccacaacggcgtccgaattccattcaacttggagcacattcacactcctcctttcagatgctctgcacttcaccaccccatctcttccttttgctcagtgttccattatcgtcctcctcaccgcttcccacttctgtgctccacacgatttggccaccacaattatgcctcagaagtaaagaggcttagtgctcatcttaatgatgacatacgcaatgttgagaattctcccactcaggaatctctggcaaatgaagatttcacttcctccgttagaactgtagcattatgggtg

SEQ ID NO: 14986 - DNA, 718 bp, Glycine max
  unsure (1)..(718): unsure at all n locations
cacgtgcctctacgaagtctcctacggcgacggatcctacaccgtcggagagttcgcgactgagactgtgacgctgggctccgcggcggtggagaacgtcgccatcggatgcggccacaacaacgaaggactgttcgtcggcgccgccggtttgctcggccttggcggcggaaagctctcttttccagcacaggtcaacgcgacgtcgttttcttactgcctcgtgaaccgcgactccgacgccgtttcaactctggagttcaactctccgttgcctcgaaacgtcgttactgcgccgttaaggcggaatcccgagctcgacacgttttattatctcggattgaaaggaatcagcgttggcggagaagctcttccgattccggaatcgatttttgaggttgacgccatcggcggcggagggattattatcgattccggcacggcggtgacgcggcttaggagtgaggtttacgacgcgctccgcgacgcgtttgtgaagggggcgaaggggattccgaaggcgaacggcgtgtcgttgtttgatacatgctacgacttgtcatcgagggagagtgtgcaggttccgacggtgtcgtttcattgtcccgaacggagggagttaccgttaccagcgaggaattacctgataccggatgactcggtggagacgttctgcttcgcgtntgcgcccacgacgtcgtcgctatcaatcatggga

SEQ ID NO: 14987 - DNA, 434 bp, Glycine max
caaccatcatctcccccatgtgaacgttacattacaccttagtttggttttgtagcattattatccccaacccatcaaaagcaacaatcattgaattaattgcaccaaatattgttttgctgtaatcaatactccaatggggaatgccttggggggaaagaaaaccacaaaggtgatgaagattgatggggaaaccttcaagcttaaaaccccaataaaagtttgtgatgtgctaaaagaccaccctggccttgttctgttagaatccgaggctgtgaagcattatggtataagagcaaagcctttggaagcccacaaggaattgatgccgaagaggctttacttcctcgtggaacttcccaaggaagtgacggtggcgccgaggcgggtccggtcggggatcaacatgagcgccaaggagaggctcgagagcc

SEQ ID NO: 14988 - DNA, 1808 bp, Glycine max
ctcgagccgctcgagccgaatcggctcgagctttgaataacaaggctgaagttttgctaaaccacgactaccgagagtcagtacctcaccctgacagcagggttgagtatgagttctggaccaacagcaatgacgaatgtggagctcgttgcgacgaacagatgaattttgtgaagaattttaagggtcatgctcagattcttgagaggggtggttacaccttgttcactccacactacataacatggttttgtccaccacccttcattcttagcagtcagtgcaagtctcaatgtataaaccgtgggagatattgtgctccggatccggagaaggattttggagaaggatatgaagggaaggatgtggtgtatgaaaatttgaggcagttgtgtgttcatagagttgccaatgagagcaaccgttcatgggtctggtgggattatgtgacagatttccatgtcagatgttctatgaaggagaaaagatacagcaaggattgtgctgaggaagtcatgaaatcattagatctgcctatggataaaattaagaaatgcatgggtgatcctgaagcagatgtggagaatgaagtgctaaagaatgagcaacaagtccagatcggtagaggatctcgcggtgatgtcaccatcttgccaacgttggttataaacaatgtccagtatagaggaaaattggagagaactgctgtactcaaggctgtatgttctggatttaaggagactactgaaccttcagtttgtttaagtggagatgttgagactaatgagtgtcttgaaagaaatggaggatgttggcaagacaaacatgctaacataactgcttgcaaggatactttcaggggaagagtttgtgagtgccctgttgtgaacggtgtccagtataagggtgatggttatactacatgtgaagcttttggacctgcaaggtgttctataaacaatggtggttgttggtctgaaactaaaaaaggactaactttctcagcttgctcagactccaaggtaaatggctgtcagtgcccagttgggtttcgtggggatggtactaataaatgcgaagacgttgatgaatgtaaggaacgaagtgcttgtcagtgtgatggctgcagctgcaagaatacttggggtagttacgattgtaaatgcaaggggaacctcctatatataaaggagcaagatgcttgtatcgaaagaagtgaatcaaaatttggacggttccttgcctttgtggtcatagcagttgttgttggtgctggtctagctggttacgtgttctacaaatataggctccggtcatacatggactctgagatcatggctatcatgtcacaatacatgccactggaccagcaaaataatgtagttcatgctgaagctcagcctttacgacaacaaggcgccgtgtaagacatacataatgagctaaaaatagtcaaaggaacccgttgcactgcataatccacttgagagacggattataaacagaactggctatatggatttgaatccatttgacagcgaaggaagatcagtattttactgtaggataatcatgtgaacattgcaatatataacagaatttttctgcatagaataatttccattttccacagtttgtaaatagagtttttgagaattgagatgtacatgtacaccttagattgagaataaggatccgtgtgatgttggagtacagcatatgacgacattgataccaaaatttggcaacacaagtatgtcattctggttcttctttgtggcctacaatataatctgtggttaccaatc

SEQ ID NO: 14989 - DNA, 443 bp, Glycine max
ggaagtaggaagagttaaaggtttgatctttgaggtgaaggtccagtggtttgagtagccaaaccttagttatggatgttgaggcagagattgatcgcttgccaattgacctgttggctcatatttttgttctgttcacttccttcactgatttggcacaggcaagtggtgtttgcaagaaatggaaacaaggggtgaaggagtctcttgctcggagacacaatctcagctttgccggttggaagatggatgatgactccactgctcgccttggttttcatgcctacaacctcactaaactagaaataccgaggagctgctggggttgccaaataactgatgctggacttctcagaatatcttttgctaagtgtatcagcaatctcacatctatatcattgtggggtttgactggcattacaagatgaaggtgttgttcaatt

SEQ ID NO: 14990 - DNA, 532 bp, Glycine max
gaaacagtagattgtaccaataggaacatagatgatgattccaaatatgatcctgtagagatgcatcactctaggtgttcccctcctctaattcaatcccaggatcagcctgtttggcaggattcatgtgatgaaaaagttaaagatgattcatgcacatcatcagacataggagttgtctcacaggagactaaggttaccgagaatggtgatcattggtgtggtaactataatggggtaaccaatggttatagccaaggatatgttttagagcattgtgatgcaaaagtgtgggattctggatttgtatcatgctctaaaaataagattgacttcttacctacatgcaacatgatagaagaggtttttggtgatggacgaaggcaagacatgagaagagcttgagcaaatcccgggcttttatgtgaagtgaatctcagttagcattctctgctaagggtgatctgacttcgatttttctttttgtatatttgacataagattcaaaaagtagccttcattgtaaaataag

SEQ ID NO: 14991 - DNA, 1543 bp, Glycine max
ctgctcgagggctcgagcttcactttatcgctattaggtaacaagaattcctctgagaaaaagaaacccccactctgcatcacctttggttctccccttgtcggtaacaaaaagtttcaagaagccatatcacgtagttctacatggagttcttgctttctacatgtggtctctatcaaagacccatttctcaaaagattgaatcctgacatcaaggattacatgccttttgggacatttctcttctgctctgatataagttctacctgttttgagaaccccaagtctgttttggaacttcttgtgatctcaatcaaagatcaaaatcaagcatttccgtccatagattatggcaacattgtgggaaatctctatattaaagcaatttgcaaggactttaccccacgggggcaggactttactgattctaattcactgcgtgcaagtatccgtttgcagttgtgggcagcactaggattgacaccagatatgcagcaacaacacctgaacattgatataaatgctttggtaacaaagttggaaaagctggagaaggaagtgatcttccagaaggggaacaaatttgatccatccaagaaattgaatgtgatgaagatagaaatggccaaacttgagtggtacaagaagtattccaaaaataataagattggctactatgacagcttcaagaggggtatctcaacaagcgacctagatgttgttcagtgccagaaaaccctcagaaattactggattgacatggttgcagaggcagagctgaaacctcagacagaaggtgcagcttttcgtactcgctggctttttggcggaactaattacaggagaatgtttgaacccctagatattgctgagtactacgcgaatggtggtaaagactatgaggctaagggaagatctagacattatatagtgttgcaggagtggctggaagaggataagaaagacaaaagcaattcaaacagtacaaacaaaaaggatgtggaatctattttaacttttgactcttgcttttgggcacatgttgaagaagctatcctttcatgcaaagtgttgaaggatgaacaatctagtgtgacagagaaggaagaggaaactgggaagttgcttgaattcgagaagtatgtttatgggttgctcacgaaatatgaagtgtcatcagagattttcctaaggcaaagcagctacatgatttggtggaatcagtataaggcaattaagggaacttcttataattcagcactcgcagacttcatgagcaatcccgatcattataatgtgctgtatattaagggaacttataatttcccccctcaggcttagtgattagtgaacgtccgtgtggttgaacagtgtaaaatagagtgtggttttatctcactgtgcaccttttaataagctttttttatattttcccttgttgatttttgttaaggatcttggttttaccctcccttgtgttgtggtattggaaactcatgcaattgtcttgacttgtgatattggaaactcttgcaattgtttt

SEQ ID NO: 14992 - DNA, 1219 bp, Glycine max
gcgcccacgcgtccgcggacgcttcaagcccagcaattctcatcgcgggtcgtgtattgggtggcattggtgtcggtatggcttcaatggcatcacccctctacatttcagaggcttctccaacaagagtaagaggggcccttgtgagccttaacagttttctcatcactggaggacagttcctttcctacctcatcaacttggccttcaccaaggcaccagggacatggaggtggatgttaggggtagcagcagtgccagctttgttacaaattgtactaatgttgacactcccagaatcgcctcgttggctttaccgcaagggtaaggaagaggaagcaaaatcgattctgaaaaagatttatccaccacatgaagttgaaggcgaaattcaggccttgaaagaatcagttgacatggaaattaaggaagcagaatcatcagagaagatcaacatagtcaaacttttaagaacttcagctgtgagaagaggtttatatgctggtgtgggcctcttaatcttccagcagtttgtgggaatcaacactgtgatgtattatagtcccaccattgttcagttggctggttttgcatctaacaggacagcattgcttctgtcactcatcacagctggcctcaatgcatttggttcaattctgagcatttacttcattgacaagactgggaggaaaaagcttgctctaatcagtttgtgtggtgttgtgttctcccttgctctcctaaccgccgcttttcgcgaaagcgaaatccactcaccaatggttagtgccattcaatcctctcaattcaacaacaacaacacctgccctgattacaaaacagctttgaactctgctgaatggacttgcatgacatgcctaaaggcttcaccatcttgtggttattgtgctgctgatgacaagcttttacccggggcatgtttgatagccaatgttggcacaaagaagatgtgtggcaatgaccatagggcatggtacactacggggtgtcctagcaaatatggttgggctgccctaataggccttgctctatacatcatattcttctcacccggcatgggaactgttccatgggttgtgaactctgagatctaccccttgaggtacagaggggtgtgcggaggaatagcatccacgactgtttggatttccaacctcattgttgctgagtccttcttgtccctcacagaagctatagg

SEQ ID NO: 14993 - DNA, 597 bp, Glycine max
gattccctgcaaagaatctaaatgactaaatccaaatccaggatataaagatatcacacctatcatcatttcatttgtttcttctccccttccatgaacactactttctccctcttcttccatatcttttgattacttctagctatcatagttttaaaaaattcaaccatgcgcctcttctctttcccacactacaaatccttttggagatcttcaattgcatttgcatttttcttaacatttctcactctccaaacccaatccactccaatcccatgcaacaaggacccctacaaggtgctcaaccttatccctaacaaaaacggcaccgtcacgcgccccaacaaaccccccgagagcccgcccgcaccggatcccaacctcaacaccctcgtactctccaaagacatctccatcaaccaatcaaaaggcacatgggcgagagtctacctaccccgcgtggcactggatcacagctccaagctccccttattggttttctaccatgggggagggttcattttcctcggtgcggcctcaacaatcttccacaatttttgcttcaacatggcaaacgacgtcgttgcggtcattgct

SEQ ID NO: 14994 - DNA, 386 bp, Glycine max
gtcatattttatttttaatttttgggaaaagagtgagagagagagaggagtgggaaatcgagaaaccctagtggagccggaagtggaagtgaagagagtaaatgacgatccattcggtggtgatacagaagctgcttagcaccaatgctcaggtgggtcgacgtgttgccgctcaccatttgaaggagttcacctatggcttccgcaacaaaatggccatcatcgactccgacaagaccctcatttgcatgcgcagtgcctgcaacttcatggcctccctcgcccgccacaacggccgcttcatgttcatcaacaccaaccctctcttcgacgaaatcttcgacctcatgaccaagaaggtgggctcctacagcccctccaccaac

SEQ ID NO: 14995 - DNA, 410 bp, Glycine max
ggactttgagagaggaccaaggtaccacgcatacgctgcgttgagggaaacaaagcttcgcatgaggcaacaagaagaagaagagggtgttgttgaagcaaaggtttcaaccccaccaagaaaaaaacaagtcaagtttcaaggtgctgtggtttcagggagaaaagggtcatcatctcttgtggctcagtctgtgccggatttttctaatgtgttgaggaaggagaataggaagccggtgaatggtaacatgatgttacctcctttgatggagttgacgccacctccttcttcttccaagagtggctgtggtgttttttcgagtgcgagagggagtaagtcagcgaatgcaggtgagaagagaacgggtggtggtctcatgcccaggaagagctatgccagcattgatg

SEQ ID NO: 14996 - DNA, 550 bp, Glycine max
gtcccattcctatctctgtcagctgtttttgctgccgtcttttctcaaacttctctctctcaatagcagcaaggatcaagtgaaaactgattgttttccattgagtctgatttagttcttagcttctgcttcgatgccttcaatcatgtcacctcagtggcaagataaggctgctggtttcttttcttcctccggggtgaagcttaaagaagccaaggaatcagcaggaacatttgttggcgaggtcacgaaggatacaaagagtaatgtggccgaagtggcaggacgagtgggatcgatggtgaagagtcggtgggcacttcttcagcagccatccacaagacatgctgtgcaggatcgtttcatatcagctgctgctacaactggtaccctcctgaggagaggcttctcagggacaaaggataaggtggttgtgggaaagtccaaggttgaagaggttgcaaaaataacagcacaaaaaagtaagactatcttgacagatattgaaagatggcaaaagggagttgcgagcactgattgtaagtttctc

SEQ ID NO: 14997 - DNA, 395 bp, Glycine max
gtagaggcctcatcgattctcttctttgccttttactacacagactatttattgttggtgtaatttcaccaaattatttataaaagatttttgtgtttgattgatgattttgtttttcaacaaatcgatgatctgtcgtgtccaaacttgtcttttatgcaggatcaagtgaaaactgattattttccattgagtttgatttagttcttagcttctgcttcgatgccttcaatcatgtcacctcagtggcaagacaaggctgctggtttcttttcttcctctggggtcaagcttaaagaagcgaaggagtcagcaggaacattcgttggtgaggcacaaaggatacaaagagtaatgtggctgaagtggcaggacgagttggatcgatggtgaag

SEQ ID NO: 14998 - DNA, 406 bp, Glycine max
attcctatccctgtcagctgtttttgctgcccgtcttttctcaaaacttcattttccccctcctctctctctctctctctctctctcaatagcacagctaggatcaagtgaaaactgattgttttccattgagtctgatttagttcttagcttctgcttcgatgccttcaatcatgtcacctcagtggcaagataaggctgctggtttcttttcttcctccggggtgaagcttaaagaagccaaggaatcagcaggaacatttgttggcgaggtcacgaaggatacaaagagtaatgtggccgaagtggcaggacgagtgggatcgatggtgaagagtcggtgggcacttcttcagcagccatccacaagacatgctgtgcaggatcgtttcatatcagctgctgc

SEQ ID NO: 14999 - DNA, 407 bp, Glycine max
cttcctccctctccctcctcccccaatcatgcccttctctcttccaatttctcttctctgtccaactcaatcgattagtttagcttccgcggacagttcagggatcatggctagggttttagttcagtctactggtatgcctggcctactgagtgggcaaaggcacgggaagcataagggatcaggaaaatcgaaaagatctgtcaaaatgatgagcaccttacgaatgcctgctttaagaatgtcgagtttctccggattacgtactcttaatcctatggattctctgtcgagaccacgccacacttttccgttgaatacaacttctaggcgcgagagggctaaaagatgtgtacctaaagctatgtttgagcgtttcacagagaaggcaatcaaagtcattatgc

SEQ ID NO: 15000 - DNA, 431 bp, Glycine max
aaacccgcacacagcagaacacaaattccttactctcgatgcgacgcttctctccttccttcaacggcactttccactctggccaccgatatacttggtagctgataacagaatattggtgattagttatggaaacattggaacttctgagcctgaagcagaagttttcttcggtccgggaccaggtcatgtggcagaggctgaaattattgggctctcagtgagcacattaggctcaactatttatatcaatgtcaagaacagaggactctttgcatatcagtcacgtggacatttgctttggagtgtggaacctgtgctttaccaattcggctaccgtcaaggatgcaggaaaaatcttacaaattgttactttgcttcagttcctttgcttgatcattgtgagggtagtatatatatctcaaacacag

SEQ ID NO: 15001 - DNA, 627 bp, Glycine max
gggagtgtattaattgaaactttatcttcttcagtagcctgtcaacattcaaaattttctttggctttgctggatcaagggtgatataggggtaattgggccaggtctgggcagccatctgtgatccagaccaactcttaccctccaagtgaatgttttggacagactaatatacctcctacagataacatggcttctgtacccttgcaaggtgggaatctaagtggtgcgtccatcacttcactgtccaggcaatcctatgattcaatggcagatatgcactctgaaggagtgacttttaccaaccgacctgggcatattagccggtattgtgccatatcaagggtggcatgacaataatcaggatgctactcaccattcaaatattttgtcaataaactcactgactccagtcaatggtgctgctgttccagctggccatgcagcaatgaactcagccttacacagaaacttggactttaattattgtgatcccttacaaatgaagcatgagggatttgtggagttaactgacgaggccttatcgaaacaacatcaggggaatatcatgaacctaccgaaatctcaacaaagtcatttctctaataatcttggttcactggaaga

SEQ ID NO: 15002 - DNA, 580 bp, Glycine max
caaatacctggcaaaggaagaggtcttgttgcatcacagcctctaatagcaggtcaaatagtcctcactgaatcccctctcattctctactcagcttctcctctcctcacaccctcttcttcaccttacacttactgtgaccattgtttcagaatcttacctctcactcacaatagtactactgtcacgtgcccttcttgctcaaaccacagtttttgttcccagaagtgcttctcccttgcactcaaatcctcacactccacttgggtatgcaaagcactcatgtctcttcaacaacaccccaattcaacacttcttcaacaacacccccaagaacgccaagtccaagcccgtttaattgttgcttctcacaagctcttccttcacaatcacaccccttctgagctagacacttttctttctcttcatggcaccccagatgatgctattcttgatgctgctaactttcttcactcgctaatctcaccacttttcccacctcaggctcaactctctgtggatctcattgcacaacttcttgcaaaggacagactcaactcctttggcttaatggaccctt

SEQ ID NO: 15003 - DNA, 553 bp, Glycine max
atccaatccaagacacagaacagaagaatggcctcaaaatcatccaccattagacttctttgtttctgctacttcatgctcttcagctttatgcatttcagcagctgcaccgtgctctcattgaaaagtcatgcaagcacatgcaatggttccatagctgaatgcaatcaagaagatgagctgttgatggagtctgaaataagccgaaagtttctggagcagaagagatcatacatttccaatggagctttacagagagacaaaccagtttgtaatggtggtggctctggtgaagcttatagtaaaactggagggtgtcttcctcccccctcaaatcctcaaagtagaggctgctctaagtattatcgttgtaggtctgactcttgattacatcttcatgcaaacatctttaagggtgttcatgaatcatgccttttcacataatctttaagttgtccattaaatttgatggtaatttacttttgaatttgaagttgtatgaaaatttccaaaaggccctctaataactaatactctgaaggaagatttatta

SEQ ID NO: 15004 - DNA, 923 bp, Glycine max
tctatacttaaaaaccactcacattttagtcctgcataaacactttcagatcctttttgttaccattacgcaaaatttaccttttagtcttgacattttgtagcgagtagccagaactattagagatccgaaaatacttatccaaaaaggataattttgaagtgtaaggaccaaatgagtaatttttcttttgtttttatctacatgtggaatttaagattttacatttgtttcaaatatcaactgcaaattcaatatgtacttaattttcctcagttatcctaccttgaataagtttaaaaaaatggtagaagtgttaaagtgagtttcagatgttaaacaggttgagaaaatgttagctcactttttcatagattatctggtctggtatactaaaccgcccctcaatgcactttaggtgtttcttgtagggaaagattttggagctcgccctgcacattttttttccattctacaccctgaaagggtcttaggagttgtcacgttgggagttccatatgttcccccaggcccctctcagtatcacaaattccttcctgaaggcttctacattttgagatggcaggaacctggaagggcagaagctgattttggacgctttgatgcaaagactgttgtgcgaaatatttacatcctcttctcaagaagtgaaataccaatagctaatgaaaaccaggagatcatggatttggtggaacctgatactccgcttcccacttggttcacagaggaagatcttgcaacatacggagccttgtgtgagaaatctggattccaaactgcattgcagattccatataagtcattaggtgaagtgcttagcttgccagatcctgtggttaaagttccggcatttctgatcatgggcggcaaggattatgttctgaagtttccagggaatg

SEQ ID NO: 15005 - DNA, 581 bp, Glycine max
taagaacgggaagcacaactgcactgtggacttatcgtcaaggaaaactaagttcttcagtcttgacttgagtgctttgagttcatggatccaatccaacacaagttcgtcaacgttggtgctctcaagctccacgtcgcagaaaccggaaccggtccaaacgccgtcgtattcctgcacggcttcccggagatatggtactcgtggcggcaccagatgatagctctcgccggtgccggattcagagcggtttccttcgattacagaggttacggtctctccgacccgccacccgaacccgataagacctcttggtccgatcttctcagtgatctccttcatattcttgatgctcttgctctttctaaggtgtttcttgttgggaaagactttggagctcgtcctgcatatctattttcaattcttcaccctgaaagggtcttgggagttgtcacgttgggagttccatatgttcccccaggcccctctcagtatcacaaattccttcctgaaggcttctacattttgagatggcaggaaccgggaagggcagaaggtgattttggacgctttgatgtaaa

SEQ ID NO: 15006 - DNA, 1567 bp, Glycine max
gacacaagttcaccctccaaagtccaatccgctatcactcactctctcttctcctaccattatttctctctaccttgaacttccacaatacaactctctcttcctataaacgctcttgtttaacgtgagaacttgggtgatcttttggagttgtaggagcccttacaccttgcagagtcatctctacattcccaagggctcctactacgcaataactccaagcccgatctcaaattaatatttcatttactcatcttaatcaatattaaataagaaaagatgggagagatgtcaaacttccaattgggtgtgattggtgcactatttctctctgtggcttcttctgtctccattgtcatctgcaacaaagccttgatgagcaatcttggcttcccttttgccacaacgcttactagttggcatttgatggtcacattttgcacccttcatgcggctcaacgcttgaatctattcgtgtccaaatccgttgacttgaaaacggtcatgctttttggtattctaaatggcatttccattggatttctcaacttgagtcttggctttaattccattggattctatcagatgacaaaacttgctatcataccattcactgtattattagaaactattttcctaaagaagcagttcagctcgaaaataaaattcgctttattcctattacttgtgggagttggcattgcttctatcacagaccttcagctcaattttgtgggaaccattctttcccttctagcaatcataacgacatgtgttggccaaattctgaccaacacaatacagaagaagcttaacgtctcttccacacagctactctaccagtctgctccattccaagcagcaattctttttgtttcaggccctgttgtggatcagatgctcaccaagcaaaatgtcttcgcctacaaatattctcctgtggtcttggcattcatcatcttgtcttgcttgatagctgtttctgtgaacttcagcacatttctggtcataggcaaaacatctcctgtaacatatcaagtgctaggccacctcaagacatgccttgttctaggatttggctacacattactgcatgaccctttcaccggaaggaacattcttggaatactaattgccgtttttgggatgggtttgtactcttatttctgcactgaggacaacaaaaagaaacagttagctggtgatctcccattggcctctcaggtcaaagacaaagatagcttaccacttttggccgggaaaaacgtgggtaatcaaaatgaggaaaatcatgagactaataaattaagcaaggattctgttatttgaaaggacaggctcccatttctttttcagatttcatatattttgggtttctttcaatttctaggaaaattgtaatgagtgtaaatcaaatttgtttaataagttttctgtaactttaagtcggtgcatttcattacctaccatatatatattcgttaaactgcaggaaattaaattttcataaatttgtaatcctttttttgtgtcaatgaaaaggtaaaccccaattattttgtgattc

SEQ ID NO: 15007 - DNA, 497 bp, Glycine max
ttttctctctctctctacaatgctaaatattattattattcctctaatctctctctcttatacttttctcgttctctaaaatcttcacttcccagctttttcaatctgctttctttgactggacaacaagaggggttttcttcgacgaatcaaaaccacaaaaagtttcaatttttacccattttgcttcccctggatcgcctcacttcgagttgcatgagctcccatttctcgccgagacataaagagttctctacaccaaccaagttctgtacaaaggaaggatggggtgcttcactgtattgaagagcaaaaagaaaaagtccgatccaattacatacataaaacatgtaagccataatgagaacgtacctacagtactgcctgaacctcaaactcgtactcgctcactccagtctgctcctcctagttttaggaccagagtgaaacccattcaacccattaataaagccagtaacaacagaacacgaacatta

SEQ ID NO: 15008 - DNA, 419 bp, Glycine max
aaagcagagaatggcagaatttttaggacagttgcttgggcagcttccttcagtcaggtgtgggagaagaacctatggaggcaacacatccccgacactctccgaaccccggtgctgttgctcatcctcgccacagtcataaggagctgccaagagcctcgtttaacaacacaggcacacaaaacattagaggtcttataaacaacaccggttgtactcaagggtaatggtcatggatccatcgtctatggtggctttgactcatccaacaggtctcggtactaattaatctctcgcgcaacgcactgatatatatcattatcttctatataattaataccttgtaccatctctgaaactgatcatgcatatctctaatatcaaactactgcaaaataatggtgtttctatacctactg

SEQ ID NO: 15009 - DNA, 374 bp, Glycine max
gcatactctaaatggtggtttccttcctggaaattccactggtaagtggctggaaattccctgggttggaatggccttctttggggtatgggccagtttatttggtcatttttcagtgggactattcatgctttcatctggatttggtgggccatacccattccttgatgtgtcattgccctcctctccattatgggtacttgttggttgcattggtacatattccatgttatggcctgtttaaactgattgcggatgtgaaatagtatttcttgtcgaaatggttcccttactcttgtcagtcctaaagatcgagtggtatcagagttggaccgcataagagccagaaacagtttagccaccatcggcgaaac

SEQ ID NO: 15010 - DNA, 468 bp, Glycine max
ctagccttctgcaagagaaggtatcctctgtttggcaaactgttacatcttttaaatcctcctcctgatttttaactcttccatttgagcctactcttcttccttgccacaatgaccaaaattcaagccattcaaacctcaatatcaaaactcctaatccaccctttgctgtggagactaacaggctttgtctcaagcatagttggattcagctgttatgccctcagtccctctttccacaacatgttcggacactggaacgcgctgaagatcttcgtgtacactgtcgtaagctcacttttatctatcttcatgttcttcattaaaagatgtagctggggacatgggaggagtttcttgttgaaagcacaagtgggttttgtggtcttaacgctcacctctctgtggtctgttttcgaagaccgtagtgaagaagggaaagtggaaaatgcgcacggcaaaatgatg

SEQ ID NO: 15011 - DNA, 388 bp, Glycine max
gtcgaaaccgtggctataccctgctccaacctatcgaacgatagagaccttctgggtcaccgatggagacgcacccggccctcgctgtggccacaccctcaccgccgttgccgccaccaagactcaaggcccccgcttgatcctattcggcggcgcaaccgccattgaaggaggatcttcctctgcccccggcattcggttagcgggagtcactaataccgtccattcctatgacgttcaaagtagaaaatggactagtatcaaacccgccggagagccgccgtctcctcgggctgctcatgctgctgctgcagttggtaccatggttgtttttcagggtgggataggtcccagcggggcattctaccgatgatctctatgtgcttga

SEQ ID NO: 15012 - DNA, 509 bp, Glycine max
caaaacggcattgttccttcattcatcttcatttctcttgcaacaagtaactcgttcagattttggtttttgcttccctatccgctctctcttcttcacttcagtatggcggtggtaccttacaccaccggttctgcacctcttctttctcctccttctacttctagtgttgccacaaagctctactccggattgaaacttcaagctgcgagtcctttcggagctgcaaaacctaacgtaaccgctgagttttatggaaaagttcacaacactcttcactgtcggtatgctaaccacaatacatcaatggcacgtattcgaatgatgccaatagggactcctaaagtcccctataggacacctggtgaaggaacttggcaatgggttgatgtatggaacgccctttatcgagaacgtgttatcttcattggacaagagatagatgaagaatttagtaaccaaatattggcgactatgctgtatcttgacagtatagataactccaagaa

SEQ ID NO: 15013 - DNA, 417 bp, Glycine max
agtctatctcacagtgggagaagctgtggctgacatgtcatcaatctggaaagctcagccttgatctcccatcaaggacgggaaagagaagttaaaggaaccataaaacttaaggggataaactttaaccttttgtttttgcctgcgatgaatacttgtttaaattccggagagtctaatttctgttagtagaaaccttcaaaacaatattaccccgtaaaaagaaaaaaggagtgccttgaaaatcaaggaccttgttcttttactagagtgtttcttatctcaggttgatcagctgatgcctgccgatgttactccttataatttctgctactttagcaattttgttaagagatgtttgataaccttattcatgtagaaaattttgagttgaaaatatgaatacaacctttaacg

SEQ ID NO: 15014 - DNA, 405 bp, Glycine max
ttattttcatgttagttcttccgtcttctcaccaccaccttccacttccactctcttctccatccatcccatttccatggcttcctccctcggcgacaacttcaaccttctctcgcctcaacagcaagagctggtgaagatgctattggataacggccaagagcacctgtttcgcgattggcctgctcccggcgttgacgacgaccacaaaaatgcgttcttcgaccagctgactcgactagattcgagttaccctggcggtctggaagcatacatcacaaatgctaaacggctcttggctgattctaaggctggcagaaaccctttcgatggcttcacaccttccgttccaacgggtgagactttggcgttggtgatgagaactacatcaaatttgaggaagca

SEQ ID NO: 15015 - DNA, 1185 bp, Glycine max
  unsure (1)..(1185): unsure at all n locations
tttttttttttttttatagtgacataatactactatatgtaaaggcttccaaaccattcatggaacatttgacaacatgcaaggacatgttacacttcaatttcattagtttataagcatcctcgtacccatatcttattgttggtactagtatggttacgatgagctagatattctttttgaacattggaatttattgtaggctcattaagcctcaagggtaatatccaccgtggccaccaccttcgccaccaccagcaccacctccataacctcctccatgtgcacctccaccgccagaaccggcaccaccgccgccaccagagccaccaccgccaccgccagccgctcctcctccatagcctccgtcgtgttcttgattatactctgcgaaataatttttgcgtttcattgtcttataattagcatggcctttgccgcagttaaagtgttcatgatattggggcttttagccaccgcgtgtgtagcacaagcccctggacctgcacccacgcaaccaccatcaacaaccccatcaccgtccacgtcagcacccgccccatcaccaaccgcaaacacccctcctcctgcggctgcacctgcacccgcaacacccacacccacacccgctccttcatctccaactccaacaacagctccatcccaggccccaggcccaaccacctcctcccctcccgcgccaggcccatcaggcccagcaccaggcccatcaggcccggctccagaccaaccagcctccgagcctccctccgcagcgttctccataagcaagacatgcattgccgccactgctcttgttggaaccttcctcgccgtggctttggcttaattaattaaacctcttccgatgagaaatttttttatgattcgtcccctttgaaggaaaaaaaaatgattatttgattttggtcgtggacggaccagatcgatctatttgatttcttctttggtctctgttgagttactctgtttaattatcttcttaattgtgttggtttcgttggtgtttgttcattgctacataattttgtgattctttgtttcccggcttcatttgttttatctagatgcccatggtttcaatgtacgtttaatcatatgtagaatgtaaaaacggttcattctttcgctctccaaannnnnnnaaaaaaagaggaaaaanaa

SEQ ID NO: 15016 - DNA, 953 bp, Glycine max
gaagcgattgttgcaaatttcctcggattaagcgctttggattcgagcaaaccgataattggatcctccggtgcaataccgttcctagttagaaccctaacgaatttaaacgataacgaaagtaaaatcgagtccaaatcacaaatgaagcaagatgctatgcgagctttgtacaatctctcgatctgtcagagcaacgtttcagtagttttggaaaccgatttggttttgtttttagtgtccacaataggagacatggaagtgagtgagaggagtctcgcgattctaagcaatttagtgtcgactccggagggtagaaaagcgattagcagcgttagcgacgcgattccgattcttgtggacgcgttgagttggacggactcgccggagtgccaggagaaggcgtcgtacgttttgatgatcatggcgcacaaagcgtacggtgacaggcgggtgatgatagaggcaggggtagtttcgtcgctgcttgaattaacacttgtgggaaccacactggctcagaagagagcctccagaatattagagtgtttgagggtagacaaagggaaacaggtttctggaagttacggtggaaactttaacttgggtgtctctgctcctatttgtggatcttcttcttcttcgtcgaaagggtgcttggtggaggaagatgggatcatgagtgaggaaaagaaagcggtgaagcagttagtgcagcagagtttgcagagcaatatgatcaagattgtcaagagggctaacttgcgtcacgattttgttacatctacccattttgcttcactcacttccaagagtctcccattttgaagaataataatgaaatgaaaccatttctcattgtagtttcgttgagtttttttttatcttctgtagctacttagcaatgataataataataataataataacgatatggcagattatatattatt

SEQ ID NO: 15017 - DNA, 807 bp, Glycine max
gaataatgatggatcactgaaaatctcaggagacagcttggagaatgtgtacaaatcatatgtgacagattatccaattgtgtccattgaggatccatttgatcaggatgactgggagcactatgcaaaattaacagctgaagttggccagcaggtgcagattgttggtgatgatctccttgtcaccaacccaaagcgggtggagaaagcaatcaaggagaaggcttgcaatgcccttctgttgaaggtgaatcaaattggtagtgtaactgaaagtattgaagctgtgagaatgtctaaacaagctggttggggtgtcatggctagccacaggagtggtgaaactgaggataccttcattgctgacctctcagttggattagcaactggtcagatcaagactggagctccctgccgatctgaaaggcttgccaagtacaaccagctcctgaggattgaggaggaacttggttctgctgctgtgtatgctggtgccaaattcagagcccccgtggagccctactgattgtttagcccaagattactaagcatcatttaaataagattctattgatgactgcataggacatgtattttttgcgaaaaataaacttgtctactacttcagagaatataggttttccgggcgtggaattttgaagcgagaaaataaggcagtagatgtatgcctgatgcctagtttatttgaaatctagctttagggggtgtttggtgcgacaaattgttttccagaatcataatttttgggaattaaaaaattttggtcgtaaaacaaaaaaacaaaaa

SEQ ID NO: 15018 - DNA, 1167 bp, Glycine max
atataacaagatggcttcttttcatatccaatattcattccttgtgcttgtgcttgctatggtgatcacattgatgaaccctaccaatgcaaccctctctccccatttctatgataaagtttgccctcaggcattgccagttataaagtcagtggttcaacgagcaattatccgtgagcgacgcatcggagcatctcttctgcgcttgcatttccatgattgtttcgtaaatgggtgtgatggatcaatattgctagatgacacccgaaacttcactggcgagaagactgcattgccaaatcttaattcagtcagaggtttttctgtggttgatgaaatcaaagctgcggtggacaaagcctgcaaacgccatgtggtctcatgtgcagatatcttggccattgcagcccgtgattctatagccatatatgggggtccacactactggtaccaagtattgttgggcagaagagatgcaagaactgcaagcaaagctgctgcaaactccaatcttcctcctccaacattcagcttctcacagcttgtttccaacttcaaatctcacggcttaaacgtgagggaccttgtggccctctctggaggccacaccatagggtttgcaaggtgcaccaccttcagaaacagaatctacaacgtaagcaacaacataatagaccccacgtttgcagcatctgtgaggaagacatgtccgaaaagcggaggagacaacaacttgcatccacttgatgctacacccacaagagttgacaccacatactacacggatttgctgcacaaaaagggtcttctccattctgatcaagagctgttcaagggaaaaggcacagaaagtgacaaattggtgcaactgtatagtagaagccctttggcttttgctagagattttaaagcttccatgatcaagatggggaacatgaagcctctcactgggaggcagggagagatcagatgcaattgcagaagggtcaattaattaattagaattgcaaattgcaaggtctggattacaatagtggtacatacagtggaaagaataagaaatcgtattatattataagcttagtcatgccaattttactttttttttatgagcagatattagtttgttatttttattaaaaatatcaattgagagatttccaactt

SEQ ID NO: 15019 - DNA, 568 bp, Glycine max
  unsure (1)..(568): unsure at all n locations
tctccattctgatcaagagctgttcaagggaaaaggcacagaaagtgacaaattggtgcaactatatagtagaatccctttggcttttgctagagattttaaagcttcaatgatcaagatggggaacatgaagcctctcactgggaggcagggagaaatcagatgcaattgcagaagggtcaactagttggattgcaaggtctggattacaataatggcatatacagtggaaagaataagaacctgtattgttttataaggttagtcatgtcagtttttatttttgctataaaaaagtttaagtgggttggattcggaaacttatcaagactcaatgagtttaagtgagttggattccgaaaaagtttaagccgttgggttgagatgctgagtttctatgttaagattcaattgtatttttatgttgtatgtgttggtttcaatccaaaaggaattactcttttcaagtactaagcaacttcatatgtatcgtgaattgaactcaaatggttattacatcgttaacttctaagcccnnnnnnnnnnnnnnnnnnnnnnnnnnnnnnnn

SEQ ID NO: 15020 - DNA, 371 bp, Glycine max
gcatataacaagatggcttcttttcatatccttgtgctcgtggttgctatggtcacattgatgatccctacgaatgcaaacctctctccccatttctatgataaagtatgccctcaggcattgccagtcataaagtcagtggttcaacgagccattattccgtgagcgacgcatcggagcatctcttctcgcgcttgcatttccatgattgttccgtaaatgggtgtgatggatcaatattgctagatgacacccgaaacttcactggcgagaagacagcattgccaaatcttaattcagtcagaggattttcggtggttgatgaaatcaaagaagcggtggacaaagcctgcaaacgccctgtggtctca

SEQ ID NO: 15021 - DNA, 809 bp, Glycine max
atgggagggaaggatgtggttcatataaagcagacaaaaaattcagatttacagcaggccgaactgcagaaattgctaaagcagttagctgatgagaggttttctgaggcttcaaatcatagttccaatgtcaatcttgctgataaatcaagaaaaataaaggataattgtgctaagatgtgggggttcaaaccggttcctgctcctggcaggccagttgtaacaagtcactccaagaatgatgatattgtgagcatttctgttcgaagagggggtattgataatggtcaatcttacagccagtggctttcaaccatatcacagtctcctagtgtcatatcaatgtcttttgtgcctatcacttccctgctgaattcggttccaggcaatggatttctaagtcacgcagtgaatttgtatcttagatataaacctgcaatagaagagcttcatcaatttctagaatttcaattgccccggcaatgggccccaatgtatgatgatctgcctctcggattcggccataagtataagaagagcatgtccccatcacttcagttcactctcatgggacccaagctttatgttaacaccgtgaaggttgactctggaaaccgacctgtgactggaattcgcttatacttggaaggcaagaaaagtgaccacttggcaatccatctgcagcatctttcagaagttcctggagcccttgaaatttcagaagatcatggttatgatcccgttgatgaaccagaagaacgaggctactatgagcctgtgaaatggagcatgttttcccatgtctacac

SEQ ID NO: 15022 - DNA, 570 bp, Glycine max
ccttttcgtccgcccacgcgtccaattagcagcaatctcacaacagagaaaacgagagaaaaaaaaagagagagagaaatggagcttcaagaccatgatttcttggaggaattaatgtctctaagaagagaaacatgggataccaatccatgttcacaagaaaaccagcttttctctaatggctggagttttgattgttttgaggatcaaaactatcatcaagcttttcctccaaactctttctcttgccaacaagttcctcaaagttacaataacaaaggctacaactacaatgaaatttatagttccttactacatgaattctctgcaccccaagttatagattcatcatcctataacacccttgatacctctccttttctggctcaagaagattatccattgtccatgatggaagaagaagatccgggctttcttggggaagagcttcattgtttggaccttcaaaccacatgcaaaatggagccaagccattccactgaaatgcctattttcaacacaacttcatcatttgtggagagaaagaatagagcaaagaagcttcagggg

SEQ ID NO: 15023 - DNA, 344 bp, Glycine max
ggaattccctctcctccaccctggttccagagaaaccccaaacgccaaaacgcgatttaatctttgaaccgccccatcaatacaaaaatagaaagaaagaaagtttttcaaaacgcaaaagatagccaagagaccaaaacaagaaaagaaaatgccagttttttccttctagcacccaacaacaacagcaccccttttgtttccttccaccaagaaccgattttgccaccgacccattcctccaaatgcttctcctccgtcaaagcgccgtcgtttcctccctcattctctgcttcttcttcccaccattgctctgcctcggaatccgctctttcccaaccacc

SEQ ID NO: 15024 - DNA, 579 bp, Glycine max
gggggtcaagacaatgcaatgggggggtttcaacatggaaatgagagcattctgacttgtccaacttccggtctcagtggtgcaaatgttaatgtttcagaaatggctattagttctgtgtctatagccaagccttcagatgtagttaacccttttattgcttcttccgcttgggatccacttgtttcattgagtcaggttcaatcttttggaggctcttcaatggtttctcatagtgagtttgccaattccaactcatcttaccctcttgttttggataaccaagggataagcaacacgtctcacctggttcaatacatgtctgactcaaatcttgggggcatggtccccaaggttcactcctatgcaagtgggggattctcagaaatggttggtgctggctctttttgccaacataggtctgctgatatggctaacacagggtatccaatacattataatccgatcaaggaggctccaattaatggtgaacaatctcaggttgaggactcaattcctgaagaggaagcaccaggatctgcacctagtgggaatagaagaaagagagggcttgatcat

SEQ ID NO: 15025 - DNA, 456 bp, Glycine max
aattccgtttatctctccgatccgcgagcagacctcactgtctctgaagaagcaaagagtcgatctaaccgtgtcgccgttccactcaactttcagtggctatggctccaccgcctccgcagtctcatcgatcgccctcaccgccgcaaccgtcagggaagagtgaagtctccgatctgaaatcgcagctcacggcagcttgctgggagccgagctccgggtgctgatgattctaagagggatctcttcaagaaggtgatttccaacatgactataggtattgatggctcatctctatttggcgagatggcaatgtgctccgcaacgtcagacattgttctgaaaaaaatgcgctacctatatgttgggaactatgctaagggcaatcctgatcttgcgcttttgccgataaatttctacaaggagatggcaaggatgaggatccaatgattcggg

SEQ ID NO: 15026 - DNA, 808 bp, Glycine max
tgatggtactagagagaattgtgaaaagaatcttggggaatgtagttccttttcccttcctcgagcagcctttgaacttttctccagcattaaagccagcatattccaaacttttagaggaactctaatttcaggagcagtttcctcagtacctacatttgaaaagaagaatggatatgattgtctagataagaaagatttggaaacttctgacctctttactgaacaacatccaatggctgagttgcaatatactgaggacaagacttcatatcctgaaaatattgagattcatgagaagaatgattttccattttctttagacagcaacagttcaaaccagttcaagcagtttgatgtaatagaaaattgccctgaccaccatttttttgttgagggaaaagggttgtcaacatctcaggtaaaaagaagttgggtgaaaaaggttcagcaagaatggagcatcctcgagaaaaatcttccagaaactatttatgttcgtgtgtttgaagaaagaatggatctcatgcgagcagctattgttggtgcatctggaactccttatcatgatgggctgtttttctttgacatatgcttccctccggagtatcccaatgaaccacctatggtgcactacaattctgcagggctccggttaaatcctaatctgtacgagtcaggaaaaatctgtctgagtctcctaaacacttggacaggcacagacactgaagtgtggaaccctggagcctccactattcttcaagtccttctctctctacaggcacttgtccttaatgagaagccttat

SEQ ID NO: 15027 - DNA, 390 bp, Glycine max
tacactttcgagttcgaactaaagaaaaaacagtaaagaacgaactaagaaaaaaaaaaaggaaaacaaaatggtttcgtgggtgagaggcaagtgcgtcggtaacggcgcgtttggggttgtcaacgtggcggtttcgaaaagagataatcgcgttttcgcggtgaagtccgtggattgcggaagggggctttctggtcaggtggaggcgttggagaacgagattgggattctgaagcgggtggcttcgccgcacgtggtggcttatctcggagacgatgtcacgtgcgaaggaacggcgtcgttcaggaatcttcatctggagtacatgccaggtggcaccgtcgctgacttggaccgcgctgacgtggacgagcggctagtgaggcg

SEQ ID NO: 15028 - DNA, 272 bp, Glycine max
ctacactttcgagttcgaactaaagaaaaaacagtaaagaaagaagaagagaaaaaaaagatggtttcgtcagtttcgtgggtgagaggcaagtgcgtcggtaagggcgcgtttggggttgtcaacgtggcggtttcgaaaagagataatcgcgttttcgcggtgaagtccgtggattgcggaagggggctttctggtcaggtggaggcgttggagaacgagattgggattctgaaacgagttacctcgccgcacgtggtggcttatatcgg

SEQ ID NO: 15029 - DNA, 547 bp, Glycine max
ggaaagaaagaaagaaagaaggaaccgatagaagcaaaaatggcgatgttagcttcaccatctgtgaaactctcgctcccattccctctttcttcttccaaacccaaccctcgcaggcccttcaccatccgagccaccgagcccgaaaccccactctccggttcggacccatcccagcccgaaccggacccttccgacgacgccttcgacgaccgcatcaaccagctccgcctccggtaccgcagcggcaccggtaagaaggcggagctccgaaagaacaaaaaatcaaagaaaggaacctccggatccgggtcgggcatgtacctgccgccggtgccgctgaaggaaccggtttccggcggcgtgaaggtggagctcgggttcagccagtacagcgagcgattgaacggtcgcattgcgattctcggtctggcggcgctggtgctggtggagctcgcgacggggaagggtgtcattaactaccacacgccggctattattctgattcagatctatttcgtggctgcggttggagctgtctttgtta

SEQ ID NO: 15030 - DNA, 330 bp, Glycine max
ctcgagccgttttcccatcaatgcttctgccttcttcctcttctcttcttcgctctttcttttggaccctttcttttccctccttctccttcacctaccatttttagggttctctctccgatttcactctctcaatctacctaccccgatcgcttctgtttttcttctccacatttcaaatctatttcgctctggataattattgcttccttcctcgtgatcttctccatacctatcaattttgaattagcgtgtgcgcaaatattcatcgtttgagtgcatattccggtgggtttagttcggccacatgtcaatgagtgagcggaagac

SEQ ID NO: 15031 - DNA, 413 bp, Glycine max
  unsure (1)..(413): unsure at all n locations
gaaaatcacatgcactcgcccatcctctcattatccacacaaaaattcttccctcaaacatatgtttctatctttcccacttttccctaatgaaaaacacccttccttaaaacactctccactatgatcactacaaaaaaacaagaacaacttcttttgttcatcatcatctttgctttggggaaaataacatttttcattccaacaacgaatgcccaagtgaaccaccacgagtgccgccaaacatgcggttcctccaaacccgtcccttacccattcggattctcctncggctgcgcaatacgcctgaaatgcaccgncggcgtggccttcgtcggagaattcccggtcaaagtcaacacagacagcatgatcgtgagcattgaagctcaatgcaatcgcccattcgatag

SEQ ID NO: 15032 - DNA, 574 bp, Glycine max
cttgtatttctccttcgtgcacctttacagaatttggagactggaattatgagcagaaaatggaatgtgaaaacttcgggatatattcttctttactgccttccaatgtttgttcttcagctctttgttattttggttggacctcagttagacaagaataagggttctggaaaaatgttgcctcattatttttcaagtgcagtggttgcctctggggagaatgataccaccctctgtacttaccctttactcagcactattctccacggcctttttgccattatcctgacttcctaccttttttggcttggtagtcggattttgaaattagttattaacaagggtttgcagaagagggtttacacattgctattctcagtttcatgtttccttccattcagggttctttctcttggtttatctgtgttgtctggacctgaacatgttatgtttgaagccttagtttacttggctgtacttgcactagtatctagcggtggctcgggcatgtgcacacttgttcaccaggcagctgcagattgcttagcgctgggaaatctacaagacttagaag

SEQ ID NO: 15033 - DNA, 341 bp, Glycine max
ctgattagcaatgagagacacagtatcattatgatcatcattaagcctccaggcttccaagtcttgtagatttcccagcgctaagcaatctgcaactggacggtaaacaagtgtgcacatgcacaagccagcacaacatactagtgcaagaaaagccaagaaaacaaaggcttcaaacataaaatgcccaggtcctgatgaaacagataaaccaagaaaaagatcccttaatggaaggaaacatgaaattagttattaacaagggtttgcagaagagggtttacacattgctattctcagtttcaccccccgacctcctaccttttttggcttggtagtcg

SEQ ID NO: 15034 - DNA, 742 bp, Glycine max
taaagtccaatctgcagatgaatcattctcactagagcccattagagaggatcaagaagctgatgatgaggctggatcattttcaccacaactgttgcacggtgatgaaaatgcggaagctattgacccagaagaagatagagccatgctggagcggaatcgtaaggctgtattagaagagcagcaaagacgagttcaggaagcaatggcatcaaagccagctccttctgaagataattttgagatgaaggccttaaaagctatgggggatatggaagatggagatgctgtgtttggatctggtgctgaagttaacctggattcccaggtttattggtggcatgacaaatacagacctaggaagccgaagtatttcaaccgtgttcacactggatatgagtggaacaaatataatcagactcactatgatcatgacaacccacctccaaagattgtccaaggttacaaatttaatattttctatcctgatcttgtagacaagacaaaagccccaacctacaccattgagaaggatggcagcaatggggagacttgcattataagattccatgcagggccaccatatgaagacatagctttccgcattgtaacaaagaatgggagtattctcataagaaaggttttaagtgtgcatttgaacgtggaattctgcatgtgtacttcaatttcaaacgccaccgctaccgaagataatttcacacaaggcaatggttcactttct

SEQ ID NO: 15035 - DNA, 433 bp, Glycine max
cgttgtcttattgctgctaatgcgccattacttgggcgaagctaatacctaatcctgcgaattcataaggcgttctctggctttcgttggtaattttctctccgtttcagggttttcagaaattttcgtgtgaccctgtgaccaagaagagagaagatggcacctcaattggcactaacccactcttctcttctctatgtttctccctcttctgcttctctcggtttcagaaggaataaagttttgattccacaaagatgcactataaccaacgagaaaaaaaatcatgccatcacagcgtttgcagccaactctctcggaaaatcatctatccaactcactcctgtttcaacttcactatttaccgataaagaaagctaacctctcactcagaacttctatttctcaaagattcaattctaggatctgtgga

SEQ ID NO: 15036 - DNA, 1454 bp, Glycine max
acgagtcttaacccttatttcttcagaaccctcgctcctcgccagaaattgtattgcagaggaaagaccgagaaaaaagaagaaggaattttgatggtaaagtaatattctaatttccaaaattcgattttgttgccgaaggaagaaaagaaggaaatgggaggttcatcggatacgaagctcctgcaagacctgttgttgtacgcagcgagcgcagcgctgagttgcttggtactattcgcgggtttgagacacctggaccctaatcgcgaagcatcgaagaaggctctcgagcacaagaaagagattgcaaagcgtcttggtcgtccccttattcagactaacccttacgaggatgtaatagcctgtgacgttataaatcctgatcacatcaatgtggagttcaactctattgggggactggaaacaatcaagcaagctttgtttgagcttgttattctgcctctaaaaagaccagacttgttttcgcacggcaagcttcttggaccacaaaagggggtcctgttgtatggaccgcccggcactggaaaaaccatgcttgccaaagctattgccaaggagtccggagcagtttttattaacgtgagaatatcaaacctgatgagcaagtggtttggggatgcccaaaagcttgttgctgctgtatttagcttggcttataagcttcagcctgccatcatattcattgatgaagtagacagttttttgggtcagcgtcgtggaacagatcacgaggctatgttaaacatgaaaactgaattcatggctctgtgggatggatttacaacagatcagaatgctcaagttatggttcttgcagcaactaatcgtccttcagaacttgatgaagcaatacttcggcgtcttcctcaagcctttgaaattggaattccagaccaaagagagagggctgacatattgaaggttatcttgaagggtgagagggttgaagacaacatagactttggtcatatagctggtttgtgtgagggttacactggttcagatctatttgatctttgcaagaaagctgcctattttcctattagagaactactggatgaagagaagaaaggaaaacaatctcatgcccctagacctttgtcccagttagattttgagaaggcccttgctacttcaaagaagacaaaggttgctgctagtgaatacggtggattcagccttcagtcaccttcaagatggacagtgcctggtgagtcaggtgattctcagtttcaagctgcaatccatgaaatctctaagcttgtggtttctcacatgattaacctccaatcagattcccaggatccttaaaatgtttgctttagagcattcttctactgtcatttagcctagttcagattgtaacagtgattacatccttagttatactagttataggaacatatatatatatattatacattggttat

SEQ ID NO: 15037 - DNA, 258 bp, Glycine max
ctcgagccgagataaaaaaagaaggaattttgatggtaaactaatatttctaatatcagaattcgaaagaaggaaagaagaatgggaggttcatcggaaacgaagcttatgcaagacctgttgttgtacgcggcgagcgcggcgctaagttgcttggtgttgttcgccggactgagacacctggaccctaatcgcgaatcgtcgaagaaggctctcgagcataagaaagagattgctaagcgtctcggtcgcccctca

SEQ ID NO: 15038 - DNA, 402 bp, Glycine max
caattgtattgcagtagtgaaatggctggttcaattggaagcggagggaacacaagcacgggtgtggagtggcacgtgcgacctccaaaccctaagaaccccatcgtcttcttcgatgtcaccatcggtaacattcccgccggtcgaatcaagatggaactcttcgccgatattgcccccaaaactgccgagaatttcaggcagttctgcactggggagtacaggaaagcaggactgcctgttggttacaagggttgtcaatttcatagagttattaaggatttcatgattcaggcgggtgattttgtaaagggagatggtagtggatgtgtttccatctatggactcaagtttgatgatgaaaactttacagccaaacacactggtcctgggcctctgtcg

SEQ ID NO: 15039 - DNA, 411 bp, Glycine max
cactcacatatcgaatccctgtaactccatggcaccaccgaacctccctcccacttcagagccaagttcctccgccgtacagaaagtgaaaagcaacctcgtcttccgttcaacctggcccgaactcaacggcgccatgggtgacctaggcacatacatacccattgtcctgtccctaaccctagccagggacctcaacctcggcaccacattgatcttcaccggcatgtacaacatcatcaccggcgccatctacggcgtccccatgcccgtccagcccatgaagtccatcgccgccgtcgccctcgccgaccccaccttctccataccggagatcatggcctccggtattctcactggagcaaccctgttggccctaggtgtcaccgggctcatgcagctagcttacaa

SEQ ID NO: 15040 - DNA, 733 bp, Glycine max
ctgaccaaggtcttagacataggtgagcagtgtagcagagatgatggcatgtgtgagcagtcatcatcacttgaggaattcatactgaaggatcttgagatggtaattggacaggtgaagtgactaagaactcaaatccctggcatctgattaactgcaataattttttttccttattctttttgtttcacatggcaagttcaccgagaggacccgtatttgcttccgagatgctctgtaccgtcttgctagaaacactgaagaacaacctgtaatgctggaccagaatgaagatcttaacatacagaaggcaataccacatacagatcacaatgaaacaatgaggtctcaggacaagaaaccaatggaatcagaaaccaacaatattgacagaataattgcaaatctcatgttcaagagcatggagttcaacatacatcattctccaattacatcatcaacaaactccgttcaacaagttattggaagtaataatggtccacgtggaaacaactcaaaagccatgaatatggaagacaaatcttgctactcccacccacaaaaattactagtagatgccgagattcccaggtttggactaagtaatcaaccaagggacacaggttcatatatcacatgtagaagatcccatgaagacatctttcatgatagggtttggttaggttgtctggttgtgagctttcttgtaggcattagctaaaccataatcagg

SEQ ID NO: 15041 - DNA, 264 bp, Glycine max
ctggccaaggtcttggactcatttgagcagtgcaacagagatgatggcatgtgtgagcagtcatcatcacttgaggaattcatactgaaggatcttgagatggtaattggacagttcaccgagaggacccgtatttgcttccgagatgctctgtaccgtcttgctagaaacactgaagaacaacatgtaatgctggaccagaatgaagatcttaacatacagaaggcaataccacatacagatcacaatgaaacaatgaggtct

SEQ ID NO: 15042 - DNA, 533 bp, Glycine max
aaacaaaataagcaaagaaaaataaaaaaacaatggggaaaacttagcgtgtcctctgatgcacagaagacagaagagaagtgagtgagagaatgttcaagaaggcggtggaggcgaaatctcaccagaggttgtctggtgcggacaggaagaagctgagacgaagcattaagcaaaaattccaaagggtttctgattccgacttagatgccttgcttcctcccaaggctgagcttacagttgcctccccatcgattcattcatgtttctttgtttcttttcatatatcacacacactcacactctgaagaattaaacaggcagagattacaatagccaagcttcaaaaccgtgtccatgtttatgctgtggaaggaggctttccaatgtttttcgatggtgatggccggggctcatacattttccctacagtttatgcactgtggatgggccctgagctactgtcagtttatccgctaaagggtggcgaggtatcccggttcgctatcggaggagcagacttgatgttccct

SEQ ID NO: 15043 - DNA, 389 bp, Glycine max
gtcctctgatgcacagaagacagaagagaagtgagtgagagaatgtttaagaaggcggtggaggcgaaatctcaccagaggttgtctggtgcggacaggaagaagctgagacgaagcattaagcagaaattccaaagggtttctgattccgacttagatgccttgcttcctcccaaggctgagattacagtagccaagcttcaaaaccgcgtccatgtatatgctgtggagggaggctttccaatgtttttcgatgttgatggccgcggctcagacatttttcctacaggttgggagtaccacaatgagcagcgctgaagcattaaaagctggattacgtggaaaggcactgagaataactcattgctatcgtgatttgctttgggaaa

SEQ ID NO: 15044 - DNA, 478 bp, Glycine max
  unsure (1)..(478): unsure at all n locations
caaatgatggattggntctaagccaggtagcttgagatgtgtttggtagcgagacacaaagttatgttatgagagtgtgagtggctatataagctgtcgtcgcatgcttcgctcttaaacacaacaactcatcatcctatattctcttcttggatcatcttggttaagctgcagatcagaatagaataataataaataaagataagatggagactcatttggttttcttgcttggtttgatcttcactctagttgccggcgttggagcccaagcccaaggcccatccacctctcctgcgcctcccacaccccaagcatctccacctcccgtccagtcttctccgccacctgttccctcttcacctccaccctctcagtctccaccaccagcttccactccccctccatccccactcagctctcctcctgcttcctctcctcgacacctcctgctctgctacttcttatccacaccgtg

SEQ ID NO: 15045 - DNA, 930 bp, Glycine max
atgatgaggaaggcttggattctgagtcagacgatgacgatgaagatgatgactctgatgaagaggacgaagaacagatgcagataaaagatgaaacagagacaaatctggtcaatcttcgaaggacaatatacttaacaattatgtctagtgttgattttgaggaagctggtcataagcttctgaaaattaagctagagccaggtcaagagatggagttgtgcattatgcttttggaatgttgcagccaagagagaacctatctccgatattatggtcttttggggcagcgtttctgcatgattaacaaagtacaccaagaaaattttgaaaagtgttttgtgcagcagtactcaatgattcaccgacttgaaacaaataaactgcgaaatgtggcaaagttttttgctcatttacttggcacagatgctctaccttggcatgttttatcttatatacgcttgactgaagaggacacaacttcttcttcacgtatatttattaagattctcttccaggaattatcagaacatcttggaatccgactgctaaatgagcgattaaatgatctaacaatgcgagaatctttcgaatccatatttccaaaagataatccaaaaaacacacgggtctgcattaacttctttacatctattggtcttggtggtcttaccgagaacctacgtgagtatttgaagaatatgccacgtcttatcatgcaacaacagaaacaagtttcagaatctgaatcagatgatgagtcagggagttctgattcatcagattctggatctgctagttcagaggcagactcagactcagctagttctgatgaaagtgacagaagacgaagaaagcggaggagaaagtgaagcaattttatgctattgacgaatcgaatgcccatgcatctacaaaactgattgaata

SEQ ID NO: 15046 - DNA, 445 bp, Glycine max
  unsure (1)..(445): unsure at all n locations
acatattctacagattatgaaaggaagatatanaagcatttcagatttttttaaatagtgaaattaaatggtggtagtacaagcaagacagaaaaatgattcaggatcaaacatccaaagaatcttacggccaagaatctggagtgaccctttcactgatagtagaaccaaattgtgggcctcctttcctatatgagataagaaactcaatagggtatcccttcagcttgtgaggaacaattccaagatcattgaaagtcaaagcattttctgaaacaacggtatctgtagtcaaagcctggatcttatccagatttaatatctcaggaacaggtagtggaaaggggaccttgtttagtaatatttctcttggtgttgccaatgcctttgcaatggggaaaggcaccttcacatatcgaggccattctcgaatcggacgcgtggg

SEQ ID NO: 15047 - DNA, 393 bp, Glycine max
ctcgagccgattcggctcgaggcacgaactgttggagtagccgtggacttttctcctaccagcaaattagcccttcgttgggccgttgataatctcatcaacaaaggtgatcaaatcatcttgatcactgttcagcctccccaagctcatcacacccgaaaggagctttttgaggacactggttcacctttggttcctctggaggaattgagggagttgaattttactaagcaatatgggattgctagggatcctgaggtcataggtatccttgacactgcctccaagactaaaggggcaaaggcagtggcaaaggtgtactggggagatccaagggagaagttgtgtaatgctgtggaagatcttcacctggactctttggttgttggaagc

SEQ ID NO: 15048 - DNA, 487 bp, Glycine max
aactacatcaaccccaagacactctttctttggccccaagattgtgtcatcatcccctcaccaacactactacttccatgaacctcacagcccctcctcctcattcccttgtaattgttttaatgtctcttcgaggcgttggagtgccttcaagcttggttgcacctccatggaccctcaagtagaattctcatcatcacttcactctgcctctgagatcattaggaaaaagaaaattactgggcggcaaaagagagaggaacttgaaaaggaggtcgctatgcttcaaaagttgttggaccaagaagaaaagtttcatgagattttggagatggtgcatagtagaccaaatgggtcatcgatatcaattcccaattttcttccacccaagatgagagaactcttaagagaactagtcatgggttaaggttaaaatacttgacctggatcccaaattagcgaacttccagcctgatttgaaccatga

SEQ ID NO: 15049 - DNA, 642 bp, Glycine max
ttccactgccaaaaggggtggtcattcagtgtccaaaaaaggggttttgccgggtttggttaaattcaaatttgctactggtggtccctttggtggggattcaaacatgggtggggaattatctaagtacccaaaagcagagcttcctggcccaatgcagcacgatcaaagtttgacaacctcagtcattagagaacgtccaaatcaatcgttaaatcgtctttctcagaaactggatcccatagactggcttacgtatgagccatatctctgggagaatgagagacagtcttacctacgacatgctgttctctttggtttctttgtgcaactcaaccgtatgtacacagatactgttcagaaactgcctactaattcagaatctaatattctgaggtgttctacagttccccgatttaaatacctccccatcagtgctccagcattgtcctctagagggacaaagaaggcatttactccatcatcaaatgaaatcgctttgagaagttcatggaattcaattacaaatggagatctttctcaaaagataaatttggatgacagttcaagtctgggggtggcagcacccttactgaagtcttttatgccaggtggaaaccaggtccgggaaaagtcctttaa

SEQ ID NO: 15050 - DNA, 1702 bp, Glycine max
aacttctctttcgtttctcatcatcagagacttacactccaatttccaaaccgaatcgaatttgaatttcgatttgaatttgaatttcattttcaacttccctgtgatgccttacacggtccgcgagaacctttcgatcgggaacatcggcgacgcggcggagattctcgaaaacggcgccgtccagagcgtgacacacatcctctccgtcctcagctccgcctccatctccttcttctccgaatggaaaaccactctctccatccccgccaaggagatcaccaaagtccacgcggcggacgccgccgccaaatcggcgctcccgccggagaagctcctctactctctcgagtacgccggccgcgacctcaagctcgtgcgcatggccgtgcctctcagagacaccgagaaggaggacctgctcgattacttggaagcctgcatcgatttcattgatcgcggtcggaaggaaggttccgttctcgttcactgttttgccggagtttccagaagtgcggcggttattacggcgtatttgatgagaaccgaacgtctatctgtagaagatgcccttgaatcgttgaggcagagctgtgaatttgtttgtcccaatgatggttttttagagcagttgaaaatgttcgaggggatgggttttaaggttgatcactccagccctatatacaagcgctttcgtctaaaattactatatgagaatcatttctcagggttgaggatagacagttctaaacttggtgcagatcctggtatgcctgttgaagtttcttcagaggcagaagaaactactaaagtaggaaataatcgtaggcctacatatcgctgtaagaagtgtcgacgacttgttgcattgcaagaacatgtcatagaccatgttcctggtgagggtgagagagcctttgagttccacaaacggagaggtggcaaccctttcaacaaatctgatgaatttgagtgttcatccgtatttattgagcctctacggtggatgaaagctgttgaggaaggtgcaatggagggaaagctgtcctgtgctcattgtgatgcccgtttgggatacttcaattggtcaggcatacaatgcagctgcggaagctggatcactccagcttttcaactccacaaaggccggatagacataagccccatgtaatcatttttgcgtcattttatgcataagggatgcctcctatatttttgtcattgttctaggacttgtattctgcccgaattctccaagctggtccactgccaacaatgaaattgtgtaaggaaggattggagtcttgctctttggacatgctcaacttttccaagctgaactaatgcagttatatggaagggaggactattatagttttacaatttttgtgcatcttccagaatgactttttcgagctatgattggagattattactggtttctagtaaatggtgaggcatgagttgggattccaatattagggcttgttccctcgatgattttaccgtaagcaaggataatgcttttttctacaaaagaaaatgagtgttctccattgtacgtttttctattattttcaatatacaaatttttttcttcgctgtgaagaaattggttacaagttgaaacagacacaagaatataaatccaatgtggatgaatacatccacttgacctgaatgaagatatatttcttgcctc

SEQ ID NO: 15051 - DNA, 656 bp, Glycine max
tgctcgagccgaatcggctcgagcggctcgaggtgctatggcacatagttgagagacagtaatagatttgttataacactaccgatgtgagaacatatagatgagaatcatttctcagggttgaggatagacagttctaaacttggtgcagatcctggtatgcctgttgaagtttcttcagaggcagaagaaactactaaagtaggaaataatcgtaggcctacatatcgctgtaagaagtgtcgacgacttgttgcattgcaagaacatgtcatattcctttttcctggtgagggtgagagagcgtgagagttccacaaacggagaggtggcaaccctttcaacaaatctgatgaatttgagtgttcatccatatttattgagcctctacggtggatgaaagctggtaagaaaacattcaactacaatattataatgtctctaattttccaacgaactgtgaatttatgcttcactttttgtgcagaatgttcctataattttgtacaagagatcaagaatggtcttctataatattctgaaatttgaagtgtgttaccacttttttattgcctcttttggaacatttactgaattgttttttcttgactgctccctacatttcactttgtctgatgtttaaagtaatgtacaca

SEQ ID NO: 15052 - DNA, 276 bp, Glycine max
aactctctttcgtttctcatcagagacttacacagtccaatttccaaaccgaatcgagttcaaatttgaatttcattttcaacttccctgtgatgccttacacggtccgagagaacctctcgatcgggaacatcggcgacgcggcggagattctcgaaaacggcgccgctcagagcgtgacgcacatcctctccgtcctcagctccgcctctatctccttcttctccgaatggaaaaccactctctccatccccgccatggagatcaccaaagtcc

SEQ ID NO: 15053 - DNA, 448 bp, Glycine max
atcagatctaacacacagtaatataaaccgctggatctgagttttccgttgcatattcgccgtttctccctatcctggatacagatttgcgatttggatctgagaagagaatggatcgagaaaatggcgacggcgacattgaaggcggtggtcgcgccgacgacggtggttttcgctctccgattggtcgcaagtaccaccctgtcttggccaacgatcgcgcggtgctcgaaatgtcctccatggatcagggaccttcttcttcctcttccgcatttccagatcagcatcctaatatcagaaaagtaaatacaagtgtgaatggtagttcggatgctaaagaagagaacccttctcatgaaaaccaacctaatggatccctgcagcaggaatctaaactggaattgtttggttttgattctcttgtcaacattcttggtctcaaaag

SEQ ID NO: 15054 - DNA, 646 bp, Glycine max
attaaagctgtcttgcatgcctctggcttgactacggatcagttgttgatgaaatgcctttcctcagacaagatactggatccttccttgtttgatcaagtagagtacttctcgaacctgctttgccacgatcagaagctcctatttgactctatcaatgaagttctcatggagatttgtcagcattactttggggcctcaccttgggtttcatttgtaaatcctagcacgaggctaactccaagtatgaaaagggttactttaaaggtctgggaaggagtgtgctggcatatccttcccttgcccccaccgcgcactttagagcaaattgttaggaaagacatggcaagaagggggacatggatggaccttggacttgatacagaaacaattggttttgagatgggtgaggacatacttggtgaactgatggaggacaccattttgagccttgtgagtgaaagtccagaaagtaaatgtttctctgcttctatttgagggaaagaacaatgagaacagcttccacttgtaaaagacaactcactgccttttgatcatgcaagatgttaaaggaattcatatgtgtgaggtgaaatgaaagtagataggggatgaaaatcgatcagaaagaataatagagttatag

SEQ ID NO: 15055 - DNA, 503 bp, Glycine max
cccccgcctcaaagcgtttctatattacttgcaatagccactctactatatacattacaaattaattgaagcacacttgtcacatttacatttagtgacagatatatagtaacatcatcatgggtttgaagaacagtggcgttggtcatagagcatggagcctccttcgggcatcattgctgtgggcaagcaaaggtggcgtgttgaggcgcagggtggcgatggagctgcgtcttgtaccaaagtacttgaagcgactcggccacactgctcctccaagccacattcactactttgaacgcgagctctcgttcgacaagacccccatcttccatgtcaagatgtaccgtccaaccaccatgcgcttccacttgcctcacattccttgcataaacccacatgttgattttaatgatgatgatgatggcaatgttgagtatgatactggtggaagaaagagtgccctcatggatgcatcaggagacagcagagaccaggaattt

SEQ ID NO: 15056 - DNA, 377 bp, Glycine max
taaagagtttccatattacttgcaatagctactctaccatacacatacactcctcctcacgtttgagtttcagctacattatctaaagcacacttggcatttacatttagcgacagccacaaatatatagtaacatcatgggtttgaagaaccgtggcgttggtcatagagcatggagcctcctgcgggcgtcattgttgtgggcacgtaaaggtggcttgttaaggcgcagggttgccatggagctgcgtctggtaccaaagtacttgaagcgactcggccacactgcgccgccgccaagccacattcactactttgagcgcgagctctcgtttcaacaagacccccatattcaaggtcaagatgtaccgtcaaac

SEQ ID NO: 15057 - DNA, 819 bp, Glycine max
agcttctgaaaactgcagtgcgctacctaagggaaagatctgtccttttcaaatattgtgctgaagaggtagccaatatgagacacaacgcactatttagaagatttataagtgctcttacacgtggaggacctggtggattgcctcgaccaattgaagtgcatgctcatgacccactacgatatgtcggtgatatgctaggctggttgcatcaggccttggcatctgaacgtgaacttgtagctgtattacttgatccagatacaattaccgattctggtccaaagcaattctccaataactctgaggatggctctgggaagacagaatctgacttgatgtttgttcttgatagaatttttgaaggagtatgttgaccatttaaattgagagttgaacaagttttacagtctcaaccaagtcttatagtatcctacaaactcagtagtacacttgaattttactgctacactatctcagatttacttgggcgagaaactgcactttgtaatacactatgggcactgaaagatgctgctcagaaaacattttttgatattttaaaaggtcgaggggaaaagcttttgcggtatcccccacttgttgctgttgatctttccccgccaccagcagtgagggaaggggtatctgtacttcttgaagttatcgacaactacaacagcatgatggttcctgcttctggccaaaaacctgcttttggtccagttatatctgctatactggatccaatagttcagatgtgtgaacaagcagcggaggcacacaagtcaacttactaaatcatcagttgatgcaatt

SEQ ID NO: 15058 - DNA, 442 bp, Glycine max
atttacatcttcgtatttccctttcctcgaaacttaattagaactcaaaatatagaaaaataagacaacatattaattcgtcgtgttcctcatcatgttcctatttgaggatctctggtccctcccgcgcctcttctcaggtacgttacgtttgccgttaatcttgcagaattgaaaattctaacctaaaaagagagagagagagagagaattgaagttccaattcaagttttgcaattcgaaagcgattctaccgcctctcggagtcgcttagtttacagtctttacgcgaatcctttacgagctcgagctgtgacagaacggagtcggagcaatgccgcgacgagtcggcggcgatggttctgaaattcgtggcggtggcgtcgattctggtccgccggattcgggggagtctcgattccgctggtcgggaagtcgcggc

SEQ ID NO: 15059 - DNA, 708 bp, Glycine max
tctacgcgtccgcccacgcgtccggttttttaaacgttcttaacgcaacaaacacatagccacatcttctctttctcttcccatggcattctgactcatacccaaatcattgattgtttgtctatcgaatcggtgagaaaatggcagtggagctgatggggttcccccaaatgggcgaacagaaggcaattgaagaagcagccgccgaaggcctcaagggcatggaacacctcctctgtctcctctcccatcaaccttcccacctccgcactcaccacaccgacgccaccgtttccaacttcaaaaaactcatctcccttctcaaccgccgcaccggccatgcccgtttccgccgcgcacccctcccttccacttccaactctctcgccccatcccctccactggctaacccggtcaccttcgccccttcgcagtcacagagtctaaccctcgatttctcaaaacctaacatgttcaacaccaccaacgccaaatccatggacctcgagttctctaaagaaaccttcagcgtctcctccaactcctccttcatgtcctccgctatcaccggcgacggtagcgtctccaatggcaaactaggatcctccctcttgctcactcctccgccagtctccgccggaaaacctcctctctcgtttgctccgatcaagaagaggtgccacgaccaccgcgagcactccgacgaca

SEQ ID NO: 15060 - DNA, 532 bp, Glycine max
  unsure (1)..(532): unsure at all n locations
cttttacatgttgaaggaggagttctcacatcaggtntggggtgaacgatgcacttgaccacctagagcatcttttttctctttttcttcccatagcattctgactcatacccaaattatttattgtttgtctacgaaagcagtgaaaaaaaatgacagtggagcttatggggttccccaaaatggaggaacagaaggcaattcaagaagctgcctccgaaggcctcaaggccatggaacacctcctccgtctcctatcctatcaaccctctcacctccacgctcaccacaccgacgccaccgtttccaacttcaaaaaactcatctccttactcagccgccgcaccggccacgcccgtttccgtcgcgcacctcttccttccccgccaccggctaacccggtcaccctccaccaacctcccttcaccttcgtcccttcgcactcccagtctctaaccctcgatttcacaaaacctagcattttcgcctccaacgccaaatccatggaccttcaatactctaaagaaacctt

SEQ ID NO: 15061 - DNA, 1294 bp, Glycine max
tcgacgcattccacatttctttcatatactaccagtcacatttcttatacagaaaagcagtgtctgcagcacccaaacgaaacgacagtgaccaaaacagcaaaacgacattacagagagagagcgacgatgccggaagaaacgacgtcgatcgactacgtgatggaggcggcatctgggccccacttctccggcctgagacttgacggccgggtcccgtcctccgccaccgccgcgtcctccactcccgattcaaccctaaccctcgattcccttcccaatcaacccttcgtcataggagtttctggaggtactgcctcgggcaaaaccaccgtctgcgatatgatcattcagcaactccacgatcaccgcgttgtcctcgtaaatcaggactcgttttatcgcgggttgaatcctgaagagttggaacgcgttcacgagtacaatttcgaccaccctgatgcttttgacacggagcagttggtagagtgcacgaggaagctcatcagtggccagggagtgcatgttcccatttacgacttcaagaagcaccaacgctcttccgatagttttcgccaggtgaatgcttctgatgtgattatattggaggggattcttgtgttccacgatcagcgcgtgcgggatctgatgaacatgaagatctttgttgacacagatgctgtgtgagacttgctcgtagaattaggcgtgacacaatggagagaggcagggatataaactctgttcttgaacagtatgcaaaatttgttaagcctgcatttgatgattttgttctaccatcaaaaaagtatgctgatgtgatcattcctcgtggaggtgataatcatgttgccattgatttgattgtgcaacatatccgtacaaagctcggccaacatgatctatgcaaaatatatccaaatgtctatgttattcagtctacattccagatcaggggaatgcatacgttgattcgtgaccgagacatatcaaagcatgattttgtattttattcagatcgacttatacgcctggttgttgagcatggtctaggtcatctgcctttcaccgaaaagcaagtggttactcccacaggatctgtttatactggagttgatttctgcaaaaaattgtgtggtgtttcaattgttcgaagtggtgagagcatggaaaatgcacttcgtgcatgttgcaaaggcattaaaattggtaaaattctgattcaccgggatggagacaatggaaaacagcttatatatgagaagctccccaaggatatttcagaacggcatgt

SEQ ID NO: 15062 - DNA, 388 bp, Glycine max
tgaacaagcgattgagcatctcatttcttgttgtcctttgattgaagatgtaactttgaagtgttgttctgtattgaacaatggtggcataggaggtctacttgagcccaggacctctaggatgcaatctattagtatgaatgctctgccaaagctcaagaaagttgatgttcaagggataccggagattattatcattgatgctccaagtctagagtatttctgtttttgtcctggtggagatgtgcattcaccttttaagatgaattttgacaagtgcagaaatttgagagtgttatacttatggtcattgaagagcactactatcacagacaagtggtttcttgatctatttactaaatttcccttccttgagtgtttgaaattt

SEQ ID NO: 15063 - DNA, 647 bp, Glycine max
gttggaaggaaagaaagaaggagaaaggggtaagatagtattttgacatgcaggaaacgaagcggtagtagtagagagtagtgggaaggtaaccggagtttctctcccaccgctatatcatatgggggccaattgttttattgtcgtcattcattcaaattctgcttccaatcatatttaaatagaaacacacactcctcatcccaaaccctacattttcttcaagcgctgcggtggatcagattccccattaaggatggaggatggtgagaaacccagccatggcattgctgatatggatgttgttgatgccactttgcaaagccatcgtgtggcttctgatcaagtaatggtcctacagggtcatgatatcaaaaacggcgattctgatcctgctcacgtgccagcaaccagtgcaattagcaataatcagtttgaacttgaagatgctaagactgtttcgcatcaggaactgatcactccaaagcctaaagaaaagaatgtcagagaaatgaagaatgtgctaaatgataccgagatgactgattatgatgagtatggcacgcctctggatcgagaaacatttatgaaagagcttgagactttctacagagagcggtccttggaatttaagcctcctaagtttt

SEQ ID NO: 15064 - DNA, 449 bp, Glycine max
acgtaagctcggaatggcgctcgagcaaccatcctttgcaattgcaagaatctttagtttttttatggctggccatcagtgtctctttcagttgagtgccttacttttaacgcaggtacaaagaaggaagaagcacgcgtgggggtgtgggtgaatatatggcgaaaagagtaccagtaggagagttgttggtgttggtgttattattgttggcaccaaagacaaaggcaatgagcataacaagaggtcataataaaagcaggggcaaagagtcctctggttctagtgatgaggggggtgcaattagcttttgtttgagttggagattggcagtggaggcaaacaatgtggttgcatggccaacagttccacctcagtgttcccgatatgttgagacttacatgatcaatggccagtatgaccgggacttggatttgattgtggaggaa

SEQ ID NO: 15065 - DNA, 489 bp, Glycine max
tgcaaatcgatcaaaacagaaacatatatttagagaacaccaaatcaaacgcaactcgagatattaataagcttcttcttcgtcagttattaccattcgtggaagagaaaaagaaaaaagtaactaaaaaaataaactgtaataaagagtccaaaatgaaagccaaaacggtgaaaggaaattggagcttgaggacgaacaagctcagcttcccttacgtcttcctcgtctgcatcttcttcttcctcgctggattcttcggtttcactctcttctctcactctcagggcgatggagatggcttgaggccgaggcagaggctgcttgattcgacgaacgaggcggagtacaatttgatgcctgttggagatcttggcgatgattccattacatcgattccttttcaggttttgagctggagacctcgagcactatattttcctaattttgcaactgcagaacaatgtgaaaacattattgatgtggcaa

SEQ ID NO: 15066 - DNA, 368 bp, Glycine max
aatgtaggtattattatatcttcttgatgaagtttttctacatggaccatttcctaaatcatagattgcagaaatcgatgcattagaaatatttaaacgtaattgattgttgattgattaagaaagcaaggttttttcacgtgacttcagtttagaattttgactaaatgaaacgctttgtgagaattgcttggacaatgaacaagaatgaatgatggtataattttccgaaaaaaaaaattgggggacttaattatagttagcgcgtaatgttttagtgaccatattatattttgtgaaaaaattggtttattaaattatacaaattttaatatgattcatctatttaatttctaagaaaagagagt

SEQ ID NO: 15067 - DNA, 827 bp, Glycine max
  unsure (1)..(827): unsure at all n locations
ctttcatttaaaccctttttctcaaattttggagcaattgtcacatttgctatattcggtaccttcattgcttcaattgtaacgggtatcttggtttatcttggtggcttgctctttctgatgtataggctaccttttgtcgagtgcctgatgtttggtgctcttatatcagctactgatcctgttactgttttgcccatatttcaggaactgggcacagatgtcaatctatatgccttggtttttggagaatctgttttgaatgatgccatggcaatttctttgtacaggacaatgtcatcagttagagctgatccatctggacaaaatttattcatggtggctgttcgatttttggagacttttgtagggtcaatgtctgcaggtgttggagttggatttatatctgctttgctgtttaagtatgcaggattggatattgacaaccttcagaacttggagagttgtctttttgtccttttcccatatttctcgtacatgcttgccgaaggccttggtctgtctggtattgtgtcaatcctgttcacaggaatagtcatgaaacattatacgtattccaatttatcgcaaagttctcaacggtttgcctctgcttttttcgagttgatatcatctttagctgaaacatttgtatttatatacatgggcttatgatattgctatggagcaacatagctggtcacatgttggattgatattcttctccattatattcattggaattgcaagggcaacaaatgttntctcatgtgcttatttggtcaatctggtcagacccactcatcgaaagatacctccaaaacatc

SEQ ID NO: 15068 - DNA, 674 bp, Glycine max
cagctttgtgcctcaaggtttttgaccttgacaagatgcaatcggagagttcgagcacgacaagtcctgattgcgttgggatattgcgaatattcactaatcagtttcctgaggcaaagattacatcatttttggttttagaagaagtgccacctatactactcatagctattggcttggacagtggttctatttactgcatcaaaggagacattgcacgggagcgtatcactcgtttcaagcttcaggtggaaaacaaccattcggacaaaactctttctgctgtaactggacttgggtttagggtggatggtcaatctctacagttatttgttgtgactccaagttcagtgagcttgttttcgttgcatgatcaaccgccaagaaggcagacccttgatcagattggatctggtgtgaacagtgttgcaatgagtgatcgatctgagttgataattggtcgaccagaggcagtatatttttatgaagttgatgggcgtggtccttgttgggcttttgagggagagaagaaattgcttggatggtttcgtggataccttttgtgtgttattgcagatcaaagaacaggaaagcatactttcaacatctatgacctgaagaatcgattaatagctcacagtgcattggttaaagaagtatctcatatgctctat

SEQ ID NO: 15069 - DNA, 930 bp, Glycine max
cctcgagccgaatcgcccttagaattaagttagtagcgagagagggagaaatgaaggttgtttacttcttcgttgtgctattggctttggcatcctccattgcctttgcttatgatccaagccccctgcaagacttttgtgtggctatcaatgataccaaaactggtgtgttcgtgaatggaaaattttgcaaggatccaaagcttgctaaggctgaagatttcttctttcctggattgggacccggaaacacttcaaaccccctaggctcaaaggtgacagctgtcacggttaatgaaatattagggctcaacacacttggcatttccttggcacgcatagattttgcaccaaagggtttgaaccctccacacactcaccctcgagggacagagattcttgtagtcttggaaggtaccctctatgttggttttgttgcgtccaatcaaaacgataaccggttattcaccaaagtgctgaacaagggtgatgtgtttgtgttccctattgggctcattcacttccagcaaaacataggttatggaaatgctttggccattgctggtcttagtagccaaaaccctggagttattaccattgcaaatgctgtgtttggatctaaacctcctatctctgatgaagttcttgccaaagcttttcaagtgggcaaaaacgtaatcgactaccttcagaagcaattctggtacaacaatagttaggtgggaacataatagactcgcgataccgtacatcttgctctggcctaggttggataaatgattttctcaattctgcttcatgcaatagtcaattactatatactatattaaataaatggaatgcatgtggctattatatgtgtaacacagttgttttgtgtggatgtgaacttgatttcatatatcaatatttaaagtctaataacaaagg

SEQ ID NO: 15070 - DNA, 349 bp, Glycine max
  unsure (1)..(349): unsure at all n locations
cgacacttctcgctcagcctcaaccataacaaacaatttcacgatgtctctttctctccccttctgaaatttcgagggtttcgattctcttcctgcatttgcatcccaactttagatgtccagtaccccaataacagaatctccgttcatcattttctgccttccttttatagcttgagctggaattgccatccgatctgacttcgtttcgcagggtttggtcttgattatttgacaattttggtcttcgattaagaaatttggtagaattcgttgtttgttttgttgctataggngattagggctttttgtagaatttagggttacaagtatatctatggcggctagt

SEQ ID NO: 15071 - DNA, 620 bp, Glycine max
  unsure (1)..(620): unsure at all n locations
acgagaaaggagacggtaaacagcgtgtcactgaagaaggctcctcctcacaatctgaagatgtgaaagcaataagcacaaaccttagggccaaagatgcatctgataaatcaacaggagaaggtgcaatcattgatttttcaaatattaagccaggtcttgctgcagatgtgaaatttggtggatgtggttcttatcctaatctgccttgggtatccacctcaggttccggtccaaatggaaggacaatttctggtgttacttataaatacggcactaaccaagtcagaattgtatgtgcatgccatggttctcacatgacccctgaggagtttgttcgccattcaaatgaagaccaggcagctgcagaggggaatacagttttggggacagtagcaaacggcaatcctgctgcctcttcccacagctaatcttgtatcgctgtacgttaatattaaagttctcaacaggagagtcagggaaatcgagctttgattnttgtatagatgaatgagattcctaccatttttctgtatacactttaataacttggtatttggctatcccgctttatttactttgtagccaatgcaatcaagtttgcagttgtatttaataat

SEQ ID NO: 15072 - DNA, 390 bp, Glycine max
agctgtcaggacaggagctacctttatttgctcgctatgggctggaacattgtttatcagttcaggaagggtcaaaacgaaatcgatagatacctgcgtctggttcctctcattactcttgtggacaattctcgagtcagggagagacttgaagttatcgaaatggatcaacgtgaatacacattggatgatgaggaccaaaaggcacaaacagttatttttaaaccttgagcctgacaaggatgacactgctgtgttgaagaaaacactatcatgttcttaccccaactgttctttcactgaagcacttaaaaaagaaaatgaaaagcttaaactagaactacaacggtcacaagcaaatttggatatgaatcagtgtgaagtcattca

SEQ ID NO: 15073 - DNA, 798 bp, Glycine max
tcgaaaaaaaaaaggaacggttaagttggcaagtaagagatgaattcgtacttgacatcctcgatgtgggagtaacaggaacaggttgatgcccaacatacttagccaattcacacgacaaaaacagtggatatcaacacaatcctcggaccctcttccatggctactgtttcttctctttgcgctgtttttcccatactcacaccaaccttgtcgaaaccccgcttggctcccctctcttgccgaaccccaaaacgacgtcgtgtcagtatcatcacctctgtcgccgaggatcgagaaatagttccggtgtccgaagatagaggaattcgtttgaacgaagttgatggatttcaaccttcggagcctcacacagagtcagaggttgttgtttcgcgcctcacaagcagtagtaccgtcaatgccatcatcgttttggggtttgggactttcgctgtcaccaagttgctcaccattgaccatgactactggcatggttggacactttctgagattgtaaggtatatacctgaacacaattggattgcctatgagcaagctctgaaagcaaacccggttttggctaaaatggcaataagtgggattgtctactcaattggagactggattgctcagtgctatgaaggaaagcctctttttgagtttgatcggacacgggtactcagatcaggtcttgttgggtttactctccatggatcactttctcactattactaccaactttgtgaggctctttttcctttccaagaatggtgggttgtccctgctaaagttgct

SEQ ID NO: 15074 - DNA, 513 bp, Glycine max
atgaattcgtactttcacatcgtcggtgtgggactaacaggaaaaggttgatgttcaaacacgcttaaccaattcacacaatcctcgtaacctcttccatggctactgtttcttctccttgcgctggtttccccatactcacaccaaccttgtcgaagccccgcttggctcccctctcttgccgaaccccaaaacgacgtcgtgtcagtatcatcacctctgtcgccggggatcgagaaatagttccggtgtccgaaggcagaggaacccgtttgaacgaagttgaggggtttcaaccttcggagcctcacacagagtcggaggttgttgtttcgagcctcacaagcagtagctccgtcaatgccatcatcgttttggggtttgggactttcgctgtcaccaagttgctcaccattgaccatgactactggcatgtccgtatcttcagctttccttatatattttgtctctccttttattataataataataataatttattgttgaactact

SEQ ID NO: 15075 - DNA, 366 bp, Glycine max
gcttatcatactcttcttctttttctgccctcaaaactattcaattcaattcaattcccttctaattcttccaccaccccttttccttattcttcctcaattctcccaaaaatcatatttttaccgttctgattggtttttcagcttgtgggtcgatgtcaactgtgtcgaaagatgacaacttggtgctgtcttcggaggactcttcgtgcccagaagagtctgagcttgaattgggtcttggcttgagcctctcttctggcccttcatcaaagtctcatcaccaccatgttcatgctcctacaactctctatgctagaatttacactgctaaggattttccttcttccgcagcagcagcatcat

SEQ ID NO: 15076 - DNA, 1691 bp, Glycine max
gagagagagaaccaaaccaaaccaaaccaaaaccatggtgtgaaaaacttgacatggggggcatatagggattacaatattttattatggttttgtccctcaatccttgccagaaacagtgaaagcctcacgaaagtttaggacttttcagaccaccttcttcaatcaaagaggacccatcatttcctttcccttattataattattattattaattttttttctttctttctttgtgtgtgctgttgatggatcccaagggctcaaagcagcagcagccacaggaggtggtaccaaacttcctcagcctcccccaacagcaacaagggaataccaacaacaacaacatgggagagaacaaacctgcagaggtgaaggatttccagatagtggtagctgctgagaaggacgagagcaagaagcagcaacagttggcaccaaagaggagttccaacaaggacaggcacaccaaggttgagggcagggggaggaggataaggatgcctgctctctgtgctgccagaatcttccagttgaccagagaattgggccacaaatctgatggggaaaccatccagtggctcctccagcaggctgagccatccatcatagctgccactgggactggcacaatcccagcatctgctcttgctgctgctggcaactcactctcacctcaaggttcctctctttcatcagccttacaccaccaacaccaaaagattgatgaattaggttgtgggtcaggtgggagcagtagggccagctggcagatggttggggggaatttggggagaccccatttgggtgtggccacaacaggcctatggcccccccatgtcagtggatttggatttcagacagcaacaacaacaacaacaacaacatcatctggtccatctaatgccaccttagccactgagagctccaattacctccagaaaattgccttccctggctttgacttgcctacttctgccaccaacatgggtcacatgagtttcacctcaattttgggtggtgctggttcccagcagatgcctggtttggagcttggactttcccaggatggccatattggggctgctgaatccacaggccttgaaccagatttatcagcagatgaatcatcaggctcaagctggtagagtgcatcaacagcatcagcatcagcaacaacagcatcagcaaactcctgctaaggatgattctcaaggctcaggaggacagtagtagagttttattatggatttggatgaaaagaaaaaagaaagaagcatcattgtgcagatgctggctgaggtttctacaatggcttttgtattgtagtataattgggagactgtgaggaaaagaaaaaggtgtctcagagaattcaatagaaagctggatttggtttagccccttattgttccttctccccagtactcaagtctccatatacaggtggaattgcatggccagatggcttggctgctttggtctggccttaaaactattgtttaattcagaggtgtgttgattattttgttcttctctaggacagggtggagtgctgagatcggtttgttttgtgaatttgaagatatagtttcataatcatatttgtcaaatttcatattggatctggtatttagtacgtttatcatctgggaaattttaatctttgtgtggaacatcacttgcaagtt

SEQ ID NO: 15077 - DNA, 690 bp, Glycine max
caatgatgtcaaacatagccttcagattaactcttgtctttcttttattttctgcggtgctctctactcctccagaggatccaatcaagtgcgccacttcagagaacacaacctgcactatcacaaactcctatggcgccttccctgatcgaagcatttgcaaagctgctcaagtgttgtaccccaccaccgagcaagagcttgtgtcagtggttgcatcagcaaccagaaacaaaaccaagatgaaagtagctacccgtttttcccacagcatccccaagctggtgtgcccagaaggcgaaaatgggttgttaataagcaccaaatatctcaacaaaatattgaaggttgatgtggaaacaagaacaatgactgtggagagtggtgtgactctgcagcaacttataaatgaggctgcaaaggtagggttggccttgccatatgcaccatattggtggggtttgaccattggagggcttatgggaactggtgctcatggaagcactttgtgggggaagggtagttatgatcatgattatgatgcggagcttaagattgatagggctagtctggcttgccaaatgtgtgctctaactgacattaattgatgtacagcataatgaccgttttgctgtcaaaaaaccagttgtgccagttggattaattaaacaggcaactctcgggctgagg

SEQ ID NO: 15078 - DNA, 477 bp, Glycine max
ctcgagcgtgacagccaaataacagtcacatgatgactcgcgtcgccctaacgaacgaaagacctcgacaattcttctgatccgtttcgttcagatcaaaacttgcctctttgcaacgctgcttctgacaaaaaacgttgtaccatccgaaatgtcggacacagtggaacatacagatcaaagagctgaagctattccccaatccacagctacaccaaattggactattcatgtgtcagacgtgaggaagaaatttttacattgtaacattggttaccattgtgattgtggattgtagaatacatgatccaacaatcaatattatgtttccagggtgaattccaggttactgcaatatgaatttggctgccttaacagtaaagcctgtgccagaaataataacagcatttaaaaactcgtgatagatgtagctaaggaatgaaaatcgaaattaattaatgaaaagtcgaagcattc

SEQ ID NO: 15079 - DNA, 518 bp, Glycine max
taacgaacgaaagacctcgacaattcttctgatccgtttcgttcagatcaaaacttgcctctttgcaacgctgcttctgacaaaaaacgttgtaccatccgaaatgtcggacacagtggaacatacagatcaaagagctgaagctattccccaatccacagctacaccaaattggactattcatgtgtcagacataagaacagttaaggttagcaacatatcattggttacttccaagaaggacattgaagaattcttttcattctcaggtgatattcgatatatcgagatgcaaagggaaagtggtcacactcaggttgcttatgttacatttagaggatacacagggagcagacacagcagttctcttaacgggttccaagataggtgatctatatgtcaccatcacaccagtggagaagtatcagctgccccctgaagcacttccttcaagtccaacaaaccaaagccctgatgcagttaagaaagctgaagatgtaatgagcaccatgcttgct

SEQ ID NO: 15080 - DNA, 505 bp, Glycine max
gcaagtaaaggtcaagtcaatgaatgaattgaagttttaactctttgtggttggtgttgctgtttgctttttccattccatcctccaaggccaagcagtgatggccaagaccacgctagattcgggatggcttgcagctaggtccaccgaggttcatttcacaggcactcaactcaccaccacgcaccctccctctgcctccacccaaccatggatggaagctattgtccctggaactgttcttgctaccttggtgaagaacaaagcggtgcctgatcctttttatggactaggaaatgaggcaatcttggacattgctgactctggaagagaatattacaccttctggttctttacaacctttcagtgtaagctgtcaggcaatcagcactgtgatctgaatttccgaggaatcaattactctgccgatgtctatttaaatgggcacgagatggtcctcccaaaaggaatgtttcggagacattctcttgatgtcaccaatatt

SEQ ID NO: 15081 - DNA, 642 bp, Glycine max
  unsure (1)..(642): unsure at all n locations
cggacgcgtgggcggacgcgtgggcgacccacgcgtncgcggacgcgtggggtgtatgaagagagagaaaggaagagagaggaaggaagagcacagcactacacagctccgaaataggagggggagaaattttgtatgcgttggatttcgtagatctgaataaatgacaaatgtatcattcaaagaatgttcctagtgcaagtttaattggtggtaattcattaagtcatggtcagcacatagattgtggtggcagcacaatggatcctggcagtggaggaaatggtcttagcaacaactctaatctcacctcaaaacaacgtttacggtggacacatgaattgcatgagcgctttgttgatgctgtggctcaacttggtgggccagatcgtgccacacccaaaggcgtgctcagagttatgggtgtacaaggcttgaccatttaccatgtcaaaagtcatttacagaaataccgacttgcaaaatatttacctgactcctcatctgatgaagggaaaaaggctgacaagaaagaaacaggggatatgctttccaatcgtgatggttcagctgggatgcagattactgaagcactaaagcttcaaatggaggttcagaagcgactacatgaacaattggagg

SEQ ID NO: 15082 - DNA, 514 bp, Glycine max
gcgtacgaagtcggaattacgtcagctcgagcgtgtgtatgaagagagagaaaggaggagcacagcactacacagctccgaaataggagggggagaaattttgtatgcgttggatttcgtagatctgattcatggtcagcacatagattgtggtggcagcacaatggatcctggcagtggaggaaacagtcttggcaacaactctaatctcgcttcaaaacaacgtttacggtggacacatgaattacatgagcgctttgttgatgctgtggctcaacttggtgggccagatcgtgccacacccaaaggtgtcctcagagttatgggtgtacaaggcttgaccatttaccatgtcaaaagccatttacagaaataccgacttgcaaaatatttacctgactcctcatctgatgaagggaaaaaggctgacaagaaagaaacaggggatatgctttccaatcttgatggttcatctgggatgcagattactgaagcactaaagcttcaaatggag

SEQ ID NO: 15083 - DNA, 529 bp, Glycine max
cgaaaatttggtgtgaaagagacggaatactattatcgaaagggaaataaatatttattgagaggaggatgagggtttccgcatagtagcagtgcttagtggcgcagaaaaataaacctaatttaccaaattcagacacagattctcattcctcaagatcttcttcttatttcttgtctcaaattaatcctcaaactttcctctctgtgtctctctaacaatgtgctccatttcctcactccaccaaaatcatgtctaaggatattgctaacatgaaggactcttggtttttcgacaataactttaatggtctctcagacgagatttttgatgatgtcattaacttttttgatttcccgctggaagacgtggaagctaatggcgtcgaagaagactgggatgctcaattaaaatgccttgaagacccgcgtgttgatgtttatacagcatcatcagctgggttgtgtgccaaaactcaaaatgaaaagccccaacttggaatgaagttctctgcttctggaaatgggat

SEQ ID NO: 15084 - DNA, 418 bp, Glycine max
  unsure (1)..(418): unsure at all n locations
ctcgagccgctcgagccgctcttgctgaatcttcaggagttaaattgggagccctgtgggcagagatagttgtgaggctgaatgtacttaattacttcaacctctttttcctagtatcattcattttcacctgcatgtgcgttttatcacctgttcaaatatgagattcagcgtcacatactgatggtcattatcattaaatggagcacctgagataagggaggttcaatcagggtttatccattttcagcggttctgatcttgaatagtctctaactttgtcggatgtcaaggatttgatattgatatgttgtggctcaattatgttgcactgttgactcgatttgttgactccacctccataagttgcatatactngtcctaattgtggtgctatataccctgttaaaataaaatt

SEQ ID NO: 15085 - DNA, 405 bp, Glycine max
acaaggacacaagaagtacgacaaattaagacagggcctaagagaaggtgttgtagagaggatacagcgagagcaaaatgtattctcattgggttcgattgatgcttctcattgcttgcattcttccagctttggttgaatgcagagtgaggcactacaaatttcatgtggtgtctaaacaaactaatagattgtgttcaagcaaatctattgtcaccattaatggcaagttcccgggacccactctttacgccagggaagacgatacagtgttggtcaaagtcatcaaccaagtcaatcacaacgttaccatccattggcatggtgtgaggcaattgagaactggttgggctgatggacctgcatatgtcacacagtgcccaattcaaccagggcaaacctatg

SEQ ID NO: 15086 - DNA, 486 bp, Glycine max
ctagtctctcattccttccatttcttctctcctattccctcctagttccaattcttcaccctagtctaaaaataatgtcattcacttccaaggtcattgctctgtggtgcaagaaacatgggaatgatgatggtgtcgatgtgtatgatgctcctgctgccactgcttgcattgaaggaaatgtttgcaattggcatggagattttgtaagttttgtcccagttgcattggtggagggtgacgatgacgacgatgacggaggttatgactacgctcccgcagcataaactataaatgtttggttaccttgtatactatccaacttgtagtgaccgacatattagaatgtctgcttctattcttaatttttagtttggcgccaattgaaagcgattaagctacaaaattatgtgcgaggtgactttatgttgatgtgtaggcatgcactatcaattatttagcagctaggtttgttatccagagtga

SEQ ID NO: 15087 - DNA, 582 bp, Glycine max
ctcgagccgaatcggctcgagtccaaagtatctcacttgggtccggaatcagaagtacttaataaattcttctcagctatgaagaagctgtgtcccaatcttgatcgtgaggatgggctcgaaaccgtgcttgaggtccctatcccggaggagattctcacccacaagagtggaaccaccaaagcttggcacaacatgaagaattggatgaaaccacacgctgaatcgagatcaaattcagcttccatggcagcagttttcggagggaaaaacactgagattcagcttttgttaggcgttgttggagcgccgttaattccttcacctatcgcccctgacaaccaacccatcactcgcagcattaaagaccaacacattgaggtttcaatggctaaatacatagtgaagcagtacgtggcggcggtgggaggtgagcgtgctttgaatagtgtggtactgcatgtatgctatggggcaggtgaagatggcaacatcagagttttcagcaggggaagggagtgtgaatagtaagctggtgaagaacttgcagtgtaaggagaggtggggggtttctggtgtggc

SEQ ID NO: 15088 - DNA, 537 bp, Glycine max
aaacaaaacccaccatgactgatagggttcacccttcggccaaaaccaccgccaacgccggccccaagccgacattccccgctacgaaatcccagctttccggcgccaaccgccccacctaccgcccccaaccgcagcaccaccgccgccgccgtagtcgcggatgtgcctccaccctctgctgctggctcctcctgatcctcctcttcctcctcctcctcgtcggtgccgccggcaccgtcctctactttctctaccgtccccaacgacccacattctccgtcacctccctaaaactctcttccttcaacctcaccactccctccaccatcagcgccaagtttgacctcactctctcaacaactaaccctaacgacaaaatcatcttctcctacgaccctacctccgtatcccttctctacggcgacaccgccgtcgccagcaccaccatcccctccttcctgcaccgacaaaggaacaccaccgtgctccaggcttatgttactagcactgaagaagtggtggatagtgacgccg

SEQ ID NO: 15089 - DNA, 479 bp, Glycine max
ctcgacaaacaaatcacaactaagcaacacaaactattgcaatggcttctgctcagtgtgagaaacccaacaccacagttgaagttagccaaccaaaaagccatcacaaacccaatactgcaattgaagtatgccaacccaaaacccaacacagctcgttcggccaaaaattatctgagataactagcaaggctttcaaagggcgtcatggcagcaaccaaaatcaacttcaatactatagccaaactcaggttgagtcccaaggccacaatggcaccaaaacagaggctcactactatggccaaactcagacccaaaatgacaaaaaacatggggtctccaaaacccagatcacagttactgtcgtccaagcacaaattacccacaccgagaagaaggacccttatccttatgataccactacaacatgctttggggctcatgcaaagaagaatggagagctcaacaacaataagaag

SEQ ID NO: 15090 - DNA, 1040 bp, Glycine max
gcaatggcaatggcaattgcaatggttcctcaacctctgctaacccttttcctctttctctcccttctctcaattgtcaactcctctccttcccaacaccttcagatcgccaatgctgaacgcaggattgacttgacttctcacattattaaggtgtacttgacgttgaaggttgaaaatttggggacatctcctacttcagaagtacatattgccttttcacccactgaagtagaacatctagcaatagtcagagctgctgcaacttctgggaagaggaagaagaaaacttatgttcctctagatgtcaaatctgccgagctacctgatggaccaaatggaactaagtttttctctataactttgttaactccattaagtaaaggtgaaaccacaacactagaggtgctttacatattgacacattctctggaacctttcccagtagaaataagtcaatcagagtcacagttggtttatttccgtgatagtgcaatattattgtctccctatcatgtcaagcaacagacaacttttattaagactccaagcacccgggtagaatcattcacagtggtggaccccactaaacgtgctggtacagagttgaaatacgggccatatgaaaatcatcccccgtattcatattctcctgtacttattcattttgaaaataacaatgcatttgctgttgttgaggagctagaacgtgaaattgaaatatctcactggggaagcattcaagtcactgagcaatatagcttggtccatgctggtgctcgacataaaggtgttttttcaagggttgaatatcaaactaaaccaggtggtactggtgtttcttcatttaaacatcttttagcgaaactaccccctagggttcactcagtatactaacagggatggaataggaaatatttcctcttcacatctacgtacagattcttggaagtcagaacttgaaattgaacctcggtatcctctatttggaggctggaaatcaaccttcgtcattggttatgggctacatgcaagacttc

SEQ ID NO: 15091 - DNA, 406 bp, Glycine max
cttcttcttttttctctggtgacagacaccacttcaacttggctcatgcctcaattcaacttggattcatattttgaaagcatcgcaaggtaaaaaaaaaaaacctacttttattattaatcgcccttggatttatacaaaaagatgactagggagcaaagcaaaagtgctggggaatcggtgctaaaaatccaatttggaaattggggaatttggtgacggttggaagaagtcaagcctatcaaccatgcttgatgtgcgttaatatcgactgaaattacatgaaatggttttttaatcagtacttttataaggtgtatataatgccctttaagaaacaaaatttagattttgaagtcttctgctcttgttgaaaattatgtctatcatgagcaattctttcata

SEQ ID NO: 15092 - DNA, 477 bp, Glycine max
gacttcatcaagcacaagtaaacaaaaccatttttctattaggacgaccaccgcaaatggcagcattgaacctttgccgcatggcacttcgatcctcgaagcttctctctcgcccttatcatcgtctttctgttcagttgcagatgcagatgcagccctcttctccttcactcactcgaaagatgagcatggatgcacagagtgttgcttctcagcttaatagttctggattgttgaggactcagggccttattggagggaaatggagtgatgcttatgatggcaaaaccataaaggtttataatccagcaactggtgaatctattgtagatgttgcatgcatgggtggaagagagacaaatgatgcaatttctgcagcctatgatgcatatggatcatggagcaaaaccactgccgctgaacgaagcaaatttctgaggaaatggtatgatttgctaatggtacataaagaagaac

SEQ ID NO: 15093 - DNA, 594 bp, Glycine max
acgagcgccccaacaccaccatggccacaagagtctcccctcccgttgcccttctcctctcctccctcctcttcctcctcaccctctcacgcgcccgcgatctccccaaccctttctcccaacccaaacctcactccgaacctaaaaccgtttcgttcacgatcgacaccatcgatcccgttccgctgacgctcctccgcttccgtccgatcaaccgccacttccagcccggccgtccgttgccgctgtcgctccgcaccggccaccgccgttgccgccaccgccgcgagatcccctacggcaacgacgcaatcctggtcggcgacgccgctgccgccagtcggatccatccgcgctgggttaggcttcactccgccgccgagacgcggtttccggcgacggtggagaggcaggattccgatcacgatcatgatcacgagcaccaccaccaacaccacggcgagcgccaccaccaccaccaccgccacaaggcgagctggttcgcgaagaagattcggaagttcatgaagctgttctgattttgatgttgcaacgacgaacgacgatgatgcatatatatatatagtagttata

SEQ ID NO: 15094 - DNA, 352 bp, Glycine max
  unsure (1)..(352): unsure at all n locations
ggccagaagagtctctcctcccgttgccgttctcctctccttcctcttcctcctcaccctcacacgcgcccgcgatgttccgaaccccttctccgaacccaaacctgactccgaacctggatcccatcatcccgaacctaaaaccgtttcgtttaccatcggcaccatcgatcccgttccgctgacgctcctccgcttccgtccgatcaaccgccacttccagcccggccgtccgttgcctctgtcgctccgcaccgcccaccgccgttgccgccacggccaccgccgcgagatcccctacggcaacgacgccatcctgctcggcgacgccgccgncgcgcgccggattcat

SEQ ID NO: 15095 - DNA, 414 bp, Glycine max
gcagcgaaaccaagacaaaagtggcatccttgttgttcgcttcaaattcaatgtgctacagagggtaccactctttctacctcctttttcccctttcttcgctacaaatcttaggtttaattcataatctcacatattggatatcttctcttcttttcttttctgttctgtttaattctcgttatgacgtatggaaattttcatttaatttgtcaaagtcttgaaaccttaacaattttcgttatcttttttaattttacgaattctgaattatcttcgaactgggtgaggacgaaatctgaactatcttaaaacaaaataaataattggaattattagaagtaaaaccctaaataaatagaaaaagatgtgttgtccactatccccctaatatctagtctaaaacagaacatc

SEQ ID NO: 15096 - DNA, 413 bp, Glycine max
cattcattctattcatacaccgagagagagagagagagagagagagggaagcagcgaaaccaagagaagagtggcatcgttggttttcgcttcaattcatcttcgctcaaccttctacaatgttctaccgaggtaaatttgctgatggtggtgatgggcgtgaaatggctgcaaaacgccagcgcactgttgatccaggatcttcattctatggtgcttccactggttccaattttatgtacaacccatctccttatggatatgtcagccaacctcctcctccaccttttcctgttgttcggctgcgtggccttccctttgattgtactgaaactgatgtggcttgagttcttccatggtctagacatagtcgatgtcctttttgttcacaaaggtggcaagttcactgggga

SEQ ID NO: 15097 - DNA, 304 bp, Glycine max
atttacattcatacagagagggaagcagcgaaaccaagacaaaagtggcatccttgttgttcgcttcaaattcaatgttctacagaggtaaatttgccgatggtggtgatgggcgtgaaatggctgcaaaacgccagcgcactgttgatccaggatcttcattctatggtgcttccacgggttccaattttatgtacaatccatctccttacggatatgtcagccaacctcctcctcctccaccttttcctgttgttcgactgcgtggccttccttttgattgtactgaaactgatgtggctga

SEQ ID NO: 15098 - DNA, 537 bp, Glycine max
gttgtttttcataactaggatacatgagagacatcaaaatatttactgtactatttgttttattttacatgctccttctattgtcattttgcctactttctaagtaactcttctgtataatgacatgaataaaaatattgcataaataaaggattggattttcttgtgtagattcctttttctattttctttctctttttcagttttctctgttcctctgctttcatttcttcccttctctactcttcattaactttcttgctaagggaatcttcgtcgtggaatctgaggaaacgtcagtatgaaaatcaaggaattttcctcgccataatgaacgagagaatcactagaggcacatgttggtagaagattttctctggggattgacttgattgattgattgttcacagttcatgctaaacaaccaaccaaacggctattctgactattttttgatcctgtttctaatcttgtttcttagactgtgtctaagtcttcctttcaggctttgtgaattgaattccgatgtcagagcca

SEQ ID NO: 15099 - DNA, 586 bp, Glycine max
gccgtatgcagactcaccatgttctgtcaataactgaattgttttaagtctctgttactctgctttcatttctaacattttcaactcttcattaactttcttgctaagggaatcttcgtcgttgaatctgaggaaacgtcagtatgaaaatcaaggaattttcctcgccataatgaacgagagaatcactagaggcacatgttggtagaagattttctctgggattgactttgattgaatgattgttcactgttcatgctaaacaacacaaaccaaacggctattctgactactttttgatcctgtttctaatcttgtttctaggatcctgtctgtctctcttggtttggtttattagacttgtgctgtgtctaagtctttctttcagggctctgtgagttgaattcaggtgtcacatccaaggcaacaaaacaagatgatgagtccaaaccttgcagaacaagttggggacacaacctataccaagatctgtgctggaggattagcttgggagactaagagagatactgtacaacgctatttcgatcagcttggggagatcttagaggccgtcgtcatcactgac

SEQ ID NO: 15100 - DNA, 1304 bp, Glycine max
cctcgagccgattcggcttcagtctctctctctctctctctctctctctgtgttgcgttttgtgaaatcttattcgacatggcgtcacgggacaacaagaaggcgtccagcagccgagccggccgaattcgcaccctctccgatctgaaccgtccctccgccgattccgacagcgactccgatggccctcaggagtactacaccggcggcgaaaagagtggaatgcttgtccaggatccttcaaagggaaatgatgtggatgaaattttcaatcaagctaggcaacttggggctgttgaaaggcctcttgatcagcttcaggagcctccaaggtcaactagctttactggaactggcaggttactctcgggggaaactacacgatctactaataatcagcaacctgaggctgttgttcataacattgttttctggagtaatggtttcactgtaaatgatggaccattgaggagtttggacgatcctgaaaatgcctcatttttagagagcataaaaaaatctgagtgtcccaaagagcttgagcctgaagataggaggtcatctgttaatgttaacctcatacggaggaatgagaactatcgtgaacccgaaaagcagcatgttgcatttcagggagtgggaagaactcttggaagcagctctacatcaatggctcctgactctcctgctgcctcaacacctaccaatgcagcgccaactccttctgctggtctggtagttgatcaatcattgccatcaacctcaatacaactcaggttggctgatggaacccgcttgatatcacattttaattaccaccacacaatcagcgacatccgtgccttcattgatgcatctagacctgggggtcggcagaattatcaacttcagttgatgggtttccccccaaagattctaattgatgaaactcagactatagagcaggcaggactggcaaattcagttgtcatacagaaattttagcaaactgctgcttcatgcgattagtcattgctggctaaatgctgcatggaagggatccagttttattaggggcttctagacgtgaggtactgttatttacaaaaacagataggaaacccccctaatgttggggggacattttcttttgttgctcaaagtttaccaagtatttgctttaggaccagttggatggcttagctttggacctatttcatgttatgatgattgtgttgtgtgtcctctttctggctgggcctagtgactgaacttgataatatattgaacacttcactgaaatgcaggataaccctaagtcaccc

SEQ ID NO: 15101 - DNA, 970 bp, Glycine max
ccgcaacttctcaaattcatgactttgtcttgttcctagccaaagaagcaatgacagctcatgatatatcttctgatggagatggaataagccaaaagatgaaggagttctctgttacttttaataaagttacatgcaatgaagcaagtttgctgcagttcgttcttgacctgtctaatgttctagccaaagcaagtgaatttagatttaatatccttggttataagggtagagaagctgaaactaatagtcctgattgcatagataagattgctctgccagaaaataagttagttcaagacaattcatcaggagagagatttcaaaatggtcgttcacatattcttaatccctgttctgatcctgagaggctcctgatgatggaaatttggccccaggctatgaatcaaatgccacgtcacagaagttctcaatggaggactttgaagaattgaaattagagaaagagaaggcagttgttgatctgtcaaagtgtgttgaaaatcttgaaatgacaaagtctcgattactagagacagagcaacatctagctgaagttaaatcacaattggcttctgctcaaagatcaaacagcctggctgagacgcaactaaaatgtatgacagaatcatacaggtcaattgaagcacgcacaaaggagtttgaaactgagcttaatcatctgcgaatgaagacagaaactctggagaatgaacttgaagatgaaaagagggctcatgaagaagctttggctaagtacaaggagctagaagaacaactacaaaggaatgagagctcagctgctgataatgacattaagactaagcaggagagagacttggaagctgctgctgaaaagttagctgagtgtcaggaaaccatatttcttcttggcaagcagttaaaatcgctgcatcctcaaacagagccaatgggatctccttattcaaaggccgaaggcttcacagag

SEQ ID NO: 15102 - DNA, 463 bp, Glycine max
atttaatccggtattggaatgcgggggtgtccgtgaggggtgaggaggaacttaatttgaacgtttccctctgactctgaggttacaagaatcctccacccaacctctgttgtgtttccggagattaggatctggttgggaaactgctatagaagtgtacggatctcatccatcggggcatagcttgtttttgcgatgggttggagatacaacgctggattgttcctcatagtcactgttgttattatttgggtcacctccgccgaagttacccaggatatttttacagattataagcagccatttgcagtaacatatcttggagcttctcttatggtagtttacctcccaatagcattcatcaaggactgggtctgtaacttgcttagatcccgctcctctgaaagtggtaaaaatgcagaatgcgtggatgagttttctgtcaggattagctctcctctca

SEQ ID NO: 15103 - DNA, 792 bp, Glycine max
ctattattctctttttcatttctcagtttcgtttccaaaataacattccttctggatagagaatctataagctttttgctcatagcctcacaagcaccttgctttctctttttcccattgttagtggtttttattgatttctgggtcagtgtggttttttcctgttccacgagtttggtcaagtttccagtgaatttgttaggtgtgatccatgtagccgatctcacctagtgggataaggctttgttgttgttgttgtggtggtggttttgtgattattgggctgccatggatctggttggatcttctggtttgagtcctacagggtccaagtgaaggtcaaagtttcgttttttatggggtgagtgattcagctgctgaatgagtttgaaatggtgggtcagttttagctgaaaaaaggggtgtgaggatagaaaatgaagcgcaaggtggttcagcacaagtggaagaagaagctttttgctttgatcttggtggtgttttgtttaggaagcttgttgtttatgcagacacgttaccatcatgttgcggggttggtttcattgcaacaccgttttgtttctgagcccgaggttcaagggcccaaggttgcgtttctcttcattgcacggaacaggctccctttggaaatggtttgggatgctttctttaggggaggcgatcgcaaattctcaatttttgtacactgcaggcctgggtttcttctcaacaaggcaacgactagatcgccatattttttgaatcgtcaagttaatgatagcgtacaggttg

SEQ ID NO: 15104 - DNA, 389 bp, Glycine max
gtcaaatggaagcccaagggcctatgcctcgtccataaccagcaccagcacaactttggaagagggagctatcagttatcccctgtccgggttgagtgctacgtttgagaacaacgaggtcaccattttcgccactctcacacttccaaacgggaccacctcctttgtccacgtctggcaagatggccctctctctggaactaccccacgagagcatagccacgagacttcccaccaaaactccaaggaaatcttggaccttctctctggttcctccactcagccaaccggaaattcacgccaaagaagaagaaacacccatggagtgctaaatgctgtgagctggggcatattgatgccaacgggtgccataatcgcaaggtacttga

SEQ ID NO: 15105 - DNA, 1105 bp, Glycine max
gaaaggagtccatgaattagggagcgtagagagacaaagtaagagagagagaggcgtttgtgttgtgttgtgtctcataaacctcacactctccctcactattcctccagcctccacccgctgaaagagactcctactcgtcaatcgttgtgaagaaaagaactgaaaacactgacactgttattctctgaattttctcaccatctacaactgaagttttaaccaatatggaaactgaaaagtctaatgtttcaaaggctgaagaatttaaactccttgccaatgaagtgttcaatgctcgaaaatactcccaagccattgatctatatacacaagcaattgagctgaacagtcaaaatgcagtttacttttctaatcgtgcctttgcccatcttcggcttgaggaatatggtagtgcaatacaagatgccacaaaggctattgaaattgatcctaaatattcaaagggttattacaggcgaggtgctgctcatcttgggctggggaaattcaaggaagctctgaaagattttcagcaggtcaagaaaatgtgtccaaatgatcctgatgcaacaaagaaattgaaggaatgtgaaaaagcagttatgaaacttaaatttgaagaagcaattgctgcaccagagtctgaaaggcgttcaatagctgaatccatagatttccgtacgatagatgttgagccacaatattcaggagcaagaatagagggggatgctgttactttggattttgtgaaaaaaatgatagaagatttcaagaaccagacgttcttacataaacggtatgcattccagattgtattgcgaacaagagaggcgttgcaagctttgccttctcttgttgacatacatgttcctgatggcaaacattttactgtttgtggtgatgtgcatggtcagtactatgatcttctgaatatttttgagcttaatgggcttccttcagaagagaatccgtatctattaatggtgactttgtggataggggatccttttcattggaagttatcctcactttgtttgcatttaagtgcatgtctccatcagccatatatttagccagaggaaatcatgagagcaagagcatg

SEQ ID NO: 15106 - DNA, 420 bp, Glycine max
tttctttttatgtgctattaacccgatccttttcttttatcttcttcttcctattctcttctttttcttcttcttattattcgtattcttcactgtgctgtttctccccaactacccctttaccttcaagtcaatcagcgtgaagagaagaagcgaacactgactctgttattgttctgaatttcctcaccctatacaactagttttaacgaacatggaaactgaaaagtctaatgtttcaaaggctgaagaatgtaaactccttgccaatgaagcattcaatgctcgaaaattctcccaagccattgatctatatacacatgcaattgagctgaacagtcaaaatgcagtttacttttctaatcgtgcctttgcccatcttcggcctgaggaatattggagcgcaatacaagaagccac

SEQ ID NO: 15107 - DNA, 499 bp, Glycine max
ccctcttcacctttcttctctccttacaacaaaccaaaccacttaaagttttaaacacacttacaaaatcagttacaattacacactttcactagctattacactttttgagggtttttttttttattctactatatatgggggcaagctcgggtatagtactagaaatcacagttatatcatgcgaaaaccttcgtgtcacggaggatccatacgttgtcgttagggctgagtcgttaaattgttgcacctcgaatatagcgaaggattgtgggagcaacaaaacgagtttgttttcgtggaacgagaagttgatgctgaacatgcccatgcatgcaaggtccatcacgttcgaggtgcaatgcaacaggttcaagggctttcgacctgctggggtggccagaatcgccgtgtcggattttctcggcggcgctgtgtcggaaaactgcatgcacgtgttgagttaccggctgagggactgggaagggaaagaaaacgg

SEQ ID NO: 15108 - DNA, 465 bp, Glycine max
cggctcgaggaaatattcagcgtattttacagtgagtgttgttggacttggacagtagctgctgctttttcccttgtctccagctacctccgttcctcgatctcattcaccagacagaacagaatgggttgtcaaggtagcaaggagaaaaaatcaaagacagaatttactacttcctatggatcagcagccactggtagtggtggtggtactagttacaacactgttcagcctccgccgccgccaccaccacctactactactgctactactactaatcaggttcaaacatcagcagcacccaaaccacaatcaaaagcttctcctacagtgcagcagaaagcagacacgaggattctggggaaaccctttgacgacatataaaaatactacagtttagggaaggaattgggaagggggcaattcgggataacgtatctgtgcacggataatgcgagcggtggg

SEQ ID NO: 15109 - DNA, 445 bp, Glycine max
ccttattggattctcaaatattcaggcagtgtcataatcggttggacttggacactagctgcttcttcagctagctccgttcctcctccatctcattctcattctcccaaatcttcattcacaagacaaaatgggttgtcatggtagcaaggagaaaaaatcaaacacttcctatggatcagcagccactggtagtggtagtggtagtggcagtggtggtggttacaacactgttcagccatcaccacctactaccgatcaggttcaagcatcagcacagactccagaaaaccgaaaagcttctcctacagtgcagaagaaagcagacacaagcatcgtggggaaaccctttgacgacataaagaaatactacagtatagggaaggaattgggaaggggccaattcgggataacgtatctgtgcacggagaattcgaagcggggg

SEQ ID NO: 15110 - DNA, 1574 bp, Glycine max
gttggaatttgcccatctaaaacctcaatcttttactgaaaagtctcaactttgaactcactcgaagtgatgatggagtcacacgtggatctaggttttctccttcaagctctcactccatcttggaactccgttcctttgcttgtggggttcttcacttacttggccgttgctggatccattctccctggaaaacttgttcctggcgttgcactactcgatggaactcgtctacactattgctgcaatggtctgctctcgcttcttctgttggttgcacttctcgggatcggtgccaagatgggttttgtgtctcccactgccatatcagacagaggacttgagctgctgtccacaacttttgccttcagttttcttgtaaccctggtgctgcatttttccggttgcaagtcacaaagtaaaggttcatcactaaagccgcatatcagtggaaacctgatacacgattggtggtttggtatacaactaaatcctcagttcatgggtatcgacctcaaatgtttctttgttagagctggaatgatggggtggctacttatcaatttatctattcttatgaagagcattcaagatggtactttgagccagtcagtgattctctaccagctattctgtgcactatacatcctggactattttgtacatgaagagtacatgacatccacctgggacataattgcagagagactgggtttcatgttggtttttggagatttagtgtggattcctttcacttttagcatacaggggtggtggctcttgatgaacagtgtggagtcaacaccagctgccattgtagctaattgctttgtcttcctgattggatacatggtatttcgaggagcaaacaagcaaaaccatgtattcaaaaagaatccaaaggctcgtatttggggtaagcctccaaaagtcattggcggaaagctacttgcttctggttattagggtattgctagacgctgtaattacctaggggatttgatgcttgctctctcctttagcttaccatgtgggataagttcaccaattccatacttctatccagtttatcttcttattctgttaatctggagagagaagggatgaagctcgttgtgcagagaagtatagagagatatgggccgagtattggaaacttgttccatggagaatattgccttatgtttattaagaaggaaaacaaaaaagggcttcaccatgaatccttcatcttgccgatggtattaagcactttggtgtaaattggttcttgtggtttcaatcttggatcatttcctattgaaccatgtagctgcaaggagagtgtttcaaggactttatcttaccatctccttttgtgtatcaattatgctgcagcctgcaggccttcgtttttcaaaggccaactcttttttacttgttttatttgtttttagatgagaatggcatggtcaaagctcctaggcttatcaaaagtaacagtgtcatgttcccagtttaatttcatatttgatgttggaatgaaatttttacattgatatgctctttaaacttaatggcactttaagcccagt

SEQ ID NO: 15111 - DNA, 368 bp, Glycine max
gttaatgatgaggtgctttctaccttgctttcgtacttgtaaacggaggaaccacttgggttccgccgatgaagcccaaaaccatatgggagaaggagctgttgaagaactcattgattccatagcagagtcaaaaacaacaaatgaagagcaattgaataagagtgttgaaaccaaggatgatcggaaagaggaagcacctcaaatagatgagacagataaaagatcgcatcaagaagagtcttcggagtcactggtctctctctccatttcttctaggaaaaaagcttcagatgccgagcctgaagttaacagtcctattcgactcgtatgcacaaaagaagcatttgggtcatccccaagtgttg

SEQ ID NO: 15112 - DNA, 254 bp, Glycine max
aaggtcacttttatacaaaatcaattagttaatgatgaggtgctttctaccttgctttcgtacttctaaacggaggaaccacttgcgttccgccgatgaagcccaaaaccatgtgggagaaggagctgttgaagactcattgattccatagcagagtcaaagtaagcaatccattcattcctttagtattttgataatatatatttattatcctgtcatttacgctttcagaacaacaaatgaagagcaattga

SEQ ID NO: 15113 - DNA, 1270 bp, Glycine max
cccacgcgtccgcccacgcgtccgcccacgcgtccgcccacgcgtccgatttcgtataacatttcatttcacttcacttagggtggtgcatttgcaaccctttaatttcctcacaaaaatggaggaacgtagtttgtactcactagtgtttcttgtgcttgctttggctattgtgaacaaagtgcatgggcaagggacgcgtgtagggttctattcgagtacatgcccacgcgctgagtccattgttaagtccacagttacaacccatgttaattctgatagtactttggctgctgggttgcttcggatgcacttccatgattgctttgtgcaaggttgtgacgcttctgttctcattgccggttctggcactgagagaacagcatttgcaaaccttggtttacgaggatttgaggttattgatgatgcaaagaaacagctcgaggctgcatgccccggtgttgtgtcttgtgctgatatccttgctcttgctgctcgtgattccgttgttctgagtggtggactgagttatcaagtgcctactggacgcagagatggacgcatatcacaggcttcagatgtcagtaacttgcctgctccttttgactctgttgaagttcaaacacaaaagttcacagcaaagggactcaacactcaagacctcgtcacccttgttggtgcacataccattggtactacagcttgccagttcttcagtaacagattgtacaacttcaccgcaaatggtcctgacccttccatcgacccttcatttctttcccaactacaatcactatgccctcaaaacggtgacggttcaaaacgagtagcgctagatacgggtagtcaaaccaaatttgatttatcttactatagtaatttgaggaattctcgtggaattctgcaatctgatcaagcactatggagtgatgcttccacaaagacaactgttcagaggtacttgggcttaataagagggttacttggattaacattcaacgtggaatttgggaagtctatggtgaaaatgggcaacattgagttgaaaaccggtaccgatggtgaaattcgcaagatatgttctgccatcaactagatttatagccacttcaaacaattaataattaaattgcttctagaactgtttctctgttggcatttgccagtgaagtgtatcatatacaatttgcttcttttgtctggccagacgaaatattttcatcttgaaagtgtacaagttacagaataaatattaaattttgttcaacat

SEQ ID NO: 15114 - DNA, 728 bp, Glycine max
gtaccctagggtttatgagggttgttgcttgcggtgccagaattgtgatagatcctttcacggcgtaacggttccgtcgctgccgccgcttgttcccggtcaggatgcttattattgctgctgggggttcttccccatggggtttgttgttggcagcttcggttctcctccgcagccggaggaagaagctgctccttcggcggcggaggcgccaccgtcaccgcctcctccgccacagcaaccggcttcttcgctgcctaattggatgccggtggcggcggagaatggcgtggggagtgtgacaccggtggcggcggccaccaggttgacgaggtcgggggcggcggtgccgaacggggtaggatcggggaatgggacggggaagaagaaacgggggcggccgaggaagtatccattgccgtcgtcagaaggagggggtgttttggattgttgttgtaggtactgttgtgctgtttaattgttgtttttgtagatatgattacctggttattttgtatgatctgtctcttgaatgtgggtatctttttggctctggtttttttgctatgggtttttgattttatgccttgttgatgagtaggggaagagaaacaatgtggccggttatctatagttgaaattattagattcacagggccttaatgcccttaactttattttatgtggttttcacaaaaataaaaaataaaaactctggcttttcctac

SEQ ID NO: 15115 - DNA, 1544 bp, Glycine max
cctgatttcagtgataggtatgatagaaatggcagtggtgggtctaacgaagctggatcacggaataatcagagttccaaagggggaagttatgcttctcatgatgtttcaaatggaacacatgttgctggcaatgttgattcttctgtcagaggtcatggggcttcggatgctggagctggactatctcctgagtcttatcgacatcggcatgaaatatctgtgactggagacaatgtacctccaccccttgcatcatttgggtcaactggctttccatctgagcttctgagagaggtacaaaatgctgggttctcagccccaactccaattcaggcacagtcatggcccattgctcttcaaggtagagatatagttgccattgctaaaacaggctcagggaaaaccttgggatatttaattccagcatttattcacctcaagcgctctggtaataactccaaaatgggccccactgcattggtactttcaccaacaagggagttggcaacacagatacaagatgaagccatgaagtttgggaaatcatctagaatttcatgtgcatgtttgtatggaggagcaccaaagggtcctcaactgagagacattgatcgtggagcagatattgtggtagccactcctggtcgcttgaatgatattcttgagatgagaagaattagtcttaatcaggtttcttacctggtgctagatgaggcagacaggatgctggatatgggttttgaacctcaaattaggaaaattgtgaatgaggtgcccaatcgcaggcaaactctaatgtttactgcaacatggccaaaggaggttaggaaaattgcagctgatctgctagtcaagcctgtccaggtgaacattgggaatgtagatgagcttgttgctaacaagtctattactcagcatgttgaagtattgccaccaatggagaaacaaagacggctggaacatattttgcggtcacaggatcaaggatcaaagataattattttttgttctaccaagaaaatgtgtgatcaacttgctcgtaatctgacacgtcatttcggagctgctgctattcatggggataaatcccaggctgagagggatcatgtgttgagtcagtttcgaactgggaggtctcctgtgctagtggccacagatgttgctgctcggggactggatatcaaggacattagggtggttgtcaattatgacttccctacaggagtggaagattatgttcataggattggaaggactggaagagctggagccactgggctagcttacactttctttggtgaccaggatgctaaatatgcttcagatctcatcaaagtcttggaaggtgcaaaccagaaggtacctccagaacttcgtgatatgtcatcacggagtggtggtgggatgggtagatccagacgatggggttctgggggacgaggtggacatggtgattctggatatggtggaaggaataatgactctggatatggtggccgaggtaatgatgctagatttggtggaagaggcagatattctta

SEQ ID NO: 15116 - DNA, 1623 bp, Glycine max
cccacgcgtccgcccacgcgtccgcccacgcgtccgcccacgcgtccgccgcccctccgattcacctcacaacttcatcaaaccaaaaaacacaacaaaagaaagaaagaaagaaacaaagagttccttgctttgtagtaagatatatcatcaaaaatggttttgtcttggactagaagaaacgttttccgccgtgcaaagaaggagaaggaacaaagtcaactattagaagttgaggttgtgattcccaaccactttcgctgtccggtgagtttggagctgatgacagatccggtgactttatcaaccggcattacctacgaccgtgtgagcatcgagaagtggatcgagggagaaaacagaacctgccccgtcaccaaccaggtgctgacaaccttcgacctcatccccaaccatgccattcgcatgatgattcaggattggtgcgtccaaaacagttcttatgggattgaaagaatccccactcctcgtattcccatctcgagctacgaggtttccgacacgtgtaccaggatcttgtcggcttgccagcgtggagatgataagaggtgtcaggagttggtcgggaagattaaggtttggagtagagagagtgagaggaacaagaggtgcatagttggtgctggtgctggtgctgttcttgcatatgcctttgattgtttctcaagtaactctattgataagcatgtggttgttttggaggaggttttggaggtgatgacatggatgatcccatttggggaagagggtgtttctaaattgagttcaagagcttctttgaattcattggtttggtttctagaagggaaagaccttgcatcaaggcaaagtgctgctttgttgcttaaagaagtgtgtgtgcaagaattggccaaggttggaaatgttgttgaggctttggttaagatgcttagggagcctattgggagcacttccaccaaggcttgtttggcaacaatttttaacttggtgtcgttggctgcgaatagagagggaattgctcaaagatttgtggagttgggtttggtttcacttttgctagaggctattgttgatggagagaaaggggtgtgtgagaaggcacttggggtgttggattgcatttgtgattgcgaaaaggggaaggaggttgtgaagagcaatgctctagccttgcctcttgttgttaggaagcttttgagggtgtcaccattggcttcaggttttgctgtgtctattcttaggaagatttgtgacaagagggaggaagggattctgattgaggcacttcaagttgggctttttcagaagctcttggttctgctgcaggttgggtgtgatgagagccccaaggagaatgctaccgtggttgttgtaaactgttgaatggttacagggaccaaagccgagtgctctgactcatcattgaatttcgagcatcttaagaagccattttaattagtgatgaatggcaactagattcacttattcttttttttttcttgtgtaggtcaatttattgatccacaattctttcctgtaaaaagatacacacatcaattgattctttgaattcattctttggaaaattgattcgaagtaattagttagatataataatca

SEQ ID NO: 15117 - DNA, 414 bp, Glycine max
ttgtttcgtgggcggacgcgtgggcaaaaagaaagaaagaaacaaagatcgttcattgctttgtagtaagatcagatcatcaaaaatggttttgtcttggtcaagaaggaacgttttccgccgtgccaagaaggagaagtcacaaactcaattggaagtggaggttgtgattcccaaccactttcactgcccggtgagtctggagctgatgacagacccagtgactttatcaaccggcatcacctacgaccgtgtgagcattgagaagtggatcgagggagggaacagaacctgccccgtcaccaaccaggtgctgacaaccttcgacatcatccccaaccacgccattcgcaggatgattcaggattggtgtgtcgaaaatagttcttatgggattgatagaatccccacacc

SEQ ID NO: 15118 - DNA, 492 bp, Glycine max
taactactttgacccatcctcatctcctccgcacacccatctatatatataccaaccacgcaaccttcttttcctcatatcatattctcttattcacctcacaacttcatcaaaccaaaaaacacaacaaaagaaagaaagaaagaaacaaagatcgttccttgctttgtagtaagatcagatcatcaaaaatggttttgtcttggtctagaaggaacgttttccgccgtgccaagaaggagaaggcacaaactcaactattggaagtggaggttgtgattcccaaccactttcgctgcccggtgagtctggagctgatgacagacccggtgactttatcaaccggcatcacctacgaccgtgtgagcatcgagaagtggatcgatgttgaagctttggttaagatggttagggagcctattgggagcacttccaccaaggcttgtttggcaacaatttttaacttggtgtcgttggctgcgaatagagagg

SEQ ID NO: 15119 - DNA, 383 bp, Glycine max
  unsure (1)..(383): unsure at all n locations
ttctgaactgtattacaatgaaaacactaaaggttttatgactgttacctcacttcttctggaaatgcttttgcttcatgtgcttcctctcattcttctggtcattattattaccataggatgcaggggtactagggaagcaaatgaaagatggagtaagattgatggggcgtggttctgagcagatcaagtggccaattcatctagaggtagacttgatttggaggctaatatgcgtttggaggatcataatcatgccttttgattctcacgtcgttggaaatgcttttcttaacactttntaaacttgcgtttatctaatgttgtaaatttcaccacggtcataattaatcatcattgntacttttgctaaatagtttatg

SEQ ID NO: 15120 - DNA, 622 bp, Glycine max
cctccataccctcccaataaatgttttttcccttccactaacacatttaaatattcctcccccaactatctcccctttctcaactctcaatcatatcacacacacaaacatatgctacaaactccacttcttcaacacaaaaatccgaaatttgtgctccaacacaaaaaaatgaaacctacaatcaccattctcttgttgtctctactacttctcataacttcaccctccttggcaacccgacccgcatccaaccctgatcaagtcaagcacaacaaaaacaacaaccaaggtggtggtgctggtgctggtgctggcgggttctttggccctggaggagggttcagcatacccggttttggaaacgggtttggaaatggcatcataggaggaggatacggatccgggtatggaggtccgaatggaggctcctctaaaggtggtatcattagaccaaccgttgtgtgcaaagacaaaggcccttgtttccaaaagaaggttacttgtccagccaagtgcttctcctctttcagccgttccggcaagggctatggcggcggaggcggcggtggtggctgcaccattgattgcaaaaagaagtgcatcgcttattgctaagcca

SEQ ID NO: 15121 - DNA, 288 bp, Glycine max
cttcttcaaacaaaaatctgaaatttgagctcaaacacaaaaaaaacaaaaatgaaacctacgatcaccattttgttctctctactacttttcatagcttcaccctccttggcaacccgacccgcatccaaccctgatcaagtcatgcactccaaggacaacaaaaacaacaacaaccaaggtgatggtggtgggttctttggccccggaggaaggttcagcatacccggctttggaaacgggtttggaaatggcatcataggaggaggatacggatccgggtatgga

SEQ ID NO: 15122 - DNA, 1319 bp, Glycine max
ggggtatgaagtttacattttagaagctacatacaaggatccggtgggttgtgctgctaggaatgtccatggatttacacaggaagacatagaaaagatgtctaagcaatgggaagaagctccatccttgtatctgcagcttgatgtgaagtcattatttcatggagatgatctaaaggaaagcagaatacaggaggttgacatggatatggaagatgatctgggtgatgcattacttccagttcaaggaaaagaagatgagaaagttgttgaccctcctgttggggaagatgcaagtttcctaaaggctgggaagaattggcatgctgaagaggaacatccaacagaagtcagggagttgggtaaaagcaaatggtcagaagattatggtgaagatgacattgatcaaactgaaggtatgaagggcaatattaatgctctgtctgggttaattcatcaatatggcaaggaacgaaaatctgtacattggggtgatcagggtggcaaagacagggttttcaataggggctgcaaggaaggtaaatgctttgtcgttagtgatcggacctggtgctggatataacctgaaatctaatccattacctgaagaggatagtccaacccgtaatagtgtggagtcaaagaagcatagcatatttcaagaacaaatccgggctgaacgagaatctttcaaagctgtttttgataggagacggcacaggattggtggacttgatgtggaagaggactaaaagagacccacccaatgcagaaatgctttcacaaaacagagtatggggagggtagatatatcatgtattcagctttatccctccctgcgttggagaagttgttaccaggatttgaatcctccacaagacggatgtggagactgattccgaattttggttttaatgtcatcaaaacagacggattacttgaaagtcatacttccatgtattagaggagtttaggtgaaagaatagagttgagttgtttggttggctgggaaaagaacatgatgttcccaatgagtttttgtggaatgatgtaaaattttattcaaggattaatatgaaatatttatacacctgatgtgataaggtcaactcagcgtctatgtaagtgtaggtttttcttttcttgtaccagcatgctatttgccatttatagacattacgtactctgaaagaagaatacgttatcggtttaacagacgtctgaagaggaaatacactcatgtgattgtccttcaaatataaacaatcgtgtatgatgatgtttattttattgataggaatatacgatgggatgtatat

SEQ ID NO: 15123 - DNA, 1025 bp, Glycine max
cccacgcgtccgaatctcccagagaaacaaagaaaagaagaaaatggctgtggccaacaatgtgctttgcattttcttcattatctccttaacgtgtgcggttcaagctcgaatcccgggggtttactctgctggtgcatggcaaagtgctcacgccaccttctacggaggctccgacgcttccggcaccatggggggagcgtgtgggtatgggaacctgtacagccaggggtacggtgtgaacacggcggcattgagcacggcgctcttcaacagcgggcttagctgcggtgcgtgttttgagataaagtgcgcaaacgacaggcagtggtgccactccggcagtccttccatcttcatcaccgccaccaacttttgccctcccaacttcgctcttcctaacgacaatggcggctggtgcaaccctcctcgccctcacttcgacctcgccatgcccatgttccttaaaatcgccgaataccgcgccggcatcgtgcctgtcgccttccgcagggtggcatgtaggaagcatggtgggatcaggttcacaataaacggtttccgttactttaacctggttttgatcagcaacgtagcgggtgcaggggatatcgtgcacgcctacgttaagggatcacgaacggggtggatgccaatgagcagaaactggggacagaactggcagtcaaacgccgttttggtgggtcaggctttgtccttcagagtcaccgccagcgaccgtcgctcttccccctcttggaacattgttccatcaaattggcaatttggtcaaactttcactggaaagaacttccgtgtctgaacaccccctttactttcttaagatatataaaatacaagtttattttctttttgtttgggttccccccatttatctatttcctgatcttttttactgcagaggaagaaacaaaaaaatagtcagtgacaagtttttttacttttgcttctcattggtgggtttcatttttttaattaatgtataattgatgattcccgggtgg

SEQ ID NO: 15124 - DNA, 519 bp, Glycine max
ctttgcttattcttcactgtcaacctctctctctgctcaactgaataaagcagagaagaataagaaaatgggtgtgttcagtacagtgctgctgtgccttatgtccctaatgtggatggtggatgctcgaattccaggcgtatactctggcggcgcttggcaaaatgctcacgctacgttctacggaggatccgatgcttccggcaccatgggtggagcatgtgggtacgggaacctgtacagccaagggtacggagtgaacactgcagcgttgagcacggcactcttcaacagcgggctgagctgcggagcgtgcttcgagatcaaatgcgcaaacgacaagcagtggtgtcactccggcagcccttccatcttcatcaccgccaccaacttctgtccccctaactacgctcttccaaacgacaatggcggctggtgcaaccctcctcgccctcacttcgacctcgccatgcccatgttccttaaaatcgccgaataccgcgccggcatcgtgcctgt

SEQ ID NO: 15125 - DNA, 376 bp, Glycine max
ctcacagacaaacaaagaaaagaagacaatggctgtggccagcaccctgcactgcattttcttcattatctccttaacatgtatggttcaacctctcatcccaggggtttactctgccggtgcatggcaaagtgcccacgccaccttctacggaggctccgatgcttccggcaccatgggtttgaactaactcaccaacaccttcgtcattgtcactagaccaaacttatatctcatttggtgtcacctagaatgtagcatgtacttagtactcacaatgtgcctatttttaaggagattttattttgcaggggagcgtgtgggtatggaaacctgtacagccagggttatggtgtgaacacggcggcattgagca

SEQ ID NO: 15126 - DNA, 1198 bp, Glycine max
cggaatctgctcgactcgagcgctttctttgtttaattctcctctctctctctctttctctcttacacccttccattttctccttctcttcctcccatggtgtaattgctccaactatggccgtggacctcatgacgacgggttgcagccgaaacgacaacatcagtagtttcacaaccaaagccgaggaaaatgccgtccaagaagctgcttccggtttagagagcatcgagaagctcatcagactcctctcccaaacccaagcccaagcccaagcccaccatcaattcaacaacaacaatagctctagtaatgaaatcgccatcgccatggactgcaaagccgtcgctgacgtggcagtctccaagttccagaaggtcatttccctcctcggccgaacccgtaccggccacgccaggttccgacgcgcccctctccccaaccaacaccaacacacccaacctccctccgaaccacccgtgttccacgctaccccgctgcaccagatcccacctccctcccttcaccaaatccccaaaaccgagaaacacctcaacgattcatcgtctaagacgcttcatttctcatacccctccgccgttacttccttcgtctcctccctcaccggcgacgccgccgacaacaaacaaccatccccggcggccacgaccacgacctcccactttcagatcacgagcctctctcacgtgtcgtccgcggggaagcctccgctttcgtcttcctctttcaagagaaagtgcagctctgagaatttaggttctggaaagtgcggtagctcctctagccgctgtcattgttccaaaaagagtaggaaaatgaggttgaagagggtagtgagggtaccggctataagcttgaagatggctgatattccaccagatgattattcttggagaaagtatggacagaaaccaattaaaggatcacctcatccaaggggttactacaagtgcagtagtgtgagagggtgtccagcgcgaaaacatgtggaacgagctttggatgatccagctatgctggtggtaacctacgagggagagcacaatcacactctctctgctgctgatgctactaatctcattctagaatcgtcttgaaagtcgtaaccaaatcatttttttttcgtgacaaggttttaattaagtagtagaagaaacgcataccattattaatcaac

SEQ ID NO: 15127 - DNA, 669 bp, Glycine max
attagtaaagtggatcgaatcccgtaacattttttttctttaaaatcatccatttacctttataggtctctcactggattccaaaatttaaggtggacccaattatttggtttcttttatgcggttccggagtacctattgaatctgaggagtggtcatgggtgttaattttttggttttgggaatgataattgcaggggttactacaagtgcagtagtgtgagagggtgtccagcgcgaaaacatgtggaaagagctttggatgatccagctatgctggtggtaacatacgagggagagcacaatcacactgtctctgctgccgatgctactaatctcattctagaatcgtcttgaaattcgtagccaaaatcatcttttttccgtgacaaggtttagaaacgcaagccatcatttaatcaacgttacaagttttcaacggggtgcaattatggcgtgttgaattgaattgcaactttactactctagtcagtcaggggggcattaaaatctccaaagaaattagtagtgggtgttgttccctttccctgtacactattggattcttttttatctttattttttttttctcgttctcttcaaggctaaatggaacattgtgaatccgttgcatcattaaaaaaaatattgtcaaggatgattgtgatg

SEQ ID NO: 15128 - DNA, 580 bp, Glycine max
tgagagtgtgtgagcattcacatttgacggaaacagggtagcgtgagagtcgagtcacctgccgaaatcctatagcaccattttgaccaaggcgatatagctaacagctattcgcccccccatactttctttaattttctccttctcccatggtgtaattgctccaactatggccgtggacctcatgacgaccggttacacccgaaacgacaacatcagtagtttcacaaccaaagccgaggaaaatgccgtccaagaagccgcttctggtctagagagcgtcgagaagctcatcagactcctctcccaaacccaagcccaagcccaagcccaccatcaattcaacaacaacaatagctctagtaatgaaatcgccatcgccatggactgcaaggtcgtcgctgacgtggcagtctccaagttcaagaaggtcatatccctcctcggccgaacccgtaccggccacgccaggttccgacgcgcccctctccccaaccaaaaccaacaaaccatctgaacacacctcagcgaatctccacttcaagcacaccatcgccccctttgtaaccgtcacaacctc

SEQ ID NO: 15129 - DNA, 351 bp, Glycine max
aacgattcctcctcttctaaaaccattcatttctcatacccctccgccgctacctccttcatctcctccctcaccggcgacggcgccgccgacaacaaacaaccttcctcgtcgccgcccgcggcggggcgacgacgacgccctttcagatcacgagcctctcgcacgtgtcgtccgcggggaagcctccgctttcgacttcctctttcaagagaaagtgcagctctgagaatagaggctctggaaaatgcggtagctcctccagccgctgtcattgttccaaaaagagtaggaaaatgaggttgaagagggtagtgagggtaccggctataagcttgaagatggctgata

SEQ ID NO: 15130 - DNA, 1749 bp, Glycine max
gcgggcgtacgtaagctcggaattcgaggaacatttgtctctcatcaatggctgccacgagaccggtgcagtgtttgttacgaagggtttgcagaggaagtaggactattggggttgccacagaagttaatgcttcttcttcttctcagaaaatcatcgacaaggaatatgaacacagtgctcacaattaccatcctcttccgattgtatttgctcaagcaaagggaacctctgtttgggatccagagggaaacaaatatcttgattttctatcaggttactctgctgttaatcagggacactgccatcctaaaattctgaaagcattgcaagaacaggcagaaaggttgactgtgagctctcgagccttctacaatgatcgctttccagtctttgctgagtatgtgacaaacatgtttggttatgatatggtacttcctatgaataccggtgctgaaggtgtggaaacagcactgaagttagcacgaaagtggggttatgaaaagaaaagaattcccaaagacgaggctattattgtctcatgttgtggctgcttccatggtcgtacactaggtgtcatatctttgagctgtgacaatgaagctacccgtggttttggtcctttattacctggcaatcttaaagttgattttggtgatgcagaagcccttgaacaaatttttaaagaaaaaggagagcacatagctgcatttattttagaacctgtccaaggtgaagctggggtgatatttcctccagatggttatttaaaagctgttagagatctttgctccaaatataatgtcttgatgattgctgatgaaattcaaactgggttagcaagaacggggaagatgctggcttgtgagtgggaagaagttcgcccagatgttctgatactagggaaagcattgggtggaggagttataccagttagtgcagttcttgcagacaaagatgtgatgctttgtatacaacctggacagcatggaagtacctttggtggaaatccaatggccagtgcagttgcaattgcctctctagaagtaataaaaaatgagagactcgttgagagatctgcccaaatgggagaggagcttactggtcagctgcttaagattcagcagcaatacccagactatgtgaaggaggtacggggaagaggattgttcattggagtggagtttaacagcaaaaaattgttcccagtatcaggctatgagctatgcaaaaaattgaagtatagaggagtccttgccaagccaacacatgatgcaattatccgctttactcccccactttgcataagtgtggatgagatccaacaaggttccaaggcactggctgatgttctggaaattgatctaccaaagttgcagaagacaaagccaatagatgctgctccagttgccactagtgcatgcgatcgttgtggtagagtcttgtattaaccataaaaagacacgtatgaattgcatgtgcctttagttttccttggaaaaaaatatatcacatgaagaatgttactccttatacatgaacagctggaaactatgttccaatattccatatatcatcataatataagttcatgatatatgtgataggtagctgtataaataaatatataggagttagaggactcattgtataactttcaatggttaatttgcgagataagatatatgattttattatggctagaacaaagttctctagacttgccattccatctactttattcgcatc

SEQ ID NO: 15131 - DNA, 820 bp, Glycine max
attaattctcctacctgtttttccatgtttaccacatgttcttccacgttaaatccaaattgcagggacatacacaagctccgaacaagtttgcgtttaccttaaaaataaacgcacaacaagtaattcattaaaatatcacgttaggaataggaagtgacatttctagagcaacaactgattatggcttccgaccaagcagcaacaacagtccctttggattgttgggaggacaacgagaaaaaacgtgtagtcttggcggaagcaagtggagacttcatagatgttctctttagtttcctcactcttccattgggaactatcgtccggcttgggatcaattttcaactatcagtagagatgggtagcatcaagaaactgtacgagagtgtgcaaaatttgggatctgatgttttctggaacgacatctgcaagcaaatgttgcttaatccccgcaatccgttagaagcctcatgccagagactaaaagtgaaggtggatgatacaaatcccacaaagtatttcatttgtcacagctgttcaacggaaaagaatttgttgctgagtacctttgatgggggaaggtgctactgtgggaaattgatgcaaaagaaaatggagctgctggaagagtccaaggacgaggcttctgtggtcgacggtattttcgataaaggggatgccatgttcttgatctttgatgacttgacagtgctccgaagcttcccaagtgactctgtacaacggcccctccaacttggacacaaaaacttcagcagcaagctggaagaaaagtatagtgacgttggcacgaaggaga

SEQ ID NO: 15132 - DNA, 502 bp, Glycine max
gtggtaattaggtcaaggaagaaaagagattttaagggtttgaggagtagagaccaggcaagagcaaaatggacttctcaaatggcttcaagccaagaagcaacaatccctttgagatatagggtggacaatgaacaaaagcgtgtagttatggcagaagcaagtggagactttgttgatgttctctttagtttcctgaccccttccattgggaactatcatccggcttgggaatcaatttaaccaaccggtacagattggtagcatcaacaatctgtacgagagtgtgcaaaatttgagtcctgatgttttctggaaatgttgctttctccacgcaacccgttagacgcctcttaccagagactaaaagtgaaggtggatgacacagagcccacaaagtatttcatttgtcacagctgttcaaaaggaagtgatttgttgctgagtagttttgatggggcaaggtgttcctgtagaaaattgatgcaaaagaaaatggagc

SEQ ID NO: 15133 - DNA, 434 bp, Glycine max
  unsure (1)..(434): unsure at all n locations
ggagcaataattgaggttgagatgccagaaatttcactaaaacccgtgtatgttattttacttctttgatattaaaagttctttaatttaagttttcagttatggcttccaaccaagaaataacagcccctttgagatattgggtggacaatgaacgaaagcgtgtagttatggcggaagcaagtggacactttgtagatgttctctttagtttcctaacccttccattgggaactatcatccggcttgggaacacatttgggcaaccaatagagattggttgcattaacaatctattcaagagtgtggaagctctgaacccagatgttttctggaacgacatctgcaagcgaatgttgctttctccgcgcaacccgttagaattctcttaccagagactaaaacttgaagtggatgatacgcaanccacaaag

SEQ ID NO: 15134 - DNA, 1093 bp, Glycine max
ccgacgactgtggctgtgacgttactctctatgggatcagagaggctgctgagttcgccaaggagtgggttccgttctgtaacatttatggggtcaagtcaaggtgtcccaaggtcttcttctctccctttggggaggaggatcaacacactcttcgccacgatggattcagtacacaacgagacctcatcaaggctaaatacgagaagatgcataaaaatatcgagaaatttggctcagaccctaaaaatcgccgtattgtgagtgacagacctcctcgtattgagattataaatgaccaaccgggaatgccacttgttgtttatgtgtctcgcgaaagaaggccatcccttcctcacaaattcaaaggaggagccctcaacgcattgctcagagtctcaggtttaatcagtaatggaccttatgttctagcagtggattgtgatatgtatagcaatgatccaacctctgccaaacaagccatgtgcttctttcttgatcctgaaacgtccaaatatattgcatttgttcaattccctcaaatgtttcacaaccttagcaaaaaagacatctatgataatcaatctagaactgcttttaagactatgtggcaaggcatggatggactaagaggtccaggtctttcaggcagcggcaattacttaagtagaagtgctttactatttggaagtccaaaccaaaaagacgactatctgaaggatgcacaaaagtactttggcaagtctaccgcatacattgaatcactgaaggccatccgtggacagaaaagtagcaaaaagaatatttcaagagataaatgttaagagaagctcaagtagtggcctcttgttcctacgaaaataacacaaattggggcacagaggtgggattctcatatggcatattactagagagttctattactggctgtcttcttcacagcagaggatggaaatcagcatatctttacccgaaaacaccatgtttcttaggttgtgctcccactgacatcaaggaaggcatgcttcagttggttaagtggttgtctgaacttttgttgcttggtgtctcctccaaatacagcccattcact

SEQ ID NO: 15135 - DNA, 437 bp, Glycine max
  unsure (1)..(437): unsure at all n locations
cgacctctcttggcgcttcttctgacccttctcaggaaatccttccagcttcctcgcaaaaacatcggctccattatggacattggctccccaacgaacgtgcgccatgttgcgcatgtcacctttgataggttcaatggtttcttgggcttgcctgttgagtttgaacctgaggtccccagaaggcctcctagtgctagtgcatctgtttttggagtttcaacagaatccatgcagttgtcgtatgactcaagagggaacagtgtgccaacaatactgctgttgatgcaaaggcatctgtatgttcaaggagggttgcaggtggaggggattttcagaattaacgcggacaatggtcaagaggaacatgttaaggatcaattgaatttgngagtggtcccagaaggcattgatgtacattgtttggcatggctaat

SEQ ID NO: 15136 - DNA, 411 bp, Glycine max
cttttatctgtctctctctctttggcgaatgaaccattctcttcctctccgatccgaaacccatcacttctaacacctgcagatctccctctctcaacctcactccacaccttacaccaaagtctcccaaactttccatcgcttattattccctttttactctttctctcttctcacctttctgcaattgcttctctagggtttctccgaggcgacggattttccaattgtatccggcctttcaattggattgaatgactgtatggcggcacctaggctatgacttcaagcatgttgagtggggagtgaaagtttatctttgggagatctcaatcttgcaattgtggtaccacaagttagaacccacttactcatatattaacagcttgaaggttgggactgacctattat

SEQ ID NO: 15137 - DNA, 240 bp, Glycine max
cggcctttcaattggattgactgcctgtatggcggcacctaggctatgacttcaagcctgttgagtggggagtgaagtgtttgcttcgttgaatggcgctagcttccaccaagccaccgccctcccaccgctgttcttggttgtagtccgtacatccgggcttaccagtgtgcttttccttgttctcttctctttccattctgctctggtatggagcatttgagccacaactttcttggc

SEQ ID NO: 15138 - DNA, 711 bp, Glycine max
cccacgcgtccgcccacgcgtccgttggaaacaacatgggaagcttgcatggaaaggacttgtgaagccagctgagattctagcgcgtagagggtttaaagtatcaccataccttcacaagcagatggaagaaacagagtcagatatattggaagacaagggtcttcgtagcatatttgccccatatggaaaactcttaaagataggtggcatttgctacaataagaaactagccaagactctcagaacaatatcagagtctggtccaaaagccttttatgaaggattgattggtcttaatttagttaaagatgtccagaatgctggagggatattgagcatgaaagacctcaaaagttacactgttaaacagaaggaacccatatctaatgatgttcttggtctaaagctccttggcatgcctcccccttcaggtgggcatccaatgatgctactgctgaacattctagatcaatataaactcccttctggcctttctggtgcccttggcttccatcgagaaattgaagctttgaagcatgtatttgccgtgagaatgaatcttggtgaccctgattttgtaaatataactggggttctttctgatatgctttctcatagttttgctaaatgttgaaaaatgacatcaatgataataagacttttggccccagtcattacggcggcaggtggaatccgataaatggatca

SEQ ID NO: 15139 - DNA, 938 bp, Glycine max
ggcggcgatcgagtccatgccgacggtcgagatcggagaaacgcacgtggaaaccgaagcgcactgcgccgtgtgcaaagaagcgtttgagctgcacgcggaggcgcgtgagttaccgtgcaagcacatctaccactccgattgcatcctcccgtggctctcgatgcggaattcgtgcccggtgtgccgccacgagcttccttccgatttggaaactagggttcccagccagatcgacgaggagacgatagggttaacgatttggaggcttcccggcggcggattcgccgtggggagattctccggcggccggagaacaggcgagagtcatttcccggtggtgtacacggagatggacggtggactgaacacgaacggtggtgctcctaggagaatttctcgttctgttagaagcaatagggttagggaaagtcgagggtttggtagagttattagcaatttcttttcattctttggaagaattggttctagaaactcttcttctggacatgggtctgtaagtagaagccgtagtcacgtgagttcaatcttcaatagaagctcgcggagacatagcaggacttgggttatggatgattaattggtgaatggtgatggcaattttgcaaagaatagtaatactttcttttttttcagctttgggttatgagattcatttcatactgtaaatagcatgtaactagcaactatagaagcaagttttttagttttccctctctgggaatctttaatatggtttgattcaacatcaatggaaggaagagtgctattttttagctttgtggatcaaacattgtgcgttggcaccagtaactgtagcagtggaccgggcatgcattgggaaacaagaatgatgctttgttccccgtgaactgaattatttgatttgtttatattatatctttcatgttagtctt

SEQ ID NO: 15140 - DNA, 566 bp, Glycine max
cggaaccattctaccagggccacaagagcaccaacgtgctgaacccggtgtttaagggtcagcaattggtgccactcaacgctgaccaatccgcggaactgaagaaggagaacgccactggggtgtacgagatcgatgtgaagatgtaccttagggtcaggttcaagttgggtgtcttcaagaccaagacgcttaagcccaaagtatcatgcgacttacgtgttcctttgaaaggaagcgccggtgctggtgtctttcagaccaccaagtgcgactgggatcgctgatggattcggattcacccgacccgacccgacccggttctgctttcacgtcatttctcccttttcttatttctttattggttagttttggacatagtcgtcgtacttccttgtccttcaagggttactgttcagagatatgattattttattataccgcatgtatgtatgcatgcatcatctaccttgactactgtattcccttctgtggacgggatttttgctgtattatttatatcacacattcacacttgttatgtgttgatcaataaatctcatttt

SEQ ID NO: 15141 - DNA, 567 bp, Glycine max
ctcgagcctcgaaatcttgctacacatcttcttcatctggaaatccgaaacgaagcaaccaacaaagtcacaaagagagagagagagagagatagatgctcgtcggtgttcgttccgattctccttgaccttctttttcttcttcttcttcgcttcgttatcgttcccaacattccaaaccctaaatttgttgcctcggtcttccattcccaatctccgaactccgacgcggagtggcagcagagaacaaacatgtcgtcttggctgagatctgcggtccacaaagccgtcgaggtcggcaacaaaaacaacctcactcgcaccgtcaagaactacgccgacaccgtcgttcaacacgccggccaagccgtcgccgagggcgccaaaatccttcaggatcgcattagtgctcggaattacagaagtgttgcgcagaccattaaaaggttggaagaagctgctgtctcgtataggggacctgagagagtgcagttgcttagaagatgggtggttgtgcttcaagagattcagaagttgtccgaggcttcattggctgaaggcaaagag

SEQ ID NO: 15142 - DNA, 439 bp, Glycine max
caaaactccactgagaagaaccaaagaaagaaaggagaaagattgttagttttttttatcagcgaggaaatcgaatctgcgaatttttcctttctttcttttcattttatcacccaatcgatcttataactccaacttcaaaagggtttctctttacctctttcagtgcttctccctttgcccccagtttcgctgtctagcatttagttttaggtttttggagcttctcatattctcacatgggtcttctccttcatcatgctttgtgattaatttccttctcaagtttcaatctttcaaagaggaagaagaaaaagaggctcgtgggactggattcgcttgaatttcgtgttgggtatggcgtttgagagataaaaacttcattttttaaagccctgaaggaaagatggacagagttattcaacctcctttggttgat

SEQ ID NO: 15143 - DNA, 549 bp, Glycine max
cggacgcgtgggtccaaatccaaaaaaatcatggagcagttgtactacctcacccttgtgctactgtttgtgtccttcgtctctgtctcttttttcatcattttctacaggcatcgttctccgttcagcgtccccaacttgccgccggggaaggcggggtttccggtgatcggcgagagcctggagtttctgtcggcgggacggaaggggcttccggagaagttcttctccgatcgcatgacagagtactcttccaaagtgttcaagacctccatcttaggggagcctacagtgattttctgtggagccgcatgtaacaagttcttgttttctaacgagaacaaacacgtcatttcgtggtggcctgaaaatgtcaagaagttgttcccaacgaatattcaaacaaactctaaggaagaagccaagaagttgagaaacattctccctcagttcatcagcgccaaagccatccaacgttacgttggtattatggacactgttgcccaaagacactttgctctggagtgggagaagaacaccctagtcacc

SEQ ID NO: 15144 - DNA, 1792 bp, Glycine max
caaagcagataatggtgaactccggcagcgaagacttggcgacccatcagcttcaacaggctataactgaacagcttttcaaagctgcagagctgatcgatgccggtaatctggaactcgcgcatgggatattggcgcggctcaatcaccaactttctcccattgggaagccttttcagagggctgctttttatttcaaagaggccttgcaattacttctccatccaaatgccaacaacagttctttcaccttctcacccactggccttttgctcaagattggtgcttacaagtcattctcagaaatctcaccagttctgcagttcgccaatttcacttgtaaccaagcactgcttgaagctgtggaagggtttgatcgcattcacataatagattttgatattgggcttggtggacagtggtcttctttcatgcaagagttagcactcaggaatggcagtgcacctgaactcaagatcactgcatttgtgtcaccctcccaccatgatgaaattgagctcagtttctctcaggagagtttgaagcaatatgctggggagttacacatgtcctttgagcttgagattctgagccttgaatctttaaattctgcttcctggccccagccacttcgtgactgtgaagctgtagtggttaacatgcctattggctctttctcaaattacccatcatatctacctttggtccttcgctttgtgaagcagctcatgccaaaaattgtggttacattggatagaagttgtgatcgaactgatgcaccatttcctcagcatctgatttttgcacttcagtcttattcagggctgcttgagtcacttgatgcggttaatgttcacccagatgtccctcagatgattgagaagtattatcttcagccatcaatggagaagcttgtcttgggtcgacatggtttgcaggaaagagcacttccttggaaaaaccttctcttgtcatctgggttttcaccattgacctttagtaactttacagaatcccaggcagagtgtttggtgcagaggactcctagtaaggggttccatgttgagaagaggcagtcttcccttgttctttgctggcaaaggaaggatctcatctcagtttcaacttggagatgctaagcagagccattctgcacctttgaacgaccaatttaattctatattcgaaggtgctacataacttaccgcttctattgatctttcttgcttgaatttgccttggctatggttctatgctaattgtctgtttttaggatttattattttcagttaaggaagggaagtgaacatattaattagcaactgaatggcgatttatgagccctgatatgaagtgtattattataaacatgagcattctatttatgcattttgtcctgttttaattgcctaaatttatgggcttttcttgtatgttttacaagaaagtaacactaattaccctgtaaagttgaggctttgtttgatgtctttgatcctgataagtagtctctctctagcacatgtgctctatgaaaactattcatgtagttgttgaaggtaacactttaacagttccccatactattcagtgtggaatggaatgggaattattcagttagtttggtagtttgcagaaattgcattacatatacactttatctgcacacttttcacctagagatatggagccaggttttttaggaatatttattgtggttgctcaatgctgatcagcacttgctgccttgtatgatattttaagcagaaaggaggaaataagtaatctgcac

SEQ ID NO: 15145 - DNA, 260 bp, Glycine max
actgaattctaccttcacttggacagttagtcactctccgattccctcactcgcagtagtcaatacggatgccggcgccgcggcaaacgccggcctgggcgtcgccgccatgtcctacatcgccgtcgactacctccgccacctttctccggtgtggcactcgcgtctgcaaccggcactgtggtccctcctcgccctcgctgccgtggtccgcgtcccctcctaccggcactggtccgcggagttccggtcggcgattc

SEQ ID NO: 15146 - DNA, 677 bp, Glycine max
tatctatctatctttcccgttttctgggtgaaatgaagaactgataggctctatcgatccatcccagattcatccacacagagatcgagggccttgaattgggttagggttttgggaaagatgaaccagaggcaggtggtcgtgaagcgagattacgccacgtcatcaccagcggcggggaatattcgatacggggagtgccagaagaatcatgcggcgaacacgggaggttatgctgtggatggctgcagggaattcatggccagtgccggtgaaggaacatatgcggcgcttacgtgtgcggcttgcggctgccacaggaactttcacacgagggaagtactgcacggcgttaactgaacgaacaagttctcaacttgtcatgactcttgagtgagttcacacaattaccctctttcttctaattctggtccttctttcattcgtacgaaccacccccagtgagaaagaaaaaatagaaagtttgtctatcaaattagatgattgaattgatgaaggtttaagtttcttcccatcatcttgcctttttctttggtgcttgcaattaagtgttgattgccgatacaatagacattgatattcatgattcttgtaaaagaaaatatattgaacttatggactttttttgttcttggaaaattataaaattgttgttc

SEQ ID NO: 15147 - DNA, 378 bp, Glycine max
catcccttccctccaaaccaagtttttctttctctcttacacgtcaattttcctctcttcaaagcactctcacatgttctcatgatgaactcgcacaagcaactcttccccctcctctcacttttcttagttctctacctcttaggacaaagggtagtgctgcaagctgaagctcgccctcgacatcgtccaacaaaattgttcgttttcggagactcgtatgctgacacaggaaacattcagagaactgtctcaaattcatggaaggacccttatggcatcacctttcccggcaagcccggcggtcgtttctccgacggaagagtcctaaccgattacatggctaagtatttgaaagagaaatcaccaatccgctac

SEQ ID NO: 15148 - DNA, 537 bp, Glycine max
ctgcgacgccgcgacccactcaggcacagcgccacaaagatccactctccgccgcgagcccgcaacccactcacaaacacagctcgccgccgcgaccccgtgccactgcttttccgcgaccctgcgccgccgcgaacgctcaccctccatctttcctcaccgtgttattgtgactgaaagtgaacgattgctgctctcttttggtgttgtcattgaaagaatttggtagctgagaagtaaacatttaactggttctatttgaaaatttggctgtcgtcctcattatcaatctgtcacatttgcacgtgcaatatgcttattctgctttgcattctccacatcatcctgaatggcccaactctctgccttgggaataagggtgaggaccaaattttgaaagttggagaagagctttggagagaaactttgccattacaagttctttgcagggtatctttcctctggaaactgacatacactaactaaaaaataccagatacctgctagcttttccatacaactgaagagaaacaagtc

SEQ ID NO: 15149 - DNA, 380 bp, Glycine max
gctaattctcagcgtgtctttatggggtgtctctctgcgagcgaaatggaactctctgaggactacacgcgcgtgatttcacgcgggcctaacccgagaaccactcacatatttgataattgcatcattgagagtagctgctttgaacttgggtgctctgcttcttctgctaaggaaaatgggtgttttcttgatcacaccagctatcactctcggagctttctcagtgtctgctttcactgcaagaaaaatcttggccagggtaaagacatctacatgtacaggggtgagagagcattatgcagcaatgaatgccggtaccaagggatgctgttggaggaagagatgagcaaattggaagccagtgatatttatgggcc

SEQ ID NO: 15150 - DNA, 1794 bp, Glycine max
gggggaagcaagggacccctatgctatgctatatggagttctgaacgttctcacgacacgcctactcattgcactcttcgatcgcaactctctttttcttccaaaagggaaaacgaatctcaaacttcacaagtgtttgaggcgccatggcggatcggttgacgcgtattgccatcgtcagcaacgacaggtgcaagcccaaaaagtgccgccaggagtgcaagaagagttgccccgtcgtcagaaccgggaggttgtgtattgaggttacttcctcgtccaagattgctttcatttcggaggaattgtgtattggatgcggtatttgtgttaagaaatgtccttttgaagctattcagattatcaacttgccgaaggacttggacagggatactactcatagatatggtcctaatacttttaagctgcataggttgccggttccgaggcccgggcaggtgcttgggttggttgggactaatgggattgggaagtccaccgctcttaaagttttggccgggaaactgaagccgaacttgggtcgattcactaatccccctgattggcaggaaattttgacctattttcgaggatctgaactgcagaattattttactcggattctagaggatgatttgaaggctatcatcaagcctcagtatgttgaccatattccaaaagctgtgcaagggaatgtggggcaggtgctagaccagaaagatgagagagagaagaaggaggagctttgtgctgatcttgagcttaatcaagttatagatcgtaatgttggtgatctttcgggtggtgagctccaaaggtttgccattgcggttgttgcgatccagaatgctgagatatacatgtttgatgaaccttctagttatcttgatgtgaaacagaggctgaaagctgcccaagttattcgatcattgcttaggcctaatagctatgtaattgttgttgagcatgatcttagtgtcttggactacttatcggactttatttgctgtctatatggtaaacctggtgcatatggagtggtgacacttcctttctcagtcagagaaggaattaacattttcttggctggctttgttccaacagaaaatcttaggttccgtgatgactcactcaccttcaaggttgctgagactccacaggaaactgctgaggaagctcagacatatgctcgatacaaatacccaaccatgagcaaaactcaaggcaattttagacttcgtgtagctgaaggagaatttactgattctcagattattgtgatgctgggtgagaatgggacaggaaagacgacatttattcgaatgctggctggtttattgaaacctgacaccatagaaggtggatctgaggtggagatgcctgaatttaatgtttcatacaagcctcagaagattagcccgaagttccaatcaactgttaggcacttgctacatcaaaaaatacgtgatgcatatactcatccccagtttgtgtcagatgtgatgaagccacttcttattgaacagttaatggaccaagaagttgtgaatctttctggtggagagttgcagagagttgctctgtgtctctgtcttggaaagcctgcagacatctatctgatagatgagccaagtgcgtatctagattctgaacagcgaattattgctgccaaagtcattaagaggtttattcttcatgcaaagaaaacggcttttgtcgttgagcatgatttcatcatggcaacatatcttgcagacagagttattgtttatgagggccaaccatcaattgact

SEQ ID NO: 15151 - DNA, 450 bp, Glycine max
gatgcttacttattttcttttgctttgatacatctctattggtctctctctcattcccttaatattgaaccaatgaagcaacaaattggtttgcttttctttgttctccttctttcctctttcttagcttctgcccgtctccttgaaccactgaaaggtccaagacaaggtgagaaggaagtggagatcaatgaaaacgcttttcctcaatcatctcatgagctaaaagatgatatggaagaactcatgggatcagaggagtgctatatgaaggatgaagaatgcattagcagaaggatgatggtggaggctcacttggattacatctacacccaacaccataaaccttgaattaattgaacttacaccttgattcacacttcagaggcagagtattaagtatgaatccctatatataaaaccaataaatacatgttctggttttccggg

SEQ ID NO: 15152 - DNA, 369 bp, Glycine max
aaaacagaatgggagggatgctcaataattcagttgagtttgaagaacaacaattgggcgcccactgagtcccttaatgactgaattacatgtagcaaggtaattggtttgcttatcgttgttctccttctttcctctttcttatcatctgctcgtctccttgaaccactgaaaggtccaagacaaggtgagaaggaagtggagatcaatgaaaacgcttttcctcaatcatctcatgagctaaaagatgatatggaagaactcatgggattacaggagtgctatatgaaggatgaagaatgcattagcagaaggatgatcgtggaagctcacttggattacatctacacccaacatcataaaccttga

SEQ ID NO: 15153 - DNA, 445 bp, Glycine max
atctaattacaccccacgtgtggttgaatccttgaagggaaagactttgaccagagtttctcgctgcaaaatatcacacaattgtattaggatctgacggcgaggtatttacctggggtcatcgacttgttactccaaaacgtgttgtagttagtaggaacttaaagagaagtggaagcactccgttaaaatttcaccgcaaggaacggcttagtgtggtttctatagctgctggaatggtacacagcatggctcttacagatgatggcgcattattttattgggtctcctctgatcctgatcttagatgccaacagttgtatgctatgtgcggaaggaatatgacgatttgaagaaatattgtgaggagattgtcatgctcaaccttgattctatatttgcagtatcatcacatactgtagctagtgcctcactagatattctg

SEQ ID NO: 15154 - DNA, 361 bp, Glycine max
ctttacctttcccggacctcacagtcgtcaattcagttcagccgcacgacctcctcccaagtcccaaccctccctctccctcacgccttgctctctcagccaccgggaggtcagccgtcaaggaagaaagccatcgcgagcacatccagcagacgaccacgaagccactgcagtcagtcacttggtcgggacgctaccgcttgtcacccatttacgagctcacaccgtcgcgattccaccgccgacagccactgtgacccccaaatgagtatcactagacagcgcccccttggtggtgggggtcatcatgtattggactacctggagcgcatgcaagcagaaaatcctgctttcttctatg

SEQ ID NO: 15155 - DNA, 505 bp, Glycine max
cctaatcttatttcttttcttgcgccgaaacatcctctcaagtctgaaaacctttaagatattatgtcgcgctcttgccgtcgctgctctcgctgttgatcctcccgttttgaactcaccgatccaagttcactttcatctacaactactctgatacaccgtgaagccaacggcggccaagacttgtacggcattagtccttgtggcgtttcagctttaggagttatcaattatgggtgagtttacaattcagattagcaacgaccttgttaatcaacttgttgatgatgcggtcccgaagaaaaaaaccagaaagactagacggaaggtggcaagagagactgaaaagccccaatctaatgaaactataaagcctgatagtgcagttactccagggtggcctgtgcagtcccctttatttctacctgcaacattgcctgtacaaccggtccattcaaagttagaaggtattcaatctgtgctttaagaaagtgagagggttttg

SEQ ID NO: 15156 - DNA, 487 bp, Glycine max
tggaatcgacatgactatcctcattgagcaatctgatcactttggtaatattttgtgtttttgtttgtaatctttaactttttttagcaaaatatataattaatattattattattattattattctttgagaattatagagaagattctaatattggcaatagaggttggcgggttttcctgaatttacaagggacatgtctttctttaatctaaactttttttcaaaaaaagaaaagtgcaatatttgtaattatccgtctaatgaccggaagaaaataagagatttcattcctataacttatagtttaagaataaatggctttatctgtttatttttccatgaattttgtaccattgtgttgtgatagtaattggtgcaaaatctgtcttttttcgggctgaaacacactttttttgatttggaagtgcaaaaaggttcttccaattgtgtggcttttcaagtacctagtttttaaaattgcag

SEQ ID NO: 15157 - DNA, 1217 bp, Glycine max
  unsure (1)..(1217): unsure at all n locations
cccacgcgtccgctttattattctctctcttctccatggccatggtaagtagtgtccaattctgagtgagccaaaaccaaaactcacctttcgcatccctcagctctccatcccattcggaaccaaatttcagttccacccaaaaccctaatttcctttctctccaactcttagatcttcacgttttagggctttctccaccttccgcaatgcacaaattgggaagaggtcatcgtgacaaactccagcagttcataacaataactggagccagcgagaaactagccctgcaggctctgaaggctagtgattggcatcttgaaggagcatttgatttcttttacagccaaccccagcttaaaacatttactgattctaggcacttggaggagctatacaatagatataaagatgcatatgttgatatgattttggcagatggtatcactctcctttgcaatgatatccaggtggatcctcaagatatagtaatgttagttctttcatggcacatgaaggctggaaccatgtgtgaattttccaagaaggagtttattgaaggtttacagtctttggggattgattctctggataagttccgtgaaaagataccatatatgcgctctgagctgaaagatgaacagaaattccgtgagatatataattttgcttttggctgggcaaaagagaagggtcaaaaatctcttgcattggatactgctattggtatgtggcaattattatttgctgagaagcagtggccgctggttgatcattggtgccagttcttgcaggctcggcataacaaagcaatatctagggacacatggtctcagcttttggagtttgcaaagactgttggctcaaatttatctgattatgatgccgaaggtgcttggccatatcttattgatgaatttgtggagtatctcaacgagaatggcatcatccaaaatgatctgatcaatgattctagtctaaaacgatgatgcattcagatctcaataaattgctctttaagagaatttgatggagcctcttgtgatgagttgtgctattctgtgattgaactcctctttgttattaagtgggattcagtctaaattagattctagagcaaactcattcttgttgacaagtagttgcatcaattgtgagattgttgatatggcatatganattnncttggtattgtngaattagtaatgggagcctac

SEQ ID NO: 15158 - DNA, 750 bp, Glycine max
tacatactccaatcgattagcctcctttccatttttcttctcctctctctgtggtatataatcacctttgctagtcacagacaaagtaaatattttttgggtaggtcaccaggctctaacataaaacagaagcctctgtgaaaaaaaaaagagaatgctccctccaggacagcagtcacgggttggaggactacaaacctctctatctctagtttcttcggatccccgcctttctcccgaggagcctagaacaaactctgacaatctccgtgaatctcctactgaaagtgccagttctcgagaaacctggcctactgctgatgcaattgctgcaaagaagatggagaatagaaaaacagagatggattgccctgatcagtcagttattcgccgtgtttctagtgcagacaaaattagtcttcaggacattgcaagagaacgagttgatataatatgtgagaaaatgcatcatctacctgacgaatttcttgaagaactgaaaaatggacttcgagttatccttgagggagggaatggctcacagcatagagaggaatttttcattttgcaaaagcttgttcagagtagatctgatttaacagccaagacattgataagagcacatcgtgtacagctagaaatccttgttgcaataaattctggaattcagggatttttacatcctagcatcagtctatcacagacatcgctgattgacatatttgtgtacaagagatgcagaaacatagc

SEQ ID NO: 15159 - DNA, 442 bp, Glycine max
aagatacatactccaatccattagccttctttccagttttcttcccctctctctggtcaccaggctctaacataaaacagaagcctttgtgaaaaaaaagagaagagaatgctccctccacaacagcagtcacgggttggaggactacaaacctctctatctctagtttcttcagatccccgcctttctcccgaggagcctagatcaaactctgacaatctccgtgaatctcctactgaaagtgccagttctcgagaaacttggcctactgctgatgcaattgctgcaaagaagatggaaaatggaaaagcagaaatggattgccctgatcagtcagttattcgctgtgtttctagtgcagacaaaattagtcttcaggacattgcaagagaacgagttgatataatatgtgagaaaatgcatcatctacctgacgaatttc

SEQ ID NO: 15160 - DNA, 477 bp, Glycine max
ctttccttcaccgtaccaatatttgaaccacatccaccacaatattacattcatgctatttctgattcttggcttcatgccgaggcattctacactattacttttcacaatttaccattgccagaggctcgtactgctcacacagaactccttgatttaaaaccgcttcccatgtcttcccttggcaacagtacttatgaagcattatataaattttcacattttaatcctatacaaacacagacttttcatgtcctgtatcacacggacaataatgttctgttaggagctccaactggaagtggaaaaactatatctgctgagcttgccatgcttcgtctttttaatactcagcctgatatgaaggttatttatatagctcctttgaaagctattgtcagggaaaggaatgagtgattggcaaaagcgtcttggctctcaactagggaaaaaggatggtgaaatgactggagacta

SEQ ID NO: 15161 - DNA, 815 bp, Glycine max
cttccattgggccttttttcaaactcgttctctgtcatgcaataatcttctatcaagttcttctctataaataccataccccatcacggtgctcattcaatccaacttgaaaactcctcttcaacaacccttgttttgttctgtgcaagtgatcttgaaagggaacaacaatggtgaagtctataaactttctcctgcttctgtctctactagcctttgttccctcctgtcactgcaaaaagaaaataggaggttacctctaccctcaattttacgacggttcatgccccagagctcaagagattgtccaatccatcgttgccaaggctgtggcaaaagaaccccgcatggctgcttcgttgctcagactacatttccatgattgttttgtcaagggctgtgatgcatcggtgctgctagatagcagtggaactattatcagtgagaagaggtcaaatcccaaccgtgattcagcccgaggatttgaagtcattgatgaaattaaatctgcactagagaaggaatgcccacatacagtgtcatgtgctgacattttggctctagctgctagagattcaactgttcttacggggggaccaagctggggagtacctttgggcagaagggactctcttggtgcgagtattagtggctcaaataacaacattcctgctcccaacaacacattccagaccattttaactaagttcaagcttaaggggcttgacattgttgatctagttgctctatctgggagccacactataggaaattcccgatgcaccagtttcaggcaaagactatacaaccaaaca

SEQ ID NO: 15162 - DNA, 428 bp, Glycine max
cttacgcttgggcggacgcgtgggtttttgtagaacttatatggttcaaatgcatgactcgaggtttaatgtttcagggctgtgatgcatcggtgttgctagatagcagtggaactattatcagtgagaagaggtcaaatccgaaccgtgattcagctcgaggatttgaagtcattgatgaaattaaatctgcactagagaaggaatgtccacatacagtgtcatgtgctgacattttggctctagctgctagagattccactgttcttgtaaatatcttctttttattttgcactctggtacccttatcttgatatttgactatcaaaacttagtgatcaagccttatttataatctctgcagaccggtggaccaagctggggagtacccttgggcagaagggactctcttggtgcgagtattagtg

SEQ ID NO: 15163 - DNA, 790 bp, Glycine max
cgacgcaaatgattaaccatggcttcttctacatcacatccatccttttggtccctcctgaacctgtctgcatccattcccatttcttcttccgtatgcatgttcccaccgtctaaaaaacctagcaaagcaacaaaacggcgtcatgcttgggaagtagcatgcaatggtaaccctagaaataggagggacattctgatcggccttggaggactctatggtgctacaacaagtctcacaagtaacaacactggttctgcatttggtgcttcattgtcgcctccagatccaactaactgcgttcaaccggacccagaaaaagaccctttttgcccaccaccccccttcaaagactacgagctccctccacacgatgacaagacattaccccttcgaattagaccagctgctcatttggtcactgatgattacatagccaagtacgaggaagccgtgaggcgcatgcaagaccttccacctgatgatcctcgcagtttcatgcaacaggccaatgtccaccgtgcctactgcgatggtcgcggctataatcaaaagggcttcgctgactacaagcttgacgttcacggctcctggatattctttccttggcaccgctggtatctctatttctatgagaaaatcttggggaagatgatcgatgaccccactttcgctcttccgttttggaactgggacaatcccgccggcatgagaatccctcccattttcacagacaaaagttcacctctctacgacgaacacaggaatagccgatcatgtaaatgctttc

SEQ ID NO: 15164 - DNA, 736 bp, Glycine max
ttgactcgtgggcggacgcgtgggctcaggttcctcctatatatatatatatatacatacataatatccttctccctcaaaccaaaccatacctattctcaagtttctctctgtttcttcctacttcatgctatagcacttacaatactcaacaataacctaaccaaaccaaaccaaaccaaaacccttatctgcactcacttcacacaaaccaaagttaattaattaccaacacaaaatggatggaggctgtgtcacagacgaaaccaccacatccagcgactctctttccgttccgccgcccagccgcgtcggcagcgttgcaagcgccgtcgtcgaccccgacggttgttgcgtttccggcgaggccgaatcccggaaactcccttcgtcgaaatacaaaggcgtggtgccgcaaccgaacggtcgctggggagctcagatttacgagaagcaccagcgcgtgtggctcggcactttcaacgaggaagacgaagccgccagagcctacgacatcgccgcgctgcgcttccgcggccccgacgccgtcaccaacttcaagcctcccgccgcctccgacgacgccgagtcccagttcctcaactcgcattccaagttcgagatcgtcgacatgccccgcaagcacacctacgacgacgacctccagcagagcacgcgcggtggtaggcgccgcctcgacgctgacaccgcgtcgagcggtgtgttcgacgcgaaa

SEQ ID NO: 15165 - DNA, 383 bp, Glycine max
tcgaaatcataacacactctttcttctctctctcaatttttagattctttcactttctcttcgatggattcaaagcaattcgatcgcgcgagtcgcaaggttcgggtcgtcgccaggattcgcgggttttcggtgggtcccgaggctaattccgaaccttccgcttcgagagcggtggagtgggtttcggtgaaccgcgaaaatttggatgatgtcaccatttccttcggagatcaatcttccagtcggtatttggtggactattgctataaggaagatgaagataatgaattgatatattcaagggaggtgaagcctcttgtgtctgcagcttttgatggtcataacagcactgttattgcacatggtgctaggggtagtgg

SEQ ID NO: 15166 - DNA, 517 bp, Glycine max
ctctctcttcaaattttgttcgttcaggtcaaagaaagtgtcactgttgttaccatggccgaggaagttccaaagacaagcacaactccagaggaggtggtggtctctgacgtggcacctgctgacgagaaaccagacaccaccaccgacgttgttgttcccgtagagaaagacgcacaacaagaacaagaaacctcgccagagaaggagaaagagaacgttcccgaaacagctgaaaccgagtccgaggttgtttcaaaaccaagcggtgacgacaacgttcctgaatccggttctttcaaggaggaaagcaccattgtttccgacctacctgaaaccgagaaaaaggctctgcaagaactcaaacaactcattcaagaagcgctcaacaaccacgagttatccgaggtacctacaactaaccctcccaaagatgaaaaacccgaacacaaggaagaacagaaacccgtggaggaagaaaagaaggaacatgctgctgacgtggcagaagagacag

SEQ ID NO: 15167 - DNA, 367 bp, Glycine max
ctcttggatcctatagtttcatgtgttcctaggcccctagaaattaaaagtccatgcctagattgccatggaagatgcaagagggagtagtctcctactaccaaagaacatggaggagcacaacccaacacatgatcatggaacaacagaactgaggaacttcagatcatacctgagatgggtttacgtggatcactccaacgtgtgcaaagcgggtctctcatggtccgggttcttcactttagcctttgttgtaccaacactctcacactttctacttgaatggcccacctgcgaccgggatcataagcgaccataccacatacccgtgcagatttctctctccgtctttgccggtctctctttc

SEQ ID NO: 15168 - DNA, 837 bp, Glycine max
aaaaatatgactcttctcattgttgatctgattatatgttaatttggcattcccagtctcagatagcaaaaggaacctatcttttgtttttactggcttctacatagtaaatatggtgatgaagtctgtttgtttatttattttttctcaagggagggtatcaatatttgcatcttcgttgatattgtggttctgcttaaacagaaactgtcaccttcatgatattactttttttggtggttatctgggcatatagtatgcttgcatcttttaggtcatttttttttttcatttactcacttctgcttccttgacatatggtaggcctgctgttttatcttgtgctgacatatttaagattgttttgccattacaggtttttggagatgatgaatggtcatttgggttctgtgagcaaggtaccggggtttttagttgcccttctggaaagaatccaatgtatacatatcgtgaatccattgttttagggaaaacaaactgttccattttcaaggtaaatcaaatactaagagaactcagtagagagtggccagggagttcatatgatctgctgtccaaaaactgcaatcacttctgtgatgaattctgtgaaaggcttggtgtaccaaaacttccaggctgggtgaataggtttgccaatgctggtgatactgccatggaagtggctggaaatacagcattacggttccggcaagctaaaactgagattgtatcagcaagcaaagtagcataccggttcctcttaggagttaccaataatgttactaataatgttaaaaatggtcctgagacccctaacaattcaaacagaggagg

SEQ ID NO: 15169 - DNA, 584 bp, Glycine max
gacgcacatgacacaacactctctctctccttgttatgttccctcctcctagaatataaattcacgagagaaacacgaaaatctttcgattccggcgagaaaaaaacttggacggtgaaattggaaggttttccgggatcccaaggccgaatcttggttcaatttacgaaaagagaagagagaggaacaacaacacccgttgttgaatcttcaagctgaatcaaatcatatagagagagaaagagagagacccggataggaaaatagcgtttagagagagaaaggtgaagtgaggttgtttaaagtttgggtcttggtgggtgaaagggaaagatgacggatgtggtactgcatatatacgatgtgacgaatagtggatccgagaaaaccaacaacaccattgttcagatcaacaagatcttcaaggatgggattggtcttggtggcattttccacagcgccgtgcaggtttttggagatgatgaatggtcatttgggttctgtgagcaaggtactggggtttttagttgcccttctggaaagaatcaatggatacatatcgtgaatccattgttttaaggaaa

SEQ ID NO: 15170 - DNA, 355 bp, Glycine max
atctctctatgttatgttccctccttctagaatataaattcacgagagaaacacgaaaatctttcgattccggacagaaaaaaacttgggacggtgaaattggagggttttccgggatcccaaggccgaatcttgattcaatttacgaaaagagaacaccatccgttgctgaatcttgaagccgaatcaaatcgtagagagagagagagacacccagataggcgaatagcgtttagagagagaaaggtgaagtggggttgtctaaagtttgggtcttgtgtttgttgtgtgtggtgggtgaaagggaaagatgacggatgtggtactgcatatatacgatgtgacgaatagtgga

SEQ ID NO: 15171 - DNA, 944 bp, Glycine max
cgagaagacgacagacgggggttggttctgtgtccaaaactacaaacctttgtcaatttctttcttgttcgactctgcttctttctccaacttcacacacacacacacacacaaaaaaaaaaacatggcaaaggatagaacaattggtgtggctctggatttctccaaaagcagcaagaatgctctgaaatgggcacttgagaacttagccgataaaggtgacaccatttatgtcattcacattaactccaactctctagacgagtcccgcaacaagctatgggcagaatctggttctcctcttattcctttggtagagttcagagagcctgagattatgaaaaagtatgatgttcaaattgatattgaggttcttgatttgcttgacactgcttcaagacaaaaagagatccacattgttacaaaaatatactggggggatgcaagagagaaacttttggatgctattgaagatttgaagctggattcgctggttatgggaagcaggggcctcagcacaatccaaaggattatattgggaagtgtaagcaactttgtgatgacccatgcctcttgccctgtgactatcgtcaaggaaactagcaaggaaactagcagcagcaagtaaagatgatcaatttgggagagaacatttaaatttcacatattattttttttcttgcattgtacctgatctagttgggccatattccctttcctaagtattattttggtgtctaagataaatttatgatttactgtactttatagttttcactcctttttattgaggcaataatttaatttgagtgccatatataaggccgtcaggcctccaaaattttattgtagctcaatgaatttctgtgatttatgttatgttggcaattaacatctcaaattagtcgtaaaatcccaagtaatttctaaaaaaaaaaaagaaa

SEQ ID NO: 15172 - DNA, 487 bp, Glycine max
gggcacgaggtcattgcatatacatacacgcgtcatcaatgcccatgctttgcgtccccttgtccaaaaccaaaactttttgtcaattcatttcttgttgttagactctgcttctttctccaacttcacacacaaaaaaacatggcaaaggatagaacaattggtgtggctctagatttctccaaaagcagcaagaatgctctgaaatgggcatttgagaacttagccgataaaggtgacaccatttatgtcattcacatcaacccaaactctctagacgagtcccgcaacaagctatgggcaaaatctggttctcctcttattcctttggtagagttcagagagcctgagattatgaaaaagtatgatgttgaaattgatattgaggttcttgatatgcttgacactgcttcaagacaaaaagagatccccattgttacaaaaatatattggggggatgcaagagagaagcttttggatgctattg

SEQ ID NO: 15173 - DNA, 269 bp, Glycine max
atcactttgggagagaacatttaaatttcatatgatatttttgcttggattgtacctgaactagttgggtcaattcccttacagttcgctcctttcctaagtattagtttggtgtctaagacgagaatttgaattatatataagatttactgtactttataactttcactgcttgactttattgatggaataatttaatttgagtgccatataaggtcatcagtcctccaaattttcttgtaataattgaatttcgtgatttatattaa

SEQ ID NO: 15174 - DNA, 724 bp, Glycine max
acgtcgtccaagagcttttcagggacctcccaacgcagctctcgatcaagcccgatttggtgacctacaacaccatcatcaaggcgttttgcgaaaagggttcgtttgattccgcattatcagtgtttcaagagattgaggagaagggtttgagccctgattccatcacgttcaacactttgcttgatgggttgtattcaaagggtcgttttgaggagggtgagaaagtgtgggagcaaatgggtgtgaagaatgttgctcctggtgtgaggagttactgctccaagttggtggggttggctgaggtgaagaaagcaggtgaagctgttgagctatttagggaaatggagaaggtgggtgtgaagcctgacctcttctgcatcaatgccgtgatcaaaggttttgtgaatgagggtaatttggatgacgctaagaagtggattggagagattgcaaagtctgagtatgaccctgataagaacacctactctatcattgctcccttcctctgtgagaagggtgatttcaagactgccattgagatgtgcaaggagattttcaacaaccggtgccgtgttgatgcgacgttgctgcagggcgtcgtggataagctggcgagcgagggcatgattacagaggctaaggagattgtggagatagggaaaaccaataggtactgtcgctataggttagatattagcccttagactgtacccctgcatca

SEQ ID NO: 15175 - DNA, 596 bp, Glycine max
ggctcgaggagaaacccaatgtggatctctcagcaagaaaactcttcaagttggttcttcctcccagttgttaccttcatcatcctctttcttttacgtactttcctcaatcttttatccaaccggaacaatgattccaaaaaaccctcaccaccatctcctccaaagcttccaataataggaaacctccatcaacttggtacccacattcaccgcagtctccaatccttagctcaaacctatggttctttaatgctacttcacttaggaaaagtgccagtccttgttgtctccacagctgaggcagctcgtgaagttttgaaaacacatgaccccgttttctccaacaaaccacatcgtaagatgtttgatatcctcttgtatggttccaaagatgtggcatctgctccatatggcaactactggaggcagacaaggagtatccttgttttgcatcttctcagtgccaaaaaggttcaatccttcgaggcagtgagagaagaggaaatctccataatgatggaaaatattaggaagtgttgtgcatcattgatgcctgtggatttaactggcttattttgtatagtggccaatga

SEQ ID NO: 15176 - DNA, 681 bp, Glycine max
attcgatccctgaatcccttcaaaacctcttccccttctcatcttatcctcctcctaaaaattggtcaaaatctatcctatctctttgcatattctttcttatcatcatcttcttctctcttgcctccagaattgaaaagttcttcctctgcccatagtctttgacacccttttccaatctctagtttttttattttcttccctctataattatctccttcacaaaccttctatccctcataacatcaattaccacaaacccaagccttgtacctctcaaagtttgattcttttctcttgcccaaagcgatttggattgctataatttttgttcgtactacatgttatgcagtcatgaatgattgagagacaacacaaatgtcttccccagtgatcagcgagatcctcctctctggcttcaccataaactcttccctaagacgcaggacacacttggtgcaatctttctcagttgttttcctccactggttctacgttttctcatgaactaaattaactgacctcgtacataggagtataaacatagtactcgtgttcttttttcaatactacatcacattcaaatcattaaatctagctagcaaattagagttattatttattatcattgcacaaattaaatagcatactagtacatggcttctcctggtggaagtggga

SEQ ID NO: 15177 - DNA, 623 bp, Glycine max
  unsure (1)..(623): unsure at all n locations
catctatcctcctcctaaaaattggtcacaatctatccaatctctttgcatattccttcttatcatcatcttcttcttcttctctgttgcctctagaattgaaaagttcttcttcctgcccatagtctttgacacccttttccaacctctagatttcgttcttccctctataattatctccttcacagaaaccttcttatcccacatatcatcaattaccttgttcctctcaaagtttgattctttttctcttgaattggattgttataatttttgttcatacttacatgttatgcagttatgaatgattgagagacaacacaaatgtcttctccagtgatctccgagatcctcctctctggcttcaccataaactcttccctaagacgcaggacacacttggtgcaatctttctctgttgttttcctccactggttctacgttttctcatgaactaaataaattaacctcgtacatagtataaacatagtacgtaccagtgttcttttttcaaattcaatcattaaacctagctagcagattagggttattattgttcaaatagcagactactgcatggcttctcctgntggaagtggaacctattcatctggttccagttc

SEQ ID NO: 15178 - DNA, 651 bp, Glycine max
  unsure (1)..(651): unsure at all n locations
ttnnnnnncatnattacgccaagctcgaaattaaccctcactaaagggaacaaaagctggagctccaccgcggtggcggccgctctagaactagtggatcccccgggctgcaggaattcggcacgagctcaaacatggcctccaaatccttcaccctcattctcctcatcctcaccacattcctcatggcccaaacccaagcccaagctcccgcaccggccccctcaggcgcggtgaacctcaccgcgatcctcgaaaagggtggccagtacaccaccctaatcaaactcctaaaggacacacaacaactcactcagatcgagtcccagctcaaatcaaactcacaaggcttcactctcttcgcacccactgacaatgccttccagagcctcaaacccggtgccctaaacaagctcagcgacgaccagaaggtgaagctcattctcttccacgtcactcccaaatactacaccatctccgatctggttaaccgtgagcaaccccgtgaggacgcaggccacggagaaagaagggaccggggggctgaacttcaccggcaagggggaacaggtgacatcttcacgggngtggggagangagtcaaaacgngtgnggngagttctctggggggtccaggtgnnaagtgttttn

SEQ ID NO: 15179 - DNA, 342 bp, Glycine max
cacaataatctaaaactagtactatatcgaataattctctaattaacatggcttccacatgtacaccctccacactcattctcctcaccctcaccacattcctcattgcccaagcccaagcccaagccccggcaccgtccccgtcgggcgcggtgaacctcaccgcgatcctggaaaagggtgggcaatacaccaccctaatgaaactcctgaaggacacacagcagctcactcaaatcgagtcccagctcaaatcaaactcacaaggcttcacgctcttcgcgccgaccgacaacgccttccagagcctggaaaccggttgcctaaacaagctcagcgacg

SEQ ID NO: 15180 - DNA, 544 bp, Glycine max
tggacaattggtcagacttagaattatcagctctgcaagttctgatttgcgcaccacaacacaagtctccgtttggttggcatcaatcacatccggcatgggtgcaggtcaagctatgaaaagaatccctcgcatcaagttccctcagagacatcccaaaccttcttctggttctacacctgagactcaagcttcgtcttcaacaactgatgtcagtctagcgttcttttcaagttcaaatgcctcaacctcagttggagggaaggcctctcttcaacccaaaagaactccagtgtccaaagaggagattgaggcaattttgttgggtggctgcttctaatcgagcgtgttcaagggcagactatattgtgcactcattttttgtggctttaattcatcattttccaaagtttatggttcttttttggtgccaagtgttggcataaacaatacaccgagtacaattgtcaataattgatatactcgttgaattttccacttatggaaatcgaatattgactctggacaaaaagagtttcaagtt

SEQ ID NO: 15181 - DNA, 746 bp, Glycine max
gccacgcgtgcggcgacaacaacaaagattctttctagtttcttcctttcctttcctttttcgtcgccaacacggtaaacaaaaccccccaaatttcctcaattagggtttcaatccacattccaattccccaaccctcttcttcccaatccttcaaatcccgaacctttccccaactgggtcctcaagtccgccacggcgagccctcgtagctcgcgatctccgaaaccaacgatgccgaaatcctcacgattcctcgccgtcgtcgcgatcgccgtcgccgcgctctgcgtgatcctccccgtcgcggcggcggtggatctcgaggaccccggcgtgctgcagctgccgtcggagagcttgtgcggcaaaacgatgccgttatcgtgcccggcgaaatgcttccgagccgaccccgtttgcggcgcggacggcgtgacgtactggtgcggctgcgcggaagcggcgtgcgccggcgtcgaggttgcgaaattcgggttctgtgaagtggggaacggtggatcggcgccgattcctgggcaagctctgcttttggtgcacattgtttggctcattgtgttggggttctccgtgttgttcggtcttttttagttaaaattggggttatgtggttttagttctttgcaattctttgaggggttcttttgtaaatcaatcacacggccattcttgtattgtatgtatgattattgttactattgtaatttcacaactttcttgattcc

SEQ ID NO: 15182 - DNA, 375 bp, Glycine max
gaaacctggcgcgtcatgcttcttcgaatgcaaccgcaaccaaagccacttattactctaccatctccactcaaaccctaacctacgaaccctgaacccaccacgacaaatttcccactctcactttcattccggcacgaacaaaaccctaacccgatggagaaccgaaccacccaggttcggtgcccggagaaccaggagctggccacctacgtgtggaacaagtggaaggaaatggcgcagcaacccaaaggcatttctgacaacatcgacatgagccctttccaaggcccacttttaatctctgtaactccaaaacccccattcgaaccatcaaagatttctctcaagtcaagggtgtggggaaaatgattt

SEQ ID NO: 15183 - DNA, 413 bp, Glycine max
cggacgcgtgggcggacgcgtgggtctcttacataccccaaatatgggttctaaagcccgttggcgccagagttgggctccacagcctttgacacccttaatggaaggccctggccctgaaatgcaagaggaaggaaccaagaaagagagctcttgggaagtcataagggaatggttcaggactcagaagatctccccaggtggaagcttttcacaatcatcatcattctatggaaccattcatgccaagacacaagatttgaggttgttgcttggtgtcttgggttgccccttggctcctattccctcagcacatgatcccactcttagtattcacatcaaagacaccccatttgtaagctctctatacactgcagaatgtgccctttagaccaaacttaaattaaagtttt

SEQ ID NO: 15184 - DNA, 621 bp, Glycine max
atcctcagcacccaagttttgcaactcataattctgagccatatgggccagttccaaagtacagaggaaaatgtgaagctgatccagaaactttaagaagttattgtaatgggaagattgttggagcacaacactttgctcatgctgcaatagctgctgggtcatttaacccttcaattgactttgcttctcctcttgatggagatggacatggaagtcatacagcctctattgcggccggaaataatggaattcctgtgaggatgaatggccatgaattcgggagagcgagtgggatggctcctcgtgctaggattgctgtctacaaggcaatttatagactgtttggagggtttgttgcagatgtagttgctgcaattgatcaggctgtatatgatggagtggatatactcaacctttcagttggacccgacagtcctccagcagccaccaaaactacatttttgaacccttttgatgccacacttcttggagccgtgaaagctggtgtatttgttgcacaggctgctggaaatcatggtcctcgtcctaagtcattggtttcatatagtccatggatagcatctgtagcagctgcaattgatgatcgtagatataaaa

SEQ ID NO: 15185 - DNA, 810 bp, Glycine max
gcaaattggagcaaattgttcatcaatttcttttgaagtgcttgcacatcattttggactcaagggtacctttgttactcccgcatgatagaagcggtggtgacttgtcgatgggtcctcgcgtgaagaggagcgacaagtggtttaacttggctttaggtgataggccttctgctctggataacttgcacttctggcacaggaatttgatggatccaatgataattgacattatacttgttcatgaagaggctggctcttctgttgagacggttatagagaggtgggttgttcagtatgattgtccccgtgtggtggctcctcaaaccagtgacattactagctcttacaagaagacataccagaagtcaatagtgcttttccgtgctctttattctcaaatgaggcttctcccggcttataagatatttaagcagttaagcacatctagtcatatttgtaattttgatattatttacaaggtctcttcctttagtgatccattctctcgagcagaaaggggagtgatagaagaatataatttcactcctgttgaggcccttccaggccgcctttgtatatctgtgaactactgcactgtgctatctgatttcaacctagagtgttcagcttcattgccaacaaaaataattactgattatgttggaagccctaatactgaccctttgaggtctttcccagtcttggataacggtgttagtgccacttcctttccactaaaaaggaaagcacctccgtcttctattccacttgatcgccctcattgctggacatgtggcttgcataaaa

SEQ ID NO: 15186 - DNA, 910 bp, Glycine max
tttcttcgcccaacacagcaaaaccctaatttccaactccgatttcgtttctcctccgaaaacaccctaatttccccttcgctcttccccatgaccaccgcgtagtttgcttcccccactccgaaaatgtcgctccagggaagcgaccgccgcgatgcaccatcttcgggcagcgccggcggaaacggcgccgtggcggcggcagcggcgagcctgaggctgcggctgaaccctaacaaggagcacaagcccgacgggtacgaggacatgcaattggatttcagccctaacattttcagctcgctggagaggtacctgcctccgagcatgctcaacgtgctgcgtgacgagaaggccaatttcatgcgcgagacttctcctcaagtatctgcccctcggggaacgcaacagagctcaaaagcatagagaatatagagagaggataatagcaaattatcagcctctacatcgggagttgtactctgtggatcctgctacattctttgtccccacatttctgagagcaattaatgataatacggaacaaagtattagaagtatagtgtctgagccctctccaggcatttttatatttgacatatttcagacccacttttgtgagttattgctatctgagattgaaaattttgagaagtgggtgaatgaaactaaatttcggatcatgcgtccgaatacaatgaataaatttggtgctgtacttgatgactttggacttgaaacaatgcttgacaagcttatggaaggttttatccgtcctttatctagaggcttctttgcagaagttggcgggtcaaccctggattctcatcatgggtttgttgcagaatatggtaaagatcgagatgttgacttgggtttccatgtggatgactcacaagtaaccttaaat

SEQ ID NO: 15187 - DNA, 361 bp, Glycine max
tttccaactccgatttcgtttctcctccgaaaaaccctaatttccccttcgctcttccccatgaccacggcgtactcatttcccccactccgaaaatgtcgctccagggcagcgccagcggaaacggcaccgtggcggcggcgtcgacggcgagcctgaggctgcggctgaaccctaacaaggagcacaagcccgatggctacgaggacatgcaattggatttcagccctaacattttcagctcgctggagaggtacctccctccgagcatgctcaacgtgacgcgtgacgagaaggccaagttcatgcgcgagattctcctcaagtatctgcccctcggggaacgcaacagagcacaaaa

SEQ ID NO: 15188 - DNA, 530 bp, Glycine max
gcgtgagaggaggagttctctggtgtttagtattgattacagtactgaagttgaggctttggatggaagtggtagtgatgttggcgctcaggaaagtagcatggcgtctcctccaatcgacacaacacaagtgtccatggttgatgatcctccttcaagcagtaataatagcagcagcaacaacaacaacaacagattgtctatgttcaggaacaagtttggatttttggctggtaggaatttggtgccatgtgccttcagaaagtgggccaacattgatgacatctcaagtaccagctttcaatgatatttattttgtaagaatgggtctagtcacaactgagaggaacagtctagacccagctgcagctccgtttgctaaaaatccaagagacatagaagggcttactgagggtgctagtataattgaagtggttaagaagattaggtcacatgtgctccttggtttgtctggcgttggtggtatttttaatgaggagccttgcttcatacatggctgaggaagatat

SEQ ID NO: 15189 - DNA, 610 bp, Glycine max
agggtgtcccaatttggttaagctcaaggtgagtaagtgcagaagggttaatggtgaagttgtggagtggctgcgtaaagcaggagttctctggtgtttagtattgattacagtactgaagttgaggctttgaatggaagtggtagtgatgttggcgctcaggaaagtagcatggcgtctcctccaatcgacacgacacaagtgtccttggttgatgatcctccttcaagcagtaatagcagcagcagcaacaacaacaacaacaacagattgtctatgttcaggaacaagtttggatttttggctggtaggaatttggtgccatgtgccttcagaaggtgggccaacattgatgacatctccagtaccagctttcaatgatcttttattttgtaagaatggtaatgcattcttgccattttcccaatgtttgttggttgtgttctcgtttgttcagttacattacatgttccttccttggttgggttggtctctgaattatgttttcctactgggattggttatggcggttcttattatgttataactatgtgtagccagccattagtctgttagcttcattaactggtcttattcagtttgttatttt

SEQ ID NO: 15190 - DNA, 586 bp, Glycine max
atttaaccgatcttaacttctaaattctaaattctaaaataagttaacacgtcagatgtgctacatctcctcttccatagatctattaacactaccaactctagtttgcattcttttctatttaaattgcctattttagttctcttccattcatttctagcttccaaattcatagaaagtcaaattataaggaaaataatctttctaacccttgttcctgtcaaagttctggttcttgcacgtttgacaaatgaacaagaaagcacctacttgcgttacagattggcaggtgataactgagaacaaggatggtatttttgatgggttgcctcacttaatttatgcatccagagagaagcgtccccagtatcatcatgattacacagccggagccatgactgtcttgactgtgacaggtttgggaactatcccacgattgttcaacacgctgttgtgcattttgatggattcacaaagaggaaaagaagttgcgttcgttcaatgtttccaacaattctacgatggaataaaagatgacccttttggaaatcagtgggtgattgcatttgagtacattatacggggc

SEQ ID NO: 15191 - DNA, 581 bp, Glycine max
atcctgggtgtccataaaatttggatccattttgtcatcccttgtttagaatctctaattccaataaatcttttcttcaagcatcgtacaattctagctggcactgccagtcttaccgcactgtgtttgatgatgataatatatattaaggaagtttattatttagaaccacaacaaagccttcataaattacaagtataaagaggtagtcttactcctgctcagatccatattacattgttctgcctttcctttgcaactagttcattgaagagcaacaaaaataatggctgaaacaaagttgagctttaaggacaaaagatggtcactccatgggatgactgctctagtcacaggagctacccgaggcatagggcatgccattgttgaagaattggcagaatttggggcagctgttcatatttgtgcacggtaccaagatgatattgataaatgtttggaagagtggaaaggcaagggacttactgtgacgggttcagtatgtgatttacaatgttctgaccaacgcacaagattaatggaaattctttcctccatcttccacggaaagctcaatattt

SEQ ID NO: 15192 - DNA, 846 bp, Glycine max
gtcaaaagtgaagaatcaaaggtttcaagaaaaagatccactggcactgagccaccacacaaaccgagtggtgtagaacaaaaacctgccagaaaaagtgcctctattcaccaacaaccttgtacaaatcgaaacaaccaacatcagaggcattcagatgttgctgcaagaagctcaacatcatcgtcctctagtacctcaatttcaactaaggttgttcaacaaaacaaggacaaaagtcatgagagaaaaccacaaggacagcccactggaaattctcttgtgcttgctaggataagtactagcaatgagaataatgagaacaacaagtctcaattgaaactcactgggaatttgcttgtgaataacaccccaagaaggaagagtgtggaatacatgcctaagagtgcagagttgaactctgtgcccagttcttacaccaatgcaagcaaaggcttgatggggaatatcttgaataggaacagcgatggcaataaggttgcacagtttttgagtccaaggatgaaaaaagtggaccctgaggtgtcgaaatcccatgggaaatgatgcatacaagcagggaagatttgaagaggccttggctctgtatgatcgagcaattgcactttgattcaaataaggcaatatatcattgcaacaaaagtgcagctttaattggcttatgaaggcttcaggaagcaattgttgagtgtgaggaatcaatcaagctggacccttcatatgtcagagcccacaaccgtttggccacaatatatttcatgttgggagaagcagacaaagcactgaattgcaatcagataaccccatatgttgattcaatactta

SEQ ID NO: 15193 - DNA, 425 bp, Glycine max
aatttcctcttctctcactttgatcttctctctctctctctctctctctctctctctctctctatatatataaaattggtcctctaagatgggtaatgaaaaccattaccaccatcagttttactatcagaaaagcacattccttccaatgctttgttcaaggccttccatcaaagaggtgactcttcctcgattcagagacccttctgcttcttctggcaacgaccctttgtccccaagaatcagttgtatgggtcaggtcaagagaaacaacaaaataagcggcattccaccctctcatagactcactttcacaaccaaaaccgacaacaccaacagaaacactacctcctcccctattgtcaaatactccaagctcaaaaaactcttctctggcaagaactttattattagcaccccaaaaa

SEQ ID NO: 15194 - DNA, 508 bp, Glycine max
tctacgcgtccgatccaacttccctaaacttttaaataaataaaatactaatagtaccccgcagaaatataatactgcgagtgaacttgaggcgaggatgagccattttcctccttatattatccaatccatcccgaaaaccaactctgtataattcggaaccactcatcgccaaaccattaaaaatcgctctgcttttgtgttggccacgatttgtcaggggaaacaaatgggagaagcaagagaaggatgacataatattactcaagattgtacctcctgtgaaccagatttatgctaaatggcttgctagagaccttgtaagaattcacggctttactccaaaacgtactcgtgcagtgcagccgcccaatcattatgtagaacatatgaagttgaatggatggttggatgtggacttgaatgatcctgatcttgctcatttgttcgagtagataatttctatatgccatatagacaattattgtgactttgtagctgcactatg

SEQ ID NO: 15195 - DNA, 379 bp, Glycine max
tctcgagcgaatcggctcgagtctgtgtaattcggaaccactactcgctgaaccatccaaaatcgctctgctttgagttggcgaaggttataaattgtcatgggaaacagatttgtcaggggaaacaaattggagaagcaagaaaaggatgacataatattactcaagattgtacctcccgtggaccagatttatgctaaatggcttgccagagaccttgcaagaattcacagctttactccaaaacgtattcgtgcagtgcagccgccggttcattatgtacaacatatgaagttgaatggatggctggatgtggacttggatgatcctgatcttgctcatttgttcaagtacataatttctatatgccatattggca

SEQ ID NO: 15196 - DNA, 371 bp, Glycine max
aaagaaacaaaaaacatagcagcaaagcttcaatttccgcttccttcaatttttgaacaagcttctcgcttccctagcttagcacctacatcacagatctttaacgataaaataaaaatggatccaaacgcggtgaagtccactctctccaatctggcgtttggaaacgtaatggcagcagctgcccgtgattatcagaaggaattgcttgctcaagagaagactcaaggatcaagttcagtacatgaggaggttgaccttgacgagttaatggatgatcctgagttagaaaaattgcatgcagataggattgcagctcttaagaaagaagcagagaaacgggaggaatggaagaagaaaagtcatgggga

SEQ ID NO: 15197 - DNA, 553 bp, Glycine max
cgttctccctcttttctctcaccatctgaaagcgcttttttttttttttttttcttctacctccgtttctccgtctccacatttctccttcacgaactcccgatttttcttcctcttcaatctcgtccctctctgtctctccatccttaaatatacacaacatcttctaaggagaaaggggttccgaaagttacgataaaataaaaatggatccaaacgcggtgaagtccactctctccaatctggcgtttggaaacgtaatggcggcagctgcccgtgattatcagaaggaattgcatgctcaagagaagacacatgcatcaagttcagtacatcaggaggttgaccttgacgagttaatggatgatcctgagttggaaaaattgcatgcagataggattgcagctcttaagaaagaagcagagaaacgggaggaatggaagaagaaaggtcatggagaatttacggaagtaaccgagggtgatttcttaggcgaagtcacaggaagtgaaaaagtgatttgtcacttctaccataaggagttctatagatg

SEQ ID NO: 15198 - DNA, 400 bp, Glycine max
cccacgcgtttttccacgcgtacgatcagtttctctccttctaaccctcattatatactacctatttctcaaccaagagcctatttatagatctcctgcaatggcactaaatgagcaaaagggcaaggatgatatcccagaaagtcaatatcagaaaggagtgaagcagttgtgtgagaaaggtcatcttaatgcagtacctaaaaagtacatacttcctgtttccgaaagacccaccaagagtagtgtggaagatccaaatgttgtgaagcaaaatcttcaggtacccatcattgattttgccgaattgcttggtccaaataggccccaagtccttcaatccctagccaatgcttgtcaacagtatggatttttccagctggtaaatcattgcatgttg

SEQ ID NO: 15199 - DNA, 418 bp, Glycine max
ctttcattccgtgtcgtaatattccccaatcaagctctctttagtctctacccatttcccttccattaaagtaactcgaaacggtttccctttcccatatggctgacgccaaagattcctccatagtagactccaaatcttccccaacctcaaccttaacatcctcagcctcacaacaacaacataggattatacgaactattttcttgatggctcaggacatcctcagaatcctacccactctcctctccgcagcttcaatcgccgtcatggtcaccaacaaccaaaccgttctcatcttcgctatccgcttccaagcccacttttattactcaccctccttcaagttttttgttgcagcaaatggtgtagtcgttgccttgtctttgctgacactggtactgaactttctcatgaa

SEQ ID NO: 15200 - DNA, 438 bp, Glycine max
ttcttattcataatcataggacgaccgttttcgaagcaactcacgtaacgtaaccagtttcgcgcacgaacgatggtggagagcacagaacaaggagggagagggatactcgggttgttccagttccagttactccaccccaaaacgacacccttcgcgtctcacaagacgctcttagcgttcctgtgggtggccacgctggcctcggtgttgttgtggcagagaactacgatcagcgggtttctggtgcagggcggcgtgccggtgagggcgccgccgaagctaaggccggtggttttctgtttgacggagttcggcggtgtcggcgacggcgttacgctcaacacggaggcgtttgagagaggtgttggtgcgatctcgaagttgggagataagggtgggggtcaacttaatgtgccacctgggcggtggctcact

SEQ ID NO: 15201 - DNA, 319 bp, Glycine max
gccaactcttgtgataataatgtaagtcaccaagagttgagaagttcgagaaatggcatggcatcaatgggatcttttcactactaggacactctcccatgtaaggaaatattagttgagaaattatggtggcagaattttatgttacaagttttcttatgtatggattggcccagcattcttgtacacattaatggttgacatgtagtgattttgcaaggtctaaatagatcaacagcaaatgactgtaaattataataggtggccctgtttctgtaatggttagttgcttatagcagttattaattattatctctta

SEQ ID NO: 15202 - DNA, 416 bp, Glycine max
  unsure (1)..(416): unsure at all n locations
tatatatatttgacatcatgcatagtatcttctcgtgactggcagtagagcttagacttctgtatatgtcttttgcaggtaaagcatgagagcagttctaacaattcagaagaaccgagagaattcggtgacctcaatgatcttgaagcattgttggacgaagatattttcatgcctacagcaacttaaaatttcattgttaaggggtgatttagaatttcacagctgagttaggtgatcaactgtctcactttgattgttatagtaaattagtaatcttaattctcattcttttgttgttaaggggtgatttgctaacatgtcacacaagaattaaaaaaaaaatgcataaccattaaaaccattcttacaatgcaaaaaaaaaaaaaaagggcggtcgncgactagtgagctcg

SEQ ID NO: 15203 - DNA, 357 bp, Glycine max
tgttgtcttaaaagaaggcagtaagcaaacagagcaaaggttgcagaaagccctagctagggtgaagtcaatggttcagtatccagaggcaagagaccaataccataggctgttgaatgttgtaactgagatccaagaaaatcaggtaaagcatgagagcagttataacaattcagaagaaccgagagaattcggtgacctcaacgatcttgaagcattgttggacgaagatattttcatgcctacagcaacttagaagttagctttcattgttcatttgaaaatttcacagctgagttaggtgatcacctgtctcactttgccccccatagtaaattagtaatcttccttctccac

SEQ ID NO: 15204 - DNA, 668 bp, Glycine max
actcgagccgcatcggctcgagcggctcgagccttaaccatcactggcacataggtgtttattgctacacactagaagaattatggaagctctcaagaccctcttcttagccatttttgttgtcttggcttccgcattgtattcagccaatgccaaaatccaggagcatgaatttgttattcaagcaacgccagtgaagaggctgtgcaacacccacagcaccatcacagtgaatggacaattccctggtccaacattggaagtcaacaatggtgacactttggtcgtcaaagtcactaacaaagctcgttacaatgtgaccattcactggcatggaattcggcaaatgagaacaggatgggctgatggaccagaatttgtgactcagtgccctattcgtcctggagaaagttacacctatcgttttaccattcaaggacaagaaggaacactttggtggcatgctcatagctcatggctaagagccactgtttatggtgctttaatcattcaccccagggagggagaggcctatcctttcactaagccaaagcgcgagactcccattcttcttggggagtggtgggacgcaaacccgattgatgttgtgaggtaggccacgcgaactgggggagctccaaacgtgtctgatgcatacactatcaatg

SEQ ID NO: 15205 - DNA, 256 bp, Glycine max
tcagcagtcacactgaggtgttaattgctcatagtaaaaatggagtctgtcaagttcattaacatgagtgccaaacactcctccatcttcttattagccatgtatctttgttctgatcttagcttcagcaaatgccagaattcacgagcacgagtgtgttgttgaagcaactccagtgaagaggctgtgcaaaacccacaacagcatcaccgtgaatgggcaatacccgggcccaacgttggaactcaacaatgga

SEQ ID NO: 15206 - DNA, 432 bp, Glycine max
aacgccttctgttggaatcgtaccgactatgtcaggattcaggctatcggattaggagatcaaggaaaagatgatgagaaggtactgaacgagagagtccttgaatcgttaccgtttgggggaaaacggttactgcaggagacaaacggtaacagaattgagagcttcgtgcaacgtcttgttgctactgggaagacaagtcttccacctagtccgtgcaagcttccgccgtaagcctctggctaacggcgtttctttatttttaatatttttgacgcagtagtgacttgtatccaaggttagattaggccgtgattaattaaagaagaaaaaaggtgctcaagtttttattttatctgttgtcggagtgaatagctgttaataaaactcacatggtagagtttctcgtgaaaaaaaaaaaaaaaaaacaaa

SEQ ID NO: 15207 - DNA, 762 bp, Glycine max
gcatggtggtattggattctatacctgtctttcccaattactggactatttatcatctggcaaggtcccctacatattggataacaattttgcttataattattgtggcattgctcccacgctttacttgcaaagttgtttatcaaattttttggccttcggatattcagatagccagagaagctgagttaatgagaaaacgacatgataatttgcagccgaggcaacaagtttccagttaacttgtgtgactgccccgtgtcttgtagaaactacagaaatctcaaatgaaatggcttcccttgtatttgttcatcacaatgcattcctgtggctgttggttgcgcaagtgaccagatgaatagctgaagcagattgcattggtgtaagacaaatgcttggcatccaacatagtaagagattgtgccacgtggaagctcatgccaaggctggcaaaatagcttgcctggtttttcaaatgcgtcgggtcaggtcgggaaggtaaataggagatggaggttggaataggcttagactcgggtatctgtatctccagcaatttgatgtgggtggaattttatcagtggcgacttgataataatgatccacggtttatagaaaaagtgtgggagagagtagagtgtaactaagtgtgtactatagttctgtaaaaatcaggcttgaaaaacgtccttttaaaaggagaatgtctcaagaaaggacaaaatgaaaggaaagaaaaggtaattttcacaatctttc

SEQ ID NO: 15208 - DNA, 1574 bp, Glycine max
ggttcaccacatatagtgtgggggggggttagcttcgcgattcttatttctctctttaactctctctctctctctcgtcctcgcggatggagagagagaaagtaagagagaaagagcggtggttggtggttttggtttggtgaagttcgattcgatgcgatgcgattgcgttggggattttgattctctctctctcactgtgcggtctctaattcgcttggtgcaggtcgggaaccggttttcgcgcggaatggaggaacggtcgccggcggcgaattggatcccgccttgcatcaactgaatcggaggccgcggtgaagctttgcctcgttttccgctcagatctcatctccgagattctaccaccagtattttttaaatttattttaatctctgcttatcagatccgaaacgcttctagatttaagtttatcgtctctatgcagaaagtgtgatttatgcggtagatcccgatgcatagaatctacatctaagagaaatagttttagttaaaaagcttctgatgtgctttttccttgtttggatttttacttgacctgcttcctttcattgattaataatcaagctgaaattttttatatttgagaactgaaataaataatcttggatttattacaataatgaatttactgtatcggtataggttaagctaattgaggtgattgcgattcgattggaaaaaaaaaaacattttttaggttttctgatggtttttgagccttggttgaattgaattgcatgccacggttgcaagtgttttatgtgatgcattccattgcgatgcttgtgcttattctggttcgagctattttatattgtttgatattgcttttagaacagaaggcttcaagtctatgaagcatttgtaagtgaattgtgtagcaggaattgatgacctgtttggggcatgatttgagtatctggctctctgtgtaactagcttctagacatagaaacccaagttaagacttgaggatggcttcaaattgcatactagctatgtcaaagcagttgatcttgtttgtgtccattcgccttgagattgatttgaatgtttgatttataaagcaatgggactttcatatatcaaaatgcttcgcgacttcagtcaattcatttctaaaatcatgtgaattgaagtaacattttcctgttgtagcttaagatgaatatatctcatgcagatagtatctattacactacctggttctaacactcatctaataaaaatctggtcttcaaattctaatatattgtcaaattgagaaacccacttttgtaactgagaattcatattatttcttggatggggcagtggcctcaaggatgcctatttatgattatgagaaattgagaatgtgattgaaagtctagagatttatttattctgtgtttcttgccagttatggtgcattgattgtttgtttcttttttcacggttatcttaaacagaccgctaactttataaattcatttactttgaatgccaagttatctatatgttacgatgtatgatttttttctgatcattggatctcagactaattaattct

SEQ ID NO: 15209 - DNA, 684 bp, Glycine max
cggctcgagtgcattttcgtctctgacattgctacttaaaatttgtcgaaaaatccaattcagcgatctccgaagagctccatttgttgcactccaattggaaaaaagaagtgaacttgcgatctgggtatccaattttcgaactctttcgatggggaatgatgcagggtcaccgcagggtccggttacgtgtgggtcgtggattcggaggcccgagaatttgaatttggtggtgttgggaaggtccagacgtggcagttcttgtccttctctcttagagattttctccttcgatcccaaaaccacttctttgtctacctctcctctgaccacttatgtgttggaagcagaggaaggtgatcctgttgccattacagttcacccaagtggggatgattttgtgtgcgctctcagcaatggtagctgcaaattgtttgagccgcgtggtcgtgaaacaaacatgaagttgttggctaaggaactggctcctctacagggtattggtcctcagaaatgcattgcttttagtgttgatgggtctaaatttgctgctggtgggttggatggacatctcagaattatggagtggcctagtatgcgcgtgattttggatgaaccaagagcacacaaatcagttcgggatatggattttagtctagactcagaatttctagcttcaacttc

SEQ ID NO: 15210 - DNA, 1179 bp, Glycine max
cggctcgaggagctctggaactccactcgtgatccaacacgatagagagagaaaaagggtcttgcctttttttctgcttttgatttgactctttacaaatacaaataaataataaaatcccatcaagaagaaataaatatcaagcccaacccagtgcagtgctgcagggactgtcactgaactcaaaaatgaactgtcttcggaatctttctcgattctctgttttgcccttcgaaacacctgttacgcgccaccgcaagaaccttcccctttccctgggtttcgtcaacaattctcgtcaatatccaactatggccctcaaggctgcctcaggttctataccaagtgcagacacaagtagtgccgataaggaggaagaaaagtctgagacatatagtcataacatgacagaagccatgggtgctgttttgacttataggcatgaattaggaatgaactataatttcatccgtccagacttgattgtgggatcatgcctacagactcctgaagatgtagacaagttgcgtagaattggagtgaaaactatattttgcttacaacaagattcagaccttgaatattttggagttgatattaatgccatacgagaatatgccaagacatgcaatgacattcaacacttgcgtgctgagataagggactttgatgcatttgatctacggaggcggcttccagctgtagttagcaaattatacaaggcaataaattccaatggaggtgtaacatatatacattgcactgctggacttggaagagctccagctgttgcgttggcttatatgttttgggttctgggttataaacttaacgaggctcatacactacttcagagcaaaaggtcgtgctttccaaaactggatgccattaaaagtgcaacagctgatattcttacaggcctcagtaagaagtctgtcactttgtcatgggaaggcagcaattgctctaccgtggaaatttcaggacttgatattggatgggggcaggaattcagaccaaatcggagaaaattaatatatctgtagaaattggcagtttggtcccgggctgttcaaagttgacctgactactgacatcttgccaaactgacctgctcaagggatgatatgatatgaagtctcatttcatattcaaaatctttttaactttagaataatc

SEQ ID NO: 15211 - DNA, 417 bp, Glycine max
tgtgctttccaaaactggatgccattaaaagtgcaacagctgatattcttacaggcctcagtaagaagtctgtcactttgtcatgggaagacaaaaattgctctaccgtggaaatttcaggacttgatattggatgggggcagagaatacccctaaattttgatgacaaagagggtttgtggtttctcaagagggaattgcctgaaggactctacgagtacaagtacattgttgatggggaatggacatgcaacagcgatgagcttataacctctcccaacaaagatggccatgtcaacaattttattcaagtccttgatgatacaagcagtgttcgtgcctctcttcggaagagattgacggctgatgatcctgatctcacaacagatgaacaactcagaataaaggagtttcttg

SEQ ID NO: 15212 - DNA, 554 bp, Glycine max
tatgacgtcgcattgcacgccttcctaagcttgggattcggcttgaggggatttccaaggtaccccaattggtgtttcaatggataacacccgtttagccattgcatcaattgggaaacttatgtttgcccaattctctgaacttgtaaatgacttctacaacaatggtttgccttcaaatctaacagctagtcgcaatccgagcttagattatggattcaaaggtgctgaaattgcaatggcatcctattgttcagaacttcaataccttgccaatcctgtcaccaatcatgtccaaagcgctgagcaacataaccaagatgtgaactctttaggcttagtttcctctagaaagacagctgaagcaatagatgtattaaagctcatgtcatccactttcttagttgctttgtgccaagccattgatttgaggcatttggaggaaaacttgaagaacactgttaagaataccgttagtcaagtggccaaaagagttctcacagttggcatcaatggcgagttacatccttctaggttttgtgagagcttatcaa

SEQ ID NO: 15213 - DNA, 578 bp, Glycine max
gctaacgataacaataacgctcgccgattagttaatttcttacacacactcttactcttttatctagggaccaaaaccatttgcgttgtcgcagtcgcagtcaaaggccaaggcaaaaccctaaattgtctcacactttcgtcggaatccgattttggctttttccgtgacaagatgccggcgaaggacgacggctccgacaaggagaagtgccttgatctctttctgaaaatcggcttagacgagcgcaccgctaaaaacaccgtcgccaacaacaaagtcactgccaatcttactgccgtcatctacgaggccggtgctactgatggatgcagccgagcggtcggaaatcttctttacacggttgcgacgaagtaccctgcaaatgccttgccgcatcgcccaacattactacagtacattgtctcgttaaaggtgaaaacaactgcccagttagatgcagcattatcatttcttgctaccacaggctccgagaatcttgatttggaccggtttgaagaagcttgtggtgttggtgttgaggtttcagaagaagatatcaaacaagctgttagtga

SEQ ID NO: 15214 - DNA, 712 bp, Glycine max
aaactgcaagcgttgggagaaaggaaggaagaccttatcatctccgaatttcatttttcatatccgaatttcattttcagaagcctctttgggaatcaaatccgaagcatgatgcattgtgcgagcattgtctcggctccgtcctacgcgttcccttttctctctggctccgcttccactactccaactgcgatctcgctcactaagcgcagttggaagccacctccgagcatggcaaaaggcccagtcagagccaccgtttctatagagaaagagaccccggaggccaatcgtcccgaaacgtttctcagaggagtggacgaggcccagtcttccacttcggttcgggcccgcttcgagaagatgataagggaggcccaggacaccgtgtgcagtgccctcgaggccgctgatggtggggcccagttcaaggaggacgtttggtccaggcccggtggcggcggtggcattagcagggtccttcaagacggtgccgtttgggagaaggctggggttaatgcccctgttgtttacggtgtcatgccacctgacgcatatcgtgctgccaagggtgttcctaccgatcaaaaacctggtcctgtgcctttcttcgctgctggaatcagctccgttttacacccaaagaacccgtttgcccctaccctacatttcaactatcgctattttgaaaccgatgctcctaaagatgctc

SEQ ID NO: 15215 - DNA, 1024 bp, Glycine max
caagttcataagaattgggaaggtgatgaaactaatcgatgagcagcagtgaaaaaaaacttgtttgaaccccaatgattaattattaatcaaattcaattcaatgaccaaccaatcttcttcgccctctttactttgcgcttctttcaaccaggaccatagttactttgccgttggcaccacagatggtgttagaatatttgatgctaatacaggaaggctttgttatgaaagagggtaattcagttcccttaattaatcaccttttttcttgttaattttttcccccttccttcgtgtagcggttggagcttttgttattgctgagatgctgtttagctccaaccttcttgctatcgttggagctggtcatcagccatctttgtctcctcgccgtctttgtttattcaatacaaccactggagctgctcttagagaattgaattttctaacttccatacttgctgttcgcatgaatagacaaagactcattgtcattttacaagacaaagcatatatatatgaactaaatagtctcacaatcttggatactattgacacagtgccaaatattaaaggactttgcgctttttcccctagtttggatgcatgttacttggctcttcctgccagtactaccaaaggatctgcgttgctatataatgtcatggattgccatttacactgtgagattgaggctcatcgttcaccattagctgcaatggttctttcttctaatggaatgtacatagctacagcatccgagcaagggaccataatcagagtccatttggtgtcagatgcaacaaagtcatatagctttagaagggggacatatccgtctactatattttctctttcatttggaccatcaaagcagcttccagatattcttgcagcctcaagttcttctggttctattcatctttttactctcggatttgcttcacatccaagcaggagcaagagatcaagtggttttcttggatcaataattcctggtgctgtgaatgatgttgctgat

SEQ ID NO: 15216 - DNA, 255 bp, Glycine max
tcttaattccccccttccttcgtgtagcggttggagcttctgttattgctgagatgctgtttagctccagtcttcttgctatcgttggagctggtgatcaggttccgtactatactgtacttgggctcgggctcgggctctgactgtgtattgttttgactgatacatgatgcacatgcagccatctttgtcccctcgccgtctttgtttattcaatacaaccactggagctgctcttagagaattgaattttct

SEQ ID NO: 15217 - DNA, 503 bp, Glycine max
  unsure (1)..(503): unsure at all n locations
nagaggggaccacaaaacatgggttaacttctacccctgttcattgctcctctttcgttctctctttctctctccttcaacgcatcccaaccctgtggcgctataccctcctagatctactctctaaccgctatacaggctggtactaagagctgtggttagtcatagatggcgctctcagcttcacgggcaatgtcaaagggtgtggtggtatctgtgcctgttctggttctatctgctttagtggctactgttttcctgttcttccttttgtcctctctttcatcctgctcctgccctactccttcagaaatctctgcctccaatgttaggagtgttggtgttggtattggtgttcctgagtctagcagcggtaatgttccgttagccacaaggaaaggagtctagcagcagtaatattccggtatcaacgaggaaggaggatgttgagtgggtgaagaatcaaatccaagcaaatgggcttcatatgcatgacaatgtgc

SEQ ID NO: 15218 - DNA, 402 bp, Glycine max
tgaaaagatgcgagcacagacgctgatgacacagtggtgcacaagagcagcaacgtgtggccaattgaggatgagcactaacactaacacccccaaacacgatggtctcgacgccattttcaaacataagcgctttcttcgaacgcaggtcagaaaaaccctcaagtccatccatccctccctccgatctcaccaagataacaccgttcaagacatagttttgggagctccgtggttcagatccagtcgcaggttgtgcgcgtacataagctgcgctgctcttcgcgaagtcgacacttcaaaaatcttgtcacagattttgcaacataacagtgctactgatggaaagaaactctatgtgccgcgcggggaggatatgaatagcacatgcgtatgtttaca

SEQ ID NO: 15219 - DNA, 1085 bp, Glycine max
tacacacatctcgatggtcccagtcacaaattcactttcaacaattttattttttccatataaaaaaaggatcaaacttgagaagccctttctgttcccaaccactcaaaatgtcctccatggcttcctccaccgctttcttcacacccctccatgatttcactcaagccagaacaaccccatcaccccctttgcctttcatcaaatcctcctttgcttcctccaagtcaaccttttttcaccctgccctttccctacaaacctcttccaactttcccaggctttttggaaagcctaagtttttctctgttcatgcaagggctgccacagaaaaaaccatttatgattttactgtcaaggatattgacagaaaggatgtttctcttagcaagtttaaggggaaggttctattgattgtcaatgttgcttcacgatgtggtttgacatcatcaaattactcggagctgtcacgcttgtatgaaaaatataagaatcaaggtttggagattttagctttcccctgcaatcaatttggtatgcaggaacctggatcaaatgaagatattaagcaatttgcttgcactcgatataaagcagaatttccaatttttgataaggttgatgtcaatggaccatttacaactccagtgtaccagtttctgaaatcgagtgctggaggctttttgggtgatcttataaagtggaattttgagaaattcttggttgacaaaaatggtaaagttattgaaagatacccaccaacaacgtctccttttcaaattgagaaggatatccagaagttacttgctgcctgagtgtaattcagaacacaaacgagagctgtatgtaagagcacgaaccgagtgatgtgtgcacaataagttaaaactgaagatgagcaataagtatagctatgcaatttactttggtgtctttactaaagaaattatcagtttagggaagaaaattatactgtattaccccaaaatgattgaatatagtatatgtttctctctttctttttttctttttgtggaagaattctctggccatttatattattattctctaagtaatatgctttc

SEQ ID NO: 15220 - DNA, 443 bp, Glycine max
cgttgatgtcaatggaccatttacaactccagtgtaccagtttctgaaatcgagtgctggaggctttttgggtgatcttataaagtggaattttgagaaattcttggttgacaaaaatggtaaagttattgaaagatacccaccaacaacgtctccttttcaaattgaggtatgttaagcttcccccaatagtaaatccagtttttaattgttaccatgacagtgaaatattaactaatgaagtatgtcaatgtctttcctactcaagattgaagcctgaaggtgagtataatagagtatctgttaatattgagaaatttagcattgaaaattcagtttgaaacttttaatgctgacaacttagcactagaatttagtgtttgaaaacttgatattttaagtgcctgatgaaattagtttatgcttaatgtagtcagtaacct

SEQ ID NO: 15221 - DNA, 615 bp, Glycine max
tctttcttctctctcctttcggttttcaccttttcttttcccacacaagtacgttctccctagatccaaccacttccattgccaccaattgcttcttcttgtttattttgctcccataccattagcaacactgtgttagatactcagatcccccctcttttctctatgccattcccccagctgggaagggtgtactggaatcagagtgtagctgtggggtgcagattgattactattcttgtgttggccttttcaggatgggcaagtgcaagggttgtgggcagataggaagaatgggaacaacaaatgggtcaatgagttcttatgaattttcgttgatgttgtctcctgttgtttctttttgggattgtatgttccgtaaaatgaggtattcctacagacctgagtgggtgtagtggttagaacgtaactttagtactagtctcaatactttaactaaatagagtatattagcataacaatttagggaaaggggagaaattataaacagaaaaatgtatacagctttaaagaaattctcttggaggataggagttctcaaaagatatcttttttaagtatttatatagatagtgggctctatggataacatgg

SEQ ID NO: 15222 - DNA, 466 bp, Glycine max
  unsure (1)..(466): unsure at all n locations
tactacgatgcctgcacgcctactctagatgatcctctcgctcaagcacctntcctcattctacacaaatacggatgctatagatccaaccacttccattgccaccaattcctgcttcttgtttattttgctcccataccaacactgtgtgttagatactcagatctcctcccccctcttttctctatgccattcccccagctaggaagggtgtactggaatcagagtgtagctgtggggtacggatttattactagttttgtagagaatgggcaagtgcaagggttgtgggaagttaggaagaatgggaacaacaaatgggtctatgagtgcttatgaattttcgttgatgttgtctcctgttgtttctttttgggattgtatattccgtaaaatgaggtactcctacagacctgagtgggtgtagtggttagaatgcgactttagtactagtcttgatacttca

SEQ ID NO: 15223 - DNA, 553 bp, Glycine max
tgtacctgtactgtggcacaaaaccatcactgttcgagaaaaaggaggatcgaactcgaacccgattgtggtcggtgcagaacagagaggagaggacaacacacacaatcacagggttgagttgagttgagccgtgagaaaagaaaaaataaatggccattgctatgaaggccacgcctatcacggcttcgggcttcgtttcaacaagaaattccacacttccaccctttaaatcatcatttctcagataccgctcaggagcattggaagttcctggcatgcgggtaacctactcagatagattgaaatgtaattgtcatggtggcggtgcccttggcactcaaatgaatctttttagcagatttgctagagttatcaagtcatatgctaatgccattataagctcctttgaagaccctgagaagatattagaacaagctgtgctggatatgaacaatgatttgatcaaggttcgccaagctacagcacaggttctagcatctcaaaagcagttagaaagcaagtacaaatccatagaaaaagcttttgatga

SEQ ID NO: 15224 - DNA, 1536 bp, Glycine max
tttctttgcaattgatgctgataattcaggcaataagaatgaaaggtatgatgaggttgtttcagaagcaactgaaactctggaagcaagtgcggcactttgtagcttgggaaatgaagatgctcctgcaactgcaagttgtgataatgacacttgcagtttgaaacattttgacataactaaagatccatcggaccactattttattggtgcaaatggacagagtaacaaccggaaatggttcaagaaagtgcaacaagattggagcatattgcagaataaccttcctgaggaaatctatgtacgagtttatgaagatagaatggatctcttgagagcagttattgtagggccatacggaaccccttaccaagatggactctttttctttgattttcaccttccgccagaataccctgatgttccaccgtcagcatactatcattctggtggttggcggattaaccctaatttgtatgaagaagggaaggtttgccttagccttctaaatacatggacaggcagaggaaatgaagtatgggatcctaaatcttctagcatccttcaagtcctagtttcactgcaaggcttagtactcaactctaagccttacttcaatgaagctgggtatgataagcaggttggaacagccgaaggagagaaaaattcattgtcatacaatgagaatacctttttacttaactgcaagactatgatgtatcttatgaggaaaccacccaaggattttggagtgctcatcaaagaacattttaggaggcggggtcataaaatccttaaggcttgtgatgcatatatgaaaggtttcttgattggctcgctgactagagatgcctctgtaagtgaaaagagcagtcagaattcaacctctgtgggtttcaagttgatgttagccaagatagtgccaaagcttttcttgtcactatgtgaggttggagctgattgcgaaggaatttaagcatctgaaagatttgtagcgaagttatatggttgatacatcacttcatttctcaaattaaagccaactttggtctgctgtctctgccccatggtaccatcaagtgtaagggttcccatatagcgtcaatgttttgattcctactatttgtaccctttaatttctcttgtttaaaagatcaattcacttctaggagcttgaaggaacataatttggtgggatttattgacatcgagagaagcaaccactgacagtgcaagccggatatacttttgattttggtcgcctgaagtggggaggctatgttggttactaacttgtatgctgtttacctttttccttattttttgtttcttttatatctggggattaactctgcgcaatggcatcctgcgatccttgtagccaatttcacttgatgtgaaataaggcttttgtcgttgttttatatctggggacagggtgggaatcggggttggattttcgctggtatttgaaagggtttgtcttgcattgattgatttaccttctgtttcccaagaatacgatgaattgaatat

SEQ ID NO: 15225 - DNA, 654 bp, Glycine max
gtctgctcttctgcgtcctggaagattagatagaaaaatagaaattccattgccaaatgaacaatcaaggatggaaattctcaagattcatgctgctgggattgctaagcacggtgaaatagattatgaagctgttgtgaagcttgcggagggctttaatggagctgatcttcgaaatgtgtgcacggaagctggaatggcagcaattcgtgcagaacgtgattatgtgatccatgaagattttatgaaggctgttagaaaactgaatgatgcaaagaaactcgaatccagtgctcactacagtgctgattttggcaaagactaaaagctattataaaattctgagccatggatatctagggaaaacttcatgcaattaggttaactcagacggtctgaccttaagatgaagtggtctcttttagctatgccttctattgtccgacttatgcagttccatagagaagatgtttagttgaatcatttgcctaagctaattgaattattattatttttgttttctttgggattatgctatacaaattactgatctttgaatttagagtttgcgtgcctccccatttatggttaaagactgcttgttgagtgaatttgcgttgcaagcttcaataaatctgatttggtgtttaatct

SEQ ID NO: 15226 - DNA, 446 bp, Glycine max
gtgatccatgaagattttatgaaggctgttagaaaactgaatgatgcaaagaaacttgaatccagtgctcactacagtgctgattttggcaaagactaaaggctattataaaattctgagccatggatatctagggtgttcatcttttgagccagaaatacttcatgcaattaggctaactcagacggtctcttttagctatgccttgtattgtctgacttatgcagttccattgggaagatgagcagttgaattatttgcctaaactaattgattattattttggttttctttgggattatgctctacaaattactgatctttgaattagaggttatgcgttctccccatttatggttgaagaccgctggttgagtgactttgcgttgcaagcttcaataaatctgattggtgtttaatctaagcggaaataacaaattttattc

SEQ ID NO: 15227 - DNA, 327 bp, Glycine max
tcgagccgattcggtcgagcaatgggactgaccctgcatgaggactggggaagtactgccgctgcaatagacagttgcttgactgttgctgatcaatacgatatccagattaacatacataccgacaccctaaatgaagctggatttgtcgaacatagcattgcagcatttaaaggaagaactattcatacttaccacagtgaaggtgcaggtggtggtcatgctccagatttcatcaaagtttgtggtttgaagaatgttctgccctcatcaccaaaccgaacacgccctttaacactcattactatatatgagcatcttgacatg

SEQ ID NO: 15228 - DNA, 876 bp, Glycine max
tgagcactgcacaacaagtatggcttcaaaagttaggaggtgctaaaaatcctgtgaggcaagtcacagatgatatcatgaagaatggcctaacacaggttcagaagtcaatgtctaaactagattccacaacagcggaagaagccagactaagtgagaaaacatcagaggggccacaacctggtgaaagatttaagctaataaaagagcaagaggcaagaagaaaacaacaaagagaagaagaagaagaaaaaaggaaagccttggaagcagcagctagagaaactaaagtagacaagacacttgaggaaacagttgaagtggagaatcaaactggaggtgatttagttgttgaaaaatctcggtctttggcttcagatactgatccctccatatctggagtagtaaatggtaatccattaagtaaagacttggagggaaatcagaattctacatctacatctgagacagaaaataatgaaggttctgctcatttcaacaatgttgagataaacgagaaaattttagacaaggaaccaagagaagtattaacaactacaaccaccacaaacaaacaacctcctgcggaagagacaaaggattgactatctaaaagagattgatctgcttggagattgactggcccagttgccatctatatgccatatgggaaacgcaacctccatttcaatttggggtctgcctggttaaagactgtacattgccacagaaatggtggaatgaatgagattcaatgtttctatattggcagagggagtgcttggatttgatggctgattttacagccatatagtgctagtttgtattatactctttttatcaattttcattgacaaagatggatgaattcccatt

SEQ ID NO: 15229 - DNA, 525 bp, Glycine max
caggaggcagagggggtacatctacgactcaggagctattctagtgtaatcctaacccgacgatggcgagtgaaaagttggtgctggcagtgatcagggccgcgaggccaaccttccgcaaccaaaacgacaaaatcgcatttgccgttcactcctccttcctcacctccggctatgtcctcaccgctacaggtccccaggccctctccgacaatgcgttttctgacccatccaatgacgaggtatccgttgatcattggaacgagctgaacgatgagtacgcgttcgtttacgcgaatccagaaaagggttcggagaaagtgcttgtcaagtgcctcgtgatgaacgacaaattgctcgttcatgctttgactcaagggtcgtcggagcctttgagccttgagattgatgttggggattatgctgaagaggatggaggcagcaattattctcagcagttcaagaattggatatagcttgtgaagagactagatggggatattttgtccaaattagatggttctg

SEQ ID NO: 15230 - DNA, 349 bp, Glycine max
gggagcttgggtagggatagggttttattcagcaacaggtcagagactaaaaatattatctgagaccattaaggcttcattggtttactaataggaaatggatgagaacatattgaccctcttatgcactctgttgactgctgtaataatcatgggctaatacactgtccttgcagattgttgttctagatgtttgatagttcaattttggattttgatgggtagttccttgtgtacttttggaactaatgggttacaatcccttggcattgtccttatggcatgcataagttgcttcaaaaaaaaaaaaaaagggcggtcgacgactagtgagctttttaacccggga

SEQ ID NO: 15231 - DNA, 552 bp, Glycine max
  unsure (1)..(552): unsure at all n locations
aaaaaacatacagaatataaacttggttcagccaattcatctcatgctgatcctgctattcatttgaactcttcagtgaattttaaccaagatcggggatttaaaaacagtgatacaactcaaaaaagagaagtgactgatgcaattgaaaagccaaacataaacgagtcaaatgctgttcaggataatgtttttcagcatcaccttcccttgcgtcaggaaattttggctcataaaaggaaggcagttactttgaaaagagaagggaaactaacagaagctaaggaggaacttccgcaggccaagctgttggagaagggcttggaggatggaaatatgctgccagacactgcctcttcctctgcctctgccactgtgaactatgcttcccatgcatcaaatgttgtacaaaagaaacaagaatcgtcaaatgttagtgcaaagccattgagtagtcgtgatcgatttaaattgcaacaggagtctctagggcacaaacgtcaagccctaaagctacggagggaaggccanatagaggaagctgaagctttg

SEQ ID NO: 15232 - DNA, 421 bp, Glycine max
cccacgcgtccggttgatttcatttgctcttattaaactcaccaccaccaccaccaccaccacgctctcttccattttcccgcaaaacaaacacattcacatacttttccctcactttctcggcggccaaacgccataaaaatggcgtcgaaggtggcgctgatggcgctgttctccgtcgcgctcctgttctctccgtcgcaatccgcggtcttcagcgtagatctaggctccgaatcggtgaaggtggcggtggtgaacctcaagcccggccaatccccgatctccgtcgcgatcaacgagatgtccaaacgcaaatcgccggcgctggtctccttccatgacggcgaccgcctcctcggagaggaggccgccggcctcgccgcgcgctacccgcagaaggtctattcccaaatgcgcg

SEQ ID NO: 15233 - DNA, 355 bp, Glycine max
  unsure (1)..(355): unsure at all n locations
gagatggtgaacggagtcttcgacagataggagagtctcttattccccttcgagttgccgagcgaggagcgtggtcgtcgcgctgttgcgtgagaagcagtgtggaggtggctgataacggggaatgtatttagctttgagagtctttaaattttctgtatttgttgtaatgttagtagttccttaaattggccagatggagtctatgtgtttgtaaatgcagggatgctaacggaataaaatggccacttgtattgctatcccttgtgctagcataatagaaagggttgaatcgcgctncaaagctctcacatttcgtctggtgtacacagactttgctactgctattgatcct

SEQ ID NO: 15234 - DNA, 423 bp, Glycine max
tcaaatgtgacttgtcagcctggcagaaagtatattatcaacaagtcactgatgttggcagagttggcttagacaatggttctggaaaatcaaaaagtctacagaacttgacaatgcaactcagaaaatgttgtaaccatccctacctctttgtgggtgactatgatatccataaacacaaggaggagattttcagagcatcaggaaagtttgaacttcttgaccgtttgcttccaaaacttcgtagagctggtcacagagtcctccttttttctcagatgactcggctcatggacattcttgaaatttatctgcgacttaatgattgtaaatgtcttagacttgatggctcaacaaaaacttgaggaagaggttccctactacgggaatttaatgcacctgattctgcatactttatgtttc

SEQ ID NO: 15235 - DNA, 685 bp, Glycine max
acgtgctggcatccactcaggcaaaatattaacactgccactctgctagtgggaacactgactgggctataaggtggcaaaaatccacgcacttgaaaatgtggaaagtaattccacatacttttctggagtgctatatctgtgagtccacaggaaggagtatgcagctttctgtaataaagtgtgttcctcgtggatgcatagcagcataggacaaggcaaggtgtgaattgaagtactgaactccaacaagatcatttcatatatcatgttaattttgtaaattggctatttgtgatttgtccatacgtgcttgccccaattcatttttctaatgatttgagcatacccgcaactcttagttcttgaatagcacatttatatgtattttttttcactttattttctgtacgggcaactcaatgctctaagaacttcaaagcattgtactaggaagaagctcgttatactacattatgagtttctcctttgattcctcattttaaaataataataattattataatttattttgtaaattcatttcctatgtagttccagttagttttttttttttttggaaaacattaccaggtcccctgaaggaaggttagtggaaatgttaaaaaaaacaggagaaatttgtataattgtataaaacttcagggaaattgaggtaatttac

SEQ ID NO: 15236 - DNA, 523 bp, Glycine max
  unsure (1)..(523): unsure at all n locations
ttgaatggatgtacattttctttccctctttaagaaagaaagctgtctttagatatgaacccccatactcaataatttctttgtggcaggattacttggaaagttggaatgtccatgctcttcttggatggatgtgcttctctgcatttcttttctagaatgtgccccagcttctccttcttgtatttttccagaagaaataatctgattcgccctagccctgccattctgcattccctcagcattcattgctttttcattcctcatgacttttgctcagtgttcaatttccaacatgtttcaacatagaaaccatgatgatttcgcaactgtggcagggtttgctttcgtctacatggaagatgaacgtgatgctgagtatgcaatcagaaggcttgatagaacagaatntggtagaaagggtcgccggattcgtgttgagtggactaagcaagaacgtgacagtagaaggtcaggtggtgattccagaaaatcttcatctaattcaagaccatccacaact

SEQ ID NO: 15237 - DNA, 980 bp, Glycine max
atcccctcccactctttctctctcttcactttccaacgttggctttctctctcgcgttttccaattccccccaaatctcacgcctagggtttctatcgcaaaccctccctacctccaaccaggtcgcgtgcaaagggatttcgaagcttcggaagaaaaaaatgaaacctgttttctgtggaaacctggatttcgacgcgcgtcaatctgacgtggagaggctcttcagaagatacggcaaagttgatagagttgacatgaaatccgggtttgcttttgtctacatggaagatgaacgtgatgctgagtatgcaatcagaaggcttgatagaacagaatttggtagaaagggtcgccggattcgtgttgagtggactaagcaagaacgtgacagtagaagatcaggtggtgattccagaaaatcttcatctaattcaagaccatccaaaactttgtttgttataaattttgatcccgttaatgccaggacaagggatctggagagacattttgattcctatgggaaaatattaaatataaggatcagaaggaattttgcttttattcagtttgaatcccaagaggacgctactagagctttggaggccaccaacctgagcaagtttatggaccgtgttatcactgtggagtatgccattagagatgatgatgacagagacagaaggaatggatacagtcctgatagaagaggccatgactctcctgatgggagatatggtcgtggtagatcccccagtccatatcgtagaggtaggggtagcccagattatggtcatggatcgaatccatcttccagaccagaaccaagaggaagccccaagtatgatcgagctgaaagcccaataaatgggagatatgataggtttgatctaatttacttgttttattttcttaaaataattttttatgatatatatacatcattatacttttgacttttttactgttcatgcagccgg

SEQ ID NO: 15238 - DNA, 322 bp, Glycine max
cgcgttttccaattccccccccaaatctcacgcctagggtttctatcgcaaaccctccctccctccaaccaggtcgcgtgcaaagggatttcgaagcttcggaagaaaaaaatgaaacctgttttctgtggaaacctggatttcgacgcgcgtcaatctgacgtggagaggctcttcagaagatacggcaaagttgatagagttgacatgaaatccggattggattacttggaaagttggaatgtccatgctcttcttggatggatgtgcttctctgcatttcttttctagaatgtgcctcagcttctccttcttgtatttt

SEQ ID NO: 15239 - DNA, 614 bp, Glycine max
ctcgagccgctgaaaactgatcaaaaccctgttggagatgcaaaggttaagaagacatcgaagttcgaggattttaagattgagaaccgaacatcatcatcctcggcgttgtcggatgaatattcttcttcttcttcttcgcccgaatccgatattactttcttggatttctcggattcttgtgaaacaacatgcaatcttgggttggacttggaaaagtacccttccgtggagattgattgggcagctttatctgagtcatgaatgatgttagtggttttgtctttgttgaacggtttaatgatttgatgtgttttaggtttttttttcatgtgtcttgggcagcagctgcaacgaaattttttaccgttgaagcagttgctatgctgagtcaggttgctaactttagtgtactgctgtagatggatgggtcacagcggtttggttattatggttttcttggtctgctggtatttttttattcctgcatgaccaagctagcttcaactcttttttttctttttaaattgatagaaaacaaggtagcttcaactacttgtttgcagtctcgcatgtaatttaagtgccttaatgcaagttttaaaagttcttgt

SEQ ID NO: 15240 - DNA, 320 bp, Glycine max
gtaaaggggcagatgacctcgatcatctctgtgagccaacagacgtggtcctctcgaaggcaaaagactctgacagtctttgaaaggtaaaaggcacatgttgttgatagtctctgcatgacaaaagactctgatagtccttgaaaagtaaaggagcagatgaccttgattgtcttcgcaagacataagactctaatagtctttgaaaagtaaagggcatatgaccttgattgtctctgcatgacaaaagactctgatagtctttaaaaagtaaaaagcagatgaccttgattgtctctgcatgacaaaagactctgata

SEQ ID NO: 15241 - DNA, 521 bp, Glycine max
caaaaccaccaccttcccccgagagcacaatccgccaccaacccatcaccggaaccatgctccgcctcctaaagccgcaaccttttccctccgggcaccacctcatccaacgctgcgccgtgagcggcaccgcaaagggcaaagcgaagatcaaagcaggccaagcgctaaaacgctcccgcatcaccacgaagaaacccggatccgcgaccgcaggcccacccatgtcgcgtgagcgccaagaacgtgagcgcctctacgaacaatgccttcaagccccaacccctctccgccacctcacccaaaaggagcgcgaacgcgaagcggagcgcgagaaattgggcctcatcagcaaggatcggcagcgagaaatcgacatgatgaagcgaaaagacgacaaatttaaggtttcggagaagcccacgattattgggacacctgggttggattacgtgagtttaggtttggtggatgtggacaagttgccgaagtatgatttgacggtggaggatggagaggtg

SEQ ID NO: 15242 - DNA, 620 bp, Glycine max
cggctcgaggctcatcatcaggtgaaggaatttctttaccagagcatatgcagtttaagacatgcacaaatgatgattatgaaaaaggaagaatttctgctatgcacctaatgaaagataagttttgctctatctatgaccaatctgatacacgttctgtatttgatgatttgaacctccccactccacaagccagggtaaatcaggaacatcagaaaaattacattgaacaatccaggttcaaaagcaggtgcatacattttgaggagttaccctactactctgggaagaatgtttctgatttactcttcccgcaggagcagttttctcaacactatttttctggttgtgggaatggggttgacaacactgttttgcaagatgtgacagatacaggtggtgacttccctcttgatgaatcatatggacaagatcctgataatgatattggaggatatccaaacaccagtgaaagccatctgccttgtacttcaacagaagatactaaatttgtcaatggattgaattctttagacacaccatgttcagacatcaatgttgaaaaaatagagtctgttaaaaatgacacatcaagcaacaatttctgtcaaaatgatgat

SEQ ID NO: 15243 - DNA, 413 bp, Glycine max
gaaattattgttattattgtaataatttcatgaatcccatgcaggtggcatagcttaaccaaccaattgtggccactgcagacaacatgtttctgtggccactgcagacaaaatcttaatttgttcaccacagaaacatgttgtctgcagtggacaaattaagattttgtgctagtgtgttgttctgttgggagttgcgtcacggtggaatcattcatgagtgatggtaaggtaaatattagtggtacctactactagggtgaggcaatgtttattaagaattgggttttgttaattggtgttcttagctgattgattaagaatattatattattggagtgtgagaagaacttgcttgctacatatgatatgattaaatagtggaatcaaatcacatagtggcatctatgcat

SEQ ID NO: 15244 - DNA, 492 bp, Glycine max
  unsure (1)..(492): unsure at all n locations
gggggcccgagggtggttttgctaggggaatgtttactagaggatcaacagcaatttccaatttaccaatatctgatgtgcttcctgtccatggagactctcatagaatgaatacaggtcttaatggtcacagcaatttatcggagcgcacaccatatagctcaagggaggatcatgtttcaagatatggtactgataggtcttcagggccatctgcttatgatcaatcaagtgctccagagcgtaatgtaaaccatggcaacagaggctggaggagtgcagatcggaatcttgaacctcctgctcatttgcaagggtcaatggtctctcagaatgcttcttcagagaagatttggccagaagaacgactgagggacatgtccttgtcagcaataagggaatactacagtgctagagatgagaacgaacttgctttatgtgtcaaagatttgaactcttcgagcttncatccttncatggcttctctatggg

SEQ ID NO: 15245 - DNA, 808 bp, Glycine max
gccttattgctgcacttttggcaaattatgttgatgattggatggaccctgtcggtgctatcattctggctttgtacaccattcgcacatggtcaatgacagtgttggaaaatgttaattccctggttggaagatcagcagcaccagaatatcttcagaaacttacatacctatgctggaaccaccacaaggctgtgaggcacattgatacagttcgggcatacacatttggatctcactactttgttgaggttgatattgtcctgccatcggatatgcccttgcaagaggctcatgatattggggaatcgttgcaagaaaagcttgagcttttgcccgagattgagcgtgcttttgttcatcttgattatgagtacagtcacaaacctgagcatgctcaagcacactcttagcagcaatcaggaaagcactgccttcttgtttatttcagttgccctttcatctcccgtcagttgtaaatttgaaccatttctggttgttcagaatctgaacttaagtgcaagtcactgagaagttgctagctatcaatctcaactttctggcagccctgataatattccaaatgtatatcacgataggcttatcaggcaagaccctttcagattccatttaggggaaatagaatttgctaccttcttttccattcccccttttttgtacagtgcactctttttaccttaattcaggatttaaggtgtgtgtgtgctggtgtttgttaatttctaacatgtgcaagtatataatataatacaatggagtggatttcttattaaaaaacagaaactgc

SEQ ID NO: 15246 - DNA, 652 bp, Glycine max
acgaggggttttataagcaaggtttgaggcatgggtttggggtgtataagttttacactggggattcctatgctggtgagtggtgtaatgggcagagtcatggggtgggggtgcaggcttgttctgatgcagttgctatgttggggagtttaagtttggggtcaagcatggacttggatgttaccatttcagaaacggagataggtatgctggagagtactttggagataaaatacatggctttggtgtctaccactttgccaatggccactattacgaaggttcatggcacgaaggtcgtaggcaaggttatggcatgtatatgtttcgaaatggtgatggaagatgtggtgaatgggatgctggcaacctcaaactctctctaccaccacaaaatgatgctatcattcgcacagttcaggctgctaggaaaacagctgaaaatgctataaatcttccccggaaggatgaccacgtgaacaaggcagtaattgctgcaaacagggctgccactgctgctagagttgctgcagtgaaagctgttcagaaccaaatgggtggaaaattttgcgatattgatgtctgagtttaggtgttagctagcttttggttgaaaattggaaatttttactaatagtaccagttttaagta

SEQ ID NO: 15247 - DNA, 284 bp, Glycine max
atctggtgttagaatggatagttcctctcatcagcgcctccccgtcaacgaaaacgacccagaagacatgcttctctatggcatcatcacttcatgccaagaaaaaaaagtgaccatcaaccaagagcaagtgaataagaagaggagcagcttccgcggcgtgcggaggcggccgtgggggaagttcgcggcggagataagagactccacgcggcatggcgtgagggtgtggcttgcgacattcgacaaccccgaggccgccgcgctggcgtatgaccaagccg

SEQ ID NO: 15248 - DNA, 342 bp, Glycine max
ccgtaatggaaggcctgatgctgaatatgttaaatggaggtggcggccaaatgggtgcataattccaagtttgaatgcaactgattttctggagaggttgcgtgggcagaggctagtttttgttggggattcactgaacaggaacatgtgggagtcacttgtatgcattctccgtcaaagcatcaataaaaagaaacgggtttttgaaatttctggaagaagggaatttaagaagaaaggtgtctatgcttttagatttgaggtgagttttctaatcacttctatgatgtttgtgtatgtgtagtgtgaaaagtgaatcttgcatgggtatggggctgacta

SEQ ID NO: 15249 - DNA, 422 bp, Glycine max
ggaagcataggcgagtagacaaggggaaggtgtggttatcaaaatgcagcttctcctttggaagagtagggatagggacaggtctaatggcggtgctgaagaagtttgcttgttcaacaattaccttaacacccaattgatcttcggtctgggctgcaattgaaatgctgaagctctacgaggcttataagtgaatccttggtatctttctcataatctttgtccttgtaaaaggtcattcatgacatacaggaaattcagaatttgtcgctacttgctaagcatttagtttagcactacccttctgcttctgccacaacatataaagatggcagctcgagtcaacgccgtgacaagtgagaaactgactgaaactgattggatgaaaaatattgaaatctttgaattttgcatgagaattt

SEQ ID NO: 15250 - DNA, 294 bp, Glycine max
cacacattcatataatcatctctctctcactttctgtgaggaactgacaatttgtcaccaactttaactttactacttacctgcccaattaactatgtcatcgtcatatgccaaaaagcttcccactttaaagttaaccataaagaataactctctgtgaaagaaaaaaagcagcaaccaaattgatcttcggtctgggctgcaattgagatgctgaagctctacgaggcttataagtgaacccttggtcgttcatgacatacaggcaattcagaatttgtcgctacttgctaa

SEQ ID NO: 15251 - DNA, 982 bp, Glycine max
  unsure (1)..(982): unsure at all n locations
gcnctactcctccgcccaaggttgattcctttatgcagtttgctgataaaggtattgatgataccagcatctcttttgggcctgttgaagctactggaagaccaacactgaatcttgagagaagtttggatcatgatggacatcctcttgccattaccacagctgatgctgttgcagcaagtggagtccctccttggaattggagagagactcctggaaacggtggagaaagtcagtcatgttgtggaagggttatatcagttaaatggggtgattatacaaggcgaataggtattgatggcaccccagaagccattaaagaagcaattagggctgcttttaggttgagaactaaacgtacattttggttggaggatgaagatcagattatcagaagtattgaccgtgaaatgcctttaggaaattacactcttcacattgatgaaggaatggccattaaattacctctctatgatgagcctgaccatatacctgtgcatactgaagataagatattttacactgaagacgatttccgtgattttctgacccgccggggttggatatgtctaagagaatttgacagctacagaaatattgacaacatggatgatcttcgacctggtgccatatatcgtggtgtgagttgaaagcaggtacatggtgtggtcaatgttcagctaccataaaatgtctggagaactgtggtggggactgttcagatctttgatgtatgtgcggcactaacctggaattgtatttgttttaagttttgataatgctgtttatagttttatataggaaaaggaactagtccctttgcacaaattccgttccaatcattggccttaacatgtctgtaaatatgcatttgcagtgagaacatattgtctaattttttagtggatcattttcatcactcttaactctatgtagctaagttggacagatgcatattatgaagcacacacctttcttgttc

SEQ ID NO: 15252 - DNA, 1399 bp, Glycine max
cgaggatgcatcggaacggggccctaaattgcagtttgacctagagaggccgagcgagagagcgagggagcatggaggagggaaaattgagagagctgaagcaattcatagagatatgcaagtccaatccctcacttctccacaatccatctctttcattcttcaagacttatcttctcagcctcggtgctcgcatccctccccaacccaaaacggaaccaggtgattttgatgacaagtcagatcctcctttatccgcacaaaatgacattgtagaatctgatatagagttggataatgctgatgttgttgaacctgataatgaccctcctcaaaagatgggagatccttctgctgaaataacggaagaacaaagggatgctgcacaactagcaaaatcaaaagcagtcgatgctatgtcacaaggtaatttggatgaagcactggcccaactgacagaagccattttgttgaatccgcaatcagctatactttatgctactagagctagcatctatatgagattgaagaaaccaaatgctgctatacgtgatgctgaccctgccttgaagattaacccagactcagctaaaggctactaaatacgaggaatgtcaagggctatgttgggactatgggaagaagcagcaagtgaccttcacgtggcttcaaagttagattacgatgaagagattagtatggcacttaaaaaggttgaacctaatgcccttaaaatcgaggagcataggagaaaatatgaacgcttaagaaagcaaaagcaacagaaaagagctcctatcaagactgaagctcctattaagaaggagcaagaaactgaagcccaagtacaagcagcattatctgctttaaaagatgggcaagtcatgggtattcactctagtggtgaattggaaaagaagttaagtgctgcatcaaagacatcacgcttggcgatcctgtattttactgcaacatggtgtggcccttgtcgcttcatttcccctatttatacaagcttggctgaaaagtacccaaaagtggtttttttgaaagttgacatagatgaggccagggacgttgctgcaggttggaatattagcagtgttccgacatttttctttgttaagaatggcaaaaaggttgacagtgtggtcggggcagccaaaagtacccttgaaagcaagattgcccaacatgctggctctctttaagtgaatcccttataaaaaccctgatacaattaacattttcttgtttcttgttttaacatgtccatagtgtcatccaaaggcaaaagatcaaattgagttccaatgtgttatggcttggcgtttcctctgtctggttgcatggacaaaatgttgtattgatttgtaataagtttcatattttccacccg

SEQ ID NO: 15253 - DNA, 378 bp, Glycine max
tatatcaatcctggtaattgaagatggattaatattatcgggcgcagttggatgttggtattttcaaattctggaacgctgtgaacagtgactgtatgatttgaaaatgtgaaggactgtatctaactcaaaacttaagtctcaaaataaataatgcacgagaggtttgcatcttttcatgttagattgttgtagtcatattgcaatagtgcttctccttttcatgtacatcatcattggtggagattggatacaaagatcaatagcatgggcttgttttcaatcttaaccgagaggattaagactcttatttccagctgatcttgtcgacaatacattttttttaatcaagaaaacctgctttatttacttgctttt

SEQ ID NO: 15254 - DNA, 429 bp, Glycine max
taggaatcatcaattctttgtaactttgtattaacgctgattttttcttcaaagtcaccgtttaagccttgcacaatttctgtcttcctgatgtcatcttcattcttgtttttaactacaggaaggtgtacaacaacttgttcttggtttatacatcatcaggggtgacaacatgtatgtcccttactctatcatttttaaatttgtgcatcatttagatttcattttgtggcactatttatatacactaaaaaatgtatggtttccgtttggtcattgcagaagtgttgttggtgaactagatgaagaactggattctagtctggatttgtcaaaactcagagctcatcccttgaaacctgttatccattgaggtgaaatactatgtgatggatttaatgaatgcatgcctactgggtggaaagagtc

SEQ ID NO: 15255 - DNA, 434 bp, Glycine max
tctttgggttcctgtaggaggcggtggatgggaggtctgaggtggggccctatgaggcgggagtaggtgaccaccaggaaagcggcggcgacgacgacgaccattgcaatcaagggcggactgaagtcaaccgccggcgagtttgacggtgggggaaagaaagacttgtggaggattggtgttggtgttagagatggagatggggcccaatgaggtggctgagaaggagccatcatgatgatgagaaaatggtaagaataaacaaaaaagagatgaatagggttttagtgctacaaacaaagcagagagagagagagagtgcagttgggtttaatgcagatagatacaaacgttgacttgtggttgtgtgcttctttctttttattttcgtggtggctgctctgctccacggagacacgtcggcgttggtgaag

SEQ ID NO: 15256 - DNA, 380 bp, Glycine max
cgaaaaagtagcgaagatggagagggagaagaagagacgtttggtattggttcatggagcctgccatggggcgtggtgttggtacaaggtggctgctttgttgaaatccaatggacaccaagtcacagctctagacatggctgcatcaggcatccatccaaagcaggtacacgacctcaattcaatttcagaatattttgagccattaatgtactttctagggtctttgccaacagaggagcgtgtaatccttgtgggtcacagctttggtggggcatgcatatctgtagctatcgaaatgctccctaccaagattgctgctgcggtatttgttgccgcttggatgccttctcctgacctaagcttttccactctccttc

SEQ ID NO: 15257 - DNA, 418 bp, Glycine max
ttaaaaaagttgggatatgccatggtattagtgggaatgcatatgtctttctgtcactggaccaacttcccgggtatgtaaagtacttatacagggccaaagcttttgcttgctttttgcttgccagagctcataagttgatatctcgaggggaaatgcatgggggtgatagaccatattcaatgtttgaagggctagggggcatggctcacctctttttggatatgagtgatccttccttgtctaaatttccagcttatgaactctgagaatctccttgttttggaaaggagacctatgtataaccgtgtctcatatgaccaatgtaaatgttgtcaaaataacatgagtcagtcttggtagggatatatatatactttttatgaagtttgagttatgtgagaaccttgtgcttttt

SEQ ID NO: 15258 - DNA, 580 bp, Glycine max
cgcgacgtaagctcggaattcggctcgaggagagtatttgtatccaaaaaataggtgaaccacgtctcaaactattctcctttattcatcatcttggttttgcttgtcaaaggtcaaatagaagtgcaaggagatttatgtgtaaaagctttgaattattgtgaaacccaagatgattgtaaactaaagtgtatagccccgcgcaaggatgggtttgcgtattgcgataacacacacacgtgttcctgttttttctattgttaattaggcaagctttgaaaagtgctattttccaccttctcgctaagccaatctgcaaggcttagtaagcatccgctaagcgcatcactcatgggctaagcgtgaggaagactctggaagaagatgagttgtacaggttcactaagcgcaccgcttcagttcatccgctaagcgagaaaagcatgtgctaagccaaaattcactaatatacgctaagagagccataattgcgctaagcgcacgagcacgaacaatgccacctatttaagcctgaaatcagattttagagcgggagtttggactgggattcggagcttta

SEQ ID NO: 15259 - DNA, 456 bp, Glycine max
ttcatgatatcgccgtttgaacctatgtcctgctgcgtcctgattcctgggttgatgcaagtgaaaaatttctttaatgcagaactaaactctagattcccccccccccaagttggattatctttccccttttcatttgaatgcacttcttcgtttgctcgtctgttgtaaattagtttcttccgtggcttaatgtttgacggcgattcttgtttgtggtctgtcttatgtggacacaattcctagcagttacaacataatgtcatttgagtggtctttggccccctagcaggttatctgtaccgttacaaattaatggtccacacatacaggatttatgtacttttaggttattagcataatagttgaacaattgaattaataaattaattatgttatgaaatgattaatattgttatatgcaatattaaaaattttaatgtaaatttatataat

SEQ ID NO: 15260 - DNA, 786 bp, Glycine max
  unsure (1)..(786): unsure at all n locations
gcgnncgtaagctcggaattcggctagagggcaacctcatctttgtcttcaattttcattggaacaacagctattcagattacagagttggctgttcaacccctgggaaatataagattgtcttggattcagatgatgccttgttcggtggcttcagtcggctcaatcacactgctgagtacttcacctcagaaggatggtatgatgaccgacctcgatcctttcttatctatgcaccttctagaacagcagtggtttatgcccttgcagatgatgttgaacctaccctagcagatgaagctgaacctgccctagcagatgaagctgaaccagagccagttgatccttgatgacaattttctgggatgctgaaatgttacaagtgcacaacggcatggatgcagtaaatccctaatcaaactagccaaccaacgtctggtggattaaccgacactgaaacaacaaagaagctgaattgaagtggaataaataaagcgctagttcatctttagttgagagcaggagactagcctcgaaatcttgtacatgtgccttgctaggtaataagttgtgatatcacacccatcttcctgtttttactttttaggatttaacgtcttgacatgtataagttgcgtcacgattgacaaatgtgaatcaacaaagctatggtccgcgaacctgagactcaatgtacctatgcacgtatcaatcttcataaagtgcttactctgtttaagagttggaaggatttaaaaaaaaaaaaaaaaaaaagggcggccgccg

SEQ ID NO: 15261 - DNA, 619 bp, Glycine max
gtccgtgtctctttctctcttctattactagtagtaatatatctatgttttcttgcacaaccaaactcgtcactctgtggtattaattcaatattcatagacttcactgtctgattgtctttgtttaataccatataggattcattaaggattctctaatgttggcacaaatggacatggaggagcttgtctcatgtaacaacaacgatgccaccaacatagccaaagggaagcgcacaaagcggcgcttgaggcctttgtctccttgtgctgttgtcgctgctaccactatcaccaccaccaccactgctatcaccgctatcaccaccgtcatgacatctagctgttcaagtgcttctgccggtggcggtggatcgtcttcatccaccacctttgaggacgaagaggaagacatggctaattgtttgattctcctagcacaaggaagagtaggacgggaccctcctcatcatcacaaggacctatgtggtgatgtcaagacagagaacggtagcaccaaagttgatcatgtatatgtttatgagtgcaaaacatgcagccgaacattcccttcttttcaagcactaagtggccacaaggcaagtcacaaaaagcccaa

SEQ ID NO: 15262 - DNA, 500 bp, Glycine max
actgggatatgatcacaattatgtgcttgattgtggggaagagaaagagggtttgagacatgctgcaaaagtgagggatccatcaagttcaagagtacttaacttgtggacaaatgcccctggtgtgcaattttacactgcaaactatgtgaatggtgttcaaggaaaaggaggtgctatatatggaaagcatgctgggttatgtctcgagacacagggattccctaatgccataaaccagccaaattttccttctgttgtggttcgtccgggcgagaagtatcaacataccatgttgtttgagttttcacttgagtgatgtttgttggagtggcatagcaatcaggtagacatcttgatctgcatattatgatttagaacctgaacgttagtaggcttctcctgaaataaacacttgtttgtgttcaaataattgaatgatcatttcactgtctccctttgtgctgttttatcaattctaaaagttgacattatattgc

SEQ ID NO: 15263 - DNA, 672 bp, Glycine max
gacatcacgtcacgtaacaatactaatatacacgcccgcacctctctcacaagtctcaccaacttccactctcatcaatgactctcaccaatgctttcctcgctccttccttcgccgttcacggtggtagggtttccgatccgcgctccattcctcttttctctcttccctccgacgccttcttccgctccccaacctccctctccagggacaagaacattctatatgcttctgcttatgatttgaatgcagttggttcagcttcactgcaatctggtgacaatcctgatagtcttcctatgccaatagttctaatagatcaagaatcagattctgaagcaacaattgtgcagcttagctttgggaatcgccttggagctcttcttgacacgatgaaagcattaaaagatttgggattggatgtttcaaagggaactgtctccacagagggattagtcaagcaaacaaaatttttcattacacaatcagacactggacgcaaagttgaagatcctgatatgttagagagggttcggcctaaccctttattaacaatctgttgaaatatcaccccggctccagtgaactacccgtggggagaaaattgttgtgcaaagggctccaaaaagatacttgatgatgatatcaaaactcgtatacaagttaaggaag

SEQ ID NO: 15264 - DNA, 286 bp, Glycine max
attattttgattttcattacatcacgtaacaataataatacagccaagcacgcacgcacgcacccacaggcacaagtctctccaactcaacttcttccactctcactaatggccctcaccaatgctttcctcgctccttccttcgccgtccacggtgttggtagggtttccgatccgcgctccattcctctcttctctcttccctccgacgccttcttccgctccccaacctccctctccagggacaagaactttctaaaagcttctgcttatgatttgaatgcag

SEQ ID NO: 15265 - DNA, 208 bp, Glycine max
cgcacccacaggcacaagtctctccaactcaacttcttccactctcactaatggctctcaccaatgctttcctcgctccttccttcgccgtccacggtgttggtagggtttccgatccgcgctccattcctctcttctctcttccctccgacgccttcttccgctccccaacctccctctccagggacaagaactttctacaagcttc

SEQ ID NO: 15266 - DNA, 932 bp, Glycine max
aaacccgggcccgacccacgcgtctcgcttgacatccccttcaacttctattctcttttgaaacacttagaaaagaaaaaaaaaatgtctgcgttccttttgcttttcctagttttttcttctcagttgatcggtggactcaatacacctctaccatctccaatctatggaaacctcgtaaccattctcagcatagatggaggtggtataaggggtatcattccagctgtagttcttgaccacttcgaaaaggctcttcaggcatgggataaaagtgcatcactagcaagttattttgatgtcatagcagggactagcacaggaggactcatgactgctatgctcactactcctcacccagacgaccccactcaccctctgtttactcccagcggaatcatagaattttataaaaaatacggtccttctatattcaatgaaactagtggttgggataatgcattcccgggtcccaagtacgacggcaagttcttacataataaagcacgtgagttgctgcaggatacgcgattgagccagacactgaccaatgttgtgataccaaccttcgaccttaagaaacttcacccagttatattctcaaactttcagctgaagacagttcctagctttgatgcgaagttgtcagatatatgcattgggacctcagcagcaccaacttatcttccaccctattactttgagaatgatggcactgaattcaatttggttgatggtggcgttgcagcaactaatccggccatggctgctgtcaatgaagtgataaagcaacagaagctgggaaagaatctcgacatcagttataaaaagtcaaatgaatataccaaaatcctgttattgtctataggctgtggaactgcgaaggctgtgggttatgatgcccaagttgcagatcagttctcagcaactgt

SEQ ID NO: 15267 - DNA, 306 bp, Glycine max
ctgatagtttctcacattctcaactgcggatatggggaagaaactcatgcatgcggttcagtatgatagctacggtggaggacctgctggcttaaagcatgttgaagttcccatacctactcccagcaaagatgaggttttgattaaggttgaagcagctagtataaatccatttgattggaaagtacagaaacgcatgttgtggccacttttgcctcgcaagttcccacatatacctggcactgatataactggagaggtcacagaggttggtacaggtgtccaaaagttcaaactggtgacaag

SEQ ID NO: 15268 - DNA, 303 bp, Glycine max
ggaatgcttgatcaaattatggatcagaatctggtggggaaagtcaatcctgcttctcttaagaagtttggggagacagctgagaagtgcttggccgagtatggggtggatcggccgtctatgggcgacgtcttgtggaatcttgaatatgctttgcagcttcaggagacctcatcagcactcatggaacctgaagatgacagcacaaaccacattactggaattgaattagcacgtattgagccttttgataacactgttagtatgatgagatggcggcatctattccacagatgatgatgc

SEQ ID NO: 15269 - DNA, 414 bp, Glycine max
aaaatgagaaggatcaagatacctgtaccaccagctgatgaaagaaaaaaggtaattgaagatgttgacaaagatcggtgatatgccattgatgcagcaattgtgcgcattatgaagagtaggaaaattttgggtcatcaacaactagttttggagtgtgttgagcagttgggccgcatgttcaagcctgatatcaaagcaatcaagaagaggatcgaagatctcatcactcgggactacctggaaagggacaaagataacccaaacaccttcaggtatctggcataaatggaagttactaatgtatagagtggccagtgttatggcctgcaaaaagcactggggtttgcctgaatttaatttctagggaagtacagttgaaaatgcttaaagttacacaattctgtaaatgat

SEQ ID NO: 15270 - DNA, 461 bp, Glycine max
caaagttttatattaagaaaatccagttaaatgactcaaatctttgcgatggccatttgtttagggtgaatttgtttaaactaagtaactttaaaataagtgttttttatataagcgcttttttatgaagtagataggatttacttcttaaaataagcagaaatagtttagacaaaacacactaaaaaatcaaaaaaacttcttattattaaaacaagcgcttatttccaccaataagtttaaacaaattggcccttaatcttaaaagaaaaaggggttataggatatagcttgtttttaagacccttaattctcagaagtttttttccatataaattgctgagaaaaactctgaaacactttttatttttgagtgtttttttcttctgaaaacttaataattataaattttattaaacatatattttgattaaaaagcatttttttcataaagacaacac

SEQ ID NO: 15271 - DNA, 797 bp, Glycine max
ggtgaatgaccaagagattaggaacatgatcactatccaaagtaatgctcccacaagggacagactccaatggtgaaatttccaccgaggacgccaactaggggcatctagaagatcgagaaggaagcaggataagttgacaccagtgtaacatagaaggaaaaacatagttacagttggagtgataagatccagattcccaataacgacacacccaatgcataagaaagcagtaaaaaaggtagcaacatgtggttcaccgccatctccaactttaaagtagttcaaaataggtaaaatatcatcattggctattgctgcaagcagacgtggggcaccagtcaggctctgaagagcagcacccatagttgaaagaataacgccaattttaattaatgaaggaaaaggccaggcaattgtagctgtaagtagcctgtcagttaaaagcttctctctggtggcaacagcgccaaaaaatgttccctgtcatcccaaacttgcagattttgctaactgtatgaagaagaaaggtcggggaatgtccatatttgtctctatactagatggggattaccatgaatgtgctgaagatgccaagactgcttgcaaacaacttagcacctacatcgattacaaaaattgtgaaggtgtggctgagattgttgttgcccctaacatgtctgaaggcttccgtggcattattcagacaatgggccttggcaatctcaagccgaacattgtggtgatgcgttatccagaaatttggcggagggaaaacttgatagaaatccctgcca

SEQ ID NO: 15272 - DNA, 283 bp, Glycine max
gcaagccaagtgcacccgaagaattggtatccaattccactggtattttgccgaccctggggcaaactgccagaaaatgttccctgtcatcccaaacttgcagattttgctaactgtatgaagaagaaaggtcggggaatgtccatatttgtctctatactagatggggattaccatgaatgtgctgaagatgccaagactgcttgcaaacaacttagcacctacatcgattacaaaattgtgaaatgtggctgagattgttgttgcccctaacatgtctaaa

SEQ ID NO: 15273 - DNA, 418 bp, Glycine max
attaattacttgtgagtgtttccaaaacacatagagcaatatggtaagatccggggactaccgcacccacgtttcagaagttgagagggagtctagtaccgttgaataccctaatgctcacgtttccctcaacaagaaggttgtttacgaggaaagtgagatagagggttcccaccaccaccaccaccacctcttccataggcaccaccacccagagactcgtgagagtgttaaggtggtagagtatgagcaagttcctgagaggcgcgtcgctgaagttgtctacgaagagaacaggacagtgtggccttgaatggcttactagctagggttgaacttcttatggtgtttggctactttgctaagcaggccacctagtatatcaaaattaatcaccagtgtgcttatattaaataaa

SEQ ID NO: 15274 - DNA, 1537 bp, Glycine max
gtggttccttcaaataagaaggttctgcccgtaatttgacaccaacgaatacgaagagtaagaaccaagcactaagaagagaagaggttcgtcgtgaatatcagtattaagcggtgtgaggcatttgttgatgtagagagcggagacatgggcgagtcaagcgactctgtctccattgacattgatttgattcctttgggaggaaaggaatgcacggttaaaactagtaaaggctccgtgtctgtgcttgtttgtggggatcaagaaaaacccgctctaataacctacccagacctggctctcaattatgtgtcttgtttccagggtcttttattctgcccagaggcagcttctttgttgcttcataacttctgcatttatcacattgatgctccggggcatgagttgggggctgatgtcatttcttcagatgaaccattgctctgcgtggatgaccttgctgaccagattgcagaagtgcttgatttctttgggctaagggaggttctgtgcttgggtgtaacagctggtgcttatgtcctcactctattagctatgaaatacaaagaacgagtgcttggattgattcttgtttcacctatttgcaaatctccttcatggactgaatggctttacaacaaggtcttaatgaatttattatacttctatggtatgtgcggtgtactgaaggaatgtcttctgcagcgttacttcagcaaagaacttaggtgcagtgttcagggagcagaatcagatataatactaacttgccgaaggcttttggatgaaaggcaaggtttgaatgtcatgcgatttctccaagcaattaatgcacggcacgacctcactgagggtctgaaggacttgcaatgtaaaacacttatatttgcaggtgagagtagtccattccatgctgaatctgtgtacatgagctcaaaaatgaaccacaaaatctgcgcacttgttgaggttcaggcttgtggctcattagttacagaagagcacccaaattccatgataacaccacttgagcgtttcttaatgggttttggctaccacagacaaacacatgctgcttcctcatcaagcaacggttcaaatccagcaagccccactagccattcatgcatagcaccagaactcctctccccagagagtttaggaattaagctcaagcccatcagaacccgtgttgatgttcaaatctaactttatccagcaaaaaggttcagaaaccccaacaatacagcagtgaagtgagctaaatcattgcacataatataatatatagctagtgtaggatatattctttgattaatgattatgttggtggactaattatattgtttgcaaaaatgggtgtttttcctaccaatgtaaaaaagaaagaaagtaggggaggtatcttacagttcacaataggactattctttttcctaatgttgattttttgagataagatctccccccaaagtcaatctgttctgcaaaaattcaggtttatacaaacctcaagcgataaggactgtttgctact

SEQ ID NO: 15275 - DNA, 792 bp, Glycine max
tttcactccaaaccttccttccttccttcctttgctccaaagaatgggagataacaatgtcaacctcccacccgggtttcgcttctaccccacagatgaagagcttgttgttcatttccttcaaagaaaggcaaaccttcttccttgccatccagatgtcatccctgatcttgaactctacccatatgatccttgggaacttcatggtagagctttggcagagggaaagcaatggtactactacagcagaaggacacaaaatagggtcactggcaatggttattggatgccaatgggaatggaagagccagtggtttcaagctcaagcaataagagagttggcatgaagaaatattatgtgttccatttgggagaagcccctgatggtaacacaaccaattggataatgcaagagtatcgtctattagattctgattcctctagcagatcatctaaaagaagatcacaacctaaaccggaccataataaatgggtgatatgtcaagtttatgaacaggataacgatgatgatggtgatggtacagaactctcttgtttggatgaagttttcttgtcattggatgatcttgaagaaataagtttgccaaattagatgattatgcaagtgatctagttagctgcattttatatccaaataggatattagtttaagctaattgttgttatcattattattaatattgttatttactggttgtagttaaatgcattagcagtttttagctgccattgtaatcagtgaagtcgctatagctagatttctatatagca

SEQ ID NO: 15276 - DNA, 698 bp, Glycine max
tttacgcgtgggcgaccgtctcagaagcaattaatcatattcctctctcattctcactataaacacaaaacccttcccatcctaattaaggtgaaaatgaaggcatcacccattgcttggttcactttggtggttgtgtttcttgtggctgaagttcaagtttcaatggcagtgacatgcagcccagtgcagctgagtgcatgtgtaagtgcaataacctcttcaacccctccatcaaacctatgctgctccaagatcaaagaacagaaaccatgcctctgccaatacctcaagaaccccaatctcaagaagtttgttgactctcctaatgcaaggagagttgctagcacttgtggaactcccttcccaaggtgctaagtgttaataaattggaagaggttttaatttctctgcctgattatgcatcttgatatctatccaagtgtttggccagagactagagagtgaaagaaaattatgtgttaattgttatcatatatatatatatatggtgtggtttaaggtctctatatatgttttaatgttagtgagattaagtattagtcctaatggatatgtgatgctttggtttcatgtcattccatttcagttccttggtgtggtctcatctcacgtaacgttaattagttgttgcaaaaggctgtatttataattcaaagaagtatctgtttctgatc

SEQ ID NO: 15277 - DNA, 726 bp, Glycine max
aagcccggaatccggttcaggaccatattctcctttcattctcactcaaaacacaaaatcctaactaaggtgaaaatgaaggcatcacgcattgctttgttcactttggtggtgcttctttttgtggctgaagttcaagtgtcaaaggcagtgacctgcagcccagtgcagctgagtgcatgtgtgagtgcaataacctcttcaacccctccatcaaacctatgctgctccaagatcaaggaacagaaaccatgcctttgccaatatctcaagaaccccaatctcaagaagtttgttgactctcctaatgcaaggagagttgctaacacttgtggaactcccttcccaaggtgctaaggtgttactaaatttgaagtggttttaatttctctgcctgattatgcatcttgatatctatccatgtgttctggccagagaccagagagtgaaagaaattatatatatatgtgttatcatatatatatatatatatatatatatacatatatggtgtggtttaacgtctctatatatgttttaatgttagtgagaatactagtcctaatggatatgtgatgctttgggctcatgtcattccatttcagttccatggtgtgctctatctcatcttacgtaacgttaattaattagctgtcgccaaaggctgtatttataattcagagaagtatctgtatctaatcatatgtctcctcttcttatgaaaaa

SEQ ID NO: 15278 - DNA, 425 bp, Glycine max
tcgagcttcaaaccctctctctcttttttctctttctctctttgaagctctgtgagaaaccttaactctgtaattgcaatggctgatgcttctgtggccccaccacctccactgaaagatgagcttgacattgtgatccccaccataaggaaccttgactttcttgagatgtggaggccattctttcagccttaccatttgatcattgttcaagatggtgaccccaccaaaaccatcaaggttcctcctggctttgactatgagctctacaaccgtaatgacatcaacaagcttttgggtccaagggcctcttgcatctccttcaaggactccgcgtgtccctgcttcggctacatggtgtccaagaagaagtacatcttcaccattgatgatgactgctttgttgccaatgatccatctggaaa

SEQ ID NO: 15279 - DNA, 1768 bp, Glycine max
gctgctcgcagcttgcgttgtgtagccattgcatacagatcctatgaattagacaaagttccatctagtgagcaggatttagaccaatggtccttaccagaacatgagcttgttttgcttgctattgttggaataaaggatccttgtcgccctggtgtcaaagatgctgtaaaagtatgctctgatgctggtgttaaggtacgcatggttactggagacaaccttcaaacagcaaaggcaatagctttggagtgtggcatactggcttcaattgaagatgctgttgagccaaatataattgaaggaaagaaattccgtgaactatctgaaaaggaaagagaagatattgccaagaaaataactgtgatggggaggtcttctcctaatgacaagcttttgcttgtgcaagctctacgtaaaggaggggaagttgttgcggtcacaggagacggcaccaatgatgctcctgccctacatgaggctgatattggtctttctatgggcatccaaggaactgaagttgcaaaagaaagctcagatattataatcctagacgataactttgcatcagtggtaaaggttgtccgatggggccgctctgtatatgcaaatattcagaaatttatccagtttcagctcacggttaatgttgctgctcttgtaataaatgttgtggcagcaataacttctggtgatgttcctttaaatgcagtgcagcttttgtgggtcaaccttatcatggatacacttggggcgcttgcactggctactgaaccgccaacagaccgcctaatgcacagatcaccagttggccgaagagaatctcttataacaaatatcatgtggagaaacttgatcgtacaggctgtctatcaaatcgcagttcttctcgttcttaacttttgtggtgaaagtattctaccaaaacaagataccaaagctgatgcctttcaagtgaagaatactttaatattcaacgcgttcgtcctgtgccaaatattcaatgaattcaatgctcggaaacccgatgaaatgaatgttttccgtggagtgaccaagaacaaacttttcgtgggaattgttggagtgacctttatacttcagataatcatcatcgagttccttggaaagttcacctcaacggtgaggcttgattggaagctatggcttgcttctcttggtattggatttgtcagttggccccttgctatagtcggaaaatttattccagttcccaaaacaccattggctcgttacttcttgaagccactcaggcgattgaagaggtctaggtctcgtgctacacaataggcatcgcttcctcaagtggataaccagccatgcatgcatattaagctaacgcctcacaggttacaatatactagtatatattattactgctccatattgccgaaccatccttctagaattccaatgaaatgtatattatccaattaatcccaaagggtttaagcataaagcaatcattacgtgattccttttacttttaacatcatttcattttttggttcagctgtacattgtaacatttctagatattgttagagttgccccttgccactttataaatagtgaaatactatcaaactgactttttagcattggcaaggttcgattccccaaacaaattaaggaaagcatagcgtattttagccatttatatttcatatagattttgttatttagtatgaattcttttatgcggattttttcgatgtgaaaaatgaagaatcgcggtgattgcttg

SEQ ID NO: 15280 - DNA, 534 bp, Glycine max
gctggattacgtggaaaggcgctgagaataactcatgactatcgtgatttgctttgggaatctgccgaggggcattgcgtgcctaatgcaggttttttcgaagatgttgtctttgaggatccttctttgttacaagcttctcatgattctgatttgactgatgctgtcggtgagacatcaattgatcagcacaacaactcaaaaggtgatggaccggaggaatctctagatgtaaatgagttccaacctgattctaaccctgcattgacgatgccaaatggtaatgaaaatgataccgctgctgaagtaactgaaggcgtggctgatctgaatttacgggatactgcctctgctaatgacccagatgaccaacagactctatcaactgcagacgttaattccctgttagataagtgccttcttcaagctttgcacacaacagtgaaggacaaagaccttcccttgcctggaagcactctatggtcaaaccatgtattgccgtgtaggccttcatgaatcactttagacatcaaa

SEQ ID NO: 15281 - DNA, 509 bp, Glycine max
ggtcgaccacgcgtgcgtcacgcgttcgccacgcgttcgtccacgcgttcgtccacgcgttcgagatgactcgctcagagaggagaaagaacgaacaattttagcttcaaacacacacaaacacatcggcatcagcttcatcactctccgacacttgaaactctcatgttgttcctctagaaacctcttccgcaccaccgtggaattttcctgctccttttgcacaaaacacacactctgcttctattataattcatgcttgtccttgtccttgtccttgtgctggtttttttctagatagggtttgcactttttaatcagaactagccaagaccaggtacagaaagtactgtgttagttaaaaaaaaaaaaactttcatcaattattatcaactttattcggtagtgtagccttgtaggtgaactatgtgtcaggattctgaagtttgattctcttttatattgattgaatagttgtgtgtagaaactagaaaggttagtgattatta

SEQ ID NO: 15282 - DNA, 775 bp, Glycine max
atggtgtgtcgcttattcaatcagcacgcaaaccccccaagacgctgaaggagaaagacaggttcttccattggatcttcaagtttactggcagaaagaaggtcggaatgctctttctctttaccatctccgctgctgttttcatctgggttttgtacgttggaaaaggtgaagattcacaggaggggaacagtgttcataacattagtgttaatggaaatatgtctataggtgtttctccatctttgatcgctggtgcaaatatcaagggcttcactacaatttcagttctacctcctcctcccccgagctattttctgggttacactcttccttctggtcatccctgtaatactttcacacttcctcctccaccggcagataaaaagcgaactgggccacgaccatgcccagtatgttaccttcccgtggatgaagccattgcacttatgccaaagtttccgtcaccttctccagtacttaagaacttagcatttatctatgaggaaactcttagcagggatggtgaatttggtggttcggactttggtggatatcctactttgaggcagagaaatgaatcttttgatatacgagagtcaatgagtgtgcactgtggatttgttagaagaactaaacctggccgcaacacaggatttgacatggatgaagatgacctccttgaaatggagcagagtcacagcgtagttgttgcatcagccatatttggaaattttgacgagataaacgagccaacaaatataagtgattattc

SEQ ID NO: 15283 - DNA, 549 bp, Glycine max
aaataaatcatagaacacttacactttagaagcgcataatgaagagtgcgatttgtgggagaatcctctctcccaaccacgtcttcaaaccaggttcttctccctgatttcgatttcgatttctttggcacttcgacactggtttcttctgctttctgatgagaatttttttttttaacgaattaaattctttaagtgttctttagtttctggtgtttagaggagttggggtttggttattatttgttggggttctcattgtgttctttagtttaccctaaaattgaaaattttcaatttttttcttgaatttgttgactggtgtgaatgttttggcaatcagaagtagttcacgagcttcaattctttgattaagttacaatctttgggaattgggttagcataatgtgtttgatttcatacctcttggtcttccctttctagaattgcggttgtagttctattttatgttttttgctctgttctatttctttaagaattttttgttcttagagaagtgtacctgattgggaagattgatttttagtt

SEQ ID NO: 15284 - DNA, 763 bp, Glycine max
tacgcgacgacagaaggggaaacgaaaagaaaaaataaataaatcaaagaacacaaacaaagaagaagagcaaaatgaagagtgcgatttgtgggagaatcctctctcccaaccacgtcttcaaaccaggggacacacattcaatttgtaaaggaccatactccaatctttgtgtacccatggttgtattggcaacagggcctggtataggaggtggggtgctggaaaagccagttattgaaaaagtcacccctggccgtgagtctgaatttgatttaaagaaatcacggaaatcggcaccgccctatcgtgtaatattgcacaacgacaactttaataaacgggaatacgtggtccaagtgctgatgaaggtcatccctggaatgacccttgataatgcagttaatatcatgcaagaagcacactacaatggattgtcagtggtgatcatctgtgaccaagccgatgctgaagatcattgcacgcagctaagaggcaatgggttgctcagttcaattgaacctgcaagtggaggctgctgatggcaagtttcactttaaatctcactggcttttatgctattgaaaggtgagatggaactatttgcaggtgtacataagttccctcctcttgaaggccttagagaaaccagtaaaaagaaaaagatatatcttgtgtaaaaacttggccttatgtgaacaaaaaacctatgattaagacatgtgatagttgtcattttgaataaagaagtgcacaacatatt

SEQ ID NO: 15285 - DNA, 891 bp, Glycine max
cgtgaatcgtataactcactgcaagggtggccatctggcacatcatctcatcatccaaaacagaaacaaaaggagaggcaacgaaataaacaaaaaaaatatataaatataaagctggacccaacaaaatggcagagcgtgtgtcattgcctttaccatctcagtctcaactctctccaacaaccacaatggctctcttgggcgccgcctcctcctccgctcgcatcattccctccgtctcactctcttcctcttctcgctccttcttctcactctcatcctcttcttccaaactccaatgcttgcgctcctctcctcgtatttcgcacctctttctcaatcagcgaagagcggaggttcgcgtttcgagtggaggatacggaactgtgtcggcaccgaagtcagttgcgtctgatcctgatcagttgaagagcgccagagaagatatcaaggagcttctcaactccaagttctgccatcctattctcattcgtttgggatggcatgatgctggtacttataataagaatattgaggagtggccacagagaggtggagctaatggtagcttaagatttgaagttgagctgaaacatggagccaatgctggacttttaaatgcattgaaacttcttcagccgatcaaagacaaatattctggtgtgacatatgcagacttatttcagttggctagtgctacggctgtggaggaagctggaggccccaaaatccctatgaaatatggaagagtggatgtatctggacctgaacaatgccctgaagaagggagacttcctgatgctgggcccccttcacctgctgatcatttgcgtcaagttttctaccgtatgtgtttgaatgacaaggaaattgttgcattatctggtgcac

SEQ ID NO: 15286 - DNA, 295 bp, Glycine max
cctaaaacgattcgactcttcccaaacacaaatcgtgattcgaagctaactggaagggtggccatctggcacctcatccgaaacaaaaggagtggagaacgaaataaccaaaaaaaatacaaatatataaataattaaagcagcctcgacccacaaaatggcagagcgtgtgttactcctcactccatctcagtctcatcactctccaaccacaatggctgtcttgggcggcgcgcctccgctcgcatcattccctccgtctcactctccacctcttctcgctccttcttctcct

SEQ ID NO: 15287 - DNA, 764 bp, Glycine max
ctttaaccttcagatataacagcagactctacctgcggaagacgatccggagccgccacctattcttttgttcatcacatattcaatggcttcctctcttctctctccatcatttacatccttcctccgcaccaaggatctctctctctctgctttcacttctcagcgatgcttcaaagcggtgccaaggaaaataatccgttgtgctattgcggcgcctcagcgccaaccttccaccactggatcagtgaggactgcaatgaccatgactgagaagatactggccagagcttctgagaaggtacagctgacccctggggataatgtttgggtcaatgttgatattttgatgacacatgatgtgtgtggccctggttctattgggattttcaagagggagtttggcgacgatgccaaggtttgggaccgtgaaaagcttgtaataatacccgaccattatatattcacaagtgatgaacgtgccaatcgcaatgtagacatattaagagatttctgccatgagcagaatatcaagtacttttatgatattaaggatcttagtaattttaaggtaaatccagactataagggtgtttgccatgttgcccttgctcaggaaggtcattgtaggccaggagaggttctcttaggtactgattctcacacttgtactgctggagcatttggtcaatttgctacagggattggtaatactgatgccggctttgtgctgggaactgggaaacttctgctccaggtgcccc

SEQ ID NO: 15288 - DNA, 1317 bp, Glycine max
tggataacctttatgggctggtgctagagcccagagttgaaaagcaaagaacagacagcacttactagtccaacagcgacggctgaacctctttgttctctctgtctaagaagaagaagaagaagaagaagaagaagaagaatcaaatatccttgagccagacatgtacaggaacgctgcttcacgtcttagggtcatcagtgcccgttcgtgcagcagcagcaggatacctgccagtgccagatttgcaagttccgttgccacacaacaatcctcttctggtttgggtggtttatttggatggctcactggagaccgatccagttctttaccatctctggatttcccgcttccgggcgttacacttcccccttcattgcctgattttgttgcgcccggaaaaactattattactacactcccaaatggactcaaagtggcctctgaaacatcaccgactcccactgcgtcggttggcttatatgtagattgtggttcaatatacgagactccgataagttttggggctacacatctgctagaacgaatggctttcaagaccactagaaaccggagtcactttcgggttgttcgtgaggtagaggcaattggtggcaatgtgcaggcctccgcttctagagagcagatgggttacacttttgatgccttgaaaacctatgttcctgaaatggtcgagctacttgttgattgtgtaggaaccctgttttccttgattgggaggttaacgagcagcttctgaaagtgaaggctgagattggtgaagcttccaaaaatccccaagacttgcttttggaagcaattcattctgctggtttttctggtgccttggcaaatcctcttttagcttcagaatcagctctaaatagactaaatggtacaattctggaggagtttgttgctgagaactatacagcacctcggatagtacttgcagcatctggtgttgaacatgaggaattgttatctgttgcagaacctctcttgtctgatctacccagtgtcccacgtctagaggagccaaaatcagtgtatactggtggtgattatagatgtcaaagtgaatcagggaggacccattttgctctagcatttgaacttcctggtggctggcataagttgaaggatgctatgattttgactgttcttcagatgctattgggaggtggtggatcattctcagctggtggacctggtaaagggatgtattcacggctatatctcaatgttctgaatgaatatccacaagttcattcaatttcagcattcaacaatatttacaatggcactggcattttt

SEQ ID NO: 15289 - DNA, 284 bp, Glycine max
acgagcccagacttgaaaaagcgaagaacagacaacactgactagtcccagagcgacggctaagcctctttgttctctgtcccaagcttcgagcagaagaagaatcaaatatcactactttgattttgagctctattgcctttgccatcaaccggcagccatgtacagaaacgctgcttcacgtcttagggccatcaaggcccgttcgtgcagcagcagcagcagggtacctgccagtgccagaatttgcaagttccgttgccacgcaacaatcctcttttttt

SEQ ID NO: 15290 - DNA, 584 bp, Glycine max
gcgtacgtaagctcggaattcggctcgagattgattcaagaatgagattctcagcggggtggtttggcatactattgctgctggtggtagaactagaagcaaccacatgtttcactttcaacaaagagaaaaagctgtcagaattcaagaccaaacttcatcaaaagattcaaaagttagctactcctcctttatcagccttggcatcaccacctgcttcctcttcagaaacaaacaagagtgggagggtgttgtacgtgagtgaatatggtgcagacccaacagggtctgaagaaagcagtgatggcattttgaaagctgctgaagatgcttttgagttgcagaagggcgttgagttggttggaggagtgaatgaccttggaagagtagcgattgatttggtaggaggaaactacaatatgagcaaacccattgcattcccttcatctggcggaggcaatgttgaggagaaaggaggaacgctgagagcatctgatccattgcctggtgagcgacatctcattgagctatggtcatcaaactccgggaaacttgaggcaaaagaacctctgaatgctgatggc

SEQ ID NO: 15291 - DNA, 747 bp, Glycine max
ccataatcatttagctattaagagaatatgtttttaatgaccaaattgtcctcaacctcaaatatacttcctcctcttcatgctgcaaacacaaccaacttcttcaaccacaaccacaaccactttgtgcattaaaacccccacccctctcagttccacacaatttatcttatctttgttttccttttttttttttgtttcccctctcatcactctgcaattctctgtctccaaacatgccattttctagtcttggatttgagttattataattataaatgttctgttttttattttgtgttaagtaagctggtttcccaaatttagacattgaaagtggcatatgttttcatttttttataaataaaagtagcatttttttttctctcatttccttcttagagaacttgtgcttacaacgtaaatgactaaatgtagagcctgatttgtgattgtttcattcctgagtacttacaatggaaatatggaatagttggtgggttttgcaaattatgcaatttctgggtttttttagtttttggatttcatttgcaaagtttaggactttattctcaagagcttttggttatggccacaaggttgtgaagggtgactgcagtacttggatctttgtttccttcaatgggttggtcacagttggttctttcatattcttcctcttggtcctttcctgggcttatttatacgcatttcccagttatcaatcattggggcggagtcatgccc

SEQ ID NO: 15292 - DNA, 416 bp, Glycine max
ccaagtgcaggagttctacttctccctatgcattgtttgtgttcttcttctgctttctacaagtccaggcgattctggaccctgccgatttcctcgctctgcaaaacattcgtaaggctctggaagacatgccaggttccgatttcttttccacttgggatttcaccgcagacccatgcaacttcgccggcgtttactgcgactccgacaagatcattgcgctcaacctcggcgaccccccggcgggctctcccggcctcaccggccgcctcgaccccgccgtcggcaagctctccgcgctcgccgagttcaccgtcgtccctggccgaatatacggtcctctccccgaaacgctctccgatttgaagaacctcaggttcctcggcgtcaaccgcaacttcatctccggccaaatt

SEQ ID NO: 15293 - DNA, 1129 bp, Glycine max
ctctccctcttctccttttcctccataattataaaaaccgcacccaaacaccccccttcctctgccacccaaccaaatcctcgatctcgccgaacaaccccaccctttcaaaatccgattttccgatgccgaagaagcgaaagtctatcgccaccagtctcgacgaggtggatcgaaccctctacgcgtcgttttgcaccgccgccaactccctctcgcagctctacacgcactccatgaaccaccagaagctctccttcaacgccggggaacgacacgccctcgaaaaactttatcagtggatttttagacaacaagaaggaggatcacgggttggaacagttgatgtgcttaattacattcagaatgagctggattattgtggagaagaaccatctatgtcacctagagcaccactgcaacaccagtcacaagcagcattgcatgtccctagttttccagtcacttcagcatcttctggtcaaacaatagctgcacaaggactccgctcggaccactgtgaaaatcaatcaaagaattctgtgttttcaaatgctttgtcaagtccagtacgtcgaagccttcaacattatcaaattggtgagggaggatgctacaccaatggtctctccatggggaatggaaaccggaacactgaacctggctttcttaatcagcaaagcagggattcaaatgcagtgagctccaatgattctgccatggatatgcatgcagactagttctgtctattggtttattaattgggaattcttaactcaccagcctttgcaacagctacaaaagaagctaacaaccttcggaattccgtatctgggtttgctcattggatcctgcaagaaacgacaggaggatggaaccaattctgttaaccttttactatgcttacgtcaaccgagcgattggtttggggtcttaagtggtttttgtaaagttttctattcattagctttaaagcattttattttgtaccttaaattggtttaccccttcgccccttcacccaaaagactaatttttaaaatgtaggggttaattctatctgaagtttcgtacgtaaatctgttcttctgcagattttctctaatggcaatctacagcttccgtcttc

SEQ ID NO: 15294 - DNA, 403 bp, Glycine max
  unsure (1)..(403): unsure at all n locations
ctcgattattcccgtgggcctncctcatcagcatgttggagaggctaatccttcagatgacttgactctttttgtggctttagatgaacatgggaaagctgaaggtgttctatttgaggatgatggtgatggatatgaattcactaaaggcagttatttattaacacattatgtggctgaacttaaatcatcagttgttacagtgagtgtccacaaaactgatggatcatgggaaagacctaaacgccgcttgcatattcaattattgctgggtgggggtgcaatgcttgatacatggggaactgatggagaagttctgcaactaattttgccttcggaagaatgaggtgttgaagctagtatctactagtgagaagaattacaaggaccgtttggaaaatgc

SEQ ID NO: 15295 - DNA, 488 bp, Glycine max
cgcatcgcacgcgtacgtaagctcggaattcggctcgaggagccttctttctttttctggtttcatggcatcaagcaacggcaacattcaggcaatatctcgcagccgaaaacatcaaaactcagccgtgacgatcgcccttggccgcaggagggggacccacaagaaacactctggtggtggtgatggcaattgcagttccccagttgtgaattcttgggaaggtggttccaagaaaagtgaggtttctgcgaggaagctcgctgctgggttgtggcagatgcagtatattcaagtctcaagggatcatcatgctgttgttttggaaccaagttcttttctttcctccatgtcccagctggctaatggaaatgcaagatcaaggtttcccattatgaccaacctggtggaaaggtttaagaaaaccagggtccagttaaggaggccattacccattttgcgttcaaaaaacggacttcgatctgagc

SEQ ID NO: 15296 - DNA, 1077 bp, Glycine max
cacaaatggcatgtttatgtgactggtcatagtttgggtggtgcactggcaaccttgcttgctcttgaactttcatctaatcaattagctaagcggggagcaatttctattactatgtataacttcggttctcctagggttggtaacaaaagatttgcagaagtttacaatgagagagttaaagatagctggcgagttgtgaatcacagagatattatacccacggttccccgattaatgggttattgtcatgttgagcgacctgtatttcttgctgcaggggttttaagacatgccctagaaaacaaagatattttgggagatggttatgaaggtgatgttcttggggaatcaacaccagatgttatagtcagtgaatttttgaagggtgagaaggagcttattgagaagttgttacaaactgaaataaatatattccgctcaatcagagatggaagtgctctgatgcagcatatggaggatttctattacatcacgttactagagaatgtaaggtcaaattaccaccaagctgtgtcaaggtccgaacaagatcaaaactatagactataatgatccaacaagggtttgttcttacgaggctggccagcaagtcttccttggccaaccagaagtatacttgtatataaggtgttgagggagaatacatatatttgagatcacatgcaggcttgcagccaattctttactgtgacgaaaatggcagcaatgcagtatgtccagtatagtgtttgcaaatggaaccgaaaagccacgagttactagaggaggactgcaaggagcaaaacttactaacaaattttatagtttaaatattatagttatttgccttatgatgatagaaattgatgttatagcatgcatgtcaaatattcaaagatagaatatatgattcttgttctgatctcaagcatttatagtctcatggataatgtaatttatgttgtaaattaaaaattgttttttttctttttcttgtgggttacatgttactgttggattgtcttgtattattatataatattggtgaaagatttagttgttgaaagattcagc

SEQ ID NO: 15297 - DNA, 1023 bp, Glycine max
atctggcaattatattgcagttgggtcagcagaccatcatatccattattatgatttgagaaatattagccgtccagtccatgttttcagtgggcacaggaaggctcggcccgacgtgaaatttctgtctaatgatgaacttgcttctgcatcaacagatagtacactgcgattatgggatgtgaaggaaaacttgccagttcgtactttcaaaggccatgcaaatgagaaaaactttgttggccttacagtaagcagtgaatacattgcgtgtggcagtgaaacaaatgaagtctttgtgtaccacaaggaaatctcgagacctttgacttcccacagatttgggtcccctgatatggatgacgctgaagatgaggctggatcgtacttcatcagcgctgtttgctggaagagtgatcgccccactattctaacagcaaatagtcaaggcaccatcaaagtgctggtgcttgcagcttgaacacgagaaaaaagaatagaatgtggaattggtattatcttttcccatgctattatgattgtatcatttattaattgtacatagttttcaagtgtatatggcaggctttagggatcttaatgagatattagttgagtgcttaaacctttatcaacaaacctatttaagggactgaactttaatttttaccaattgaggacctcaaatttattaaattttgtattaataaatgctcaggagacaaaataaaatatcaaatttggcatgtgataataatgataatatcagcaaagcacctagtgtatatgatttaactttttaaatacataactatgattgttactattgtgttaaaattgaggtcctcaattgatattgaaataagttaaggttcttaacataaattttgaagataaagtcttccttaattggttataacattatagttaaggtcctttgagtacaaacttgttgaggttactcttcatattgtcatttccaaggaaacacgtgtattaattttttatcattggttgtttcgg

SEQ ID NO: 15298 - DNA, 722 bp, Glycine max
ccatatcttatcttatcacaacagttccattgtaattaagtactaagtataaactctctcccaatagatgaatattcttttttcttgttgccgccaccactcttctaatgtctagttctgagagcacaaacgcgagaactagaacagcgtcatggttttctaccccattctttgttatcgttctcccggtggccgtggctgcgcttctctaccggctcgaaccattcaagccggttcttttgccggtccagctgggccggtccaccgtggcggttccggctcgtaacggccacatgcaagatggatcggaacgtgtgggtgagggacacttggagggcccggaagacttggcctacgacgctgcggcacgtgtcgtttataccgggtgtgaggatgggtggatcaagcgagtcacggtgaatgactcggtggttgactcggcggttgaagattgggtcaacacaggaggaaggccacttggactagttttgaagccgaatggagaactcatagttgctgatgcggaaaagggactgctgagagtgtcaagtgagaaggagattgagttgctggtagatgagtttgaggggttaaaattcaaactcacagatggtgttgatatagcagatgatggtacaatttatttcacagatgcatcacacaaataccccgtgaaggatgctgtgtttgacgtcttagaagggaagccaaatggaagattc

SEQ ID NO: 15299 - DNA, 691 bp, Glycine max
acgcgtacgtaagctcggaattcggctcgagctcgagccgaatcggctcgagctcgagccgctcgagccgaattcggctcgagaaaagaattatagcaggcatgttcatggaataagggaagatgtggatgagagagctttcttcccagaagcatcaggatcagctaggagctatacagactcgtaccaacaactatcaatgagctcctacaagtcctattcaaactccaactttcagaacattaataatgatgccaccaccaacccaagacagcaagagcagcaactacaacaacaacaacactgttttgttttagggacagacttcaaatcaacaaggccaagcaaagagaaagaagctgagacaacaacaggtcagagaccccttcaccgtttctttggggagtggccaccaaagaacacaacaacagattcctggctagatcttgcttccaactccagaatccaaaccgatgaatgatgttttttttctagttattattatgagctggtgcatacggccaagagagagagagagagagacttgttgttgataaagatcatcagtgttttgtggctggggtggttttcttttgcaaaaggtgtgatgttattgcgttatgtaggggaccacagtaggatttgtgcctttgcttccctagatatttatatttatatatttattatataa

SEQ ID NO: 15300 - DNA, 335 bp, Glycine max
cacgcctacgtaagctcggaattcggctcgaggattgtcaggcctattttaagaattggctacaaagtgtccccgaactcccctcgtcatcatctttataatgctattcctccggttcactggaagtgatgccaactcaatctgttgctaaatcaattattttgatcctgagcaatttggttgctccggtatgcatgccatttctccattattatcatcgggcaataaagacatctcaacagtgttatataattgaatgagagcttaatttctggaatctaacaagtaataacatgccactcatttttagattaatatagtagcaattcttagtc

SEQ ID NO: 15301 - DNA, 421 bp, Glycine max
gcacgccgacgacagaaggggagagaaataatggagaagaaaagcataacaagcagagcacattgtttagtgctagcatttccaggtcaaggccatatcaatcccatgcttcaattctccaagctattggagcgtcaaggggtgagaataacacttgttactactcgtttctattccaagaatttgcaaaacgtgcctccttccattgctcttgaaaccatttctgatgggtttgatgaagttgggccccaagaggctgggagccccaaggcctatatagatcgcttgtgccaagttggatcagaaacctttcatgagcttcttgagaaacttggcaaatctggaaaccatgttgagtgtgttatttatgattcattcttcccttgggcagtagatgttaccaatagattggggatacttg

SEQ ID NO: 15302 - DNA, 907 bp, Glycine max
attccaagccgttggttgcggagattgagatttcaaaacttcttgatccaaccaaaggcactgcaagtattagtgcagttgctggttcctttggttacataccaccagaatatgcatatactatgcaagtcacagcaccaggaaatgtttatagctatggtgttgttctgctggaaatccttacaactagactaccagttgatgaggattttggtgaaggtgtagatttggtgaaatgggttcacagtgctccggtaagaggggatactcccgagcagatattggatgctaagcttagcacagtttcctttggttggaggaaagaaatgcttgccgctttgaagggcgcgttgctgtgcactgacaacacaccagccaaacgaccaaaaatgaagaatgtcgtggaaatgcttcgagagataaaagaaaattgagaacagcaagccactcaagtattctattctgtgctgtaatctacaccgttgaagatttgatgtatgcaaatctctcacggatacaacagagggactgatgagttacaacttacaacaactttaaagtagtagacttgtatcaggaattattccatgtggtgaagttggtgtgtcatagtaaattcaggcattgatagaaacttcacctttgtagtttgtccaaagggttagttgtgaaatggcagcttgtctatttgagttggacactatgttaggtttggggaggacaaatgctagcagaaaccttgaaatgggacatatcagttcctgttgcatataagctagtccacagttttcatattggatttactcatttgggagatgtatgcacccatcaatcagtctgttcccattgaaactgaaagttcaaatttatttttgttgaaaccgccgacagtatgtttgaattgtgc

SEQ ID NO: 15303 - DNA, 350 bp, Glycine max
cattagtattccttctatcaacattctatctattctatccatgtgctcaattttatgctgaccattctttcttcttcttttgcttatgttatttgactgccacacaggatggttcaatcaacaatgaagaggaaacgaaggaagggttgactagaatgaaccaatcggataacagaactcgttcacattcatcctcaccatcaactcagaaccgtcacagaaaattgaggaaaccagctactactacttgcgcaaggaaactgcagaaatccataatctgcagaacacttggcgagctagaacttgacgaagtaaatggtcttatggatcttggtttcacgttcaagaaa

SEQ ID NO: 15304 - DNA, 596 bp, Glycine max
ccttcgcgtccgcccacgcgtccggatttgcgtttactgatctcaagtcttccacctcactgtcgtagcgtagtgattgtggggtttctcttctcagttctcatcgtgacgatcttgctgctccgaaaaagggttttcctaacatcgcccattcaatttccgggctgttcagttcgtgaatagactgttgtttgttctaaaaagtagtggatagtaaaaattatcgaacttttttaagagaaaaatgcagagtaaagaagcagttgtggaagatggggaaataaagagtgtgactgctgtagggtctgaaattgatgggtggaccaattttggggatgatgacataatgcaacagcagtatacaattcaggctgaggaagccaagaaggttccatttgtgggtgacaaggaaccactgagtagcttagctgctgaatataaattaggcagtcctatcttgctggagaaaataaaggtgcttgatgagcaatatgctgccattcgtcgtactcggggagatggaaactgcctctttcgaagctttatgttttcaaatcttgagcatattatggaatgtcaagaccaagcagaaattg

SEQ ID NO: 15305 - DNA, 854 bp, Glycine max
cggaaatcatcaggatcaaagaaggataacatagaaactgaatctgcatcagaggaaggcggggcaaagtctgatactgaagatcccaaggctgcagaggaggagaaaaatgaaggaaatgataactctaattctggaggaaagcaacttgagaatggagataaaactgaacaaattgatgaacaggccaagaagccagacgtagatatggaagaaactgatctgaatgatactaacaataaattagaaaatgattcagcggaaattaagaacagtcatgtgaaacgggaaaatgtgattgctgaaaagcctgaaggtgaagaagctcaaaagcaagaagttgaaccagcagagaaagttgccgaagaagctgctaatactgcggagactgaaaaatccctactgactgaattagaaaaagaaaagaatgaggagaaaacagatactgcgactctagaggctaatgggggaggcgagaaagagaatcctaatgctgcacaaatgtaatatggttatttggagctgtgcacagtgaaacacttcaacatttgtcataccgttgtgtaagctgcataaatgtaacaccattgccctagtgccccatgacttttgcgatgctattttagttattttgtggccttatggatgactgtagtctcgtatttcatctaaagatttggttgtactttctacctaggattaggaaattaaatgagtcttccttttagtttagattaggacatctgattttacgtagtgcagctacgtagattgtagactttctgtgacacatttgtgttttctagtcatttagatttcacattccccatctaagagtgctctttttatgtttg

SEQ ID NO: 15306 - DNA, 558 bp, Glycine max
  unsure (1)..(558): unsure at all n locations
gtaagctcggaatncggctcgagggggaccccaaggcacaccatcacatggggttgctgacactgcaaatgggccacacacacatttataaaatgacaggttgtgaataggtcctacccatgtgagtgatgccagtgccactttctctttcatagatatttctctctctaccctttagattctctttcatgacaggaaaggacatgcacagatctaaaagtagggtagatgcccacacgtatgacaaaagtggccagttactcgaatcttttggggtctgtggccttgtgactgagttactgtgctatacttttttttggattttttttttaactttccctctttgaagttttcaagaacccctaggtgtttgtggaaaaccaaatatgttaagtgagaaaaaaggtttaaaatttaaaatcagagaggcatatcgaggattagcacatagccgaatgttggtaggtaggttttgacacgttagttgcctttttaattatgattcaactcaaagaccatatgcaaacagaacattacctcaatggtggagacccatgc

SEQ ID NO: 15307 - DNA, 416 bp, Glycine max
ggaagaggtaatgatgcaggatatggtggaagaggcagtgattctaattatggagggagggggactgctgcttctggcagaggtggaggccgtgggtttgaccatgactcccagaggaatgataggggtcggagcccagacaagggatctagttggagtgatcgcttcaaaagcgtcaaccgggatcgcagtcgtagtcctaacagggctgcactacctcaacattcccaaggtggcagctttcacaaggcaatgatggaacgtggtggtggtggtggtggtgatcgcaataagagctttaaccgggaccgaagccgcagtcctagccctcatagacaggagaagtgcccagcggttcgagatcgttccccaggttacagttttcatcaatcaatgatgggacgaggtcagtcatc

SEQ ID NO: 15308 - DNA, 671 bp, Glycine max
  unsure (1)..(671): unsure at all n locations
gatgaaaccaaaaggaagttcctagattggccaaagcgtttcaacattattaatggcattgctcgaggacttctatatcttcatcaagactctaggctgaggattattcacagagatctaaaaactagtaatattttactggatgcaaatttggatcccaaaatatcagactttgggttggcgcgatcatttttgggagatcaagttgaggcaaacacaaatagggtggctggaacatatggttacatgcctcctgagtatgctgcacgggggcatttctcagttaaatcggatgtctttagttacggcgtgatagtactagagattgtaagtgggaagaaaaacagggatttttcggacccagaacactacaataatctacttggacatgcgtggaggttatggactgaagagagggccttgggaactattggataaactgtcaggagaatgctcgccctctgaagtcgtacgatgcatacaagtaggcctattatgtgtgcaacaaagaccacaagataggccacacatgtcatcagtggtattaatgttgaatggtgacaaattactgccaaagccaaaggttcctggattntacactggaacagatgttacatctgaagcgttggaaaatcacagactgtgctcagttaacgaactttccatcacaa

SEQ ID NO: 15309 - DNA, 568 bp, Glycine max
  unsure (1)..(568): unsure at all n locations
cgcgcncgtgagctcggaattcggctcgagcgacaggggcggttttctgacatgaacaagtacaaccttatgggtgatcttcctaagaagtcttggcccaagaaactgaaacagatgaagcagttctggcttggtcagagactcaaggcctcaagggcttacctgaaaactttattcaacaaatctggttgctcagacaagttctgcgccagtgctgcagcaagcaacaacattggagcggagaagaagtcatcaaggtgcaaagagtgtcagaacaagtacatgaaggttgcaaggagaaacccttttgagagtttctatgatggcaagcaccaggtaacttgttctatcatgaagagcatcaaaagagagatgcttgaagttgaagatgatttctgtgaccacaggaggtctttctctggggttggtcagcgacattgttccacaaaggcttcatctttagccacatcttcatccgggtcctcttcttcgncttcatctttttctttcagctcagctgggtactatgatttgcaacttttcaagaggagcatcagcgcgaattatg

SEQ ID NO: 15310 - DNA, 672 bp, Glycine max
ccccatttctgttggaagcagaagccatggaaaccaacacactcccaaaccagcagacaccaaaaaccaaaaggcaaatcttcatactctcaggtcaaagcaacatggccggtcgtggcggggttatcagggacgctaacaaccgtaagcggtgggacggcgtggttccgccggagagccgctccgatccatccatcctccgcctctccgccaccctccaatgggaacccgcgaacgagcccctccacgtcgacattgactccagaaaggcttgcggcgtgggccccggcatggtcttcgcgaacgcgctgctgcggcggcgcgtggtggtgggcgagctgggtctggtcccctgcgccgtgggcggcaccgacatgaaggagtgggcgcgtggggaggaactgtacgagaacatggtgaagagggccaaggaaagcgtgaaggagcgcgagaatagcagcgagatcaaagcggtgctgtggttccaaggtgaaagcgacgcgatcaacgaggaagacgctgcagcttacaaggtcaacatggagaccctcatccacaatgttcgtcaagacctcaatttgccatctcttcccatcattcaggttgcattagcctcagggtccgattacatagagaaagtgagagaagcacaaaaggcaattgatcttccaa

SEQ ID NO: 15311 - DNA, 1356 bp, Glycine max
ccacaacacaaaacaccaccaccaccacctcgctctcttcttccctgcttcacaatttttattttaatgatactattttgttattgttaagacggcatcatcagggaaatggatcgggtgaagggtccatggagcccagaagaggacgaggctttgcggaggctggttcaggcccacgggcctcgaaactggtcggtgataagcaagtccgttccgggacgatccgggaaatcgtgccgcttacggtggtgcaaccagctctcgccgcaggtggcccaccgccccttctcgccggacgaggacgaggccatcgtcagggctcacgccaggttcggcaacaagtgggccaccatagctcgccttctcaacaacggccgcaccgataacgccgtcaaaaaccactggaactccactctcaagagaaaaaaatgttccgccgttagtgacgacgtcaccgatcgtccgcctcttaaaagatctgcaagcgtcggcccggcccatttgaaccctggcagcccatcgggctccgatttgagcgatccgagcctgcccgctctctcaaacccctccccctcggcccattacaggcccaatctcatggaaaccgcttcttctgcttgcgatccagccacgtcactgagtttgtctctccccgggttcgggtccgggtctaacccagtttgcgcacctcgaccggtatcggtgtctccgccgtcaccgcctccggcggagccggtggagcagcgggggaagcaaatgttcaacgcggagttcttgagagtgatgcaagagatgataagaaaggaagtgaggagttacatgtcagggatggaacagaagaatggcttcagaataccaaccgaagcgattgggaacgcggtggtgaagcgcatgggaattagcaacatcgagtgaaggaaagaaacaaaaaacaggaaaaagagaataaaaaacggtgtcgtttcgagattcgaatcaggccaactgaacatgaatgatgaatgatgatgaatcacagagtagagaaaagtgagaaccgagaaagagaaacggtggtgtttttttttttaaacttttttttaaattttattttgtagttaagtttaaatataagtttaatttccctttacttgagggtaaaaaatagtaataattttggcactgtgcagaagaacctcaggacagaagggaaggatgatgataatcaatcaaatagtgttttttttttttctgttaaacagtagtaattttttgtatgaaagttgttaggaatgggtttaagtctgaaagatattaaaatggttgtaggaaggaaaaataatgtgtgtgttgggtaattgaaaaaatggttgaata

SEQ ID NO: 15312 - DNA, 373 bp, Glycine max
cttcggcccattacatgcccaatctcatggaaactgcttcttccgctcccgatccagccacgtcacttagtttgtctctccctgggttcactctgtacctcaaccagtgtctccgccgccgccgccactgccactgccggcggagacggtggaggagcgagggaagcaaatgttcaacgcggagttcttgagagtgatgcacgagatgataaaaaaggaagtgaggagttacatgtcagggatggaagagcaggagtttgggttcacaatgcaaaccgaagcgattgggaacgcggtggtgaagcgcatgggaattagcaacatcgagtgaagaaaaagaaaacggtgtcgtttcgagattcgaatcaagcca

SEQ ID NO: 15313 - DNA, 305 bp, Glycine max
tgtcagtacgtccgcccacgcgtccgcccacgcgtccgaaacatcacacctcgctcacttcttcttcttcctcctcctccctctctcacaatttttattttttaatgatactattttgttattgttattgatggtatcatcatcgggaaaaagcagagaaatggatagggtgaagggtccatggagcccagaagaggacgaggccctgcgggcgctggttcaggcccacgggcctcgaaactggtcggtgataagcaagtccattccggggagatccgggaaatcgtgccgcttacggtggtgca

SEQ ID NO: 15314 - DNA, 604 bp, Glycine max
tcctttgcacgcgcacgtaagctcggaattcggctcgagctttttttttttttttttttttttaaacaactgtctaataatacttatgaagcttccaaaagaaaagggagtgggaggaccaagatttgttcaatccaaacgccattacacagttcacggctgcaacgaatgaagatatatctctctcttctcacctctaattgaccttcaactaccaaaagttcaaaaccttgctagtcatatattgctaagattaaaactaaaaaatattaaacggcttggttgcgcggaactgagatatcaataacaaaaggccttcataaaagtctatttttcatgaacaagagggcaatactcagggtaccacatattgcctcggacatactccacggtttcttcttttgacatgtttgctagctctttgaaccctacatcaccatgtccttcagcctgcttttctgcaaccgctgcatgtacaacagcagccccaacctctgctgtaacatctcgtatacagtcaatggatgggtacaagattcccctttggacatcctcatctgtcatgtatgaagcaaggcattcagctgctgctcgcaacattcca

SEQ ID NO: 15315 - DNA, 571 bp, Glycine max
acgcgcacgtaagctcggaattcggctcgagctagccgcttcaccaaagttgaaaattttcagaaaccaaaacctcgccctccttttcttttttccttcttcgccactctctccattcctccgatgatttccgaaccggcgagttccctgagaaagagcaacttccaagaccggcgcctcagcatcatcgacgtttcctccgccgacgattcgcttctcgatggaaaccctctcagccaccaacgttcagagaaccaagagcaggccgatgtgttgtacacgccgaactcgaagaagttcgaagacgccgccaccaaactccaacaatgggaccacgagcctcactccaacgactcatccggtatcggaaaacctaagagaaacagcaaatgcaatctgcgcaagagtttagcctgggacagtgcctttttcaccagcgccggggttttggatccggaggagttgactattataattgaaggtgttgagaaggatgagaagcctgaattaccgtctattcaagaggatgtgtacaagtcgtgtgagtccatttctacgttagcgagtgata

SEQ ID NO: 15316 - DNA, 396 bp, Glycine max
ccttagcatttggcaagatctgatttccctcttcacgagggggggaaatagaatggcatatgatcttcttcaagttgcaatctttttagagagagagggttagaagaacaacatacttgagatctgtcactgtgttcgagttcacgatgccatcgcattttctggtagaaaattaaattgccttgctctgtgaggctctagatcttcaaagcttgcttccttgttcctttgctgcataggatcacattaaggaatgccaaatggggacgaaggggaattggttctccagtgtgaagaaagctctcagtcctgactcacaggagaagacagaacagaaatcacgtaaatctacgacgaaatggtttgggaagcacaaattggagacttcagtctcat

SEQ ID NO: 15317 - DNA, 496 bp, Glycine max
tcgcgtacgcgtgggctggccttcgtgtcatgtatcctgtaaagcgcacatactggtttgacatttataagaacattgataaaatccctttagtgaattgtcctgttcttgtgattcatggaacggctgatgatgtagtggattgctcccatggtaagcaactttgggaaaattgtaaacaaaagtacgagcccttatggattaaaggaggaaatcactgtgatttggagctttaccctcaatatataaagcacctcaagaaattcatcacggtcattgagaagtcaccacatcaaaaaactggatctgatcgtattcctgatcaacttgacaaacctaggaacagcatagattttcgagagaaatccagacccagcatggatcatagggagaacttggagagttttgatcagaaagaaaagccttgtgcaagcacagaccatatagagaagtcaagagccagcgtagacaggagagataaatcaaggaagagtat

SEQ ID NO: 15318 - DNA, 541 bp, Glycine max
aggttcagacataagaaattcacataagtgctgaaaagggtggagagtttttcatagacactgagaaacatatgcgaactgtagctactgcagcaagtccaatacctagtccacaaagtagtggagactttggtgcgctgagtccattggttggaggtttcgtcatgagttgtagagttcaaggtgaagggaagcgaagtaaaccatcagtacaactggcaatgcgacacgtgacatgcgtggaggatgctgccatcttcatggcacttgcagcagctgttgacctcagtatcgtggcatgtaaacctttccggaggaaggtcaggagaggtttttggcattcgatgtgatcaacaaggcaaatgtatttataagcactgtcggaactgtcaatgctctgcctttgcttttcattgctgcaatgcttaaaaaaatgtacagcttaagttagtgtcatacattgccctcttgtgaattcttctacatattatgatttctaaggctacatgacaatgtggcctttgtacaattaaggtgcaca

SEQ ID NO: 15319 - DNA, 588 bp, Glycine max
tcgtacgcgtgggcttagtcaacaccaaaaaccaaactgaaactggaacaatagagcatctttcctagttttgtctcaaatcaaacaactctgacggaggatactgctattgctccgcctgaatctccatggctgatccacagccgctgcttctcaacgattccgagccaactcaatttcaaaacacccgaatcgcctcccttgacgtctttcgcggcctctctgtttttcttatgatatttgtggattatgctgcttccatcttccccatcattgctcatgccccctggaatgggattcacttggctgatttcgtcatgcctttttttcttttcattgctggaatttctcttgccctcgtttataagagaaggcctcatagaacccaagctacatggaaagcttttgctagagctctcaacctctttgctcttggtattcttcttcaaggtggctattttcacggagttacttccttgacttttggtgttgacattcaaagaattcggtggctgggcattttacagaggatatctattggatacattgttgcagctttatgcgagatctggcttccagctccacgat

SEQ ID NO: 15320 - DNA, 259 bp, Glycine max
ctggaacaatagagcatctttcctagttttgtctcaaatcaaacaactctgacggaggatactgctattgctccgcctgaatctccatggctgatccacagccgctgcttctcaacgattccgagccaactcaatttcaaaacacccgaatcgcctcccttgacgtctttcgcggcctctctgtttttgtaattaactagctcttttctttctttctttccttgctttctacccaataaattctatttcttcctttctt

SEQ ID NO: 15321 - DNA, 406 bp, Glycine max
gaagccattgctagggtacggaatgagaaagctcggagatacttgtgttgcatgcgtaagaagaagccagttcctttctcccaaaagtttcctaatgtagacccccttgctcttcgtgtgttagaaagaatgctggcatttgaacctaaggatcgacctactgctgaagaggctctagcatatccatattttaaaggcttggccaaggttgagagagaaccttctgctcagccagttaccaagatggaatttgaattcgagagacgtaggataacaaaggaagatgtgcgagagcttatataccgagagattctggagtaccatccaaagatgttaaaagaacatctagagggagaagagccaacaggattcatgtatccaagtgctgtggaccacttcaagaaac

SEQ ID NO: 15322 - DNA, 639 bp, Glycine max
gcccactctacgacgcacgcagcagcatcagcttctactcgtgtaatctctgcgtgggctacaatggattccggtgtccaaggttgcatcttagccactttaattctccacgacgaggaaatcccagtcaccgctgagaagatcaacgctctgttgaaggcttctaatgtctccgccgagtcttactggcccagcctcttcgccaagctcgcccagaataagaacatcgaagacctcattttgaacgccggcggtggtggggccgccgttgcagttgccgctcccgccggcggggggtggtggtgccgctgctgcagccgcacccgccgccgaggaaaagaaggaagaagtgaaggaagaaagtgacgatgacatgggtttcggcttgtttgattagatctttttatatagttgtagccagattttgagtctttgaattgaaatcttgttttgttctataaaatttttattgaagggattcttagccaatctactatcataattgttgaattttggtggttttttaatatatttgtggcaactaaattcttatttacctgtttattttcatattctacttgtcacaaaatatagggatgtaatgtctctacaagaatccgtgtttaaaagattacgcca

SEQ ID NO: 15323 - DNA, 307 bp, Glycine max
gcgagggtgaggggatgagggtgaagtcggggaaacgtgtgggggtgagcttggggagggtgcgggagatttggtggtgagggtggaaatgagggtgtcgagcttatgggtcatggtttgcaggttttcactgagactgagttgatgaatggtgagcttagctatggcgtcttccaacttttcagagttggacttcgaggccatgagagcgagacgagagcaccaaattgttaggaatgcgtttataaattctgggcttcgagggccagactttcctgccttatttcatttaaatggtatttataat

SEQ ID NO: 15324 - DNA, 746 bp, Glycine max
acaagagctaggacgtccggatgcgcgcatacataagctaccttgctagtttccatcatcgtatctgttagtatttccaaatatacacattttctattttattcatagaaatctttaacttgagaagcattacatggcgctgacgatgatggcggcgatcggcatcggcatgaagcaagagaagaagatgccggcgacgccggcgccggagaacgagctgaagaagcggaatgaggagctcgagaaggagctcagagagagcaaggagagggaggagcagatgaagcgcgaactccagagcgcgtgggagaggctgcgcgtggccgaggaggctgaggagaggctctgctcccagctcggagagctagaagcagaggccgtttaccacgcgcgtgactaccacgcgcgcatcgtctccctcatggaccagctctcacgcgcccagagcctcctcctcaagaccggtgcctcctccatttcgcttccttcctcctcctaaatcataatcacacacacacacatatatatacaaagattgtaataaatttttttcattttctggtcagagtcattgtgattattagatgtatatgatgatgatcatgatcaagatgatccatatcgccggggatcgaatgtgttgtaaaattttgggggatgatggagaatagtttgattggtttagagattcgagacctaattaagtaacgttcttcaaccaataagaaggcaaaaatgttcaaaaa

SEQ ID NO: 15325 - DNA, 483 bp, Glycine max
cacgcgtacgtaagctcggaattcggctcgagcgaaggacaatgagtgttcggtccaaaaacttgaactctgtattctatgcagattcgtaccatcccattcaagctggcagcatcgacggcaccgatgttgttcctcacgataacgccgtttatcgcgctcaactctgttcctccatcggcctctatgacccatttggtgatcccaaggccactggagacccttattgcactctctttgtcgctcgtctctctcgcctcaccaccgaagatgatctccgcaaggtcatgagtaagtatggtcgagtgaagaacttacgcttggttagggacattgtgacgggagcttctcgtggttatgcttttgttgaatacgagactgaaagggagatgcgacgagcatatatggatgctcatcatttgattgttgatgattctgaaatcatagttgattacaacagacagcaattgatgcctggatgga

SEQ ID NO: 15326 - DNA, 750 bp, Glycine max
gccgatttccttgagaatgacattcgtgtgaagccagatcttgatgcacttggctctcttggcgatgaagggtggtattgtcttagagcaatactctgggctgccaactatgaactccctaaaactgtaatagcctcacgcaatcctgagcttaataaagctggggtgatattgtcttgtggggcttctttacactgggaagatgggaaagtagcaaccttccactgctccttcttgaccaacttgacaatggatataactgctgttgggacaaaaggaacactacatgttcatgacttcattatcccttatgaagagaaggaagcatcgttttatgcagctacagaaacaggctttgatgaccttgtgtcaaagtggatcccacagccaagcaagcatataataaaaactgatatccctcaggaggctcttatggtaacagagtttgctcgtttggtggcagatatcaaattcaacaactcaaaacctgagaagaagtggccaacaattagtaggaaaactcaactggtattggatgctgtgaaggcttcaattgagaggggttttgagcctgttcagattcaggaatgagatgtatgtattgtttctgtggcttgttgaactgaggtctttgttccattagtgcatctcaaaagtcatttctattttatttgtatttttaagcagtcattgctgacctgtgcatagaggaggaatgcatggtctgaagactcttacacaatgcacatt

SEQ ID NO: 15327 - DNA, 728 bp, Glycine max
gggaagagtcagtatgtcaaatgggcatggcaggaacgggtagggttaagttcgtccaacgattctctcttctttgatccatctatccgtacttatttcacgaattacatcaagactgtcttgaccaggaaaaatactatcaccggaatcgaatatagaaatgaccccagcattcttggttgggaattgattaatgagcctcgttgcatgtctgatccttcaggtgacactctacaaggatggatagacgaaatgtcaacttttgtcaaaatgattgacaagaaccatctgttgactgtgggtctcgaaggtttttatggtccaaacgatccaaaaagttcaactgtcaaccctgagctttgggcatccagacttgggtctgattttattcggaactccaaaatatcacacattgatttcgcctctgttcacatctatcctgaccattggtttcatgagcaagtattcgaagatcaactgaaatttgtctccaagtggatgctttcgcacattgaagatggtgacaaagtattgaagaagcctgtcttgttctctgaatttggactatcagaaacgaatcagaacttttccatgtccgaccgggaaaaaatgcatagagctgttctggacataatttataaatctgctaagagaaatagatctggagctggtgctctggtttggcaattcctagttgggggaatgaaggaattttctgatgaatatgg

SEQ ID NO: 15328 - DNA, 615 bp, Glycine max
  unsure (1)..(615): unsure at all n locations
gcgnncgttatctcggaattcggctcgagcgttagatcgctaacggaaccgaagccgaagccggtttgattcccgtttttccctctctcactttccccagaccactactccatcgccactggcctctaccctgcttaccacggcatcattaataaccacttcaccgatccactctctggggaacccttttacatgggtaacagccatgaccccaagtggtggctcggggaacccttgtgggaaactgtgggaaaaaacggcttaaaggctgcaacttatttctggcctggttctgaggtaaataaaggtccttggtcttgtcccttcaattattgccagcactattaatccttctgttgcgttggttctgagggttgatgcggttttggggtactttgatttgcctagtgatcagattcctgatttcatgacgctttattttgaagaccctgatcatcagggtcataaggttggtgctgatgatcctctgatcactgaggctgttgctaggattgatagaatggtggggaggttgattaggggtttggaggaaagaggggttttcgaggatgttagtattattatggttggagatcatggaatggttggtacttg

SEQ ID NO: 15329 - DNA, 720 bp, Glycine max
ggatttggatttgcatgacattctaattgagactgagaagcgtgggatagcttttgatcaattacttaccattcctgaacaagatgaatgggtatacagtgatgggaaatcaacaacatgtgttgcctttattctttcaatgtataaagcggctggaatattcggccctatttctagctccattcaagtaactgaattcacaattcgtgatgcatacatgcttaggatttttgaggataaccaaacacgtctaccaagatggtgcaacaatgagaacgatcggcatccattctgccagattcttggtgaatataggatggaattgcctggctataacaccttggatccttatgccaatatgaacgagcactgtccttcccttcctcccacttatgacaggcccttgaaatgttagtctcttctccggcatttccattttctgatttgcctgttatccatgatctcaaggtacctaatagtttgctattgtggaaagtgcaccacggaacttcgcctttgccttgtcaagttgactaagggacattgtatataacaaatttatattggtgggatggtgtgatgttttatagacttaaattatgtcaattgtaggaggataattacctatgtttcgtgatgaactacgttgttctactatctcaacgcaggaaaatgtcagtgaagataattccaattatggtttgaactcttggttctgga

SEQ ID NO: 15330 - DNA, 392 bp, Glycine max
  unsure (1)..(392): unsure at all n locations
aaacacgtctaccaagatggtgcaacaatgagaacgatcggcttccattctgccagattcttggtgaatataggatggaattgcctggctataacaccttggatccatatgccaatatgaacgagcactgtccttcccttcctccaacttatgataggccattgaaatgttagatacgtctcttctccggcattaccattttctgatttgtctgttatccgtgatctcatggcacctattagtttgctgttgtggaattgtctacaaaccgagggagaaagtgcagtacggaacttcaccttagccttctcaagttgactaaggggcattgtatataagaaatttatattggtgggatagnggggatgtttatgacttaaattatcaattat

SEQ ID NO: 15331 - DNA, 349 bp, Glycine max
gataatccaatatatcaaagcaagaaaaaatggggtccgcaaaatttgctttgatattaacaattgttattatctcaatgtgtagcatttccttggcacaaaattcgcccaaagatttccttgacgcgcacaatgcagctcgtgcagaggttggtgttgagccactcgcatgggacgacaccgtcgcagcctacgctcagcaatatgcggactcgaggatcaaagagtgccaagtagtgcactctcaggggccttatggggagaacctgcaggccatatacgacgaatgatggggctgtgatacaaagtgatggttaatgcaggtgcttgcgatgacatgcctaacgct

SEQ ID NO: 15332 - DNA, 1046 bp, Glycine max
gtaagaaacactgctacagtccctgaaactgatattcaaaaaactttggttgacaatgttacaggaagaaatgccactacattccctgaaactgatactcaaaaaactttggtcgacaattttgtgggaagaagtgcctctacaatccccgaaactgatgataaaaaaactctggctgacaatgatatgggaagaagtgccactacagttcctgaaactgatatccaaaaaactttgcttgataatgttacaggaagcagagacagtgaaaacaatttgcttgacactgttacaggaggcagcgacagaaaatctcaagtacgatcaaataaaccccagagaaagaaagaggtcaaagtacctatgcggttatcaaagcgacttgctggccttgaacctgaggtaccgcctgctgaaagagctcttgaatattcgactagaaaatcatgcaaagaagaaccaactgcaactgctactttaactaatggagtgtctgaccatcacgatgctggggaagaaaccaagcttactcctcaagcttctgacagtttgaaaacagaagtactaggagaatcattaaaccagagtgagaagtcatatgatgcccaaactggtcacaaggaacaattgcagaaagttgaagctgaaaatattggggatgcaagatcagagccacagctccccttaccgtttgggaactcttggtcagatccatgcctagaatttgcaatcaagactctcactggtgctttgccagttgatgctggtgacattatgcccgctttgcctcctggctttgataatccgccatataagcaattgcatgggaatgtggtgacaagcattaatcaagaagctcacgataactcaaaccaatcacagaacaagaaagagcttaatatggttagccagcctgtgttgaggtccagctccacctcttatgagaatgctcccaaatttacaactagactctcttatcttgatcaaggcaacataataaggaatttgaatgaagaacctcgtcacactggaaacacaacaccacc

SEQ ID NO: 15333 - DNA, 457 bp, Glycine max
ctcgagccgctcgagccgtgtccctccccttccgccgaggaacacaaacaacaacctcaacttaacgcattgtgtgcatgatggaggagatgaaagtttctcggcgggtggagtggtggcagaacatgatgttccccgttcggagggtttggtttgtcgttgccaagcgcctcggcattcgcaaaactgggttactgaagctaagtaatgatgtgagggcatgcgaatatgaggacattcaagtgatgtgggagatactaaacagaaacgaatcagagtttggtcgttcttctagcactaggaaaggcaacaacaagaaggggcattgctggaaattattgaggtgggcaaggtgtgctccatgcatgtgccgcacatgatcatgattgctgtgtacgtgagaagaaaaaaatccaacctatgtgttggtgtggtttttgctgcttcaatcatgaat

SEQ ID NO: 15334 - DNA, 267 bp, Glycine max
cgaacacaaacaacaacctcaacttaacgcattgtgtgcatgatggaggagatgaaagtttctcggcgggtggagtggtggcagaacatgatgttccccgttcggagggtttggtttgtcgttgccaagcgcctcggcattcgcaaaactgggttactgaagctaagtaatgatgtgagggcatgcgaatatgaggacattcaagtgatgtgggagatactaaacagaaacgaatcagagtttggtcgttcttctagcactaggaaa

SEQ ID NO: 15335 - DNA, 556 bp, Glycine max
cccacgcgtcccattgactagtatcattaagatggctaattcctacttatccttgcttgtcttgatccttgtagctctgctcctcacccctcaagggcttgctgatgaatctgattcttactataagccaccagtttacaagaaaccaccagtgtacaagcccaagcccaagccacccattcacaagcccaagccacccgtttacaagcccaagccacccgtttacaagaaacccccttatggtaagtacccaccagttcaagacaacgatcacttctaaaccatgcaacaaggcatgttaatgttaactatctactaaaataaagaggttcagttaacctactacgtacgttgctccttttaattcctaaatcgtaatttacaactttgtagggatgagacattcttggctagctctgcacttcaatcctttatttgtacaatgctatggccaagtcaataccatgcatcttatctatgtgtgtcattgaacgaagtagttgcgtgaaaatgatgcttgtactatgaataaataataaaagaactttatcatttc

SEQ ID NO: 15336 - DNA, 517 bp, Glycine max
  unsure (1)..(517): unsure at all n locations
ggagaaccagcaatgcatggtcaccgccggtggaaggaccaagatcgacagccccagtgcactggtcttccagagctgcatcttcaccggcgaacccgacgtgtttgccttgtcccccaagattgcttacttgggaaggccgtggagggtttacgctaaggttgtcatcatggactcgcagatcgatgacatctttgtccctgaagggtacatgccgtggatgggaagtgctttcaaggacacaagcacctactacgagttcaacaacaggggttttggtgctaacactcaaggtagaatcacgtggcctggttttaaggttatcactcccattgaagctactgattactacccagganaattctttgagatcgctaattcgactgagcgtgattcttggatcgttgggtctggggtgccctactcccttggcccaattattgcgctgcctttgccaacagcttaattcatggtcttttttaatgactctaatagaatatacatggtactacatatc

SEQ ID NO: 15337 - DNA, 519 bp, Glycine max
cgttgaatagaacaaaatcatgttctaagtttctttagttccgatctccaactttggattgtttgttccaacgacgatgctgtccctttaacacatttgaattctacgcaatttttttaaaaaaaatgcgaaggctgctcgggaagatttctgggttcttgagcaatcgaactatggtgggagtggacaaaacagggaacaaatacttcaccagaaatgaagaggttgatggtatcgtgaaagagaaaagatgggtgatatttaaaggagaggaggatcctacctctatcccagttgaatggatatgttggctgaatgggcagcgtaaaaaggctccaactccagaggaaatgatggaattggaagcaagacgtgaacgtgttagacagaatgttgctcttctcatgaaagaagaagtaacgatagccctagaaggaagcaaaggaaaacgtgtcagcactggaacagtcagtggtccagactgtgaaagttttattcatcaatttccaattgcttcag

SEQ ID NO: 15338 - DNA, 495 bp, Glycine max
cacgcctacgtaagctcggaattcggcgctctctttcgctgcgtcctcggttatggcttctcgcaggctctcatcatctctgctccgaccattcctccgtccatctctgccggaatttcaagctccgacccctttccggctattctctgtcccaaacttttccactcgcgtttctccgatcgccattacaaaattacctgggactgaggtattctcacaatttgagtccggtaatggtttagcatcagtgctgagaagctctggaatgggcttgtaccagccagctggggggcttgtaccgccttttgctagcaggtttatgtcaacagaggcaacttctgttgattcttcttctcaagatagttcgatgctggagcctgaagttcctcctcgtatcaaatttaagagattagacaaaactgccaggcacattatgcagattttagacaaggaggcagtagaggaggtgagagggcaaagagagatacctgacat

SEQ ID NO: 15339 - DNA, 567 bp, Glycine max
cgggtccagaaccggttttttaccgacccattacataactaagctcgagatagtacccgtggagtcttgaggcacgtgcgcaagccataaaccctaacacagggcttttccccttctatctctctctgcgtcctcggttatggcttctcgcaggctctcatcatctatgctccgaccattcctccctcgatctccgccggaatttcaagcttcgatcccttcccagccattctctgtcccaaacttttccactggcgtttatccggtcgccattacaaaattattctcacaatttgagtccggtaatggtttagcatcggtgctgagaagctctggactgggcttgtatcagcaggctgggggggttgtaccgccttttgctagcaggtttatgtcaacagaggcaacttctgttgattcttcttctcaagatagttcgacgctggagcctgaagttcctcctcgcattaaatttaagagattagacaaaactgccaggcacattatgcagattttagacaaggaggctgtcgaggatgtgagagggcaaagagagatacctgacat

SEQ ID NO: 15340 - DNA, 1094 bp, Glycine max
  unsure (1)..(1094): unsure at all n locations
gtttctgatgatcaagcaattgtgaatagaaagagtttttatgcaaatagcagcattgttaatggtgctggcaaaataaagaggctctggagacggccaccgaggctccctcctcgattctcgccagatgaaacaggaactggtaatggaaatggacatgtattgggaaatccggatgttgttaggtcaatgtggattgctaggcaaaagaaagtcaaggaagcttttattcatgcttggtctggatacaagaaattcgccatgggttatgatgaacttatgcctctcagccagcatggaattgatggattaggtgggttgggggctacagtggtggatgctctcgatacggctatgatcatgggtcttgatgaggttgtggctgaagctggatcctgggttgaagaacaactttctgagagaatcagtaaaaagggtcaagtgaatttatttgaaaccacaattcgggttctgggtgggcttttaagtgcgtatcatctaagtggtggggaaaaaggaacaaaccggccccatgcaggacctaaaccagcagtttatctagaaactgctaaggatttggctgaccgtctgctatctgcttttacggccagtccaactgctattccgtttagtgatgttattctgcatgacaagtcggcccatccagctcccggaggactgagtagcacatcggaagtttccactttacagcttgagtttaattatctcagtcagatatctgttgatcagaaatatagtttggaagcaatgaaagtcatggagcacatgaagactcttccaaagattgaaggactagttcctatctacattagccctcattctggtgagtttagtggagaaaatattagactgggatctcgtggggacagttactatgagtacttaatcaaagtatggcttcagagtggagctagtagcaacactaatacatcattcctatatgaaatgtataaggaagcaatgaatggagttagacatcttcttgttcggaaatcaattccaaatggactagtttttgtcggagaattgccttatggatctaacagnaatttcagcccaaaaatggatcacct

SEQ ID NO: 15341 - DNA, 1298 bp, Glycine max
gacacccaaatccttcttcaccttcacaattagaaaaaaaaaaaaacaaaaaatgggcgtttctcgttctcaaaagcctcatgttgtttgtgtgccattcccagcacaaggccacgtgaacccttttatgcaactaagcaaactccttctttgcaccggtttccacataacctttgtgaacaccgagttcaaccacaagcgtttggtgaagtctcttggacaagaatttgtcaagggacaacctcattttcgatttgagaccataccagatgggttgcctccatctgacaaagatgcaacacaaagcattgcagcattgtgtgatgcaactagaaaacattgttatgagccactcaaagagcttgtgaagaagctcaatgcttcacatgaagtgcctttggttacctctatcatctatgatgggctaatgggctttgcagggaaagtggcaagggatttggacatttctgaacaacaattttggacagcctcagcttgtggtttaatgggatacttgcaatttgatgagcttgtcgaaagaggcattattcccttccaagatgaaagtttcactactgatgggtcattggatacaaatctagactggatatctggaatgaaaaatatgcgaatcagagattgtccaagtttcgtgagaactaccactctagatgaaaccagttttatttgctttggtatagaagcaaaaacctgcatgaaatcatcttcaatcataattaacaccatccaagaattggaaagtgaagttctcaatgcccttatggctcagaacccaaatatatataacattggtccacttcaattgttaggaaggcattttcctgataaagacaagggcttcaaggtgagtgggtcaaatctttggaaaaatgactcaaaatgtatccaatggctagaccaatgggaaccttcctcagtcatatatgtgaattatggaagtattactgtgatgtccgaggatcatttgaaagaatttgcttggggactagcaaatagcaatttaccatttttgtggataaaaaggccagatttggtaatgggtgagtccacacaattgccacaagacttcttagatgaggttaaagatagaggatacataacaagttggtgcccccaagagcaagtgctgtctcatccatcagttggggttttcctaactcattgtggctggaattctacactagaaggtataagtgggggtgtccctatgataggttggcctttctttgctgaacaacaaacaaattgcaggtacatatgcacaacttgggggatag

SEQ ID NO: 15342 - DNA, 407 bp, Glycine max
accaagacgaggatgccatttcgctgtcacctgacatgagcgctggtacagaggaagatagcagaagccagggatctccacgtagagtttactcaatggcccttcacttgcgatcaattgcttcaatcttggaaagcaacctcgaggagaagtccaagttatacaaagaagtctccttgcagcacttgttcttaatgaacaacctgcattatatggctgaaaaggttaaggggtctgaactcaggctcatacatggagatgaatggattcgaaagtgcaattggaagtttcagcagcatgcaatgaaatatgagagagctagttggagtcccattctcaacttgcttaaggatgacggaattcatgttccgggtacaaattcggtctcaaaaagtcttcttaaagag

SEQ ID NO: 15343 - DNA, 451 bp, Glycine max
ggagagcgagttgattaaggcaaagggtgtgatgagattagttttgagaagaaaccagcaatcggcgattaggagtgagagagatatggagggaattgaaggaaatagcagcagatacagtctgaaaccctcgcgaatttgcaacgaagatgttctgatctgcgtcgacgtcgatcctcagtgcctcgtcgaaatgaaaggtgccaccggtcccaatggcagacccctcacccgtttggactccatcaaacaagccatcgttctcttcgtcaatgccaaactcaccatcaaccccgaacaccgttttgccttcgccactctctccaacaccctcgtctcttgggtcaggaaagagtttagcagtgaaattgagtcaacacttgcagcaatgcgtgttctttcagcttcttcttcttcttccaccaccgccggccaacccgatctcactcat

SEQ ID NO: 15344 - DNA, 421 bp, Glycine max
acatgattctggagaaatggattcagcatcagaatcaggtaaagccaaaggtgcttcggttgggaagggaaggggaggttcccaaggtgcaggaaggggctctttcgtttatggtggggcacaggtaatgggcaccactggaaatgtggctgttagtcatggagatccaaacttcccagccttcttgccagtcatgcaatttgggggccagcatcctggtggtatgggagttcctgctgttggcatggcattccctggatacgttggtcagcctcaacttggtttgggaaagtctgaaatgacatggctaccagtgttggctggtcctgcaggagctttaggggctacatacccattccttcctgttgatggtgcaagcagtcgacaatctggacaggcctctgcaatgggtacttcaagc

SEQ ID NO: 15345 - DNA, 452 bp, Glycine max
ttttgttacttttgtaccttttgtattagaacccattataatttcatcctacttcggtttaggctaccagtgttggctggtcctgcaggagctttaggggctacatacccattccttcctgttgatggtgcaagcagtcgacaatctggacaggcctctgcaatgggtacttcaagcaaggaacataatgataaagctaataatgaattgaagccacctcagagatctgagcttgcaagtgatgagtttggacagcggcagaataaaccccgaagatattcagagatgaattttggtcagtgaatagggtgcagcttgtttgaaatttgaaataagcagatgaaggcctttctcctggccctttgttctctagcttttgatctggagcactttgggctacaataagttttcagatttttttagttatataatgcctgctcttgctgttcacc

SEQ ID NO: 15346 - DNA, 784 bp, Glycine max
gcgaacacagcagcgagtggggaggagttagttgcggatagtcacctgctaccggctgtggcagttggaagaatcgtgggggaccagatcagagcctatgcttcttccgatcctaatccaacggtgcatcttgatttccgtggaacagtattgaacgttaagccttcaccagtagtggcagcttttagttccagagggcccaatatggttaccagacagattctgaaaccggacgttattgggcctggggttaacatcttggccgggtggtccgaagcaattgggccatcagggttatccgatgacactcggaaaactcagttcaacatcatgtcaggtacatctatgtcttgtccacacataagtggattggctgccttgttgaaagctgcacatccgcaatggagtcctagtgcgataaaatcagccctaatgacaacggcagatgtacacgacaacaccaagtcccaactccgggatgcggcagggggtgcattttccaacccatgggctcatggtgcgggccacgtgaacccacacaaggcactttcccctgggcttgtctatgatgccacaccaagtgactacattaagttcctatgttccttggagtacacacctgaacgcatacaactcattactatgcgttcaggtgttaattgtactaagaggttctctgaccctggccagttgaactacccttcattctctgttctctttggcggtaagagggtcgtgaggtacacacgagtcctgaccaacgtgggcgaggcaagctccgtct

SEQ ID NO: 15347 - DNA, 583 bp, Glycine max
gcgtacgtaatctcggaattcggctcgagctaagttccaagagctgcgttttgatagccgtgcaaaaacggcatgaaatttgaaatagaaaggagtggaatgcgagccgagcaattatgtatatgtactaatgtagtcttcaatttcattttcaacctctgttctcataaaaccctagaaacattcaaacaaaggatgtcttgttgggcatgcaaaaaatgcacctttgtgaatctcccttctcaaaaaggggaatgcgaaatctgcttttcccccgcgtccccattgtcaatgggtccttcttgttcttcgtcgcccccaaaatggtcgtgcaaggcctgcactttcttaaacccttacaacaacccttcttgcgaggtctgcgccactcgatgctccgttctctccctttccaatctcaccgacttgaatgacgccaccgatcacgattcttctgtcggttctgttttctttcctcttcgaacctgcaacaagataaatgccattgatgatgacgattcttctgatgtcatcaatttcaatgtcaagccatccaatatcaccggtgatgagaatatcgaca

SEQ ID NO: 15348 - DNA, 510 bp, Glycine max
  unsure (1)..(510): unsure at all n locations
cacgtatggcctcgtagtaggtgccgttttgggagggaacgttgatccactgcgttttgataaccgtgcaaaaacggcatgaaatttgaaatgaaacgagtggaatgcgagccgagcaatgtacatgtgctcttcaatttcattttcgacctctgttctcataaaccctagaaaaattcaaactcttgggattccatcaacaacgatgtctggggcatgcaaaaaatgcacctttgtgaaccccccttctcaaaaaggggaatgcgaaatctgcttttcccctgcgtccccgtcggcatcgggtccttcttcgtcttcgtcgcccccaaaatggtcgtgcaaggcctgcactttcttaaacccttacaacaacctctcttgcgaggtctgcggcactcgatgcccccgtctctccctttctaatctcaccgacttgaatgatgccaccgatcacgaatcttctgtgggttctgttttcttccctcttcaaacctgcaaanagagaaaggc

SEQ ID NO: 15349 - DNA, 564 bp, Glycine max
gattaacatccataatcttaagtcagcatattgttcttctttgcctcgcaactgtgtgaaatggaataatgatgtgtatgttttttctaggtatctttacttctttgagaagggaaacctacaagtcaccgttgctgctatccagggcttaattgagttaattatgaatgagaggcagagtgataccacaactcaggatccagctgctaatgctttcttagccagtaccatgcgctatatagagttccagaaacaaaaagggggtgcggtaggcgagaagtatgaagccatcaaggtttcacatgctggatgaccgatacccttgttgttgtcgtgttagattttgaagcaatttgttcttgggcagttccagctactgtttacaattgtctttagatttcaactgaagaaccacaagtttgtgttcctttctgatatgtgctgacagcaaatgtacactccgtcattgagttaagactctgattcattgtgtaactaatgagacttggccaccattaaacattgttagatctttttttctttcaattttacaccaattaagag

SEQ ID NO: 15350 - DNA, 470 bp, Glycine max
agaaatttctgattccagagcacagatcacagctatccatttaataatagggactcttcataggatgcacgtctttggtgttgaaaacagggatactttaactcacaaggccacagggtattcagcaaagcttttaaagaagccagatcaatgcagagctgtgtatgcatgctcacatctgttttgggttgatgatcatgataacatgaaagatggagagagggtcctattatgtcttaagcgggctttaagaattgcaaatgctgcccaacaaatggcaaatgcagcacgaggtagcactggatcagtaatgctcttcattgagatattgaataagtatctttacttctttgagaagggaaacctacaagtcaccgttgctgctatccagggcttaattgagttaattatgaatgagatgcagagtgataccacaactcaagatccagctgctaatgctttcttagcca

SEQ ID NO: 15351 - DNA, 809 bp, Glycine max
atttatcacctcattttctgatgaaaaaagttacacctttggggacgcccaagagaagaaccaacgagatcgaggaccttcttctgcttctgcttccgccttttccttcgcgcttcggtgctgcccacctacactcattccgtccaaacccctttttgtctgaaaaatcaaaccttaatttctgcgttttttttctattggatccaacttcactcgccggctagagtttcccgaggcactaccctattgggtctaatcattcgagttcttcgattaacgtgaatttgggtcagagacctcatcatcagagctggcaggtggcgggtaaaagaaaatttgcaggttgaccggtagatatagcaaaggagagtagaaaccctagaagaagaagaagaaaaagaagcaatccccatataagaaaaaggatctaaaaccaaaactttctccgtgaggttaaatgcccttaaggttattttccctctaagaaatcctcgagtcgtttaaggttcccatgccggttgacttggacaatgtttccacagcttcaggggaagctagcgtgtcttcctctggcaatctgacagtgcccccaaaacccacaacaaagaagaagcgaaaccttccaggaatgccagatccggatgcagaggtgattgctctgtctccgaagaccctgatggccacgaaccgtttcgtgtgtgaaatttgcaacaaggggtttcagagggaccagaaccttcagcttcatcggaggggtcacaaccttccgtggaagctgaggcagaggtcgagcaaggaggtgagaaaga

SEQ ID NO: 15352 - DNA, 766 bp, Glycine max
agattctgtaactaatgatgggaaagaggtcatcaaaggcaacatcttgagtcaagtcaccaatgcttcacaaatgataaagctggaaaaggatccacatgctgcatttgcattaattattgatgggaaaactctaacatatgctttaaaagatgatgtcaagcaccaatttttgggattggctgttggttgtgcatctgttatttgctgtcgtgtgtctccaaagcaaaaagcattggtaacaaggttagtgaaagaaggaactgggaaaaccactttagccataggtgatggtgcaaatgatgttggcatgattcaagaagctgacattggtgttggaatcagtggggttgaaggtatgcaggcagtaatggctagtgactttgctattgcccagttccggtttttggagcggcttctggtagtccatggacactggtgctacaagagaattgcacaaatgatatgttatttcttctacaaaaatatagcatttggcctcaccatattatattttgaggcctttgcgggcttctctggacaatcggtttatgatgactggtacatgatattgttcaatgtatttcttacatcattgcctgtcatttctcttggagtttttgaacaagatgttccatcagaagtttgcttacagtttcctgcattgtatcagcaaggacccaaaaatttgttctttgactggtatagaatctgtgcaggatggggaatggtctttattcctcccttgtcatcttcttccttgtga

SEQ ID NO: 15353 - DNA, 447 bp, Glycine max
atgcccccgtacgtaagctcggaattcggctcgagtaaaaatcatgatgtgtttcttttaataagtagcatagttactcctatcaaatatactatttttaaaatcttgcatactgttttagacaagaagcaaaaaagtggaattggtgagttacctattctatgatgtatagggtatcattaaggtaaattaaattagattcgatgtaataatttgatatgatatgattgataaaaattggcgttactttagcatgcgatcaatgtgattagaggtttgatcctcatgtccacgcatatagaataacatttggtaggacttggagaaactaattccttaaatgcattttaatatttcgagggattaatttctgactctcaaccatagataccttgggttaaaaacagaaaataagatttgatccagtgtaaattagtggcatttcaa

SEQ ID NO: 15354 - DNA, 478 bp, Glycine max
acaaatcccacatgttctcacagataaaagagatacgttttggcaattcaattgatgaattaggagttgtaggtcacctctcttgcacctcataacagctctaaatcaacacacacaaatattagtcaaaaccgtaaattaaataacacactacttctacaatccataatatatatacacacacaatacaaaaaatatcaacagagtccccaaccttaatcaatccacatttaaattataacaaacgcccttcaagatacaaacaatgtcatctcgcattgttgccgagaatgctctatcgctcaccaatattgtcacgcctccatatttcgacctaatggaactggacgatctcacgcgccgaacctccgccggagacatgcccacgctcggacagctcctcaagcacgtcggagacgtgcggaaggaagcctccggcgacggaagcgagacgcccgtgcaccacgctctcgacatc

SEQ ID NO: 15355 - DNA, 542 bp, Glycine max
aacctcaatcaatccacatttaaattataagaaacgcccttcaagatacaaacaatgtcatctcgcattgttgcggagagcggcggagagtgtcgatcggaaccgacataatccacgacccgatccttctattcctggacgagccaacctcgggacttgattcaacgagcgcgtacatggtggtgaaggtgctgcacagaatcgcacagagcggaagcatcgtgatcatgtcgattcaccaaccgagttacagaatcctagggctactcgaccgcatgatcttcttatcacgcggccaaacagtgtacagcggttcaccctcgcagctaccgctatacttctcggagttcggtcatccgattccagaagccgataacagaaccgagttcgcgttggacctgattcgcgaactggaaggctccccagggggaacaaagagcttggtggagttcaacaagtcgtggcagagcatgacgaagcaccaccaggaaaaggaagaggaaagaaccggcttgtcgcccacgagaccgcccacgagaccg

SEQ ID NO: 15356 - DNA, 531 bp, Glycine max
gctatcagttgatattgagtatcttagtaatgtgctctctgctctttcaatgccaatccctccagttctggctacattccaaagttgtctttctactccaagaaaccagctaaaagatcttttgaagacagattcaggaaaccaacttgatatgccaacagcaaacctcgtctgtaagatgcgacgagtgaacttggattcgtgaatgttcctaactaacttcaagcaaccgagccccttccaccctctctccctttttccagacatgtttttgcgttgcagaggagattcttttacatcggcaatgcctacttgcagttttttgtcatgtgggtgaatatacctattacctacttgcatattgaatttgtaactagttacaaaagggatacaatctcctgcatattatatcttctgttttaatcggagaaaagaaagagtagacggtcagcaattgttgctttttttcttttccttgtaacgcgtttgtattgtttgaagccaatctacaaaagatgtagctctcgcgtg

SEQ ID NO: 15357 - DNA, 629 bp, Glycine max
gtccaactcatcatcaatgatttcacttataaaaaacaaaataaaccaccttgctcctccaacacaccactattcttcactcctcctcctccctctctcttccaaacacacatcctcaaccatggcagcaccatcttcagagacaaagtcaccatcatcctcgaacacgcagcttccgctgaaaccaatcccaggcagctacggaatgccgttttttggagcaataagcgacagacacaactacttctaccaccaaggacgcgacaagttcttcgcgacgaggattgaaaaacacaactccaccgtgatccgaaccaacatgcctccggggcccttcatctcctcggaccctcgtgtcgtcgcgttgttggacggtgcctccttcccgatcctcttcgacaacgacaaggtcgagaagctcaacgttctcgacggcaccttcatgccttccaccaagttcaccggcgggttccgcgtctgcgcctacctcgacaccaccgaacccaaccacgcactcatcaaacagttcttccttaacgtcctcgccaagcgaaaagactcttttgtccctctgttccgaaactgcctccaggagtcgttcgcggagattgaggaccagttgagtaaaa

SEQ ID NO: 15358 - DNA, 1396 bp, Glycine max
gctgaatctatctctgatggaactctggcacaatttttgaagaggcctggtgacagggttaatgctgacgagcctattgctcaaattgaaacagataaggtgacaattgatgtttcaagtcctgagtcaggcgtgattctaaagcttctagccaacgaaggtgatactgttgagccaggtaacaagatagcaatcatttcaaggtctgctgatgcaactcacgttgccccatctgagactatatctgagaaagctgctcctcagccaacccaaaaggttagcgaggagaagaaagccccgaaagttgaaactgctcctgctaaagagaagcccaaaacacctcctgccactctgaagtctcccactgagccccagcttcctcctaaagaaagagaaagacgagttcctatgacaaggcttcggaaacgagttgctacacggctgaaagattcccaaaacacatttgctatgctgactaccttcaatgaagttgatatgactaatttgatgaagctccgttctgattataaggatgcttttgttgaaaagcatggagtcaaattggggcttatgtctggctttgtcaaagctgctgtcaatgcactccaacatcagccgattgtcaatgcagtcattgatggtgatgatattatatacagagattatatagatatcagcatagctgttggtactccaaagggccttgttgtaccggttatccgcaatgctgataccatgaactttgctgatatagaaaagcagattaatgcttttgcaaagaaggcaaatgatggatctttatcaattgatgagatggctggaggcactcttacaatatccaatggtggtgtttatggaagccttttgagtacccctattatcaaccctcctcagtctgcaatcttgggtatgcattccatagtgagccgtccaacggttgttggaggaaatattgtcccaagaccattgatgtacgtggctctaacatatgaccacagaattattgatggaagagaggctgtgttctttctgcgacgcatcaaagatattgtggaggatcctcgtaggcttctgctcgacatatgaagtgaacctctaattttaaatggagtaaattaaacctcaaaattcaaataccataatgggtacccttttgtttaggttttgaattgcggctgcccgtaatttataatctgtaatgagcaaactctttaggatcatatcccaatttccgttcgatattaattcagcatggttgtgttttttctacctactattcctctcatttaatatgaagagggtcacagtttttggctccaaaattgtatgaaacgactatgaactatactgtaaggattgcccctggagtaataatacgatttcttttcatggcact

SEQ ID NO: 15359 - DNA, 406 bp, Glycine max
atgaacttgttcggttcatttacttcatgttacttgactagtggaccattttccaagaccgcagtgaattacaatgcagggtgtaagactgctatggcaaacgtggtacaggcaatagtaatggcactcacactacaatttttggcgccactatttggcttcacccctcttgttgctctctcagctattattatttctgccatgcttgggctcattcattacgaagaagtcatccatctctacaaagttgacaagtttgactttgttatttgcatggctgccttccttggagtcatctttataagcatggacgttggtctcatgctgtctgttggtctcggcgttcttagagcactttcatatgtggctagacctgcgccatgcaagcttggaaagttacctgaaa

SEQ ID NO: 15360 - DNA, 432 bp, Glycine max
gggcatcctacaggaattggagtggaaaaatggcacaatataaaatgctttatcattaagagtttgaaccatcaaaacatccatttgtcaattgagaaaggaatttgggctactcaaatcatgaatgaaccgattctagaagaagcttttcataattcaggcagtgtaatccttatatttagtgtcaacatgagtggttccttccaagggtatgcacaaatgatgtcctccattggaagggggagagacaatgtttggagtgagggaactggttaaagtaatcctctggggtccagatttttaaggccaatatggatgtgttggaatgatttgcctttccacaagacactgcatctcaagaatcggttgaatgactataagcctgtcaaatttagcagagattgccaggagttatctccagacatgggtcta

SEQ ID NO: 15361 - DNA, 608 bp, Glycine max
ggaacgtccaccaacctcaatttcaatctcatccacatctcaaaatctcaaatcaaaaatcgaatattcgaatttcaccgcttcgaaaccctttctttatcgccagaaaattttcaaaccctaaaatccgaatttcgctgatgatctttcctaatcgtcatcataccaaacaatttttcttcatatctgtctccgggagagtcgctttgacgggaaacaagggttttcgctgcaattctaatcggtcaaattggaatcgtcggatcaatttgtcatgaagttcctggagtgttctgctttagatcggcttaatgatttcttgggtaatttgaatctgggagaacgtactatcaaaggatgccttgaagcttatagttgcaaacatgctggatcggataaaaaactctccatcagtttggagacagagattcttgattatcttgggaaatcatccgacactgattcctcctcaccagatcaaaccttcttaaccagaaccagccgaaagacattggtttacctggttctaaccctgtatcacatgtatcccgattatgacttcagtgcagttaaggctcaccagtttttcacagaggaatcacgggaca

SEQ ID NO: 15362 - DNA, 434 bp, Glycine max
ggctcgagcggattttctttctttttaacatgctttggattcctaattttgactttgacccgttggagagtcgctttgacgggaaacaagggttttcgctgcaattctaatcggtcaaattggaatcgtcggatcaatttgtcatgaagttcctggagtgttctgctttagatcggcttaatgatttcttgggtaatttgaatctgggagaacgtactatcaaaggatgccttgaagcttatagttgcaaacatgctggatcggataaaaaactctccatcagtttggagacagagattcttgattatcttgggaaatcatccgacactgattcctcctcaccagatcaaaccttcttaaccagaaccagccgaaagacattggtttacctggttctaaccctgtatcacatgtatcccgattatgacttcagt

SEQ ID NO: 15363 - DNA, 668 bp, Glycine max
gtcgagcgaatccccactcccaaacagcccgcagaccctgccttagttcgctctctcctcaaccaagcttcttccggttctgcccctgctcacctccgcctttcttccattcgccgactcagacaactcgctcgcgactcggacaagaatcgttccctcattgcctctcacaacgttcgccagatccttctccctatcgttttcaacaacggttcggatgagttgaaaaacgaatcgctcgcgctactcgttatgtttccgcttggtgagtcggaatgtgcttcgctcgcatctgattctgtgaagattggctatctatcgcggatgttgacgcataactcgttcgacgtccgagtcaactcggccgcgttgatcgagatcgtcgtcgccgggacgcactcgccggagctacgcgcggaggtgagcagtgtcgacgaaatctacgacggagtggtggatctgctccggagcccgatctcgcacccgcgcgcgctcaagatcgggatcaaggccttgttcgcgctttgtctggtgaagaatacgcggcagatcgcggtggacgccggcaccccggcggttctagtccaccggctcgcggacttcgagaagtgcgacgcggagagggcgctggccacggtggagctgctctgccggattccggcgggatg

SEQ ID NO: 15364 - DNA, 484 bp, Glycine max
acacaccttgcaaaaaccgctattgttgattaatacctatattctccatatattgacactcattcaactatggaaaactcaacaatgggtagtaattgtcttaccacatgttgtacggggaatttcttcaagaaaaagaaatctctccccattgataccatattcaagcttcctgttcctgttgcaaattcttcttggcctcaaggtggtaattttgctagtggaataatcgatctgggtgggctacaagtgtctcaaatatcaacattcaacaaagtatggggcacctatggcggcggaccggacaatcaaggcttcaccatgtttgaagcatcaggaattcctcaaggtttctttatgttaggtagctactgccaacccaacaacaagcctctttttggatgggttcttttggcaaaagatgtgtctaaaagcacaagcaacccactttaaagcaaccaatcgattacacgcttgtatggaa

SEQ ID NO: 15365 - DNA, 911 bp, Glycine max
gcatgaggtttcatctcggacaaaggatcatagagttgatgtgagaagactgtcttaccgtgaattacaagtttttagaaaacgatggcagaaggcagttgaggaggatgaatttttgactattagtatttgttattgaaatggatcgatccaacttatattctccataaacacatcaaactattagcaatttagcaccttctactactttgtaatcgttcaagagttgtgaactgtgaagaatgagttcaacaagccgtgcttggacttggagcgtggcagcaagtgttggagtggtggaggccttgaaggaccagggtatatgcaggtggaacagtgtgatgagatcagcacaacaacatgctaaacataatatgaggtctttgtctcaaaccaagaagttttcttttcaatcatctgcgatggcttctgccaaattgaaagatgagaaagctaagcagtcagaggagtctttgagaacagttatgtacttgagttgctggggtcccaactaaacaaagatgctaagacttcatgcaattttggatttccctttttttttcgctcggaatatgatgaggaatgaaagagccagaaggtgcaccaatcacagaagtgtctcaactcccaactaacatgttatgttacatgcatgctgttgatttgatccgatcgaatcagaagcttaattaattgagaaatgagtctgaagcatgcattttgctgccttggagagacatgaaatggatttggaagaggggtcatcattggaatgatgaaatttcagacagaaattgctattatgtataggattttttatatgatgacaccaaggttatgtattatgctgaataactgtaagatgtaatttataaagctaaacaagtcttgagaaatgacttttctctatg

SEQ ID NO: 15366 - DNA, 607 bp, Glycine max
gattcatcttcaactcatcaattaatattctccatacacatcaaactagacatacactacctagcttgttcttaaattccacacaaacacaacaaaaactattagcatcatctactttctagcttattgttcaagagttgtgatcaagaatgagttcaacaagccgtgcttggacttggaccgtggcggcaagtgttggagtggtggaggccttgaaggaccaaggtatatgcaggtggaacagtgtgatgagatcagcacaacaacatgctaaacataatatgaagtctttgtctcagaccaagaagctttcttctcaatcatctgttatggcttcagccaaattgaaagatgagaaagctaagaagtcagaggagtccttgagaaccgttatgtacttgagttgctggggtcccaactaaatacagatgcatggattttatgcaattctggatttctttttttcttctcttcttggaatatgaattgcaggaagatgagaaatggaagactcagaagatacaccaatcagagaagagtttcaactctcaaccaacaccatgttacttgcatgctatgcttgaacacctgttgatcaaaccgatcg

SEQ ID NO: 15367 - DNA, 729 bp, Glycine max
cccacgcgtccgattctccatacacacaacaaattagacactaccttgttcggacattccacggacacaaaataactattagcaatttggcatcatcaagaatgagttcaacaagccgtgcttggacttggaccgtggcagcaagtgttggagtggtggaggccttgaaggatcagggtatctgcaggtggaacagcgtgatgagatcagcacaacaacatgctaaacataatatgaggtctttgtctcagaccaagaagctttcttctcaaccatctgctatggcttcagccaaattgaaagatgagaaagctaagcagtcagaagagtctctgagaaccggcatgtacttgaggggctggggtcccaactaaacacagatgcatggattttatgcaattctcgatttctttttttcttctcttcttggaatatgaattgcaggaagatgagaaatggaagactcaaaagatgcaccaatcagagaagattctcaagtaacatgttacatggatgctaatatgctatgcttgaacacctgttgatcagaccgaatcagaagctgaactgagaatatatagtctgaagcatgtcttctgctgctggggagagacgtatggattggatttggaagagtgcgccagtaccaattcatggcaatcgccttaatttgatcgataatcatctttggaatgatgaaatttgagacagcaattgctacatatgtat

SEQ ID NO: 15368 - DNA, 395 bp, Glycine max
gattcatcttcatctcatcaatcttttcaattctctatgcacacatcaaactcgacactaccttgttcttaaactcacaacaaaaactatttgcatcaccaactactttctagcttattatatattcaaaagttgtgaagaatatgagttcaacaagccgtgcttgggcttggaccgtggcagctggtgttggagtggtggaggccatgaaggatcagggtatctgcaggtggaacagtgtgatgagatcagcacaacaacatgctaaacataatatgaggtctttgtctcaaaccaagaagctttattctcaatcatctgttatggcttcagccaaattgaaagatgagaaagctaagcagtcagaagagtctctgagaaccgtcatgtacttg

SEQ ID NO: 15369 - DNA, 556 bp, Glycine max
  unsure (1)..(556): unsure at all n locations
cgtgacttcatcgaagtcatcttcgagacccctggcaaggtcattcagtcctacaaccttgacggctattctttcttcgctctcgcggttgagccagggaagtggaccccagagaagaggaagaactacaaccttcttgatgctataagcaggcacaccattcaagtgttccctaactcttgggcagcaatcatgttaacctttgacaacgctggaatgtggaacttgaggtcggagatggcagagaatcgttacctgggacaacagttgtacgtgagtgtcttgtctccaaacaggtctctaagggatgagtacaacctcccagagacccagcttctatgcggaattgtcaaggatatgcctaagccaccaccttactccagttaagaaagtttttctcttctgagatgtatatatatacaccaccagtaagggcggagctagaatttctatgtaagggggctaatataaaaaaaattaattaatacttgtataaatgtatcatgaattnntaacttttagataaaatgttttaataaaaaaaatttaattactc

SEQ ID NO: 15370 - DNA, 406 bp, Glycine max
caatcatgttgacttttgacaacgctgaaatgtggaacttgaggtcggagatggcagagaatcgttacctgggacagcaattgtacgtgagtgtcttgtctcccaacaggtcccttagggatgagtacaacctcccagagacccagcttgtctgcggaatcgtcaaggatatgcctaagccacccccttactccagttaagagatttttcttctgcgatcatcatcagtgccaccacgtcgtagctccaaaattgttccatcatgagattgagacgaggggttaattaattagctctagttcatttctcatgtttcttgcgtggtcactgatgtacaaccctttcctattcattttctatatcaatatcacataaatatatatatgaaagtctccttccttttcct

SEQ ID NO: 15371 - DNA, 730 bp, Glycine max
tgtccacaacacaagaaaaccaacctaattccgagaagaagaaacacattcattgcctccataaacaagaaaatggaacgctctacaaaactcttctcggcggcgtggggtctctgcgtggttgtgatggcacaccagacagcagcacaggaactaagaggaaagaacctaatcaacagggcttgcacaatcaccccgagcagagacctctgcggtgggatcctctgatcggacccaatcagaagccctgacgcagacctcaaggacttggcacgttatctcccttagggttgctgccagaaacgcctacgggatcctcagcgacgccaaaatgttgatcgacgaccacaacctagaccccgacgtccaacaaggtttggctgattgcaaggagacaatcttggacgccgagagccagctcgaggacaccattgcttctttgttggttggttccgacaccgacgcacaggtttggctcaaggctgccgtggccgcaatcgacacctgcgacgcttccattcccggagacgacgacgttctctccgtcaagagtgccatgttccgcaggctgtgcaacattgccattgccatcagcaagctcttgaacaaaccacttaaattctaaacttgtcgattgtcgtcctttcctttaactggttttttcttcatcatcctgtgtcgatcataatctgaatatcttccgtaatttcatttacggtattaacagtgc

SEQ ID NO: 15372 - DNA, 581 bp, Glycine max
  unsure (1)..(581): unsure at all n locations
attcggctcgaggttgattttttttatgaatgcagagaaggtggaagaagacacttaagctgcgatttttatctcaaactccatgaatacatgttcgttttcttgctttgtctatcaaagcttaaatttgtgttttgagccttctccgacgtgcttcccctgccattttcaatttttatctccaaactccatgaatacaggttcgttttcccttcccgtcttcttctatgttttctttttttacctctatttgcatttgtatgcgttttttattttttcactgcatgttcattgtttcttctaaagctgcgatttttatctcataaagcttcgatttttatctccaaattccatgtacagaggttcgttttcttgctttctctatcaaagcttaattttttttgtgttcccgagctttctttgtcgtggttcccccgccattttcattttttatctaaaaaaacttcaatttttgcctagatttattatattatacttcaattggtattattaatttattcatcatctttaactttctatattctgacagnacttttgcttttgctattttatttttcttt

SEQ ID NO: 15373 - DNA, 423 bp, Glycine max
  unsure (1)..(423): unsure at all n locations
gtgattgtggtgataatgtttgaaagattntgaatttggagagctggaagaagtattgcagtattatcctcaagggtaccatggagttgataaggaaggtaggccagtctacattgagagacttgggaaagcccatccaagccgcctaatgcacgccaccacaatagatcgatctttgcaataccacgtccaggagttcgagaggaccctgcaggagaaatttccagcatgctccatagccgcaaagagacggatttcttcaacaacaacaatatttgcatgtacagggcttgggaatgaaaaatttctcacgtactgctgcaaatctcttgtctgctgtgacaaaaatagatagcagttactatcctgagacattacatcacatgtatgttgtcaatgctggttctggctttaagaagatgc

SEQ ID NO: 15374 - DNA, 806 bp, Glycine max
  unsure (1)..(806): unsure at all n locations
ctcgccaacactaaaatggcacttccatacccattttcctatctcctcttcctccttctaattctcttatcttctctcccaaacatttcccaagccacctctcgtgccccaaatcgcatgttagccttggttcaaaaccaaccgcttgtactaaaataccacaagggtcctcttctaaagggcaacatcaccctccatttgctatggtacggtacatttacccccacgcaacgatctatagtcatcgatttcctcgaatccctaacctccacgtcatcacctgaatccccttcagtttccacgtggtggaaaaccaccgagagctacaggggaggcccctgcaccctcgtcgtagggaaccaaatcctcgatgaaacctactccctcggaaaatcactaaaaaacgaccacctcgtagctctggcgtcgaatcctaaactaaattcggcgcccggggatcgtgtcatccacgtcatcctcaccgcagctgacgtggcggtggaggatttctgcatgaaccagtgcgggacccacgggaggggcaagaacggaaattcagaaaagatcgcgtatgcgtgggtggggaattctgttacgcagtgtccggngcagtgcgcgtggccgttccatcaaccgctatacggtccccagacggcaccgttagtggcgcctaacggcgacgttggggttgacggaatggtgataaatttagcgacggttttggctggggcggttacgaatccgtttgaggacggttactatcagggtccggcgagtgcgccgctggaggcggtgtcggcgtgcac

SEQ ID NO: 15375 - DNA, 868 bp, Glycine max
aaagagttcattcagaaaccccgacgaactaaattttcaaattttgtttccgatctctgaagaagagagtgatggcggaaccttggagaaacatcgacgtggagaagctgatctcgtacagcgacgacctcgtcaaggtgttgtcggagggtccgcgcgacctcaacaacctctctcactctctccaacaaacacgcgccctttcttcctcctgcgactccgacctcaatgaagctcgctccttcctccatgactatcagaacaaagtagatgcatgcaagcagaaaatagaggaagctagatccgagactgctgctgatggagacccggatcttctacaaagagaactggaggaagaacttgagaaagaacgctggttgaaagaggagtttagagcccatcggtgatgagtttaatgatctagaacagcaatggatttctgtccaagagcaaaagaagaccatacagacaattgagaaaaataagcagaggacacagatggtactttcaatgtatgcttctgtcacaaatattgtgcctaacttggatgaacagtccaaaatttcaggctatattgtgcaaaaggataaaaacgctgttgagaagtttgaatatgacacctcaaatatgactgcccttgatatatgtaatggtatttgcaaaataataagtgagtgatgcatgtcaactagataagttgatacatgcaacaatgtattatttctcagttttgagtggcaaattagcgatcctgcaattcagttacatattggtgtaagaattcaatgtcttaatttattgtgaatgaaaatcttgcaatgttgatattgactactgagagggggcaatatagcttgcaatcagtttc

SEQ ID NO: 15376 - DNA, 442 bp, Glycine max
  unsure (1)..(442): unsure at all n locations
cgacgagctatttatttcattctcccatgggatttcctatgtcaagtttccgatgactccaatcaacctgcattgatctaaatcccatacttgcatatcacgtgtgtctccttcgcacaaccattgttccttgcgaaacagaccgaatagtgtgcatcgccaccgattcacatcacagaactgcatttgagtgactcatggaaccagcttcagctgattcttcatctcaacctactcctccagcttctaatactgatgaacaacactcaaccagagtgtctggacaacctggccatgcacatgattcgcaattgtcgtcacccacttctggcatatcatcctgngcaagagatctgaaattcccacaggccctcgngcttggagcacaacagaactcccagaccgaaaatgctggcatgtcagcttttgctcgcctgactgg

SEQ ID NO: 15377 - DNA, 516 bp, Glycine max
ccagaatgttagtgtctctgtgatggttgggaggaaggattcaaataaggttgctcgtgtaataaacaagtccatgtttgattacatcgatcgttcatcatatagagccttggcttttgattacctagacatatcccctggctacccatttttgtctggcatccgtgcatggatctctttgctattcatggaagatagaaatgaagatctcatggatgtatttgggatccaaatggatttctgtgatgtagcaaattctaaggaagaagtcttgtggctgttggacatgcttgactggaagtaaatgttcaagaaaagtgtggtgccccatcattacaacaaaaagtaattggacattgtgattttatgttaacttgtttgttgatacggggtgcattacaaagtttaccatattatcagcaccaataatttgcgtaatttggtattaatatctcgtgtgtttggagtatgtaaatactcgtataatctattatcatcaataaaaagcctttgttt

SEQ ID NO: 15378 - DNA, 638 bp, Glycine max
ttcaggtcctgaaggcatggttccagaaaatagtgaagttgctgaaactttgttaggtcaagttgacagggctgctgtattccacaatgcaagtacacggttttgtgatggagcacgctttgggcttggcgcaaaggttggaattagtacaagtcgaattcatgctcgaggtcctgtaggagttgaggggttgttgacaaacagatggatattgagagggagtgggcatgtggttgatggagatcaagggatcaattacacttacaaagagttgccactaaaagcataactttgcatgcagaacttagctcactttcaagctataacatgctcacctcaacaaagcagcatcacttttctgttctgttatgatatgcagaagttgctgagatgctggccatgtataatcgtaactatcacttgaccctttccagggcctttttcttacctggagcaagctcaaggggggaggaaataatcgtaggaatgctactgtttgattatacttttataacatattccgagtttgtaaaacagcaatgctgtgacagttacaaatattattcactacgtactagtgaacttgaataattacggagaagttattattatagagaattcaatttgttttgtgcaaa

SEQ ID NO: 15379 - DNA, 458 bp, Glycine max
cttactttgcaattgcattcccagattcatttcagacaacgcaacgttagctttcccacatacgctaactcaataaccctttcattccgttcattgctctttccagattctattttgcctcttagaagttggaatagagaactagagctgggtggatggaggatgacaagaggaggaggaagaacaagaagaagaagaacaagcagaacaagaatgtggaaaatggggtgggagaaactgctaatagggatcagaatctgctgagtaatggaaaggatgagcatactaatctttccaagactgcaaatgagcaaagctcgaatgtcgatttgaatggggttggagagacattaagtagggatcacaatctggtaaataatggtaaggatgaacctgctaatctttcaggagtcgctgatgagcaatgcatggatgcagatcggaatggggttgttgaa

SEQ ID NO: 15380 - DNA, 468 bp, Glycine max
caacggtctggctcacttgcatcgctcgttccttggctcactcactctcactcagtcatcgtctctctctctctaaaaccaaaccctttttttctcacttttcttccttgcggcctctttctctgcgttgtgttgcgttcatccctgtttggtgcggtgggagtttctggtcttttcgctgccccccattatcacacggtccctctccatccacgtcatctacgtcttcttcgtatcgtaccctccccaccttcctttcttcctctccctcttctcactatataacaattttctcacccccttagggtttccaaaagccattgtccgatttcgcactgcgcaacccttttctcccaccatgtctccttccacttcctcctcttctccgcaattcattcttccacgcttcttctcacgcgtttgaggctttcggtccatgggcactcgagttcggtcatgcttgctgta

SEQ ID NO: 15381 - DNA, 382 bp, Glycine max
ccacaagtgttcctttttgtttgccgtatgttatctcagccactatagataaccatgagacacactccgaagattggtgttcacggtgtctttgtgtgttataatatattggtattgttgttgagcagttttcatgaatcaacatcatcctcttcccactgtaaagcatggctagtgcaatccattcccaccgatatgccccacttatcccatgttccaggcaccctctctaccggggatgtacttcggtggctggctgcaaactccaccacgaggcttcacataattggtcagtactggcagctgttaccttctcccaacgatcctcgctctggggactatggttacactcagcatcagatgcatgaatttggtgccgatc

SEQ ID NO: 15382 - DNA, 697 bp, Glycine max
  unsure (1)..(697): unsure at all n locations
cccacgcgtccgtaatgccctgaaagcaaagcaaaacaaagcaaaagctctagcttctgctcatcatcataaagacaccattcagactcttccctccatttttttttaacaaagttggccatgaataccataaccctcttgcttctttttcccttttttactcagtttttggaagttgagcctgcaagaaccaagcttcctgggaaaaccaggttccccatctcacaaatcagtgtgatgggttttgtgtattgtgatttctgctccaacaacagcttttccagacacagctacttcttgccaggtgctgaggtcaagagtagattgcatgttcaaagcactttcagagaaaacctctgagcagatttcactttcagtgaacagaactaccaataagtatgggatgtacaagctggaaatcccttcagtggatggagtgaaatgtgcagaagattctgcagttgtgtcttcttgccaagcaagcttaataggtagttcatcctctgcttgcaatgttcctggctacaaaaccacttctaatgtgatagcaatcaaagcaagaagagccaatctctgcatatacagcttcaatgctttgactttcagaccatccaagatggacatcaccttgagagagaattaaaagaagcagcttacacaagtaggcctagtactttggncacttgtgtatacatac

SEQ ID NO: 15383 - DNA, 526 bp, Glycine max
  unsure (1)..(526): unsure at all n locations
gccacgaagctcggattcgctcggcgctgtttttttaactttcctttcccgatctccggccataccccatgccgctcgctgtttagggaatcgaacttgtgaatggaactgagttgattttctaagatggaaaaggaaaataaggtgaaggacactgcaagtgatgacggtgattgttggtggtggttggttcaagaaaggaacaacagctgtattcatcactgttgggttgtttgcattgttggtccgtgtggctgtgtcactgcacccttactccggcgctggcaaccctccgaaatttggggactatgaggctcagagacattggatggagatcaccattaaccttccaattaaggaatggtataggaacagctccaacaatgatttgagatattggggacttgactacccgcctctgaccgcgtaccagagtttcatccatgggctttttcttaaattcttccaccctgactccgttgctcctttcgcttncagaggtcatgagtcctatcttggaaaacta

SEQ ID NO: 15384 - DNA, 845 bp, Glycine max
gcgtacgtaagctcggaattcggctcgagcaagggatcatcatcccaagatgatgaagatattcagctccaaggcatcaatgatgatgataaaaataacaacaactttgaaagcactactaagctagtgaaccttcatcatcttcagcacaaagtaagaaacaaagatgagcatcaagagggtggtggtggtggcgtagataacatggtttctcatgaagagtttgattctattttgtcttttgagaaccttaacaatgctgcttgggacaagtccacttgtgattccatgccagaaaagagttctgaagctgctgctgagtattctgttgatcatcatcatgatatagctgctgctcatgagaggaacaacgtcaggcaaaaatctgagaacagtagtggtgctcctccattgtcatttcttgagaagtggctcttggatgaaagcgttggtcaccaagtggaggagatgatggagttgtctccgatgttctaaattaacatggaattgggtccccaatttaatcccttcaaggttgggatagtgacattcaaatgatcatatgatattagtcagatgaaagaagagatcaaaggaatgaaactctttgagatctgactagggtttaatccatttacaatggtggtgagattctcagaagctatgggggctctctttcaacttgtaacttggaagtctatgatgaagggtttaattatttcaagtaacactatatgcttagtgcatcttgctctctttgccttgtagaaaactacaaattaatgttaacttcatcagctcaaataattatacaattaataacagttatattttcaagatttgac

SEQ ID NO: 15385 - DNA, 632 bp, Glycine max
  unsure (1)..(632): unsure at all n locations
gcgcnacgcgtccgtgaaaacatggaatgggatgggcacctagggagcaaacctacgaatccacacgtggtagaggagcttgtggaagctcaacctaccaataaacaagtgattgaagatgttaccaataataagcataatgtggcagtggcacctaataagacaggtcgaggatcttcatggctgcaaaaacaatcctggacacaaatggttagtcagaataacaattcatttagcatttcaaatatttttcctggcattactttcccagagccaatggccacggagcccattgtggaacctgccatttccaatgattgtaagcataatggtgtagctaaggatactgttaatgaagttgtcagtgatgggtttagctcaagggagactataccagtaaagagtcagcatactggtgccgatgacattgcttctgcttcagtaggtgaggaaaaaggtgaaacaagtccaagggaaaaatcctctgaaaatgttgaaataggcgaaacttgctcatttatgagaagtgctgcatctttgaaggaatgggcaaaagctaaggctgctatgagtggatcactcaaaagaaaacacggtgagaagggtgagaaggaagatcgaaaggttcccat

SEQ ID NO: 15386 - DNA, 605 bp, Glycine max
  unsure (1)..(605): unsure at all n locations
aggaaactaggtgttcattttttagcaagagaggccttcatcaagtgggaatgtggatgcatgaatgccattgtgcggcatcatctacttcatttgattgtttagggttaaacaatggttgggatctcccaagtagtttatgtccctgttgtgagcctagctctccggtatcagagcagttgcattgttggagagactactataagtggagatgcatcccgctagactcgcctgttgctttgcttcttcaatggccacttacaatatatcatgctgctcgacttgttggaattacagccttgaatcctgaaatcagtgataagttgtacattcattaccttggacctgagaaagagttgctacaacttgctgtgtttggagaattactggcactcttccccggtgtacgaattcatatagaacttgttggacctgcaattcctcctcaaagggatggtgagatgattcacatttctaagtatccttgttgcaatgaagacgaatgtgaatgcaaaataggaagtaaaaatacattcttagaaacacaatctggtatcacttncactttgacattgcaactttggcaaggattctatcatgatcga

SEQ ID NO: 15387 - DNA, 1175 bp, Glycine max
  unsure (1)..(1175): unsure at all n locations
tcctagtttacttttccttgcatccaaaagcctcctcctccttctcttgttcaaccttcccacaaacactgcatgcgtctttgaccacaactgcttcttcaatttccaatctttttggacaccctctattgctcttcctcccttggtgtagtttgtgtaaaagggtatctctatttatagagtttccattgtctctggaggcaattttcgaccttaggtgtgttttggagagtttttttttttttttttgtgttgtttagttgttgaggttggttggtttgtgagagagagaatggtgggtgctctatctgttgtgggatcatcagtaatggactctcacactggcccttgtttgtgtgtggatgctctcccaacaacaactagtgtcaatctcaagagtggtggagatgttgttttgtgcaagaatttgatgggaaggaagcataatttggtgaagcatggtggtgggaccatgaagttgagcagttcatttgttgatcctggaagagagtggaggctctttgttagcaaaagttgcaagaggcagcgcaaggataggagagtgaccattgtcaatgaacttggaggacaatatgaggacacttttgaagatgttaaagcgcaaatgctcaactatttcacatacaaggctgtgaggactgttcttcatcagttgtatgagatgaatccacctaaatacacgtggttctataattttgttgcttcaaacaaaccagcagatgggaaacgttttattcgatcccttgggaaggagcaacaagagcttgctgaaagagtgatggtaactcggcttcacctttatggtaaatgggtcaagaaatgtaaccatgctgagatatatcaagaaatctctgatgaaaacttggagttaatgagggaacggctcatggagacagtaatatggcccacagatgacacaaacacagaaaagattggctgataattcatctcaaatttttactttctgtcttcaacctcttcctagtctaggtatattttttgtttcaatatcaatctgttttgtttccaaaattgtcatttgtgtcattttcctttaataggattctcagttttatgttatgtaaattatgtatatatatgtaccttgttaaatacacaatccattatgtatcgctagtttcagatgaaaaann

SEQ ID NO: 15388 - DNA, 659 bp, Glycine max
ccaaatgcaccctgaatatgttatgcatataacttgagtttattgaatatttctctctctctaaatttgccagtaattagctattgttgaggagattcgagcaattttaaatagttcagtatgatgattaaactagaatctggtgattcaatatctatctcatcatgatttagataattgtttgttgtgtttttctttcttggtagttttgttgcatcaaacaaaccagcagatgggaaacgttttattcgatcccttgggaaggagcaacaagagcttgctgaaagagtgatggtaactcgacttcacctttatggtaaatgggtcaagaaatgtaaccatgctgagatatatcaagaaatctctgatgaaaacttggagttaatgagggaacggctcatggagacagtaatatggcccccagatgacacaaacacagaaaagattggttgataattcatctcaaatttttactttgtcttccaacctcttcctagtctaggtatattttttgtttcaatatcaatctgttttgtttccaaaattgtcatttgtgtcattttcctttaataggattctcagttttatgttatgtaaattatgtatatatatgtaccttgttaaatacacaatccattatgtatcgctagtttcagatg

SEQ ID NO: 15389 - DNA, 514 bp, Glycine max
cccaaaagcctcctcctctttctcttgttcaaccttcccacaaacactgcatgcgtctttgaccacaactgcttcttcaatttccaatctttttggacaccctctattgctattcctcccttggtgttgtttgtgttaaagggtatctctctacttaatataaagttccattgtctcttgaggcaattttcaaccttagttgtgtgttttggagagtttttttgtgttgttttgttgaggttgggtttgtgagtgagagaatggtgggtgctctatctgttgtgggctcatcagtgatggactctcacactggcccttgtttgtgtgttgatgctctcccaacaactagtgttaatctcaagagtggtggagatgttttgtacaagaatttgatgggaaggaagcataatttggtgaagcatggtggtgggaccatgaagttgagcagttcaagtgttgatcctggaagagagtggaggctctttgttagcaaaagttgcaagaggcagcgcaa

SEQ ID NO: 15390 - DNA, 429 bp, Glycine max
aatccacctaaatacacgtggttctataattttgtgaagcatggtggtgggaccatgaagttgagcagttcatgtgttgatcctggaagagagtggaggctctttgttagcaaaagttgcaagaggcagcgcaaggataggagagtgaccattgtcaatgaacttggaggacaatatgaggacacttttgaagatgttaaagcgcaaatgctcaactatttcacatacaaggctgtgaggactgttcttgcatcagttgtatgagatgaatccacctaaatacacgtggttctataattttgttgcttcaaacaaaccagcagatgggaaacgttttattcgatcccttgggaaggtagtctttttgtcctagttagttatttcatttgttgaaaattttcagtaaacacataaagcatgttattctgg

SEQ ID NO: 15391 - DNA, 594 bp, Glycine max
gccccgtacgtaagctcggaattcggctcgagcgatgctttcggcaaatggcgaatcttgcattctgagcttccgagtccattaactcactgagtcaagcggccgagtcgagatcgcttaacatgttggacggaatactcggcagaggcttcaccgcgaaatgcaaatcgttgatcaaattgacgaacaggcgaatcgatgtgatacggcggaagagaacagcgacagagaagtttctgaagaaagatattgctgatctattgctcaacggtctcgatatcaatgcctatggaagggctcgtggttgagttaacactgtcctcttgctatggtttcgctgagaactgctgcgaagttcgtgttgaagcatctccctgccatgcagaaactgagtgtccttgccgctgacattggtctctatataccacgccactgcgctgccgtgccacctcgccactgcaccgacacccttagtcggccattgtgttagatggctgggtgcgtgctttctttatggtgctttcttggtctatggaggtaattgacgcaggtgttggtcatgctgatccgcgctacaggggttgttaacataac

SEQ ID NO: 15392 - DNA, 570 bp, Glycine max
ttgtctcgtgggagaatcttgaaaatatataaaacattatccaaagagattgtttatttacatatctgattagtccataaaaaaatggtcaaggagtgtcaacatatgttgttgggtattgcattgacacaatgtttattgtctctgcagtttgaggattgcacatttgattggctttactggtcccaagcacgtgagccttactcccctgatacggttgattatatcaaatctctggatgccgagaaagacacagagcttctgaaatatttcgggtgggatgtcccggttgagtgtgcacgaacactccgaatctccacaatgttattgaagaaaggggttgagagaggtctcactccttatgacattggaagcattatgtgtagggaaaatttgaacaaagaatctgtcatcgaggagattatttgtgaagcccaagaatcattgctacctggcatggaggaatctgtgtttcttgaatctgtctcccagatcatggattcccgccttggataagctttcaaaatagactctctttgattcatagttatataataacaataatatata

SEQ ID NO: 15393 - DNA, 581 bp, Glycine max
cgcgtacgtaagctcggaattcggctcgaggctttctttattagtttgctctggaaaagataacagatttcttcggaactaaagtcaagtttggaatgctctcttttgtaatgctgagttgggtggctaattttcttgaggtggaaaagtatctaattttcgtgctgcaatacaaagttccgttttttttttttcgttacatctgatgtactagatttcgtagcactaaaaaggctggtttccaaggaggcaactcttgatttgatgtactgaccaaggaggcaactcgtgtaaatcataaccctgggaaactatgtgcaccatctattggcccttatgttgtaaaatttagctcattattattcctttccaaattttgaaataactcttacattagtctgtatttggaagtttttggagagaatcttacagagatagaatagttgggaaagaataataggccaaatggcttataaacagaggttgctttcctcactttgatgctttatcatattggatgccttgtgaattagataggttatattaaattttttttaaaaaaataaaaaatatggtctgtt

SEQ ID NO: 15394 - DNA, 536 bp, Glycine max
ttagttcatgcccttcttcttgtctctgtttgtttttctctgcggcacgtcctggtttatctttggtctgctaggccgtgatccatttgttgcagtacctaatggtgttggttctgctttggggacaatgcaactaatattatatttcatataccgagacaataaaggcgttacaaggaaacaagccccaacagaggaggaatccatggagatcggggatgtaaagccccaacaagggaagcaatccaatgcaaatggaattcaaggatgatatgtcaaatcacaacacatgccaaagacaatagtcatgtttgtcatttttcagctacataatctgcaactgagagcaagaacctctatgatttgatctgctctttaaaaggctgtaatttacttcttgctaagacactggcacctttaattagccgataatattgcatggaaacaagcatgtggtgggtgagtttttattagcttctttcccctggtcttaaggaatttaaggtgggggcttttttctaatggaccacctaacc

SEQ ID NO: 15395 - DNA, 490 bp, Glycine max
ctactgtactatcaagaggattagcatctaaatgtgcaaatgtcgtagcgggcgcaggatcgggttcactcaaggaagaggtgaactccagagatggtaggattgaacacctgaacagccatttgaacgggcttcacgtggaacatggacaactgattgctggaatggaggaggcacacaaacatgtggaagaactaaaatcaaaagccaagcaacttgaggaagaggtcgagaggcaaagaaccgtgatcttagaaggagcagaagagaaacgcgaggccataaggcagctatgtttctcactcgagcactatagagatggctataatatgcttcggcagcatgttatggggcacagacgagttccagttttggctgcctagttaataaatttgaaacgtgatcttgtatattgttttggtgctatcttcatttctgtcttgggatgttttatggttctagtgtatgagtcaaggtcatgtgtactact

SEQ ID NO: 15396 - DNA, 718 bp, Glycine max
gaatttcgctgttctgactatgcgggatacacatgccagaatagctccatgctcctatctagcctttcggtgtgcaaaaatgtgctgggaaatgatgtttctggacagcattgtgcacccagtgagcctagcatactacagcaactggaagaggttgttgtcatacccaactaccaccgactattccctggtggtgctagaaaattatttaatatatttggtagctcctactgtgacgagactgctaaacggcttgcctgctggatctcaatccagaagtgcgacaaggatggagacaacaggcttcgagtgtgccattctgcatgccagtcttataatctagcatgtggagcttctcttgactgctctgatcagacgcttttcagcagtgacggggaaggggagggtcaatgcaccggctcgggtgagatgaaattgtcatggtttaatcgtctgcgaagcagtttttctttgagaaatagttccttgaaaggaatatctgtaaaatataggcagctataacttttttttttctttttcttttttatcttttggggattcttggttgtaattttttaatccttagatttagggggttgttactcatccaaaattgtttaggaaaaaatggatgaggttgcagaattggctttcaaagaggagccttttgtagagaaaattgggaatctagagatagataaagtagaggagggtaaag

SEQ ID NO: 15397 - DNA, 646 bp, Glycine max
taaaactgatggtcaatcaaaagtacccttctccaataacagagcaaactggttggccatccagaggcagttgctgcaactggaaaggcaacaagttcatctgatgaatatgctgcaggatttcatgggcggatctcatgatagcatggtgactctagagaacagagtgcgaggtcttgagagaattgttgaagacatgtcacgagatttatccatatcatcaggtcgtagaaactttgcaggatttgaaggatcatctaataggccttctagcaagtataatggttttaatgactattccagttccaagtatggaagaggtggtgatggacgcattccatttggtgaaagatttgcccaatctgatggaaatgctttgggaatgaggggaagagggccatcttggagatctgacatgtctgagggctgggatcatcctgggtatggtgcttctagaaatggtcagatgtcctcaaggagggcttttgggggtagttctgctgatggaagatcgccaaaatctgtgcatgagagtgatcaagcaggcaacagaagagcttgggataaagcagcaatgcccattcggcttggtgaggggccttctgctagaagtgtctggcaagcttctaaggatgaagctaccttg

SEQ ID NO: 15398 - DNA, 529 bp, Glycine max
tggagcctgcggcttaatattatgacgtagataggatccgaatccaagttattgtcaagatccatttttgtctgaggttaagttattcttatgtgctgtcacaagagaagcaaaggaggaatattattccacctagtgttttctcggcttagagcatttgaaatgtaatcattgggcaaatttcaatccctccagataaacctatgggaagcttcatgggctttcacgaggtggtgattgatgggaggatccatactcttagattacaagaacctatttcagatgtggcgtggatcaaaagaaggatctaatattgtcaacctgactcaagaaaacttctagtactcatacttgatagttgaattttgtttgccctccacatccttttccggtcatgattttgcttacattcttcatatctgtaacttgccagtgtctgcactgtaaaattccgatgcttcatagttcatatcatgagtagtttgtatccgaatatgacattttttgttaaggaaaatatctttctatt

SEQ ID NO: 15399 - DNA, 674 bp, Glycine max
gggactgttattgttggggatgattgtgcactacctccacctcgagggattgcgggaagaagaggtttggcagggactattctggttcacaaggttgcaggagctgctgctgctggtggtctttctcttgctgatgttgctgctgaagcaaaacatgcatctgaaatagtgggaacaatgggtgttgctttgactgtgtgctcaattcctggtcaagttgcatcagatcgtttggggccaggaaagatggaacttggtcttggaattcatggagaacctggggcagctgtggctgatattcagcccgtaaatgtggtggtttctcatgttctacagcaaatattgtccacggaaacaaactatgtaccgataactcgaggagaaagagtggtccttatggtcaatgggttaggtgccactcctacaatggaactaatgattatagctggaaaaacagttccaaaattacagctagaacatggattggctgttgatagagtttatacagggtcatttatgacttctcttgatatggcaggtttctcaatttctattatgaaggctgatccagttattcttcaacgattagatgctccaactaaagctccttattggcctgttgctgctgatggtaatcacccgcctgctaagattcctgttccaattccagcatc

SEQ ID NO: 15400 - DNA, 494 bp, Glycine max
ctcgagccgctttttttattaacgttggtgattctcttcaggttatgacaaatggaaggtaccgaagtgtgagacacagagtgttggcaaatgggttcaagtccaggctttcaatgatttactttggaggtccacctttgagtgagaaaatagcaccattatcctctctcatgaaaggaaaagaaagtctatataaagagtttacctggtttgagtacaaaaaatcaatctacggttcaagattatctaaaaatagacttgaacattttgaaagaattgcagcttcgtaatatatattctagagaattgtttgagacccttgtcaatacaaaatgggagattccaatatgtagtttgtatactataaatgctttttttttttttttttttacttttaaggttatttatcaatcagaaggcttcatagacaggataacatatgtatccattttgtttaaatgctagtgaatgacatctaatgttgttatcaaaaa

SEQ ID NO: 15401 - DNA, 455 bp, Glycine max
aatgtacataggcataaatgggtgctctctgaagacgactgagaaccttgatgttgttaagggtattccagttgagagaatgatgattgagacggactcaccatactgtgaaggcaagaatactcatgctggaattggttttgttaaatctacatggccttctaagaagaaagagaagtatgatcaagagtgcattgttaaaggccgcaatgaaccttgtttagttaagcaagttcttgaagtggttgctggctgtaaaggcatcaacgatgtgagtaacctcagcagaacattgtaccataacacttgcaggatatttttccctcatgacttggattctgctgctgatgctcttctagctggcggtaattctacataaacatacttgctagtgacttggccttttctttgcttatattcggagctgttctgtagaccaaatcctcattttcttg

SEQ ID NO: 15402 - DNA, 385 bp, Glycine max
gcgtacgtaagctcggaattcggctcgagctgggatatgttgctgcatccaaggacccggtgattggaggcagcttacttttaacatacacaactggctatgtttctcctttactcttggctgcttcttttgctggagcactacagagcttgctctcattccgcaagttctcggcatggatcaatcctataagcggagcaatgctgttaggtggtggtgtatatacgttcttagataggctgttcccagtcacaatggtgatgtagaaaatctcttggctcttaacatgctgtgatattttacattaacagttcaatgtatatatgtcatacaagtattcaattcaattggaatagaaatccaaatgagactattgcataccaca

SEQ ID NO: 15403 - DNA, 443 bp, Glycine max
ctcaaaaggtgaggtcgaagttctctgtttcttttccttctcacggcaatgggaaggtgaaaaaaaaggggcccatcataaactgggacacatgaagagagatcacattacgggtttgccaaactaaagaaaaaagttggagtttttgatatggctcaatagctggttccatttgaaagtgttagtagtggtatttgatccttcgtgcaagcaaaaacaacagtgactatctgatataagttttgagaggttatcaaatttcatgctgagggtggtttgaggaatgagagcagaagataatggatttctggccagaatttcttgcaagcagttcgggaagagagtttgtagcaggtggcttcggggggcattgctggtataattttaggttattcacttgacacttttcgcatcagatttcagaacctcgaaaaatggctctg

SEQ ID NO: 15404 - DNA, 1769 bp, Glycine max
ctctagctagctttcttctccactctctcaaatggcccaaaatgattccaaccctactccgcctccggaaccccatgtagcggcggaacccattactgaggatttggtccaagacaaagaagaagaggatgatagtagtaagattgttattccagtcccagagagcgagtccttgtcattgaaggaggatagcaatagggtttctgattccgagaaaaatgccattgatgagctgaagaagctcctgaaagaggaattagaggacgaggaggtttccatctggggcgtccctctctttaaggatgacaggactgacgtcattctcctcaagtttctcagagctcgtgagctcaaagtgaaggacgcccttgtcatgtttcaaaacactctccgatggaggaaggacttcaacatcgacgcccttctggatgaagatctgggcgaccacttggagaaggttgtcttcatgcacggacacggcagagagggccatcccgtctgttacaacgtctacggcgagttccagaacaaggacctctaccacaaggccttctcctctcaggataatcgaaacaagtttctccgatggcgtattcagttgttggagcgcagtattcggcacctcgacttcactccttcctccggcatcaacaccattttccaagtcaatgacctcaaaaactcccctggccctgctaaacgtgagcttcgccttgccaccaaacaagctttgcagttgcttcaggacaactatcccgaatttgttgccaaacaggtttttatcaacgtgccatggtggtatcttgctttctataccatgatcaatcccttcttgactttgaggaccaaaagcaaatctgtctttgctggaccatccaagtccctcgataccgttttcaagtatatttcttctgagcaagtgcccgttcagtatggtggcctcagtgtagatttctgtgactgcaaccccgatttcactatgtctgatcctgtcaccgaaattcctataaagcctaccactaagcaaactgtggaaattgctatttatgagaagtgcattattgtttgggagctgcgcgtggtgggctgggaggttagctacaatgctgaattcaagcctgatgttgaagatgcatatacggttatcatacagaaggccacaaagatgtcccccaccgatgaaccagttgtttccaatagctttaaagttgttgaactgggaaaattgttgctcaccatagacaatcctaccttgaaaaaaaagaggcttctttacaggttcaagatcaaaccctactctgattgagagaaaataacctctggtggtggttttgggtacatgaaggaaattgaacttgaagagtaagaaatatgcatgtcatcatttgttcggtccatttttcatctatagttttggtcgtgagttgtttgcagattgtctttctctgtctttgttgtttgttgtgttgtatgtaacactttattgctagtctaaattgttcttttattttctggtgatgaacaatgttgggagtagcaaatggaattaaaattggagttggttttggaaattacatttattctcagaattacggatcacattgatgagtgaaccaaaccaacaacatgtagaaagccttgttatgaaaagtttcaatgtaaaaatttgttcttgtacttatccaactcggagtttggtccaattataatcattttgaatgtcatagatatgtaataccaaaggaatgaatgagaagtatgcatgattt

SEQ ID NO: 15405 - DNA, 449 bp, Glycine max
ctcccttttttcgtgcgcaaactgttcccgttggtctctgtccctctgcacttcacattcaccctcccacactctctcactgtgctatctctcagcatcttcgcaatcacacccttcccagatggccttgcaaacagctactcctccaacaactcccagtgcccaagttgttggtaatgcatttgttgagcagtattaccatattcttcaccattcaccaggttcggtctatcggttttaccaggactctagtgtgataagccgtcctgattccagtggtgtgatgacatcagttacaaccatgaaaggcattaatgagaagattctttcactaaatttcaaggaatttaaagcagagataaagactgcagatgctcaaaaatcatacaaggaaggagtgactgtgttggtgactggatgcttgactggcaaggataacttgagaagaa

SEQ ID NO: 15406 - DNA, 874 bp, Glycine max
gccttaatggtgcatgaaaaataaagcaaatcgcaaagccagagaagaataaaaagcctttctcccggggccagtccagttcattgtagagagcagacaccaacaccaaaccttaaaattattttgcccctctgcttctctctctgtctttctcagaagacaactcaaaaaaaccatggacgtgggtcagatgcagagacagtggatcgactacaccaaatccctcttccttgagggcttcctggatggtcagtttctgcaacttcagcagcttcaagatgagaacaaccctgactttgtggtcgaagttgtctctctcttctttgaagattctgaaaggcttctcaaagatctcacctttgccctagatcagaatggcgttgacttcaaaaaagttgatgctcatgtgcaccagttaaagggtagcagttcaagcataggtgcacaaagggtgaaaaatgcctgcattgctttccgcaacttctgtgaggagcagaacacagatgcgtgcgtcagatgtctgcaacaagtgaaacaagagtactgccttgtcaagaataagcttgaaacaatgttcaggcttgagcaacagattgtggcagctggtgggtcaatccctacggaactgagtttcagtggatgatgggtggggtttgtagagatgcttgtattatgatcctcttctttgttaaagattatcctttatcttatttagtccatggtgaatgtatgggtttttatgaaatagaagttttccatccaatgtacctttttcttcaccaaaaagctcttcataatttgtaatctctcgcatgcttttctgaaggatgatagtagcaccattaattgacctttcctctttgatctctcttcc

SEQ ID NO: 15407 - DNA, 796 bp, Glycine max
  unsure (1)..(796): unsure at all n locations
tcttacgcgtccgcttatgttgttttgtgtgacagacaacagaggaacactcccaaacaaaccatggacgtgggtcagatgcagagacagtggatcgactacaccaaatccctcttcctcgagggcttcctggatggtcagtttctgcaacttcagcagcttcaagatgagaacaaccctgactttgtggtcgaagttgtctctctcttctttgaagattctgaaaggcttctcaaagatctcacctttgccctagatcagaatggcgttgacttcaaaaaagttgatgctcatgtgcaccagttaaagggtagcagttcaagcataggtgcacaaagggtgaaaaatgcctgcattgctttccgcaacttctgtgaggagcagaacacagatgcgtgcgtcagatgtctgcaacaagtgaaacaagagtctgccttgtcaagaataagcttgaaacaatgttcagggtaattagataaaaaaaaaacttaagttgaataacattctattacattttggatttgaaatttatatttattttatggatactcgttgcagcttgagcaacagattgtggcagctggtgggtcaatccctacggaactgagtttcagtggatgatggggggtggtttgtagagtgcttgtattatatcctcttctttgttaaagattatcctttatcttatttagtccatggggaaatgtnttttggttttatgagngaaaagagtccatccaatgtacctttttcttcaccaaagagctcttcataatttgtaatcttttgcatgctt

SEQ ID NO: 15408 - DNA, 514 bp, Glycine max
tgcccgcgtacgtaagctcggaattcggctcgagtttcattctctatttccatttttcggccgtccagaagacgccaacataccactaaagggtccacaggacgaccttcagaacgtgcctcaacaggccgccgaccaaaaacctcagaaactcagcccagatttctacataaaaacttgccccaatgcccaaaaaatcgtggccgatgcacttgcagacatcgttaagaagaatcccggcgctctcggaaacctacttcgccttcaattccatgactgcttcgttaatggatgcgatgcatcgatcttgctagattactcgccaagcggtgacaccgtggagaaaagttcaatggtgaatggtctactcctgaaaggagctgatatgatcgatgacataaagttgaagctggaggagcagtgtcctcaaactgtgtcatgtgctgacacattggcatttacagccaacgaggtaatgaccatggcgggtttgccccctcggaaacccctcggt

SEQ ID NO: 15409 - DNA, 481 bp, Glycine max
gtgacttataaatttgggcagggttgtttaaataaagaatagcgctatagaattgaatggagagaaaggtggttcattaggattcaaaataattgtgtgtttttggaacaagatcgatcaaaaaactgaagggttattggctttggggcattaatggtgcggtgcctatatagatgcgaaaggaagggacggatttaaaagttaaaacctattcgtgttgtgtgttggggcgtggcacgacacactttgtctgtgggtctcaactcaatgcaagcccttccccttctcctttcccatttctgatccgattgggtggccattagtgtgttgactggatgagattgatggacatgcttctaaaagttcaataatctttaattccaaacactggtgccttgactctatctcaggggccctgtagcaacatacaacattttttttgaatttgtttcaggtgataatgttaatacaaacttctgtc

SEQ ID NO: 15410 - DNA, 455 bp, Glycine max
gcgtacgtaagctcggaattcggctcgagctcgagccgctcgagccgcgagaattcttcttggcctccttccaggattcaaccattgtgagaagaaagaggtaggggaaaaaactggtgttccggcgacattgctgtggttttcaacgtataaaccatttcgccggaacccagagaaattaacaatgtcttcccctcataactctgctcctcataattcctcacccgataactccacccctgatgatgccactcccaataactccattcctgataattccacacccgataactccattcccgataattccacacccgataactccacatccaataaatccgctccccataactccacacctgataacgccactcccgataattctacacccaataattccaataaatcacacaaaagttcctccgtgtcccctccttccatcgagggacaaacta

SEQ ID NO: 15411 - DNA, 478 bp, Glycine max
gtcgcatgcacgcgtccgtaggctcggatttcggttcgaggctttatcatttggcattactaccaccaatattagcaccagctgaatatgattggaatttcgtttgttctctgtcatgctgctatggcttccttatcgaatatcttgctgatgttttgtttgttcaatcttctagcattcccagtttcagttcattcagctggtgaagttccaattaatgtgaccaagcacttttctttctacaacttcagcttcagcaacaaccccagattagtccatgatgtgaagctcctaggcagtgccaagttctcaaatgaaaagggtgctcttcaaatcccaaatgaatcagaagatataagacaccaagctggtagaggcatctattccttcccaattcgcctgctagatccaagcaccaagactccagcttcatttcaaaccactttctctttccaaatgaacaattccactgcctctg

SEQ ID NO: 15412 - DNA, 516 bp, Glycine max
ataaaattaaaaattctgacccaaaatccgtcttctctttctttctactccgattcctgcgttgcttttggtcttggtcgaattgcgaactcagcagcagaagaagttcctcaattgtttcacctcaaattcgattcgaactatgtaaacgccactgtcgcgtcgggtttgttgtctctgtttttgttgcggtgttactgttcctcggttcggatctccgaagcatgaatctcagcaacggaaagggatccatgtcaacgcttactgcaagcgtcgttatgaaatccggcgacgccgtctccgaccagtttccggcgggtctccgggttctcgtggtggacgatgaccccacgtgtctcatgattcttgagaagatgctccgcacgtgcctctacgaagttaccaaatgtaatcgagcagaaactgctctctcactgcttagagagaacaaaaatgggtttgacattgttataagcgatgtgcatatgccggacatggatggatttaaacttttgg

SEQ ID NO: 15413 - DNA, 362 bp, Glycine max
gcaggatgatagtgataatgtcacccgatttgtaatgttagcacgagcaccttatcaattcctcagcactgataggccgtttaaggtactcagctaatatagaatacttagcgggaattatgtggatagaacacatcacaatgtctcctgactcccctgttgattggatttatgcttatcaatattgaatattgccactgattgcggtgtggatttctcagaccagcatagtcttttctttagaagagggtcctgggatacttttcaaagcccttgctgtttttgctttgcgccagattaaccttacaaagattgaaagtcgtcctttgcgcaaccaacctctacgagcagatgatagcaac

SEQ ID NO: 15414 - DNA, 959 bp, Glycine max
ctttaatcaaaacctcgttttattttttttttttgtgtcccaaaaaaagccccgttttatttttttagggttccatcccatctattctatctatttagataaaacacgaaatcccaatcttaatcgcaagcaattcctctctctgagagaagctctcgaaattcttctgatactcgtagaattttaatggcttgttcatcatccgattcaaaaaaaccagtgacgtcgctgttgttcttttccttcctaattccgataccttccgattctctttccgccctacgcatactcgatacttgttcatctctctctttctcaaattctgattcctttttgtaacataaacaccgtactagcccaactaacaaatcaaacaaaaccgttaccatgggaaaacgtaattctcaacgcaaaagtgctgcgatgttcgatagcgatgacgatagtagcgtgacttcgtcgtcaactgctctttctgatttgatgtcggtgtctggggctgaagatgttcaatttgttcaagattcctttctcgaccaagctctcgatgcattagatgagaaaaggggttccacgagggagaaagctttgtcatcgatcattgacgctttcaatagcaacatgcagcatgagtttgtggagaagaaatttgctaccttactacatcaatgtcttgcttcaataaaaaagggatccaaaaaggcatctgctaaggagatagctttggcatctcatgccattggttgtttggccttgactgtcggatgcggtgacaatgcccgtgagatatttgaagaatccattcgtcctttggatgaatctctcacatctaggatagatgtttcaaagacaccatcattactggagtgtttggctataatcacttttgttggagggaacgatcaagaagagacagaacgatcagtggacatgatgtggcgagtgattaatcccagatt

SEQ ID NO: 15415 - DNA, 411 bp, Glycine max
ctttcattgaatctctgaacctactcatcaaatctcgatgcctgttaccttccctcacgaaaacgcaccctcttcaatttcaaaccacattcctttacttcaatctcaaaacaaaaccagcagaagtatcggaataaaaacccaaaatattcccccaattccaccaacaaaaacattatcaccaaaaaccaaaagtcacaaaccaaaaacaacgaaaaaaatgacaacaataacaaccacctcgttagcgtcattagaaagctgggccatcctcccattcttcattatgttcctctccatatacttgatcggatacttcccttattttccgcaaacaaacccccaagatccgaccccgattctccagctggctgatctcgctctttcacggcacccccgccgcaatcctcg

SEQ ID NO: 15416 - DNA, 486 bp, Glycine max
ataaaattggggttaaagtcatcagccttgctgcattgaataagaatgaatcactaaatgggggtggaaagctttttgtggacaagcaccctaaccttagggtccgagttgttcatgggaacacgttaactgctgctgtcatactcaatgagatccctcaagatgtgaaggaggtgttcctaacaggagccacatccaagcttggaagagcaattgctctctacctttgccaaaagaaagtgaaagttctgatgttaactctctcaacagatagatttcagaggattcaaaaggaagcccctccagaaaatcaaagctatcttgtccaagtgacaaaataccaagctgcacaaaactgcaagacctggatcgttggtaagtggatcacgccaagagagcaatactgggcaccacgtggaacccattttcatcaatttggtgtcccaccaattttatcatttagaaaagattgcacttatggtgacc

SEQ ID NO: 15417 - DNA, 465 bp, Glycine max
atctatatttatccacacacaacacacaacacacacctttgcctctgctccgcataactcctcacacacacacacaaaacagaacacaacacatacacatacacatgttgttgatgagtggaggcaacaaaaaacacagatccatcacacacatgaacaattgatctttgtcctttgtatataatttgattctaatttttggcactaagagagccactcaaggctctgggatgtactatacgccattcggggttctgattttcggcggagagaaggttcaagagacccagtgggagaaggagcgataagtaattcatattccattatctccatttctagatccttccattaactctcataggatcctccaatttcaattcaatcccttccgatatttcggagagagcatggctggtaaggttttgaaagaaacaaagtcgctgtcggcggcggaggtggcggtgg

SEQ ID NO: 15418 - DNA, 462 bp, Glycine max
tctatatctatccacacacaacacacacctctgcctctactccgcacaactcctcacacacaaaacacaacacacgctcatgttgttgatgagtggaggcaacaaaaaacatatatccatcactcacaagaccaattgacctttgttcttggtacaattcgattcaaatttttcgcactaaggagagccactcaaggctctgggatgtactatacgccgttcggggttctgattttcggcggcgagaaggttcaagagacacagtgggagaaggagcgataagagagaccatggctgggaaggttttgaaagaaacgaaatcgctgtcggcggcggacgtggcgggggcggaggctgagatgacggtgtcgtcggtgaagtgctgctgctgtgggctgatggaagagtgcacgcacgcgtacattgggcgcgtgagggagcgctcgggggtcgatggatatg

SEQ ID NO: 15419 - DNA, 454 bp, Glycine max
cgtaagcgcggaattcggagcgaggtcttcgaaggctttagtgaaggatcaaggttgggtctgtctcgttgcagttgatattatctgtacggcttaatctaatgccagctgccatactttgtcagttgctcaaaagtcatttttggaacctatgatcacttttgctagagctttcccagaaaacttaccctctacacataaccatatgttatgtttgggcaaggtgcataaaatctttcaattttataggactgaattttgctactttttcatatttacctgctccattcttatgtcaattgcaggcaaaggtaaaagtagtgagaaggcaaaagcagaacctactaaggtggagatgcatcgagtggctgttgatattttgaacgaagcagatttcaataaggtaagtaatgctcttctatgccaattcatgtatctgttttcattgatataa

SEQ ID NO: 15420 - DNA, 1116 bp, Glycine max
attgggtttcgaagaagaataagggtttcttctgcaagatgtcgaccgagtcaccttccttgactcacactatcacactgcccaataaacacaacgaacctgttcacattgttgctgctcccggtgtctccaattctgatttctggtgtggctgtggaatcctctttattcagccagtggttgcataacttgcaaactgagaatggggttctagctgatggtaccttggctctcagacaagttcgaattcagggagtagacatgtttggaaagcgcattgggtttctcaagttcaaagctgacatttttgacaaggaaacagggaaaatggttccaggtattgtgtttgcaagaggaccagctgtggctgtgttgatgctcctggaatcagagggtgagacttatgctgttcttactgaacaggcaagggttcctgttggaagaattattttggaattgcctgctggaatgttggatgatgacaaaggtgattttgttggtactgcagttcgtgaggttgaagaagagattggtatgaagttaaatgtaggagacatggttgacctcactgctttccttgactctgcaactggatgcaaagttttcccttccgggggaggatgtgatgaagaaatcagtatttttctgtacagagggcgtgttgataaagagataatatcacaactacaaggtaaagagacaggtcttcgtgaacatggggagctaattaaggtgcgtgtagtaccatacaagaaactttggcacacaactgcagattgcaaagttctggtggctgttgcactgttagaaatggctatgaaagaagggctattgcctgctttgtctacatagtagccttttttatgattctcaaagagaagggctattccaaatttagtagccttcatacaaacctcaagagagtattagaaattaaaaatttgttgaaatttgatttttttgagtctatctttttatccgtgttgcatgctctgcctaacaacaaaagacttaaattgttattgatacgttttgcattcgttggaaatatctcttgccaagagattcttagttgcatccttgtaagctaatgagcatgtttattattgtctttca

SEQ ID NO: 15421 - DNA, 651 bp, Glycine max
gtttttttctgctccataagaagaaagatccgtaaattaacattctctccctcccttcgctataatagcaagcttttcaagcatatttctggggtttggtcccttttccttgtttggggttttcttgggaaaaaagaagtaattaggtataataatagtataactaaagcaaaaaaaaagacagtaatatgggaaggggtagggttcagctgaagaggatagagaacaagatcaatcggcaggtaactttctccaaaaggagagctgggttactcaagaaagctcatgagatctctgtgctctgtgatgctgaggtcgctttgattgtcttctctcacaaaggaaagctctttgagtatgctactgattcatgcatggagaagatactggaacgccacgaaaggtatgcctatgcagagaggcagctagtagcaaatgattctgaaacacagggaaactggaccattgaatacactagactgaaggcaaagattgaccttttacagagaaaccacaggcactatatgggagaagatttggcttcaatgagcctcaaagagcttcagagtttggagcagcagttggatactgctatcaaaaacatccgcacaaggaggaatgatctcatgtacgcatccatttctgagcttc

SEQ ID NO: 15422 - DNA, 388 bp, Glycine max
ggtggcacacatctatacttgtgcagaagaagaaagatccatgaactaacattcccacacgctcgcttcaccatatttgccacccttttaaccctcacttcttgggtttattttgctccttttttttttccttgtttggggtttgcatttttcctggttgaaaaagggaagaacttgaactaattggttaagttacctatctatctatctatctagggtataatattttatatcagttattaaaggaaagaaagaaagaaacgaagatgggaaggggtaaggtacagctgaagaggatagagaacaagatcaatcgccaggtaactttctccaaaaggagaagtgggttgctcaagaaagctcatgagatctctgtactctgtgatgc

SEQ ID NO: 15423 - DNA, 552 bp, Glycine max
gccgaacatgacagaagagactaatattggagaaccacttttaaagaaacagtactatgagaactgccctggttgcaaggttgatagagccaaggagctggaaaaggatgtctccattcgaaatctcgtccatatatggattgtggtgttgtgcggtgctcttcctgtttcttctctctatcctttcctttatttcatggtgaaggattttaatattgcagaaggggaggaagatatcagtgcctatgctggctatattgggtctgcattcatgcttggtagatgtttgacatctatgttgtggggaatgatagctgatcgctatggtagaaaacctgttgtgattataagtgttatttctgttgtcattttcaacatactattcggccttagtacaagtttttggatggctgttattacaagactttttcttggatgttcaaatggtgtgatgggcacaatcaaggctttttcttctgaaatatttcgagaagaatatcaacctctgggactctcaaccgtctctgctgcttggggagtaggtttagcact

SEQ ID NO: 15424 - DNA, 1271 bp, Glycine max
accaggcatacatcagcggtgagcaatcgcgtgaattttcaacgggattttgcagagcttccgcgttgaaaccatccaaccctcttagcctcatattcgttgtctatacttccctccttccttcgtgtaattacatttttttcatcagcagttccaggaccaaattgatacacaagatcactgtttttttagagagagattgagagaggatgtttggttcaaagaaaactcctctgagagatgctaaacctagttctgttggccatgcccataacccctttgattctgatgaagagacaaacgataaaaagtataattcctctaagaagactttgaccaacaccaacccctttgatgatgaagttgatgttgatgccactggccactcttcgtcgtcttcttatggcctttcgtcttcccatcgaaataggtataagagcgatttccgcgactctggggggttggagagtcaatctgtgcaggaattggagaactatgctgtttacaaggctgaagagacaacaaactcagtgaacagctgtttgaagatagcagaggaaatgagagaggatgctaccaagactttggtgatgctgcaccaacagggtgagcagattacaaggagtcaccatgttgctgctgatattgatcacgatttgagtcggggagaaaagctgttgggaagtcttggtggcatgttctccaaaacttggaaacctaagaagacaggcacgataactggccctgttgtttttggagaggatccagtgagaaagaagggcaaccacttggagcaaagggagaagttaggattgacttctgccccaaaagggcagtcgaagtcacggccaacactttctgagccatcaaatgcgctcgaaaaagttgaggttgaaaaagggaagcaagatgatgcactgtcagatttaagtgatctcttgggagaactgaaaggcatggccattgacatgggatctgaaatcgggaggcaaaaccaagccttggacggttttgacaatgatatggagaagttgaccgtccgtgtgaatggtgctaatcaacgtggtcgtcgtttgcttgggaaataggggcgtatatcatgagatcgatactaatttttaccatgcattagtcaatcaaaggagcttccaatgttccaggatactggtttcaaatatagtaatgtacaatccgcttgtgaaatatttgtctctgaaatatataatgtattggttgatttgagattatttatgattctaatctctatcgtc

SEQ ID NO: 15425 - DNA, 525 bp, Glycine max
cttccgcgttgaaaccatccaacccccttaaccttaaattcgttgtcttcacttccttccttccttcgcgtgtgattacattttcttcttctgcaggaccaaattgatatacaagatcattgttttagagagagagagagagagagagagagagagagagaggatgtttggttcaaagaaaactcctctgagagatgctaaacctacctctgttgaccatgcccataacccctttgattctgatgaagatacaaaagataacaagtataattcttctaagaagactttgaccaacaccaacccctttgatgatgatcatgttaatgccactggccactcttcatcatcttcttatggcctttcgtctacccatcgaaataggtataagaacgatttccgcgactcaggggggttggagagtcaatctgtgcaggaattggagaactatgctgtttacaaggctgaagagacgacaaattcagtgaacagttgtttaaagatagctgaggaaatgagagaggatgc

SEQ ID NO: 15426 - DNA, 786 bp, Glycine max
gttagccagtatgctaacatggcttccttccctggcagaggaaatgggctaagatcccttccttcgtctgatgatgcaaccctttacttcagttcagatcaagggagtaattcatttgattatgctcctgagatctcatccatgctttctgctcctttggattgtgaatctcattttgtgcaaaatgccaaccagcagcagcctaactctcagaatgtggtatctattgaagatgattctgcaaagacactctctgaggagcttgtggatattgaatctgagttgaagttctttcagatgccttatcttgaagggagctggggcgatacttcattggaatccttgctatctggtgacacaactcaggatggtggaaacctcatgaacctttggtgctttgatgacattccttccatggctggtggagttttctgaaccgctttttctttggtctccctgtgtgtaaataaagctacaagttgtttttctctgtttttgatttttgttgcatttgttgttctcttgttggacacatccccccatgtgtctgaaaaaaaaaatgtaatttccatttttgttgctttctggaatggttgtcatccgtgttgaagatggagttaaaacaattaactcgctcaagcatctcttgtatctaaagtatggggctatatagttatttaggtgtcctttgccttgtcaaaggccttagttttggggaaatctcgattgttgttcgagggtgattatatatgatctgtgaaacaatcttggctgctgataattttt

SEQ ID NO: 15427 - DNA, 432 bp, Glycine max
ggattgtgaatctcattttgtgcaaaatgccaaccagcagcctaactctcagaatgtggtatctatggaagatgattctgcaaagagactctctgaggagcgtgtggatatcgaatctgagttgaagttctttcagatggcttatcttgaagggagctggggcgatacttcgttggaatccttgctatctggtgacacaactcaggatggtggaaacctcatgaacctttggagctttgatgacattccttccatgtctagcggagttttctgaacagctttttctttggtcttcctgtgtataaataaagctacaaattatttttcattttccttctgggttcattaattttgtttttggtttttgttgcatttattgctctcttgttggacacatctccatgtgtctgaaaaaaaaagaatgttatttcc

SEQ ID NO: 15428 - DNA, 672 bp, Glycine max
ataacttgaagcaagtgttgttgtattgagaaaactttctggtcgagggaaggaatactttatcaaacatcctactcttgatcctttgagggaaactcttaagagcttcagtcaaaagaatgaaaaggccttggctaaggcggatgatgctgctcgccatgcattattgaaggatgcagacaagtactgcaaagcccttttgggaagattgtcacaagaccatggatgcatgaagagcgtgacaattctttctgttgtatttgcggttggtgccattttcgtgtaccagaacttgcatttatgggattatagtcaactgacagaaatgttgaacctatcctaggatgacagagttatcctgtggcttgctcggtgcttatgcccagcgtggaccacttcagccgatagtgaggagtgacgaggaatatttaatttattttagccttcaacatagtgaaattaaacaaaaataggaggaacaaacaaagccatggaagcttgtgctggccatttatataggtgttgatgtgtgttctcaaattttaggtcaacttgaaaatttcttgcataaattttttttatagtggcttgttatatattgattttctgataaagcgccaaatggctatagagaaatgaaaatgaaggtgaaatgaagttgtgcatgaatgc

SEQ ID NO: 15429 - DNA, 462 bp, Glycine max
gttctacaaggctggattgtcagcacattacttgctggtgccactgttggttcatttactggtggatcattggctgaccaatttggaagaactaggacttttcaattagcctcaatccctctagcaattggagcatttcttggtgctacagcccagagtgttcagccaatgatcattggtcgcttacttgctggtataggcattggtgttacatctgctatagtaccactatacatatctgagatttcaccaactgaaattcgtggtgcgctaggatctgttaatcaactttttatatgcattgggattcttctggcactggtggctgggctgcctctggcaggaaaccctatatggtggcggtcaatgtttggcattgcaatagttccatctgtgctgttagcactaggaatggcaatttctccagaaagtccacgctggcttgttcagcaaggcaaaatc

SEQ ID NO: 15430 - DNA, 1285 bp, Glycine max
tcacctgctgagcgagaacgtggtggcaggtgaagctaccaaacaagttgacccagttatagagtttgccacctgctgagcgagaacgtggtggcacatccaaacttgcagaagccatggagaggagtataccagtggttagggaggcttggttgattgacagcattgaaaagcaagaaccacaacctttggaagcttatgatcttgtctctgatctttctgtggatggcaagggtatcccctgggacaaacaagatcctggggaagaggctatcgaatcactctcagcagaactcaagctttatgggaagagaggagtctataaagataccaagttgcaggaacaaggtggaaagatatttgaaagagatgggatactatacaactgtgccttctctgtttgtgaccaagggcgaggactgaatgactactgtgtcatgcaactgattgttgtcccagagaatcgtttgcatctgtactttaagaaagggagagttggggatgatccaaatgcagaggagcgattagaagagtgggacaatgtagatggtgctctgaaagagtttgtgaggctctttgaggaaataacaggaaatgagtttgaaccttgggaaagagagaagaagttccaaaagaagcctttgaagttttaccccattgacatggatgatggaattgaagttagacatggggcactaggtcttcggcagctggggatagcagcgacacactgcaaacttgagcctttggttgcaaattttatgaaggtcttgtgcagccaggagatatataagtatgcattgatggagatgggttacgactgtccggaccttccaataggaatggttacaaatcttcatctgaaaaaatgtgaggacgttctcttagaattcatagacaaggtgaaatcattgaaagagactgggcccaaggctgaggctgtgtggactgattttagccaaagatggttcactctgatgcactccacaaggcctttcaattttagagattaccaagagattgcagatcacgctgctgctgcgttagagggggtgagagacataacccaggcttctcacctcataggagatatgactggctcaaccattgatgacccgttatcagagacatacaagaaattgggttgctcaatttctgccttggacaaaagttcagatgattacgagatgattgtgaaataccttgaaaaaacttatgagccggtcaaagttggtgacattgaatatggggtgtcagtggaaaacatttttgcggttcaaacagg

SEQ ID NO: 15431 - DNA, 719 bp, Glycine max
  unsure (1)..(719): unsure at all n locations
gcgtacgtaagctcggaatncggagcgagcccaaacatcagatgggattcctgaatgtgggttgttgatgcaaagcattgaagaattggcactaagatatccttcaacaaaatttgtgaagataatatctactgattgcataccgaactacccggatcggaatcttcccactttgttggtgtacaacaatggagcagtcaaaggaaattatgtgggtttgcatagtttcgggcgaagatgcactcctgaaggtgttgcattagtgttgtgccaatcagatcctgtacttaatgatggccataatggaaatgaggctatcattgaaggagtccgcaaacggtttatagagaaagttgttgctgatcatgaagagggtggtgatgatgattactctagcgattaacattttttcttgtatttgttgtgttgctttctttggagggggtatgcttttctaactttcttttggtctcacttttataattttgcctaaaaaaaagagtaacggatctgttattaaatacttaaattatgcgtgttgtaggcttttcttgttcctagtaattagatggttttatcaggtattatgtgtatcaaagtgattttatgttttttttttgtattttttattatatgatttgtattgtaataacaaacatatgcctatgtaacctttgtgtgatgattcaaagaacggttcaatcctaattgaacatcgg

SEQ ID NO: 15432 - DNA, 390 bp, Glycine max
ccgccaccctcggcgcccacgtgactctcacggaccttcctcacgtggttcccaatctccgattcaatgcggacgccaacgccgcggttgtggggcccaccggaggggtaataaccgtcgcgccgctccgttggggccacgctgctgacgtggaagcgattgggcgggagtttgatctcgttctggcgtcggatgtggtgtatcacgatcacctgtacgagccactgctcgaaacgctgcgtttaatgatgctaagtgaaaggaatgggaagatggtgtttgtgatggctcacatgaggaggtggaagaaggagtctgcgttttttaagaaggcgaggaagcacttcaacgtcgacgttttgcacactgacacgccttgtgatgggtcta

SEQ ID NO: 15433 - DNA, 584 bp, Glycine max
ctaaaggttccgctatttcaattcccaaatctacaggctttgtctacaaaacaagcagcgccaacctttcactctgtgcaccgcccatcgcaaacttacaataccacaccacatacatatataataatatctctcgctatggttagcttcgttcccttcccattatttcaatcaaacacttatcatattactaacaaaaatggaactaacattccctcatcaagacgaagatgattccgttgtttctgattgcgagagcggtgtttcgggcagtggagtcgtggtggcaccaccaccaccaccaccacaacaacaacaacgtggttttttcgttaggcttggagaaggtgacgtggttcacgatcttatcaagacaaggtttattcgtggcctcggcatgctcgggcctaaaaccgaggttgtctccgttcgccgaaacgcgtgctccgacgtcgtttcacaggcgcgccttcactcgtttcatgctcacgccagggcggtggcgaggctccgcggcggcgggaatcatgccaacgtgaagtacgcctggtatcgtacgaacggcgaggacgacgtgaacgaca

SEQ ID NO: 15434 - DNA, 1253 bp, Glycine max
cttgaatatgtgtgcgaggaatatggaggcagagtctagcttgcaaaggcttattacgagtgggttgacaaactctattgtcaagaattttaatggaagtggaatcatcgctagcatgcaccagtgcaacgactttttcttccttggaaccaagcaaattcccatgggaagagttggggatgacttttggttccaagaccccaatggggacccaatgggagtgttctggttacaaggggtgcacatgattcactgtgcctacaacagtttgtggatggggcagatgattcagcccgattgggacatgttccaatcggatcatgtgtgtgccaaatttcatgcgggttcgagggctatttgtggcggtcctgtctatgtaagtgacagtgtgggctctcatgactttgatctcattaagatgcttgtgttccctgatggtaccgtgcccaaatgcatacattttgcacttccaacaagagattgccttttcaagaaccctctctttgaccaaaaaaccgttctcaaaatttggaacttcaacaagtatggaggagttattggtgctttcaactgtcaaggggctggttgggaccctaagatgaagaagatcaagggtttctctgaatgctacaggccaatttcttgtactgtgcatgtaactgaggttgaatgggaccaaaagaaagaagcagttcacatgggtaaggcagaggagtatgtcgtgtatctcaatcaggctgaggaactgcatttcatgaccccaaagtctgaaccactccaatttactattcaaccttccacttttgagatctacaactttgtcccagttgaaaagctaggtggcagcatcaaatttgcaccaattgggctcacaaacatgttcaacagtggagggacaattcaagaattggagtgtgttgagaagggtgcaaaggttaaggttaagggtgatgggagattccttgcttactcaagtgaatctccaaagaagttccaactgaatggttctgatgttgcttttgagtggctccctgatggaaaactcactctcaaccttgcttggattgaagagaatggcggggtttctgatttggcaattttcttctaggttttgtcctgtggttctaccgttgataggcttgaatgttgtttatagcaaaaactggttgcacttaaaaaattggaaactagctcgttttcttttagtaaagtgaatctgattgttttaatgtaataacgtttgtattgtctat

SEQ ID NO: 15435 - DNA, 1304 bp, Glycine max
gttacagagtgtgggagataaattccctcctagcttgacagtgcccctctctctcaaaagtcctctccgttatggtgaaaatcctcatcaaaaagctgcattctatgttgacaaaagcctttctgaggttaatgctggtggaattgctacagccatccaacaccatggaaaggagatgtcatataataactacttggatgctgatgctgcttggaactgtgtatgcgagtttaggaaacccacgtgtgtagtagtaaagcatactaatccatgtggggtagcatcacgtgatgatattcttgaagcctacagactagctgttaaagctgatcccgtgagtgcatttggtggaattgtagctttcaatgtggaaattgatgaggcacttgctaaagaaattcgagaatttagaagccccacagatggggagacaaggatgttttatgaaatagtggttgcgcccagctatacagagaagggccttgagattctctgtggaaagtctaagactctaaggattcttgaagcgaaaaagaatgaagctggaaagctttcactcagacaagttggtggaggatggttagctcaggattcagatgacttaaccccacaggacatcaagttcaacgtagtctctgagaaggctccacaggatgatgagcttcgtgatgcagagtttgcatggttgtgtgtgaagcatgtcaaaagcaatgctattgtgatagctaagaacaattgcatgttaggtatgggaagtgggcaaccaaaccgtgtcgagagtttgagaatagcaatgaggagagctggagatgatgttaaaggagcagccttggtcagtgatgccttcttcccatttgcatggaaagatgctgtggaagaagcatgtgagagcggaatcggtgttattgcagaaccaggtgggagtatcagagaccaggatgccatagactgttgtaacaagtatggtgtttcactactctttaccaatgtgaggcactttaggcactaacctagttttttgcttcggaataacttcatgcttccatcattcaagcggtgttgctgaaacttgtgcttccaataggtagcgctgaaacctgtttttgaaatcaagtgactgtatgagtaagattgtactatccaatttatatagaaaaataaaaattgatgttctgctactttctaatgtcttatgtacattagaataatgtgatggagtaatcttttgcaatgaacagaatcaaattagacatttttgctgtaaaaaaaaaaaaaaaaaaactcgaggagaactagtctcgcgt

SEQ ID NO: 15436 - DNA, 321 bp, Glycine max
catgcccgcgtacgtaagctcggaattcggctcgagctcgagccgtggttatagagggaaggaaaaataattagagtaataataattagagtagcaaatcatacacaaagtaataataattagagtagcaaatcatacacaaattattattactttggttatagagggaaggaaaaatgagttaatgctcatagtttggaggacatgtataaaatcattttgggtatcgtgactatcatgttaattacttgaatgtaatttgtcttaattatcatcaaaaataacaaaaacattttggggcggccgccgactagtgagctc

SEQ ID NO: 15437 - DNA, 388 bp, Glycine max
  unsure (1)..(388): unsure at all n locations
aactgcagttgtaagagcgcatgatggccgtggtccaagtacaatgcttacgagtagtattttacaaacgcttggtctttcttctgcagaagaattaatcgggtggacctatgcagatccctcttgggcccggatcgctgcccttgttccagttgtagtgacctgtgcagaggctggggatgaggttgcaaataagatcttgctagattctgtacaagagctagcttcaagtgtcaaagctgttgtagagagacttggattgtgtggtcaagatggaaagagtgcctttccccttgttatggttggcggtgttctcgaagcaaataggaggaggtgggatatagganaagaagtaatgaatggcatttccaaatccttttctggggta

SEQ ID NO: 15438 - DNA, 380 bp, Glycine max
gatctttgatcaggattcaggatctttgttcttcttgaactgcaacaacatatacaacttacttgggaatcaagtttgagttgtttctggataatgaatttccacatactgaccctgagtattagggttaatggtcacgttatatgcaaatggggataaaacatcccaggaaatgttgtatgctttcaactgggatatagtatcgtgctggctttatttatccgtagttgccagaatacatattttggggtaccattgctttggcatttaagattttctggagcaaaactaatctttttgcaatatgtaaacattgtaaatgctttgatgtatttttaaaggctcgaataataatgttgccaagtgtgcgcatgtttgag

SEQ ID NO: 15439 - DNA, 931 bp, Glycine max
cttacgcgtgggcggacgcgtgggatgggccagttgctcaaacattagttgtctatgctaaaacagacataactgctgggtcaaaaggcattactgcattcatcattgagaagggaatgcctggattcaatactgcccagaaattggataaacttgggatgcgaggaagtgatacgtgtgagcttgtctttgagaattgctttgttccagacgaaaatattcttgggaaagaagggaaaggagtctatgtcatgatgtctgggctggatctggagagacttgttttggcagctggtcctcttggtattatgcaggcatgtcttgatgtcgcccttccttatgttcgacaacgagagcagtttggtcgtcctattggggagtttcagtttatacaggggaaaattgctgacatgtatacttcattacagtcttctaggtcttatgtgtattcagtagctcgggattgtgacaacggaaaagttgacccaaaggattgtgctggagctatactttgtgcagctgaaagagcaacccaggttgctttgcaggcaatacaatgtttaggtgggaatggttatgtgaatgagtatcctactggtcgtctcttgagagatgccaaactctacgagattggtgcaggaactagtgagatcagaagaatgattattggacgtgaactcttcaaggagcaataacatgccaccataccttatatgtggatggtgttgagccccttgggaaattcccttgcagatgtttgttaaactaatgctacattcatcaaacgagaattgatcattggtccaaggaataaaattctgccatattacatttttatatactttgaaaatcttcaaagcgatcatccatcttagaaaacaatgttgtaaaactatcaacagcagttgacacagataataataacttaagt

SEQ ID NO: 15440 - DNA, 399 bp, Glycine max
gttgtctttccaaatttctatgccagcgaggcagagagagaaactagagcgagaaagagagagagcgccacgcaccgttcattccttcgtcctcgccgtttctaaccgtcgcagttttccggcgaagtttctccgatttgtttaaccgaaatggcggatctgtccgttctcggttggattctgtgctccgctctgagcctcttcgcgctctacagcctggccttcggcggagcgagccgtaaccgcgcttcgccggagaagaggaatgagttatcggagaccgtgacgacctccgccggagaatgtagatcagagaaacaccacggcgacgctgacgtcatcattgtcggagccggcgtcgccggcgcctctctggcgcacactctcggcaaggatggg

SEQ ID NO: 15441 - DNA, 418 bp, Glycine max
  unsure (1)..(418): unsure at all n locations
gttccaaatttcactgccagcgaggcatagagagaaactagagagagagagagagcgaacacaccgttcatttctccctcgtcgtcgtcgtcgtttcgccgtcgcattttccggcgaggtttctctgttttgtttaaccgaaatggaggatccgtacgttctcggttggattctgtgctccgtcctgagcctcttggcgctctacagcctggccttcggcggagcgggccgtcgccgcgcttcgccggagaagaggaacgagttatcggagaccgtgacgacctncgccggagaatgcagatcggagaaacgaaacggcgacgctgacgtcatcattgtcggagccggcgtcgccggcgcctgcctgtcgcacactctcggaaaggatgggcgtcgagtacacgtcattgaaagagac

SEQ ID NO: 15442 - DNA, 456 bp, Glycine max
ctcgagcctcgttcgtacacacaccctgcacctccattgagttgagttcaaaactctgttctttcctccatgaattcaatttctttaggttccttcatcctcacaccatgcaagttccgcccttttcttcaaaccaaacaccaacccatattccacacactctccccaattcccctgacacaaaaacccacttttcttcgagccacagactcgaacatcgacgcccccatttccctccccgagggcgcgtccttcgtttccatcccagaaatcatcgagaaggactggtccgtgcttgattgcgccgaacaccgaaccactgaccgcattatagcttccggaaacatcgaacagagttcgagggttttggtctcaattgggtcagaagactttgttgattccttagcgggtttaactacctctgtgtttgttgttcatgactcgcttctgacactg

SEQ ID NO: 15443 - DNA, 1112 bp, Glycine max
aaaagagaatgtcaaaccttctctttttacttacagaatcttaatagactcaaagggccagtccaatgatattgctggaatggagcaagtgtttgagacaatgaaggaagaaggctttgaaccagacatccaaatacaggcactcttggctaggcattacacctcatctgggcttaaagaaaaagctgaagctatgttgaaggagatggaaggggaaaacttggaagagaatcagtgggtatgtgcaactttgctccgcctttatgcaaacctgggaaaggctgatgaagtggagagaatttggaaggtctgtgaatcaaaacctcgagttgaggactgcctggctgcagttgaagcctggggaaagttaaataaaattgaagaagcagaggcagtttttgagatggtgtcaaagaaatggaaacttaattccaagaattactcagttcttctgaagatttatgcaaataataagatgctaacgaagggtaaggcacttgtcaagctaatggctgatagtggggtgaggataggcccattaacatgggatgcacttgtgaaactgtatatccaagctggggaagttgagaaggcagactctgttttgcagaaggcaatccaacagagtcagctgcagccaatgtttaccacctatttggatattttagagcagtatgcaaagaggggtgacgtccataactcggagaagattttccttaaaatgagacaagctggttatacgtctcgaataagtcagttcaaagttctaatgcaggcatatgtaaacgccaaggttccagcgtatgggatcagagagaggatgaaagctgataacctatttcccaacaaaacattggctaaccagttgtttctagttgatgcatttaggaaaaatccagtttccgatttgcttgattgaggcatattcagtattctgcaagggttgtttctactttctctttccatgcaactattattattagttagttgaattgtagattgcacatttaggttgaatgaatgttttgtcttgcactgctatctataagttagatacacttttgccttttaagcgcattatattaatgctaaaatacaaaatttatgatttt

SEQ ID NO: 15444 - DNA, 514 bp, Glycine max
gattgtagctattactctttctctagagtgtgttgtgcttgagatgaaaagctggaacctcttgcttccagtaagcattgatatggagaagaaacccatttcatcagagggggaatcaaaagggagagatataccaacaataattagcaaggaactacttagtggacccagggaggtacttgttcctcaggcctctccaagtttacgttccgttgcagctgattcaattgaaggccgatcaacattacatcagtatttcaagctgtttcatgaaacctatgtggagtatgcacataaggtgtacctggagctcaagcatcacgcacctcagttgaagaaaatcattaatgaccaacattctcgaataggtgatgcacaacagaaacttttgaaagttgacgagaaagaggctatattacagaaaacgatagatcgtgcaattcaaatgcacaattctttggaagagcgcttgcaacaattaaagaacttaccctgcgtgcacaaaaaaacactg

SEQ ID NO: 15445 - DNA, 804 bp, Glycine max
atctctttggcctgttgaattggggaaaatttcatctcttgctggagcaatatatggtttggtgctccaagttcttccagcctatgtacgtggctgggttagtgacttgggggatccgtacaattcaactgttattgaatcctttacaaggacttgttgcagccctcctctcattgcaaatgaattgtctcagattaagaaatctgactttcgtgatgagaatttctcagttagtgtaagcaaatcagcaaatgagattgttgctacttataccaaggatgaaacgggaatggatctagtcattcgtctccctgcatcttatccactaaggcctgtagatgttgattgtacaaggagccttgggattagtgagaccaagcaacggaaatggttgatgtcaatgatgctatttgttcgtaatcagaatggagctttagcagaagctataggaatttggaagcgcaattttgataaagaatttgaaggtgttgaggagtgcccaatctgttacagtgtaatccacaccacaaaccacggtcttcctcggcttgcttgcaagacatgcaaacataaatttcattctgcttgcctttataaatggttttcaacttctcacaaatcatcctgcccattgtgtcaatctccattctaaggatacacctggagtgatgaattttaccaattttgcttgctggtgatatcttgaactgaaagtagtggatgaagagaacgtctcgacgtatgagaatcaacgctaatctccagcattgagaatcaatgctgattaaggcagggatgacttac

SEQ ID NO: 15446 - DNA, 870 bp, Glycine max
catacacagtgtgtgtctggacaacaagggtagtaaaagcctctccctcttgttggccatacacagtgtgtgtctgctgtggtttggccacaacaggagtcaatttattctgcatcctgggatcattctattaggaaatggcatgttgagacaggaaaaaacttgacagatttattttgtgggaaggttctcaactgccttgatattggtggggaaggttctgctctgatagctgctggtggttctgaccctgtccttaggatctgggatcctcgtaagccaggcacttctgctcctgtttttcagtttgcttctcatacttcttgggtttcagcttgcaaatggcatgatcagtcttggtttcatttactttctgcatcctatgatgggaaagttatgttgtgggatctgagaactgcgtggcctctttcagtcattgaatcccacagtgataaggtattgtctgctgactggtggaaaagtgacagtgttatcagtggtggagcagactcgaaactttgcatttcgtcagagatccctgtacagtgaggcaaactttaatcatactatcatagtatggtgatttttttgagatggtgggatagaggcagatatttcttaaattgcttcagaatcagatgcaccaaatttggcagtctcgtaaaaattgaaaggcacatattggtttctttaggagcttttaaacttttaaagaagccgaccttgccaacgaacgcacataacataaccacctcgccacctcccaacctaatattaaggcatggatggattatccgatgaatatattctttattgagtaatattttcccaaaaaaaaaaaaaaaaggccgcccgccgactagtgagctc

SEQ ID NO: 15447 - DNA, 1706 bp, Glycine max
tgaaaagaagaaggttgatttgaatgtgaaagcggggggcccatcccaccaaactccctctacctacagctgttgaagcttctccttcttgattcttcagtaaccccttctctcccaaaatctctctgttcagtttcaatatggcgaacacactatataacggcgccacatgccgaatccctctccggaaccaatccctggccttctctcgccacgtttccagatccctctctttcctccctataacacgtgcggcaaaacaacccaacgcaattgcggttaaggcttcttcgcactctgacttcgacgttgacctttcgctcagtcctcgtgtcaatgccgtcaagccttccaaaaccgtcgccatcagcgaccacgccaccgctctcgtccaagccggcgttcccgtcatccgcctcgccgccggcgagcaccgatttcgacacgcccgctcccatagccgacgctgggattaatgcaattcgtgaaggttacacgaggtacacgcccaatgccgggaccatggaactgcgccaagcgatttgtcacaagctaaaagaagagaatgggattacttatactcctgaccaagttgtggttagtaacggagccaaacagagcattgctcaggcagtgcttgcagtttcctcccctggagatgaggttattattccagctccattctgggttagttacccagaaatggcaaggttggctgatgcaacacctgtgattcttccaaccttaatatctgataatttccttttggatcccaaactcctcgaatccaaaattactgaaagatcaagactgcttattctttgttctccatctaacccaacgggatctgtctaccccaaagaattacttgaagagatagcccgaattgttgcaaagcaccccaggcttctggttctctctgatgaaatttacgaacacataatttatgcaccagcaactcacacgagctttgcatctttaccaggaatgtgggacagaactcttactgtgaatggattttccaaggcctttgcaatgactggttggcggcttggatatattgctggtccaaaacattttgttgcagcatgtggaaagatccaaagtcagttcacttcaggggccagtagtatagctcagaaagctgcagttgctgcattaggactaggccatgctggtggggaggcagtttctaccatggtgaaagcatttagggagcgaagggatttcttggtaaaaagttttagagaaatagatggtgtcaagatatctgaaccccagggagcattttatctattccttgatttcagcttctattatggaagagaagctgaaggattcggtaaaattgaggattctgagtccctctgtcgatatctactggatgtgggccaggtagccctggtgccagggagtgcatttggagatgacacttgcatccgcatctcttatgcagaatcccttactaccctacaggcagctgtagaaagagttaagagagcacttatcccgctgagctctgctgcacttgtttaatattgctgttttgttgtaatgggtgtattttatttttattttaattttggcaatgtgtaatctgtttattctgaaaatattaggctttggatattcttccataaaatgaagtgatacacctgtctttaatggtttaaaattataacaacaaaattgtcctccttttatgt

SEQ ID NO: 15448 - DNA, 322 bp, Glycine max
accaaactccctctacctaccgctattcaacctccttcttcctcttcttcttcttctcatctttcttatttttcagtaaccccttctctcccaaaatctcctctgttcagtttcaatatggcgaacacactatataacggcgccacatgccgaatccctctccggaaccaatccctggccttctctcgccacgtttccagatccctctctttcctccctatgtgagttctctcctctcttcttccctccaatttcacttcacacaccaatttctctctctcacccttcgcagaacacgtgcggcaaaacaacccaacgcaat

SEQ ID NO: 15449 - DNA, 609 bp, Glycine max
gtctttactgactaagtaaacattaggtcaccacctgatctcacataaataatgctttaactagcaccgtcacagtggaaggctgttcaaaactatgacaagcgatagccttctcctttaccatactccccctatggggatgcagtacttataaccaaagctgatcttgaatgctatcatagcacaggtgatgctagtatggaactggcgatagttcctaaaatgctgaagactaagcccatgattgcaagattatcttgcctgtttgcatccttaaaagtatctggtagtagtgtaccaatgaccaggcggctgccagttctgagtcacgtgcttgctgagccagcttgatttgctgtcaagcaggtggcttgtacagaagatgacgatgaaaataagtgaagtttgataatttcccaaagtcggtacaattgtgttacatgaagagaggatgcatagaaagaaacataggagattaggtttctccaatgttgtgttacaggttaagaggaacatgttgtagtttcttgtacatatattttccttttgaatgtttgttaatccaatggaatcctcgtgcaggttataaagcattattaatgtgagatc

SEQ ID NO: 15450 - DNA, 1116 bp, Glycine max
cgctttctctctctaaactgcatagcgtcagcgtagttgcaaattccaggttttcttcctttagcctagcttttactcattatctctctttctctctctctcagaggttctagaaagatccactccgaaatggacggtgcgccacaatccgccggtgccggaggtccggcgccgttccttctgaagacctacgacatggtggacgatgcctccaccaacgacatcgtttcgtggagctctaccaacaacagcttcgtcgtgtggaaccctcccgagttcgctcgcctccttctcccgacctatttcaagcacaacaacttctccagcttcatccgtcagctcaatacctacggatttcgaaaaatacatccagagcgatgggaatttgctaatgatgagtttctgaaagatcagaagcatcttcttaagaatatatatcgcaggaaacctatccacagtcatagtcatcctccaggttcacttgtagatccagaaagggcagcatttgaggaagaaatagacaaactttcccgtgagaaaacttctcttgaatccaatatttataacttcaaacaacatcagtcaacagcaaagcctaagctagaagattttctgcagcgattagatggtattgagcagaggcagaaacaattgctgaacttctttgagaaggctcttcagaatcctactttcgttgaacatctttcacgcaaaattgagtccatggatttatctgcatataagaaaaggagattgcctcaggttgatcacgtgcaaccagttgccgaaagtagcttggtggacaatcatagcaattttagaatggaatttggaaatgttttccggcaagatttttcgaataaactcagactggagttgtcacctgctgtttcagatatgaacttggtatcacgtagcacacagagttcaaatgaagatggggaaagctcacagaaaaagctgtctgaagtagaaccaagaggagtgcagacaagaacagctcttacatttgcacctgaaacattagagcttgcagatactggggcttcttttacttttaagatgggttcatgtttatcacgaagagcaacaactgctgagagctcaaaactgatc

SEQ ID NO: 15451 - DNA, 1278 bp, Glycine max
ctcgagccgaatcggctcgagattttagctttctcttccttcataatttctcacctttcaaatctccattcagcttcattttctgcatagaaaaaacccttttctggagaaagaatatagtcttcagctggacaaggatcattcatcttgaaagaagagtttgtgtgtgacaatctttatagttctaaggagggtgcaagagagaactgaatttgctgtgatggcaactcgtagatatgcttttggaagagctgatgaggccactcatccagactccatgagggccactttggctgaatttgtttctactttcatctttgtctttgctggagaaggctctggccttgctttggttaaaatttaccaggattcagctttctcagctggtgaattgttggcagttgcacttgcacatggatttgctctatttgctgctgtttctgcaagcatgcatgtatcaggtggccatgtcaacccagctgtgacatttggtgctctcattggaggcagaatttctgttctccgtgccgtatactactggattgctcaaattctaggtgctatagtggctgccctcgtgctcagacttgtcactaataacatgagaccatcagggttccacgtggggcaaggtgttggagtaggacacatgcttatacttgagataatcatgacatttgggctaatgtacactgtgtatggtactgcaattgatcccaaaaggggttctgttagcaacattgcacctttggcaattggactcattgttggggcaaacatccttgttggtgggccatttgatggagcctgcatgaaccctgctctggcttttgggccttccttagtgggctggagatggcaccagcactggatcttctgggtgggtccactgattggggcagcactagcagcactggtctatgaatatgttgtgatcccaactgaaccccctcatcaacaccaacctttggctcctgaagattactagttgcttccactagttgtatcaaaatatgagtgttattaatagctttttgtgtatctaaatataagggtatgcttgtgttttcttttgtttttgcaaccacccttttgcttgagtggccactaggctcctgcatgtgcatttttatttttcttgttttggggtcacaactgccaaagcctagttgagtgtgtagctgttgtattttgtcttctacacatattgaataaaatgtgtgaaaccctattttgtatagggatgctaaaaataaaaaaaaagggcggccgccgatt

SEQ ID NO: 15452 - DNA, 554 bp, Glycine max
ggacctcattccttctctgaattctccagctcttcatgcatcttttgacgctgagtttggctgcttcaaatcttcctggaaaaacttcactctcgccgagatccaagctgcaaccaatgactttagccatgaaaatttgattggggagggaggctatgctgaggtttacttgggcaaattggaggatggaaactttgttgccattacaaggttgacaagagggtgccaagaagaaatgactgcagatttcttgtctgagcttggcattatagtgcacgtggaccacccaaacatagctagattgattggatatggtgttgaaggaggaatgtttcttgttcttcaattgtctccacatggtagcctgtcatccatactttatggacccagagagaaactgaattggaacctcagatataagattgctttggggactgctgatggccttcgctatctgcatggagagtgtcaaagaaggatcattcacaaagacatcaaagcttctaatattcttctctcagaggattttgagcctcagatatctgattttgggc

SEQ ID NO: 15453 - DNA, 722 bp, Glycine max
  unsure (1)..(722): unsure at all n locations
atgatatatatgcatctttagaaanaaacattgttaatagaagtcaatagctacaaaataaactgctgaaacaaactaagttctttcaagtttcaaccttagccacaaaaatctgaagccaaaatggttgcacaaatctcgttccaatacaaaacagtctcattggacatgggaacattttaagttctttcaaacaaactgaggcaggaaaaattggtcctctacaaagaattgcgttgaagggagttctcttattagaagggaagcacacagaaataaagcacaacaaaaaccaaacctcccgggccacattgcaatactcataacaaaagaagggccatgttcatagaccttggtgttcttgcttctcaccagcagcatccaaagccaataatctaaatagtctctaaatgttctctgaacaccttcaacatattagaaaaagtgacaatgccaactaagctacaatcatcctcaataacccacaagtagttcactctatgagcaatggcctggatcatcacagcaacaagggagctcttgggatgacacactatagcctcggccttcctcaccatccgagccgagtagctagatgaccttgccaaccttccagacctagccggtgtccttgttggcgactcctcatcggaggaagacgaggaggatgccaattgtgaagtctcgcaagatgacaaaattgtgaactcctgcaacatctt

SEQ ID NO: 15454 - DNA, 274 bp, Glycine max
cgtaagctcggaattcggcgtcgagggcaatacatatgtcatacagaatcagatcaataaggttgcgcttcaatttcttttgagacatctgcgtgatttcaattgcttctcagaattctggcttcaaactctttcttctttccatgtacatgattaatttgcgctctatccagcagaagaaaaggccaaaatctagtagtacatgagatgatatgtcatgctatacatgtatctttttgttttggcttcttatatcaatataagaaattcttca

SEQ ID NO: 15455 - DNA, 516 bp, Glycine max
gtcgacccacgcgtccgagcttctggaccggtgagtggggaagaaattagggctgttttaaggcagaagactccggtgaccactcaggatcttgtagctaaatttaaggcaagactaagatgttcagaggataagcaagcatttgctgagatccttaagagaatctctaagatacagaagactacaagtggagccagttatgttatcctgagagataagtgacaatgtagaccccaatgattggttttgacggaaaatgcagcattaagaagaaaataagttcatataccatgtatatttttcacattttgggcccaatctttgagatttatactattaagttaatgcccattaagtgtacgacttttgctttaaaactcgttgaagatcagttttcttctgggtacaaatgcatgtggatatatgatacggaggtgatgtattacaccagtgtattgaataaacagcctgtaccaattaatgacatggtagatgcaaattgtacaagagcaacaa

SEQ ID NO: 15456 - DNA, 152 bp, Glycine max
gcgtacgtaagctcggaattcggctcgagcactgggtttcctgcttggtgtcacattcagtaactgaatgtgacactgggtttcctgcttggtgtttctgctataactttatgatggcgggaatgctatactgttgatttgcacaatttaaa

SEQ ID NO: 15457 - DNA, 360 bp, Glycine max
atatttttagatcttaacattcccaaggaccagcattaagtggtagctaccccacaaaagctagtgtcaccggaattagcatagcaatggagatatttttgtttgactgtagccatcctcaaattctgctgttgctaccttcttcccaacaagacagtgcaggatccactttgagcatttactttgctctttgtaggctatttttcagtggttccggcagacttttaaatatttctttttgcaatgtactcagaagtgcaggccatatgattatgaatgcaagagaatctttacattgatctatgcttatttgagatgtacactcgcaataaaactgtattcccgagtgccctttatcct

SEQ ID NO: 15458 - DNA, 1004 bp, Glycine max
  unsure (1)..(1004): unsure at all n locations
gcagggataaggattgcttgagcaagtggttttctccatgtgagaaattgggtctctctgctgagcacggttacttcactaggtggaccaaggattctccttgggagacttgcggattggcgaccgattttgaatggaaaatgattgcagaacctgtgatggcgcttgatactgaagcaactgatggttccttcattgaacataaggaaagcgcaatggtttggcaccatcaagaagcggatccttattttggatcatgccaagctaaagagcttcttgatcatctggagagtgtgcttgccaatgagccagtaggggttataaggggacaacatatagttgaagttaaacctcaggtatacttaaatttaggcctaaacaatggaacttacaatgtgtattgcttgcttagaaaatggtttgttttgtttcgaagagacagacagaaagagtattcattttaattgggatgataaggtgaactttctaaaggtgattggttgaattgtttgttgtatgagttgcagggtgtgagcaagggtaaagtggtggaagaccttatctcaatcatgcgaagtaaggggaagtcaccagattttctactgtgcataggagatgatcgctcagatgaagatatgtttgaaagcattgctctttcagtatctaatccagctctttccaccataatatcaaaagtgtttgcatgcactgttggacaaaaaccaagtatggccgaatactatttggatgatactagcgaagtaatcaagttacttgaaggacttgcaactgcagcaggaccttctgcgtccataatttatcaggatttgtgaggaacattatagaaactgatacagaaaaacaatcttgtacagaatgatatactttcataggtggattttaaaaggtcaatacttagaaatttacagattagcttattcatgtttttcacataacttgcagtaaaaaatttcttttttgnnnnnnnnnnnnnnnnnnnnnnn

SEQ ID NO: 15459 - DNA, 615 bp, Glycine max
  unsure (1)..(615): unsure at all n locations
ctatgacgtcgaatgcacccttccttaacctcggaattcggctccagccaaaattcaaattcattcgagtttatcccttcatggaggttggctaagagggatgttggctttagccctttcgtttgcccttcttctcactgcattaagaaccagaaaggctagatcatggcgttatggtcccggttggcttcgcagcctaatagctgactatggggtgcctcttatggccctagttgggacaggtgtatcctacataccagctggaagtgttccacatggtattccaaggcgtctgtttagcccaaatccatggtcaccgggtgcatatgagaattggactgttattaaggatatggttcatgttcctgttgtgtacataatcggagcatttatcccagcaaccatgattgcagtactttattactttgaccatagtgtggcttcccagcttgcccagcagaaagagttcaatttgagaaagccatcttcttaccattatgacttgctccttttgggatttttgaccttaatgagaggcctgantggaattcctcctgcaaatggagtcataccacagnctccaatgcacacaaaaagnctggcaactcttaaaca

SEQ ID NO: 15460 - DNA, 503 bp, Glycine max
caaatattatttacacccacccttcctatatatataaaaaagaaagccccctaagcctcatgggaaaggaaaaccatcgagaaaccaaaaaccaaaatcaatttagaggaaaaagttggaagaagcatggattctaggcggcgtggtaaaaacgcatctatgcaacgcaagttgcaacaacttcgatcggttacaaattccagtgctgtgaacaaagcctcaattattgtggatgccaccagatacatagaggagctgaagcaaaaagtggatggattgaactcagagctaggaaccgcggaatcatcaatctcccaagacgaactacccatggtcactgtagaaaccctagaaaggggattcctcattaatgtgttttcagaaaggaattgtcccggtatgcttggggcaatactcgatgcatttgaagaactgggacttgatgtgcttgatgctaaggtttcttgcgaagacactttccagcttgaagcagtcggaggaga

SEQ ID NO: 15461 - DNA, 375 bp, Glycine max
agaaatcagcacaccacacctccttggctcctccggcatggccaaaaagcgcaagcccaagaagaaaccccacaatcacaatgtaaacctaaaccaaaatcaaaaccaaaaccaaaatcaaaaccaaaacgtcgccgctttgatttcgcgagtaacacatgcagtacagtccttcctctcccaaaacgacctcgttctcctaccttcccaatccctccgtctcgaatccctaatctcatccatcatctcccactctccctcgccgcctctctctccgccgcacagcgactcctggttccgccgcttccgctccgtctccgattccctatggctccacgccttccgcatgtccaaaccctccttctcccatctcct

SEQ ID NO: 15462 - DNA, 249 bp, Glycine max
tctgaatttagaagcgttgccgaaaacaagatgaggggaatcaagattgatatgaatcgtcttgcaactgaaaaccgtatataaagaaagaaaaatgaattggcttcatcaaatgtttttgtactgacaatattaagaaagtcattggttgggtaggctgagtcatttattggtatgatcgactttctaatttagacgcaaatagaattctgaaatatatatgcaattacttttcctgaaatactttac

SEQ ID NO: 15463 - DNA, 451 bp, Glycine max
ctcgagccccggcctttagggaaaaaagaaagaaagaaaaaaaaaaaaacccttctttcccctccttctctcttccatagagatttttctccaaagagaaaaaatggcggcagcttcaagaaaatcaagaagtgcagtaattggatccctttcctccacccctaggttctgcaactctcactttcactcttactctccatcatcttcatcttattcctcagctttcgcctcttccacctccagcttcacttctcgctcctccaccttctttcaccgctcttcctctccgacacgtgtcaacctctgcggttcctccgctccctccgtccgcttctccctcgaccgctccgtctctccgaaccggtccatctctgtggcgcctcgaaccggcgtgtcgaggcagagcggtggtccgcaccaccaccagcagaagcggacctgcatgtgctcg

SEQ ID NO: 15464 - DNA, 601 bp, Glycine max
gatgttaattattagttagttaacattaatctttcaaaaggagccactcgtgtctatatgagccgccttgatcctgtatataacgttgggagagaaatcaagatctgagaagtttcacctttcttcaacccctcttgctctattataatttaatatcttctagagattcttctcgtgccaacccatttatttttctcgcaggtttcatgtcaattctgtttgtgtccgaggtttgccaagttttgttttttattttctgaaatctcattaatatattgttcagacattcccattttgagattttatctgttaggaagaggtccttttgcttctgaatgagagtgtccaatgaaagtttggtccttgatgcataattaaattgttctattgagtggtggcaagtcaaaaaggtctcggctttttcgtaagagaatattgttttttttagtaagattatatatggtgttgttgctatatttaaattaaagaacctgcaaggccctgtgtgcttcttgtttcagcattgccattatcttcttcttcttcttcttgctcttcttctcatggctcttatggcaggctatgatccttgttcccattt

SEQ ID NO: 15465 - DNA, 509 bp, Glycine max
ggcacactacagaaaaaaaaaaagagagagaagatgacgcggggaaagcagaagatcgaagcgcagaagcgaaacgcagagaggaatcagaagggaaagggctctcagctcgaggccagagccgttggcctcaaagtcatctgccccatctgcaaggcccaacttgcaaatcaaaaccaacttgttgatcattatgcttccaaacatccgaaggagaaaccccctgcagagaccagttagttatatttagagcaaatggtacaaaaagtccccaaagaaaaaatttctctctaggtgtgccttcatgcttttaatgtaattctccctgcttgcaggcaggttgcaacatgttttaatttaaccatgttaatgtgcatttttgtgagatcctaaaggatcataaaaactgcgtctatcattataagaatattatcatgttgctgaatatgtctgatgccaagacagaaacggaatggattttaatttttaaattcatgttccattttgtt

SEQ ID NO: 15466 - DNA, 411 bp, Glycine max
  unsure (1)..(411): unsure at all n locations
gacacaaagacaaggagacaaaacaaactaaacatgaatcccattggtttctctcttctcagcctcgcttctctagcacttgtctcgattgtcatagcccaagaaagagcccctcacgggcttgtttacgagaacccagaagccttttcaccatcagcatataacttctttcaccccaatgaacgaaagcccgagacaaaagacccttgtgctgcatcaaaatgctcaccaatgcctttagcagcacaagtggaagctactgaaattcatgaaagcaaggcctcaacccctcaaggaagtaagaagcaattgggagctggtagcgtagctggcattatctttggtgttgcttttgttgtgcttttagcattnggggtctaccatgtgagggtcactcgccgagccaacatg

SEQ ID NO: 15467 - DNA, 485 bp, Glycine max
gggaaaggttggagtggtcaacccagggaccatgagggaaaacccatcagaaaagtacattcaggttgtaacggtggaagggcatgatttttggttcatgggttttgttaattttgacaaagcagttaagaacatctcagaaggtatctcacattttgtagcgccaggagtggccgtgccatccactagtggttcggaagctaatcgaaagaactttcagtgatttctagtttttggagtactatgatgtatactaattttgtttagaatttgactttgcggtttgtgtcgtatactagaacaatactttgttgtaaaaaaacttaggagtgtatgctatatatttcatgtgtgctctgcatcttttttccccctctggtgtttttgcatcttttgttaaatacgcccatatttgggaaagttcattttttttcttgtagtaatctaataaaatataataatcaaaacaggttgtttggtcttat

SEQ ID NO: 15468 - DNA, 689 bp, Glycine max
gtagcgggtatagtttagtggtaaaagtgcgattcgttccatggacccctaaatagttaagggatcccccgtttgattcatattccgatcaaaaactttatttcttacttaaagggaatcctttataccctcaatgaatgatttgcggtataatatacattatcgtaatttgtatacaagaagaatcaattctaaattgacaacttgagttctaaaattatgaaacataagtttttggaattggatctataatccgaatttttttgagtatgacgaaaggatctatggagagatatatagaaagtttctttctaatcgtaactaaatcttccatttttttgtatagtagagattgaagcaaaatagctattaaacgattcttttagtttactagagacatctacatttttttagctcgacagaaattttatgcttttcctaaagattctattaaatagaaatagagaacgaagtaactagaataaaaacatagattattataatactgctcttctagagggatcatctaaaaagccaagatgttttaaacttattcatacaaaacaaaaaggctgacatagatgttatgggtcaattttttgattttccatctcttaattttttctgtaaaggagccgaatgaaacaaaagtttcacgttcggttttgaattagagacgaaaaattgaa

SEQ ID NO: 15469 - DNA, 573 bp, Glycine max
aagggtggtggcggggggagagagagagagagagagatgtcgagattgcgaagactgatccaagcttcagttgatgctactaagaaagttatatccggtaatcttgatgatttgatgccaccaccggagagacccatcttcagcttcaattccaagcaagagttaagcaagtggcatttgtattctgattctgaatttggaggtttgtcctctgcgtctctgcagataactgagtcggaaaatggagcaacttctggaatcttctccgggaacctttctctggatgtctctgaaggctctaaatggaacatcactcgaagtggcttctgtggaatgcgctcaaaaaaggtggatggctttattgatttggattcatatgatactattgctatgaaacttaaaggagatggaagatgttatatatctactatctacacggagaattggctcattgcacctggactgattgacggtactttataccgagctgacgattatgtcaccgatggcttccggagcatttgcactcgtctcatacttcgataccttgattgtagctgtcgttatgattta

SEQ ID NO: 15470 - DNA, 430 bp, Glycine max
  unsure (1)..(430): unsure at all n locations
actcgagccacaaacccactacacaatcataatctcaatcacctcaacttcatttctctgctccaaagtctcaatcttttatccaaaaactcaaatgggcatggccacaatcacaatgggaggcaaccacaattcctccatcactccacgccactacaacacccacaaggtgttccttttctgcaactacattctcttgggtgcagctcctagctgcatcttcctcaccctctctctgcgcctcattccctctctctgcggcttcttcttcatccttcttcaggtctttacgattgcgggtgcagtctccggttgtgccgccgtgggggctaataggtggtactctgcacacatggtggccactgttctaacggctatctttcaggggtctgtttcagtgttggtgtttacgcggactggcgattntctg

SEQ ID NO: 15471 - DNA, 567 bp, Glycine max
  unsure (1)..(567): unsure at all n locations
gatccaaacacagtataaataaaaaaaccaccttcgtccgatccactccaaacgcaacatccgaacgaaacaatcatggcagcgaacccacccgcgccttcagaatccgacccgaaccaaaacccgggttcggagtcctttccgtacttcgaagacatgaacgaactcgagacagtcttcaaccgcttcgacgccaacggcgacggcaagatctccgccgacgaactcgacagcgtgctccggtcgctcggatccggcgtctctcccgaggacctccgccgcttcatggaagacctcgacaccgaccgtgacggcttcatcagcctcacagagttcgccgccttctgccgctccgacgcctgcgccgacggcggatccggcgagttccgcgacgccttcgatctctacgaccgcgacaaaaacggcctcatctccgccgcggagctccacctcgcgctcaaccgcctcggcntcaagtgctccgtcgacgaatgccgcgacatgatcaagtccgtcgacgccgacggcgatggctgcgtcaacttgaggagttcagacgatgatgac

SEQ ID NO: 15472 - DNA, 307 bp, Glycine max
gggtcgaattctgagatagatttcagtatcctcaatggagacaaaaggggtgatacatggcgcttttcgatcgagcttgtcagaaatggggtttctttctgattgagaaccatgaaattgacaaaaacctgatggaaaaggtgaaggcgctaattaatattcactatgaggagaacctgaaggaaggtttctaccagtccgagatagcaaagaccttggagaaaaaacagaacacctctgatatagattgggaaagtgccttcttcatttggcaccgtcccacttccaacattaagaaaatcacaaa

SEQ ID NO: 15473 - DNA, 455 bp, Glycine max
gaagttgcagtaggctaagctgaatctatagactagagtagagtagtgtaaagggaaatgagtgattaacttctcaaactgagagagagagagagagaaagagagagtgcactgaagtgaagagtgcattgtgatatgaggaagcaacaacgttggcaagttggtatcgtggattgaggtggtcttttgggggaaaccatcaacgacaacgacagcatcaaaaggaagagaaagacccagaaacgggaacggctttcagaaactcacaagcttttcaaaaagagcttcaaagtgaaggaaaaaagtgccctttgattcttggtcaccacaacgccaagacaaacaacaaacaaagcaaaacacacacacacacacaagcaaactagaggagccaccgcaacatgttttctgtaaccgaatgctataattcatgggagttggtggtggtggttgtt

SEQ ID NO: 15474 - DNA, 468 bp, Glycine max
ggcaaaatacaagtcttcaagaaacagatctgaataaaagaaacaaaacttgaaccaccgtgaaattcacaatgcaaatcccatgctcgtggaaccaccacaacatgggcaaagccgttcatctcccaaccacagcctgtgaaatccacggcacaaacatggtctgttccattattcagatccacagaggtttatcttctaactctgtggacaccttcaacaacgtcatcgaagctgttatgacgaagatggaggcacaactcgatcccctcctcgaccgctttcatgcgccgccgacgttcatcatctacatgtttctcttctgggccggtgccatacgcaaacagaggggtattccgatgagcgcactctggatgtggatgacaaacacatcagaaaaagatcttatgtgagagagaagatgagggtggggttgggggtttgaactgcgagagagaagagagaatc

SEQ ID NO: 15475 - DNA, 539 bp, Glycine max
gattcacacaactaactaataaagtcttccatagccccccacatatgaagagcaccatcttctttgctctctttctctcttgtgccttcaccacctcatacctaccttcagccatcgctgatgtcctgctccataatgaaggctaccctcttcaaaatggtggcccatattatatctcgtcagacataccagcatttggcgctatctgagcacccccaacaggaaatgaatgatgccctctcactgtggtgcaatctcgcaatgagctcgacacacggattggaacacccatctcgtccccatatcgaatccgttttatcgccgaaggccatcctgtgagccttaagttcgattcatttgcagctataatgctgcgtgttggaattcctaccgagaggtctgctgttgacgatctaccagaaagacctgatgttcaaatctgtgagaacatacatgcaatgcatggctggtctagacttgagagagctcctgatgatgaatcctaaatctataagcgtgtgttgtgttcacagcaagcg

SEQ ID NO: 15476 - DNA, 413 bp, Glycine max
agaagaagctgcatgtcaggacccggatattgaatctgaacaaggcttgatattgattgaccagcaggaaccgagaaggcgttcaagcaatctacgaaatgccccaaactcactccaaaacgaggtcgtcctcctcgtgcgttgtaatcgtaacgaatgaataactctcgtttgagataaaccttggcttggaggcaaccgctttcttcgacgatcaaaacaatgccgtgttcggacaactccaacacggcgtcctgctggcgcttccaccgaacggcggtgagggcgtccactaagccttgaacgttttccagctcgcatataacgtctggggcttcttcctcctccatgagtgagttgtgcaaaatcctaaacccttctcccctatcaaccctctttccctttctactacc

SEQ ID NO: 15477 - DNA, 451 bp, Glycine max
cccacgcgaccgtaaagacgacagaaggggacagcatttttgaagtagtttgtgtagacttaaagaagagttaagggaaaaaaataagatgaacactattggagttatgattatgatcatgtctatgttagggttcgcacaagctaataattacaatcctccatttgtgcaagttgagtcaatcagtgagactaatagacttacttgtccacaagcatgcagagtacaatgtgcagctttagcaccagttgaaccatggtatgacaaatgtgttaaagaatgcactgcaaattgtaagcatgatgtgtccgttgctaaggattgctttactagttgtgccttaatcaagtccattaacatcaacaatgatgttcgtgatctttcgaccaatattgtgatgaattcctgcttgcaagaatgtcaaaacaagaaataagttgttacaagaatc

SEQ ID NO: 15478 - DNA, 552 bp, Glycine max
ggttaaaccagatgtatatcatctgattggaaagaaaaaactttttcgttttatttaaggaaaattttctgtccttagagttttggaattgtggacacagaatgaactcgttttttggactttccgtagagtatcttccttcatagataataaatagcagttaagaatctctcgttttagtcatggactattggagcgccaccctctcacatggcggcagcaaccacaatttgctacggtccctcttctattgttctagggtcaaatttacttaaacgaagacacttgaaaaacacttcgtttgctgatcgtttttctccttcaagatcattactttgtagcggatttgttccaaggaagcctgctttgggaagaaactctttctgggtatcaataatcatggatgaatccgtgggaacttctgctttcagagatgcaaatggggatgaaacgatccaagagtttgaacaagaagctttcatcgatggctcatcacgtttcggttcaagttattgtctcctgaggtggaatacaagctcaatcgactgagca

SEQ ID NO: 15479 - DNA, 331 bp, Glycine max
gaaaacatcaaaggcaaagttgctattgacattgttgatttaaagatggctaagatttctttcacaatcatttttgcttttgctcttatcttcacagttatttcaagggcaagtggagcaaccaccacagatgacaaacgttcaaaagtgtcggatcctaataattgtgacctcactaagtgtcgggccaattgcattcaacaatatcatggaactggacattgcattggcagaaatccttacaaatgtatttgcatatacgattgttctccgtagaatgatataccaattgttccaatttgaatacaaaaaataattaaataaggttaag

SEQ ID NO: 15480 - DNA, 489 bp, Glycine max
gaaattttgaattgcatcaaaaaaaatgttttttttgttttatttagtatggataaaagatcttcctatgttatactatttaattctcgacgatgagtcgatttgataactaagatattgttattcgtgatattgatccaatttgatatcatcgaaatccaatttataccattgttgaattaattatcgatgaaagatttatcatctctatgggattaaatcccgaattttttattggaaatttaagagaaataaaacataataaagattatggaagtaaatattcttgcatttattgctactgcactgtttattctagttcctactgcttttttacttataatttacgtaaaaacggtaagtcaaagtgactaatttcactgaaatctgacttcttcatttttatcaatgtaatcaatgattaaaaaaaatgaaaaaggttttcaatttttggtcttagtctaaaatcaaaaacaaggactcagtgtt

SEQ ID NO: 15481 - DNA, 1049 bp, Glycine max
caggatccttgaacaatgacagcagcagtcctgataataatcctgaagaaaagcatcgaatgagaacggttaggaagggccttcacaagattggttctgtattccaccggagtaaaagaagggagggggggtcaggttctgttgatgaggagattctgtctccacatgataacattaggtcagagaatgctaaggggatgattgctgtgaagtttgtcatggacgagaacatttccggctttcaaactggtaaggttcaggcagaagggggatcaacagaagggagtggtcctgagagccctgccagtgccaagggaaatgtgaaggatatggcgaagaatatttttaaacatgcagaaaaatcggctcgtggcttgaggcacgttctttcttgtaaatcaaggaaattgaaatttaaaggtgagtctccaacagttccagaaagagaacatgaatctgactcttctgacgaggaatctattgcagctcaatctcccatagatgtaataagaactccagttggttctcatgctgtggtctcaggtagcaatggttcccctggttctggggtgaacgtggttcaaatagttccatcaaacactaatttggacaatgaagccacagctaaaatcacgaatgaaaaagatgaccctgaaaatgcatgctcccctgacaggtctagccaagaagttgttaaatctgctgaagtggagcatgataaagaggaaatgggggcacagataaaagagattctatcggtttgtcctactgaagaaagtttcaagtagcatatagcatattttctccagcatttcatacccgtgttcttatatacagtcttccaagtgagtgtttctacagtacttggcagattttgattgtagtaatagtcctgtgatcgtcatagaccgttttacataaacatgttcatgtttcaggtgctgtagtttgtaagcatgtaaataactttatacaaggaataaaaaagaaaaggttttcaaaaaaaaaaaaaaaaaaaaaaaaaaaaaaaaaaaaaggggggcgccccc

SEQ ID NO: 15482 - DNA, 513 bp, Glycine max
gtttgattttcagtgccttttataaaaggaagaggctctgtgtgagtggttagtgttggttgagagaaagaagtgaatcgtaggatctgttattctgttagcatgttccgttcatcgttccgccgcgcgttttcggcgagggcgtcgaagcactgcgagaaccacgagttcctctctcggaactcgttcctggggagctgggaggcgccacgggacccgaaggaggcggaggcgaagctggcgcggctgcgaagggaatacgcgaagcaagtgaaggaggttcggaaggaatacataagagagatggaagcgatgaagattgagaaggagcgcaaggacgaggctcgcagggaagccctcagagtcgccaacgaagagcgcaagaagctcaaggctcaagccgcgcagcttagagcacaggaacgcgacatcgaacgacaacagtttcgagaaaccctattaaaagaaagagcagagaaacttgaaaactggaagatgaaagtcaaaatgcat

SEQ ID NO: 15483 - DNA, 286 bp, Glycine max
gtttgttgaaatgctcacctctctgttgtgttgggtaaggtaagcatgttccgttcattgctccgccgcccgttttcgacgacgtcggcgagggcgttgaagcactgcgagaaccacgagtttctctctaagaactcgttcctgggaagctgggatgcgccacgggaccccaaggaggcggaggcgaactaacgcgtcttcgaagagaatacgcattgcaagtgaaggaggttcggaaggaatacataagagagatggaggtcatgaagattgagaaggagcgcaa

SEQ ID NO: 15484 - DNA, 474 bp, Glycine max
  unsure (1)..(474): unsure at all n locations
ggtgtgcttctctaccagccactgcccgcgttctctgttggcccttccctctcaacaaaattatgtgccgcccctgtagccactggccatcgaatgtcaccactccatactcccaaagtgtaaccattggcaaaaactccatctctctcactctccaaactcaaacttttaccaaatctctcaccttcgtgagcaaagcaagaagcttcgtgcaaattggagaatgaatccccaatcaaagactagagagatcaatgttttgaaaggcaaaatgagaaatcccccttaaatcgggtcttatttttattatttcattttctgcattcatcacttgttcttgcaggttccgaggacttcattttttatttaccaaatctgagaagcaaaaaaaaaaaaaaaagttgagattacactcgaatttgggggttccttctctcagatatggggctctntatgatttcatgttccctactc

SEQ ID NO: 15485 - DNA, 709 bp, Glycine max
agcaggtgcaaaatcacgtgtgaacctcatcatccctgtgaatgccgctccacttccaaggcaaactctgaaacctctctggttctctgtgacagcggaacatattatttgatcatgtattcgttgacagtgaaacccttcttcacacctaaattagtttcttcgtcttcttcaacttccacttcgtcctcttcgatttctctcgtgtccttcccatctcgttcggtctcatcaattagctttcccagaaatttaaagcacaaaggaagatttggtctcagagttgaagcatacgattcctccaataatgacaattccaaccctgccagtgctggcggcgactccaaaccccctaatggcactttgtcaaagagcaggagagaaattttactggaatatgttaagaatgtgcagccagaatttatggaattgtttgtgaaaagagcaccgcaacaggttgtggatgcaatgcgacaaacagtgacaaatatgattggaacactgccccctcaattttttgctgtaacaattaccactgtagctggaaaccttgcacagctcatgtacagcatcatgatgactggatacatgttcaagaatgcgcaataccgtttggaattgcaagaaagtttggaacaagttgctgctcttccggatgtgcaagataaaaaggatgtgacatactttgcatctggcacacaaaagaatg

SEQ ID NO: 15486 - DNA, 252 bp, Glycine max
gacaataagaatttaacactgatacaaaattctgagataagttgtaaagactcagagaaaagttatggcaaagaaggagatgaaatctaccggagtgacaattatgatcatgattatgttgggctatgcacaagctaattataattctccatttgtgaaaattgagcctaacaacacaacggataaacttacatgtcctgcacagtgtggtatagattgcttcattgctaacattgcatatccaatatgttt

SEQ ID NO: 15487 - DNA, 466 bp, Glycine max
tgtggaactcatttttccccattttgtgaaattcaattccaagggtttccattttccatttcaatgtcttcccattcgcacaaaggcacctccttctacggcgatgccgccccttatcgatccagagaggggcttagcactcgacccgttgcatcctccgatgaaatccaattgcacatcgatcccggcatcgacttcgacgacgaaatcaccggtcttcgtggccaagttaaaaaattgaaaaatgttgctgaagagataggttcagaagtcaagtttcaaagagattttctggaacaagtgcaaatggtaatgatacaagctcaagctggggtcaagaataacttaagaagattgaacacgagcatcgtcaaaaatggttccaacaatattgttcatgtgattgcttttgcattagtctgtttctttatagtatacttctggtcaaagatgtccagaaaatgat

SEQ ID NO: 15488 - DNA, 527 bp, Glycine max
acggctgcggacgacagaaggggaaggcaagaaaaaaataaataaaacactaagatccttataagtttccctcgatcggcgaaaatatgtctggtttccttagcaacctctttggtttcaacggaaacaacaatggcactgaggatgcctttaaaaactcaggaggaggaggacaagacttcaaggacgcggagttcaacactggtgtgcaagttgccaaggggagacacgctccttgcagtggtaacagtgggactaaaagtgcttttaacaactctggttcgggaaaacaggatttcggaaatgctatgtttaacactggtgctaggtactactaatttatataagaccttcctcttggaggggctgggcttccaaaacatacatattaatcataggtatggggaataaaaatcacaagtgctcatttgtgggtcatgtgtaagatgtgtatacgtatgttgttatatgctaataattatgatactggagctagagttctgtgtactgtaactgtaatggtgatg

SEQ ID NO: 15489 - DNA, 399 bp, Glycine max
aaactagttactcattttttctctcttggcttctaccatcaatcaccatttccatcttccaaagaatcgatcataatgacgctgaatatagaaacccaatctctaacatcgtccgtccactgctccttcgcgcactactgaagattgagtggagaaagagataagagatgggtctggcattgaacatctcagtgtgttgtttcccacagcagcgttgtcccacatctcttcaaacccaccattaccaaacaagccctctccttccccaccgcttccgcttcctcctccgtaactcaactcagcgtgggccaggatttacccgccaactacagtgattgagttcccagtccctgacccgagctttgcagaagatgcggcattctgctccacccgacgtcg

SEQ ID NO: 15490 - DNA, 961 bp, Glycine max
gcgcccacgcgtccggaattgaagtccataatcataatgggtccaatatgggcatcaggaattgtgctcgtcacagcttatgcccaacaaaacacattctccctccaacaagccaagaccatggacagacacctaaccaaatcctttcataatcccagctgcgtccatgtctgccttcaccatccttaccatgctcaccaccactgccttctatgaccgagtcttcatcaaagtggctcgtaggttcaccgggctggaccgtggcataagcttcctccacagaatgggcattgggtttgtgatctcaaccttagccacattggttgctgggtttgttgaaatgaaaagaaagaaggcagctttggcccatgggctttttgaccacccacatgccataatcccaatctcagtgttctggcttgtccctcaatacagccttcatggaatggctgaggcctttatgtcaattggacacttggagtttttctatgaccaggcccctgagagtatgaggagcactgccatggcattattttggactgctatcgctgctgggaactatgtgagtaccattatggttactttggtccacaagttcagtgctgggtctaatgggtcaaattggctccctgacaacaacctcaacaaagggaagttggagtacttttactggcttatcaccatattgcagtttctcaatcttatttactacttggtttgtgccaaattgtacacctacaagccaattcaggtccatgacaaaggggatagcaattcagaagggaaccaaattgagctctctaccacggtttaagtgtggtgttgtagggattaagtggtttagatttagagtttcttacccttttagtgtccatgcttagagattgggagtctcacgtgttgtatataaataataaatactaatattaattactaaaatagttgaaaaagtgcttccatt

SEQ ID NO: 15491 - DNA, 575 bp, Glycine max
cattattccattttttcatagacattgaggtttaacctcagtcaccagccctctcagattttcacacgcgcctcaaacgctttcacttctaacatctgcaggagttttttttttttttgtccctggatttggaaaacagctagtttccatggaaggtttggtgagttctgggatcaacacggttcgtgtttttggcattacaaaacaccaatctcgttttcttccttcatcaactctgcatctgaggaataacagtgtgtgtggatttggaattggggttgagaagaagaagaagaaacagtgtttcgttgtggctgcttctgttggtggctccaaagtggtccattttgagaacacactcccttccaaagaggttcttgagctttggagaaatggtgatgctgtgtgctttgatgtggatagcactgtgtgctacgatgaagggattgatgagcttgctgaattctgtggggctggaaaggcagtggctgaatgcactgctagagcgatgggtggttctgttccgtttgaggaagccttggctgctaggctgtctttgttcactccctctttgt

SEQ ID NO: 15492 - DNA, 402 bp, Glycine max
ttttcacacgcgcctcaaacgctttcacttctaacatctgcaggaggtactcaataagattcatacactctcaaatcagacccttggatcctaaattctagcaccctttatcctctaatgggattttgataaatcaacagttttttttttttttgtccctggatttggaaaacagctagtttccatggaaggtttggtgagttctgggatcaacacggttcgtgtttttggcattacaaaacaccaatctcgttttcttccttcatcaactctgcatctgaggaataacagtgtgtgtggatttggaattggggttgagaagaagaagaagaaacagtgtttcgttgtggctgcttctgttggtggctccaaagtggtccattttgagaattcccttccttt

SEQ ID NO: 15493 - DNA, 370 bp, Glycine max
gatagacattgagggttaacctcaggcaccagccctctcagattttcacacgcgcctcaaacgctttcacttctaacatctgcaggagctagtttccatggaaggtttggcgagttctgggatcagcacggttcgtgtttttggcattacaaaacaccaatctcgtgttcttccttcatcaactctgcatctgaggaataacagtgtgtgtggatttggaattggggttgagaagaagaagaagaaacagtgtttcgctgtggctgcttctcgtggtggctccaaagtggtccattttgagaacacactccctttcaaagaggttcttgagctttggagaaatggtgatgctgtgtgctttgatgtggat

SEQ ID NO: 15494 - DNA, 425 bp, Glycine max
  unsure (1)..(425): unsure at all n locations
gatgatatctctgctggtgaaaatggattaattagattttggttggaggaaaatacccacccaaccatggctgcaaccattcctttctctctgcttaggaactgcgcgccattgaaactagcaacacctttcgctcgcaaagcctccatctttaatcttcttctccctcttcaaccacgcaggttggtctctagtacctgtgctgtgaacaatgaagaggctacagcaaaaacagcagctgttaattttgatagtgaagctccaacaatatttgataagatcataaataaggaaatcccttcgagcattgtatatgaggatgaaaaggttcttgcatttcgtgacattaatccacaggcttccgttcatgtcctagtcattccanaattaagagaatgattaacacaacttgggaaggctgatag

SEQ ID NO: 15495 - DNA, 809 bp, Glycine max
gattttctgaatgcttcaaaattgtggatggaatcaaccacgttatcctctcaatatttctctctctctctctctctctctctgtaaccaaatcaaaaaataaaaaaaggagctaactaaacataattctgatatcactgtacagtatcaaccaaaccaacaatccaacaccatgaaactctctgtgttccaccatcagcaccatcctatgattctcaattgcccccttaccttgacaaggacacacaaaagactttacaacaatggttcatataggtggttaccatgccactgctcacattcttccacaagtaaaactgctgcagaaccagttacagtttctttaagtattgaaggaaggagagcattactcagttgtctcctcacaactgttgttggagtctatgcatgtgatgtggctggagctgttagcacaagtagaagagctctaaggggagccaaaattcctgaaagtgattatacaaccttgcccaatggtttgaagtactatgatttgaaggttgggaatggagctgaggctaaaaagggatcccgtgttgcaattcactatgttgccaaatggaagagtatcacctttatgactagtagacaaggaatgggcgttggaggaggaacgccctatggatttgatgtaggccaatctgagaggggaacagtccttaaagggttggatttaggagtacaaggcatgcgagtatgaggccagcggctgttaattgttcctcctgaacttgcctatggaagcaaaggagtccaagaaatccctcccaagtgaacaatagagttgg

SEQ ID NO: 15496 - DNA, 456 bp, Glycine max
  unsure (1)..(456): unsure at all n locations
gaggaaaagaagagtttcagaaaatggatccacataaagcacaagcagaagcctcaaagagaccaccaggtcatggtgccactgaagtgcttcatcagagaaaatcacttcctttcaacttcacaacaatgactatagctggtttggttattacagctgctgtgggatacactgtcttatatgtgaagaagaagcctgaagctagtgctaaggatgtagcaaaggttactcttggagttgcgaatcctgaagagactcaccctaagagatagataatatattattagctttatcatatagtagtatacaacttttgagttcaagggcagggtcaatgactactctttgttctttttttttaatttcattttatatagnttntttctttgtgtgggttttaaaatttaatcatagcangtttgtgacagtcatacaatttcacgatgctaaatgaaa

SEQ ID NO: 15497 - DNA, 744 bp, Glycine max
  unsure (1)..(744): unsure at all n locations
tagaaatggaagcggtgaagatggtaggtttgaggcgactgatacgacagcgttcaagtctcagagactccttagccgagaaggtccatagtccagttccctcgcagcatttggcacgcctcacccccaaacgcttcttcgatcttcatcagcttggaaataaggaagcaattgagaaggagcgcgctcgacttgcagatgaaatgactaggggatacttcgctgatatggctgagttcaaaaagcatgctggtaagattgctgtagctaataaattgataataccagcaatggtagccacaaagtttcctgattttgaagtcagcttcacagatggtaaaacaatgaagcttcctatccgtgtttctgatcgtgcagttgattctgataaatcgtctgtccccaaggcatctttggtttgtctttcatttcgagcaagctcccaggaaatgatcaattcttggagtgtgccttttactgaagcatttagaaaatcaaatgatgttcatttatatcaggtatcatttatagattcgtggcttttatgtcgggctcctataaaacgtttgcttctctggacaatgaagaaacctagtcatcatgacagcaaggatacacgtcagcagcagatagtgtattcatttggtgaccactattatttcagaaaagaactcaggatattgaatctccttacagggtatatctttctacttgataattntggtagagtaagatggcaaggct

SEQ ID NO: 15498 - DNA, 634 bp, Glycine max
ggtagtgtgtagtcaccaaacaaacatggcgaaaaaggcaaaagggtctcactctgcctcttctgcctctgcatcttcttcgtccgacaaactagtgctgaggattaaatcaaacgaggggaccaagagatccgtgcggcagactaattcaagaaagaaacccaaagcaaagcaaaagaagaacaaacaaatgtttgatgctatgaaacccaggaaacctccgacagctttcttctacttcttggaggattttcgtaaagaatttcaagagcagaatccagatgtaaagtcaatgcgtgatattggcaaggcatgtggagagaagtggaaaacaatgacttatgaggagaaggtaccattctatgatatagcaccaacaacacgtgaagaatttgatagcgcaatggcagaatttatcaagaaaatggaaaatggcgagtttgacgaaactgatgatgaatcagagtttgatgagtaaagccacccttatttttcttactaggttggatctgtattaactgaaactacttggactaacagttgtacattcagttatcatcagcttttttctgtccttgctgaaacctataatttctgtgtgtcatatgttaaaaaaatttgttgtatttagatg

SEQ ID NO: 15499 - DNA, 476 bp, Glycine max
gaagttgtttaatatacacaacgattatgctgaaacaattaaggatcttgaagatgaggaaaaaagccgtgaaggtgttgttaaagagctagaatactttgaaagtgaagctagtaaaaagaaaaaagagcaggctaaatatctgaaagagattgcactacgtgaaaagagaattgctgagaaacgcaacaagcttgacaggagtcaacctgagcttctgaagttaaaggacgaaatgactcgtataacttcgagaattaaaaaagggaagaaagagcttgatagaagaaaggttgaacggaagaagcatgatgctgatacagcattactacagaatgacatccaggatcttacagcacaaatggcagaccttcaggaaaagggacgagatgttgatgacgagcttgatttgcaatgcaatgacttggaagaatagtttcgcatcaatgaggaacctggaatgaaaactgcaaagc

SEQ ID NO: 15500 - DNA, 771 bp, Glycine max
ttctgacgggggagcaacaaaaaaattaaattcttatcatttacagaatatggagtcccagacttccacacgagagaaggagtctctcaatctcagggaagtcccagaagcagataaaaccttgggcttggacatggccaagggcagcgcattctgcaagatgggtgaaggttggacatgcatcataactaaaactgaggggcctgatgctggcaaagttttcgttaaatgtggtgaaaattgcacctgtaccattgagggcgaagcagtgtcccaagaattgaatttgccacctgatgttgtgagcagcagtggcagtggagcattctgcaagtgtggtgaagggtggagttgtgtcattttcaggactgaaggccctgatgcaggctctggcaagggctttgctgaatgcgctggacagtgttcttgtactattgatgacaaatccacctaagataaacgatgagtgcatctatgatataatctgatggttatttttgtcgtgattctgctacaggtttgtaaaattaattgtattgaagaaggggacaattatgatcagtagtatgtgtggtcaagtgtatgtatgatatatatactatgatggttggtttacttccactctgatacatgtttgctacataagttgtatggaagaagtgagtgcaccatcttcaggataatgcgtgatcaatgataaaggaaacgagggactgccatgactatagaagatcctgaaaaagggcggtcgttctagaggatccaagctta

SEQ ID NO: 15501 - DNA, 643 bp, Glycine max
gacagttgcaagggatgacaagggtggtcccacaaaggtgtttaaggagacaggtgcaaataattgtgtgattttctgagtttctttatttctatttccttggagtggttgtagtgtggttgaaggagtcacaagtagaagaagaagaagctaagtgtggatcagtcacgagtcagtgttgttacttgttagaagaagtacagtagatgaggaaaagggtctgtggagggaagctttttgaataaagaaagaaagaaagaaagtatcgttgtgaggggaaaaaaagtgaaatggagccactgaatcagaagtcttttgagagagtggtttcccagaaagccttgcaaatgggaaactcatttccttgccaaatttgtgtggtgggatttctctgcggtgtatgcctcacctctctgttcttggctgctctcacttcctttggctcctttcagtttagtcccattttgttttcaaccatgtcgatggctagtaattcatcagggtattctacttttcctaacgatatcaacatggttacacgttcggactgccactttaagcttaaggaaactgagagattaggggattctaagagcagcagagagcaaaataacgatgagagagtctcattgctttattcagc

SEQ ID NO: 15502 - DNA, 515 bp, Glycine max
  unsure (1)..(515): unsure at all n locations
cccacgaggccctgtacttgcaggggttcgtcgtttacccttccctaaagtatctggtgtgctttgttcggtaataacgaaaaacgatgggagctgaaactgaatcatcacaggaaaagccagcacaagagaggccaaaggctgctctctcacaggaacagttcctctcatggaaacgccacaaggacgctgcagtatcagccagaaaagccgaagtatccaggaagcgtgctgaagatattgctgcaggaactgtccaaatgaatggccgagaactgtttttacatgagccatgggtgtttgataattcacgttattgaggtttcttttcattggctcataattcataaaaactctttatggtcatgctttgaaaacttatatttcgggtcaaaatcttctctgtagcaagatatttttgaaatttaaagtttgtaccttttgcaaaggaaaggaaacaatgaaaagattgtttctggatgtccnnnnnnnnnnnnnnnnnnnnnnnnnnnnnn

SEQ ID NO: 15503 - DNA, 427 bp, Glycine max
gaaggatttttctggaaaagaaatcaacggtgatagagaatgcattatatgtggaaaggatgaagtttcagttattttcttgccatgtgcacaccaagttatgtgtgctcgatgcggtaaagagtatgggaaaaagggtaaagctgtttgtccatgctgccgggttccaattgaagagagaattcctatatttggggcatgttcgtagtcttacatcggtgagctatgaatattttgcagaaaaactatgctctgccgtagcttatcttttgaatgtctgaaaatgaaaatctattattgctaccttgaaaataagataggtaaatactaacatgtgctttgaaggcactagtcaaggattaaaaaatataaatgattttaagatatgagtaaactgtaaagacctgagttgtttatgcaacaaaac

SEQ ID NO: 15504 - DNA, 792 bp, Glycine max
tgaacttgtagatgaatttgaagattcagaagctataactccaccagaattagttgtgctgcccctgaatgccacggtggctgatcggaggagggggcggcaaatgcttttcaaaatgtatatctaaggttcacaagacttcaagttgatgggcgacatggttatagcggtgtcgacgattccacccaggtcaagctcttgttaggatcgagagatgtagtttgtgtccgaggaagatgcatccggaaaaatgggttgagcaagttccgaatggaaacgggacttgagaggtggactgtagattgcagctgcggggccaaggacgatgatggagagagaatgttggcgtgtgatatatgtggagtgtggcgacacaccaggtgttctgacatccacgacactgatcctgttccagcacgttttgtttgccagaaatgccaacactctgaatcaaaactcaaatctagtgggcactgcaaagatgagactgtgactaacgttagtggtagtagttgcttcagaaacggcttgccagtgccatctgatgttatttgattagtcagattagatgtgtatgaaaagctcctttttcttctgtttattttgctttggcctgaaagtacctgtacataacacagataggccttagaggtagtaggttcagggacggggcatgtcttgttcatatttcagcaggttctaccttcggttgtttattttgtgtatatagtctaacctgtgaagggtggagaggggaaatgtgagcatattcaactttcttttcttcagttc

SEQ ID NO: 15505 - DNA, 372 bp, Glycine max
gttagtggtagtagttgcttcagaagcggcttgccagtgccatctgatgttatttgattagtcagattagatgtgtatcaaaagctcctttttttttttgctttggcctgaaagaacatgtccatagcccagatgggccttacaggtagtaggttcagggatggggcatgtcttgttcatatttcagcaggttccaccttcggttgttcattgtgtgtatatatagtcctaactgaaagatgtggacgggggtagtgagagtattcacctttcttttcttctgttcaaaaggagcttcttggtaaatttagagcgaattctaatgattatgggtcttctttttatgctaaaaaaaaaaaaaaaaggacgaaa

SEQ ID NO: 15506 - DNA, 357 bp, Glycine max
ggagagagaagatggcgagcaacgatggaggaggaggaggaaaagaagaaagaagaagaagaagaattgcagagagaggttcagatcgcatggccttaataacgggtcgaatcaatgcgcttcctccgacaccaccctcttcggcgtcgtccccaacccacccccacatccctcgccacgcgcagtccttgtcggtcgcagctttcgattctaactcagatgatcagcagcggcatcttccccctcgccaacagcgccctcagtcgttgtcagcattcgccgattaccacgaagatctcactggcggtgctgaaaataaacgtagtggctctccttcttcaacaagactaagacatc

SEQ ID NO: 15507 - DNA, 467 bp, Glycine max
gacaaacaagctttccatatctgatatcatatcatactgtttcctataattctaatttatctgggcatggctacgccagggtttggtctcgctgaagcatacatgacacggaagatatacaaggaaaaaatgaaaaagatagcacaagaagaacaagagggagagaaaaactccaacatgaagatttctactatcaaaacgggttccgaggataaaacatcaagtgggtgtttctcatgggtctccaaacagcaacacaagacaaattctcgaatttcagattacaacgaaaccctagctgctgccaattcatgattgacgatgttgggcttttatacattttaagtactaattaatgtttctttcaatttttcatctgtactagagattattctttttctttttgtcattattatgtataattgcataccctcccatttttgtgaaatggaatgaacttgttgtaa

SEQ ID NO: 15508 - DNA, 410 bp, Glycine max
gacccttttcttgcaatctaagttttttctccttttcttttttctttttttctttttttaatattctcaatttatacccttcgagaggggggcgcactagctatcacagtttcacctgagaaactgagggaaaaaaaaaaagatgagctcagtatgcatatcaaactgcatcaacgacgcacgtgacccacgtgttccggtgagggcttcctacgtgaacctctataagtggccggaatcggatgctgagttcgtgaggtctagaagctgcaacagagaaaaggggtctcagatattgtacggtcaccccaggggggtggatagcatctcttgcagacaaatgttcctcagaagctacacgttttcaagggaaagaaaaaccgagcacgagaaaacccacaaatgttttg

SEQ ID NO: 15509 - DNA, 473 bp, Glycine max
gaagacgacagaaggggattcacaaaaccaaattgctttgcactactactaaactaccatcttgctttccaagcaatcactaaagtgaaagccagccatgggaaactgcttggtgctgcaagagaacgttgtgaagatcgtgaaaaccgatgggaaagttcttgaatacaaaacacccatcaaagtggaagaggttctgatacaattttctggccatgcagtgtctgaatcactcacagtgctgcggcatcttgagccacacacaaagttgcttagagggcagttatattacctagtgcctctgccaccatcaccaaaaaccaacaagaaggtgaggtttgcggaaccagaagtccaagatgtacataaaagtaacgtggttaggattaaggtggttattagtaagcaacagctgcagaacatgctgcagaatggagggttttcggttagtaagatgttgtctctagttcatg

SEQ ID NO: 15510 - DNA, 823 bp, Glycine max
tccaaatcctaggacgtacattggctctggcaaggtttctgaaattaagagtgcaattcatgcattgggcgttgaaactgttatctttgatgatgagctgtcagctgggcaattgcgcaacttggagaagatttttggtggagatgtgagagtttgtgatcgaactgctctcatccttgatatatttaatcaacgagcagcaacacatgaagcgtctttacaggtttcattagcacaaatggaataccaactacctcgtctaactaaaatgtggactcatcttgagcgtcaagcaggaggaaaggtgaagggaatgggtgaaaaacaaatagaagtggacaaacgtattctgcgcaaccaaattggtattcttaaaaaagagctagaatctgttaggaaacatcgaaagcagtaccgtaacaggcgtttctcagtacctgtggcagttgtatccttggtgggttacacaaatgctggtaagagtacacttttgaatcaactaacaggagcagatgttcttgccgaggataaattatttgcaactttagatcctactacgaggagggtacagatgaagaatggaaaggagtttctcctaacagacactgttggttttattcagaagttacctactacactagttgctgccttcagagctacactggaggagatatcggagtcatcgctcttggtgcatgtggttgatataagtcacccgctggctgagcaacagataaatgctgtggacaaagtcctgtcagaactagatgtatcgtcaattccaaaattgattgtctggaacatggttgacaaagttggtgat

SEQ ID NO: 15511 - DNA, 479 bp, Glycine max
gcaaggcacagggacagcagcagaagcagaaaagatagagtgcggtgaagaaagatgtcgaatttgcagttacagattcactctcctccaccatcactcttatcatattcatcatcaccatcatcactatcctcttcttcttctcttaagctattcccaaaccaccctttctcctcaaagtcccttcctttcaacactcctaaacccttctccctcagatgccgtcactctgacctcttcgatcagaacaccttagcctctacaccacgaccaacgagaccctctgcttcagttggagctttgccgcctagggtttatgtcggttactccatttacaaagggaaggctgcgcttacatctgactactacgccccccgcattcatgccactcgattcggcggcatacataatatctaaggaaggttatgtgctgcttcagtttgcaccggcagttggtacgcgccaatatgattggaata

SEQ ID NO: 15512 - DNA, 446 bp, Glycine max
ctcagaacgcaatcaattgcagccagaaaactagagagcatagagacaaagacaagatgggagaagaagaaggttgcgaatgcaggccactgggtttcttgctcggattgccctttgctcttttggctttgattttatctcttgtgggtgcagttatctgggtgcttggatctatattgagttgcttgtgcccatgttgcatttgctgcgctggattggctaatttggcagtgagtcttgtaaagcttccagtaaaagttcttagatggttcactcgtcaaattccttgctagagcataatctttcccctttttgattcttttgtagcaatacttgggtccttgtattccctctttttttatctttgttgggatatgcctattgtttgattcattggatttgttacgatcaccaagcgtttataatttaattctttcttgtgatcc

SEQ ID NO: 15513 - DNA, 505 bp, Glycine max
ctcagaacgcaatcaattgcagccagaaaactagagagcatagagacaaagacaagatgggagaagaagaaggttgcgaatgcaggccactgggtttcttgctcggattgccctttgctcttttggctttgattttatctcttgtgggtgcagttatctgggtgcttgggtatgtttttctctctgaaagtttttttttttctttattcagttattttacttctttttctataagaaaatattgtctgggccaagtaatgccgcacaatgtgtcttttcttttggtttatttaatgatttttcttccttttgccccaatttttgttatttttttattgcgaactgaattgtgcggcgatgggaattctcttatgcagatctatattgagttgcttgtgcccatgttgcatttgctgcgctggattggctaatttggcagtgagtcttgtaaagcttccagtaaaagttcttagatggttcactcgtcaaattccttgctagagca

SEQ ID NO: 15514 - DNA, 627 bp, Glycine max
cccacgcgtccgcccacgcgtccggggttatggtggaacaagtttgaggcactgacaccgcttgagcaaaagcaggagataaacattaaacactgcaaaattcgtaggaaccgcacaattgagatttgagctagttgcaagtcaccaccatggcacttgttgaaccctttgcttctctttcaatctcttttcgcgatgctcgtgttttcactgcaccaaaatgctctcccaccactcactttcctcatcggaatttggttccaactcgagcatcattcatcgctggttccccactgttgattcgaagaaatcatggaaggaatggtgcatgcaaagcaatgcctgtttcaataagatgtgagcaaagtacccaggaagggaacagtttagatgtgtggctaggccggctagccatggttgggtttgcagtagccatcactgttgaaattgctaccgggaagggactcctagagaactttggactcacaagtccactgcctacagttgcccttgcagtaacagcactggtgggtgtcttgacagcagtttttatcttccaatcagcctcaaagagctgattacatgtttaggctggttgtgattgttgtaaattcttaagctgggaag

SEQ ID NO: 15515 - DNA, 359 bp, Glycine max
cactgacgtgtgacgcgacgcgattgctcaaaagcaagggataaacaatagtacgaggcaccgcattgttgagacgtgagacttgagttatggcactggttgaggcctatgcttctctttcaatctcttctgttgctcgtcttttcactccaccaaaatgctctcccaccgctcactttcctcatcggaattttgttgcaactcgaccatcattcatcgttggttccccactcttgattcaaagaaatcatggaaggaaagctgcatgcaaagcaatccctgttccaataagatgtgagcaaagtacccaacaagggaatggtctggatgtgtggctaggcagactagccatggttggc

SEQ ID NO: 15516 - DNA, 666 bp, Glycine max
aaaagaaaggaagaaagaaagaaagaaatggaggagaaagaagagctcaaaaagtctaaggttattaaaatagactctcaaaaatcatgggaacaccacatctcttatgctaccaatcaaaagtaccctattgtagttcatttctctgctttctggtgtgtcccttctttagttatgaatcctttctttcaagaattggcctccacttatgaagatgttttgtttctgacgttggatgtggatgaggttaaggaaattgcctccaagatggaaatcaaagccatgcccacctttctgttgctgagtggagggactcctgtggacaaaattgtgggtgcaaatcctgatgaaattaggaaaaggattgaccattttgttcactcaactcgttcctagaacttttgttcattgtgctaggaagcatttcatatatgttttatattccaaagtaatatttatacgggttgttctgtgcttgtttcattgttgaagtatatgtttggtgacccgggaaagtcagtagagtgtgaatggtactttgtattgagtttcatcatgatggcattattctcttataatatcctttcttcttgtatcatccaagcgtaccacctcattggattgaaactaaaattatttctaatataataaacattattgcttaag

SEQ ID NO: 15517 - DNA, 622 bp, Glycine max
cgcagattagtgcgtatctaaaagggagcaaatattggaagtaggggaaaccagatatgatatccttcacaacacaaccttatcctttccaattgctaagttgactctcatcaatatctcattcctattcctatgtcttaagccttaggattattttcttttctactcaaaacaaaacatgtctcacaccccacccagctaatctcccccttcaacacaacaacataatggttgcaactgccgccacatttttcaatccactatttcttcacacgcatggtagggttaacatatgggcactaagcaggattagctacttaagtggaaatgtgaagtctaggttccctatttatagatcagaaattcatcatcaggttcattacttttcacaccttgcacctatatgtgcaacctttaaggaacccaaggggtttggtcctaccccaaggaaaagagaagaagagccaggaagatgagatgggactatggagaaggtgatgatgaacaagacgaagaagatgaggaagaagagccagacaggtgagttattcctgaagtactgaccaacagaatgatgaacaggatggcagtgtctgtagggatttcactgcgtgttgcgctc

SEQ ID NO: 15518 - DNA, 396 bp, Glycine max
ggtgtcagagagaaaaaaaatagactccaaaaatcactggcaactcagagatacacaatggcaaaagcttcaatgttgtttccttgcttaatagttttatttctcataacatatgcaacaggttttgtggatgcatgtaactacccgtgcaaattcccaagtgattgtaataatttacgatgtcttcgccctgattgcaaaaagtattgcctcaatggatgttgcctttgcaattgtcgtcttattccacctagtggaaatgtttgataaagaattttcataaaagaaagttgagtctttcatgattcaaattagaatgcaaaaatttccatgactttgtgggggaattaatttgaaataataaagttgaaataataccgtctttaattctccgcc

SEQ ID NO: 15519 - DNA, 431 bp, Glycine max
ggatggatgatgaggttgtcaatggcagggtttcgaagctcgttgcccttttctgcgctaattagacaggtcgagcaagagatggaaactgtgatgaaggtgcttcagcctggacccttgggaatcatagagcacaagttttccgccgacgaaattcgcaaggctaatgccacggtttctaaagcagtgaccaattggcgaaccaatgcgatcctcgaagactacaatcacgttttaaaagactatattcacaacaagtgaagccaattttagttcctcccgccaaattttgacccaaggttacttccattttcctttggtgtgtgtgtgtgcctatttgtttagatgtatgatcgttattgaggtgtttaagtattgtaaatgccggttacttgattataagtttgtatgaagttattcaatagtatctg

SEQ ID NO: 15520 - DNA, 870 bp, Glycine max
acgatccatacccatatcatatcgcattcttcaaacttactgcattcaatttctctctgtctacaacgcaacacacacacacacacaaagagaacttttcagcttcactcttcaattcagttcaattttaaacatgctttgcgtcaacactgccttcacctctttcttgcccagaaaatcaatttgcttcttttcctccaaatcaaccaccccaatttcctgcaccctccaaggaacagttgcagaaccaaaatctacagctgctggtgaacctcttttgctaaatgcagttcgtgggatagatgttgaaagacccccggtttggctcatgaggcaagcagggaggtacatgaagagttaccaaaccatctgtgagaaatatccttcattccgtgaaagatctgaaaatgttgatctcgtggtggaaatttctctgcaaccatggcatgtttttaagcccgatggagtgattttattctcagacattcttaccccactttctggaatgaatataccctttgatattgtgaagggtaagggtcctgttatatttgatcctattcacacagctgcccaggttgatcaagtgagggagtttattcctgaagaatcagttccatatgttggtgaagcactgacaattttgaggaaagaggtggataataaagctgcagtccttggttttgttggggcaccattcaccctggcatcatatgtggttgaaggtggttcatcaaaaaacttctcaaaaataaagagattggctttctcagaatccaagatcctgcactcgttactgcagaagtttacaacatcaatggccagatacattcaataccaagctgacaatggagctcaagctgttcagat

SEQ ID NO: 15521 - DNA, 493 bp, Glycine max
tctgaaggtgaatttaggttgttgggtaggagagaagggaatcgttatggtggtggtaggttttttggtttggaagagaatgaagccaacagcaggggaagaagagtgtcatttagcatggaagataatcgtaaagagtacctaagccagaccctagagccaggggacatatctgcaactagctttgatgatgaagaggtcacaagtgatggagaatatggtgatggacaggactggggcaggagggaaccagagataatatgtcggcatatcgatcatgtcaatatgcttggtctcaataaaactgcacttagacttcggtttttgataaattggcttgttacctcattactgcaactgaaggtgcctgcttctgatgggggtgaaaaagcaaggcttggccaaatctatggtcccaaaatcaaatatgaaagaggtgcagctgtggctttcaatgtgagagacagaagtagggggctaatcaatccagaga

SEQ ID NO: 15522 - DNA, 322 bp, Glycine max
ggccacaagctacatacacaagaatggctcgcacacttgtctcagtgatttcgttaattttttttacctttgcagtcatggttgttgttctattctcaattggtgtgaatagcagtcagatctgtcctggaaattgcgaaaatttttcaaactgcaatgcctacggccaggcccactatcataagaaagggatatgcatcagcccacctaaacgagggtacatttgttgttgcttctcaggagtttgcctcacgtaattatcggcaagcaatggattgtttttaataattattagcatcagtgctggaaataaaaaagcatt

SEQ ID NO: 15523 - DNA, 517 bp, Glycine max
tcgccttttcgtccgcccacgcgagcgctaaaaccgaagaagaaacagaattgaattgaattgcgtttgcgccattgaaaatcggaagtaatggaattgcattgctccgtgaaaaaattggaaaacgagaaagcgtttgagtttctcggaggcgttcctcttctgcagaggcttccgagctcgtctctgaggaagatagctcaacttgtggatgtcaaacactgtgagccaggagagtatgttgttcgcgagggtgaacctggagatggcgtgtacttcatattggatggagaggctgaggttcttggatctgctagggccaatgatgaaaatcgaccagagttccaattgaaacaatatgactactttggttatggtttgtcaaacacagttcaccaggcagatgttgttgctttgtctaagctcacatgcttagtgcttccccatgtgcactcaacactgctgcagccaaagtctatctggagagcagaaaattctttccagacatgctcacctg

SEQ ID NO: 15524 - DNA, 436 bp, Glycine max
gctaaatcgaagaagaaacagaattgaattgaattgcgtttgcgccattgaaaatcggaagtaatggaattgcattgctccgtgaaaaaattggaaaacgagaaagcgtttgagtttctcggaggcgttcctcttctgcagaggcttccgagctcgtctctgaggaagatagctcaacttgtggatgtcaaacactgtgagccaggagagtatgttgttcgcgagggtgaacctggagatggcgtgtacttcatattggatggagaggtatgcttatatattcatgccatagaccttagagaaacaaaaccagacagccaggtttcattggattgcttgtggatttgtgtagagcagttttggctgaggttcttggatctgctagggccaatgatgaaaatcgaccagagttccaattgaaacaatatgactactt

SEQ ID NO: 15525 - DNA, 845 bp, Glycine max
gtccaaggctactttaatcagtgttttgatcacaaccgttttctatatgttatgtggctgctttggctatgcttctttcggagatgcaagcccgggaaaccttctcactggcttcggcttctataacccatattggctcattgacatagccaatgttggcatagttatccaccttgttggtgcataccaagtttactgccaacccctcttctcattcgtggaatcacatgcagcagcaaggttcccaaatagtgattttatgagcagagagtttgaagtaccaatccctggctgcaaaccctacaggctcaacctcttcaggttggtttggaggacaatttttgtgattttgtcaactgtgatagccatgctcctaccattcttcaatgacattgtagggcttattggagccattggattttggcccctcactgtgtatttaccagtggagatgtatataactcaaactaagataccaaagtggggcataaaatggataggcctacaaatgcttagtgttgcatgctttgtaattactagattagctgcagcaggttccattgctggggttattgatgatctttaagtttacaagccatttgttaccagctactaattcaataggataattacttagtgatcatgatcaccattgtcagagatttcattagcaacaagaaaaaaaaaagaaggtaaattgttgcaaattgaaatcaacaagaaggtggtcttacttagttattgcttaataaccttagatcttctagatctttggtttttttgttagagtggggtggtctcttactttggaactagctcttgtttcctaatttgcaatgagaaat

SEQ ID NO: 15526 - DNA, 453 bp, Glycine max
cgacagaaggggacttttgccaagtgctaccaatgcccgcaaaagtccctgcttcaacaacacaatgctgcatcattgaaaattatatatgttcttctgctttaaacatatagggacgcatcagcatctccacccttgtgtatttcccctatctttttgtttaatctctctagctataaatattgttaatgctgatgttcccttgtgtagaaaggcaacattgttatatttcgctttcgaatcattttggttaatcataagcatgcactatagttatagcatatgtagggagtgatgtttggcaattggcatatagcgacctcaagtatagcctgcatgtttccaataatgtctttgcattccaatataatcatttttttcttctccaaatctcaagtattggtagaacatgtatgtttggtgaaagttacattataaaagcgtgtagtatat

SEQ ID NO: 15527 - DNA, 642 bp, Glycine max
tgttaggatttaaacaactttgccgaagatttaaagcaagagggtaaaatagcaccagatgaaccagcaattctgcccccgttgcctatagtccctaaacctgaaaagcgtaaacccatatatgtaactcctcaatcaaagagaattgattacagggatagagattgggatagggagcgtgatagggactttgagctgatgcctccaccaggaagtcataaaaaggagtatgctaccccgatggatgttgaccaacccattgatccaaatgaaccgacatactgtgtttgtcatcaggtatcttttggagacatgattgcttgtgacaatgaaaattgccaaggaggtgaatggctccactattcgtgcgttgcgctaacgcaagagacaaggttcaagggaaagtggtactgtccgacttgcatattactcccacaatgtcaacgatgaatcttcgcacgaactaaactacattcataaatgaccactgtttcaatagaattatcactttttagtgaatacataatatgtcggttttgaattatttgtcttctatattgcttggtcatttgtgtttggcaaagaaaccaagtgggctctaccagaacttgtataaagtcctctaagatttgagagaaatga

SEQ ID NO: 15528 - DNA, 595 bp, Glycine max
ataaaagctttttctgacagtcccatcattggagagatacggggaactggcttgattctgggcactgagttcacagacaacaagtcacctaatgatccatttcctcctgaatggggaataggtgcctattttggagcacaatgtgagaagcatgggatgttagttcgtgttgcgggagataacatcatgatgtctccaccatatattatatctcctggagaagttgaagagttaatcagcatttatgggaaagctttgaaagaaacggaaaagaaggtacaggagctcaagtctcagcgcaagtagcttaggcctcatgatggaataataaactctgctgcgcccacttccgggggaaaaggaaatattgtagtaacttgataagactttgttccaaccttttcgttattgtaaatgtcaataaattggtttcctagttgcttcctaattatatgttgtagttatacatatgcttagaataatgctcgttacacatctccacattgcatgtagcatagcctctcattaatgacgtggcagcatcaatagtgcaagtgtagaaattttagtaagccaaactgtaataaggtgatgg

SEQ ID NO: 15529 - DNA, 537 bp, Glycine max
gaggaaagcagctggagagccggatactcaagaagaaccaaagaaggggctgaggagtagagggttgtgtctggtgccagtgtcatgcacactgcaagttggaagtgacaatggagcagattattgggctccagccctaggagggggctttcgttaggagttttttacaaatggggcagcatatacatataaatatggtagcatgcatagaggtaaattcatggaaatgatataacatcatgagcagtcaatctgctaaaaaaaaatctaaggctgattgctcatgatgctatacttcattattcctgaataaaatgtgtgctagctagccgtgacagtatttgcaagcccttgaagacttcataattcatggaaatcaagcttaattagttttctttattctcatttagcttaattaattaagatgatggtactaattaatgcgctatatttcgatgtatatgcaacatttgtgtgattaatcatttgaatgctacttttttagcagcattaattgaactgattaccattatgctc

SEQ ID NO: 15530 - DNA, 546 bp, Glycine max
aatctcttcgttgtcatttgtctctcacaacctcatcaccaccaccactcccacatggtcacaattccaatctgccaaatatagaaaaccaatacgccaccacattagtaaaattgcatgcagtgaaaacacactcgaaggagaaaagctcccacatcggaggaacgttctacttggcctaggaggattttgcggcgctgctgttatgtctctgaacaacaagaacataccttttgcctctgctgctcccacacccatgttccctctggtgttggattccgctgtgagcacggtggtgaagaggccaagcaagtcgaggagcaagaagcagaaggaagaggaggaggaggttctcgtgattgaagggatcgagtttgagggaaacacacatgccaagttcgatgtcatcattaacgccgatgattataacgaaatccgtcccgatcacaccgagtttgcaagaagctttgcgagtctgcctcacttaaataacaaaaagatcgttactttcatgagtctgggattgacggatttgttggaagattt

SEQ ID NO: 15531 - DNA, 520 bp, Glycine max
tggcctggaacctttgggctgatttatcgacttatgtgcttgtttatgtgcttgcatggtcgtgagaagatgatagaaggggacgtaatcgaacaaccaagaaaagttacccttacagtagttcaagaaaacgaagagtatcagtccgcctgtcactccctcatcccgtgttcctattctacattcattccttgttattgtttaggatgcgtctgatgcggacggtgacttgacctggaatggccctacacatcatgccccgttggtaacaagaggaaatggcggtggaacagaatgagttgtatctgggaaagatatccgtttcactatcgcagcgtaactctttaacttaaatctcaaggggccagaaaccaagcccgaactcgtacattttgttcaccatacaaatgaaatttcaaccccgtaaacaaagcctagccatttatagtagcgcgaaagaaagaacttccggcgggttaccctcaaagacacactcggaggattattcgtcaccaaatct

SEQ ID NO: 15532 - DNA, 487 bp, Glycine max
tggctcggaacctttgggctgatttatgtgcttgcagtcgtgagaagatgatagaagggcatggtcgtgagaagatgatagaagggcatggtcgtgagaagatgatagaagggcatggtcgtgagaagatgatagaagggcatggtcgtgacaagaccctagaagggcatggtcgtgagaagatgatggaaggggccacgtaatcgaacagccaagaaaagttacccttacagtagttcaagaaaacgaagagtatcagtccgcctgtcactccctcatcccgtgttcctattctacattcattccttgttattgcttaggatgcgtctgatgcggacggtgacttcacctggaatggccctacacatcatgccccgttggtaacaacaggaaatggcggtggaacagaatgagttgtatctgggaaagatatccgtttcactatcgcagcgtacctccttaacttaaatctcaaagtgccagaaac

SEQ ID NO: 15533 - DNA, 527 bp, Glycine max
attggcttggaacctttgggctgatttttgggctgatttttgggctgatttatgtgcttgcatggtcgtgagaagatgatagaaggggatagtaaaaataaccaacaaagacgagcccgaagaataatacggcggcgtcaaaggcgcgcccgccgtcctccccttccgcgggggccatagtcgtatgtacggaatcgagtcctcctaaaagcgactagctactaagccacgacgacgacgagcacctaaaattacgtcgcgactctcgtacgcgtatatgtctaacgttcttctaacgtagtcgcgaagacaccaggtcgaacctacgttatctagaccgcaagagtcgcacgcgtatatgtctatagttaggatagcgctgccgctccgatattaatgatcctcgtcataaattccgtaagcttagagacgatcagaaaaatcaacagtctctctaaacggatgaagttttcccaggtcccgcccgccacgccaggggagataaacaaaataagaaacaaaagtct

SEQ ID NO: 15534 - DNA, 500 bp, Glycine max
ttggctctggaacctttgggctgatttatgtgcttgcatggtcgtgagaagatgatagaagggcatggtcgtgagaagatgatagaaggggatagtaaaaataaccaacaaagacgagcccgaagaataatacggcggcgtcaaaggcgcgcccgccgtcctccccttccgcgggggccatagtcgtatgtacggaatcgagtcctcctaaaagcgactagctactaagccacgacgacgacgagcacctaaaattacgtcgcgactctcgtacgcgtatatgtctaacgttcttctaacgtagtcgcgaagacaccaggtcgaacctacgttatctagaccgcaagagtcgcacgcgtatatgtctatagttaggatagcgctgccgctccgatattaatgatcctcgtcataaattccgtaagcttagagacgatcagaaaaatcaacagtctctctaaacggatgaagttttcccaggtcccgcccgccacgccagg

SEQ ID NO: 15535 - DNA, 486 bp, Glycine max
  unsure (1)..(486): unsure at all n locations
gcttcgacctttgggctgatttatgtgctttgtttatgtgcttgatggtcgtgagaagatgatagccggggatagtccaaataaccaacaaagacgagcccgaagaatggtacggcggcgtcaaaggcgcgcccgccgtcctccccttccgcgggggccatagtcgtatgtacggaatcgagtcctcctaaaagcgactagctactaagccacgacgacgacgagcacctaaaattacgtcgcgactctcgtacgcgtatatgtctaacgttcctctaacgtactcgcgaagacaccaggtcgaacctacgttatctacaccgcaagagtcgcacgcgtatatgtctatagttaggatagcgctcccgctccgatattaatgatccccgtcctaaattccgtaagcctagagacgatcagaacaatcaaccctctctctaaaccgatgaagttttcccaggtcccgnccgccacgccaggggagat

SEQ ID NO: 15536 - DNA, 545 bp, Glycine max
ggctcggaacctttgggctgatttatgtgcttgcatggtcgtgagaagatgatagaagggcatcgtcgtgagaggttgatgggcgggcacgggcgtgagaagatgatagaaggggatagtaaaaataaccaacaaagacgagcccgaagaataatacggcggcgtcaaaggcgcgcccgccgtcctccccctccgcgggggccatagtcgtatgtacggaatcgagtcctcctaaaagcgactagctactaagccacgacgacgacgagcacctaaaattacgtcgcgactctcgtacgcgtatatgtctaacgctcttctaacgtagtcgcgaagacaccacgtcgaacctacgttatctagaccgcaagagtcgcacgcgtatatgtctatagttaggatagcgctgccgctccgatattaatgatccctcgtcataaattccgtaagcctagagacgatcagaaaaaaatcaaaaaaaaaaaaaaaaaaaaagtggttgtctcagaggacttaagtccatgcatgtgcgtacgtgatgctac

SEQ ID NO: 15537 - DNA, 510 bp, Glycine max
tggaccctttgggctgatttatgtgcttgtttatgtgcttgctgatttatagtgcttgcgcggggtcgtgagaagatccatagaagggggtcctatacaaaataaccaacagagacgagcccgagagaatagtacgccgcggcgtcaaaggcgcgcccgccgtcctccccttccgcgggggccatagtcgtatgtacggaatcgagtcctcctaaaagcgactagctactaagccacgacgacgacgagcacctaaaattacgtcgcgactctcgtacgcgtatatgtctaacgttcttctaacgtagtcgcgaagacaccaggtcgaacctacgttatctagaccgcaagagtcgcacgcgtatatgtctatagttaggatagcgctgccgctccgatattaatgatcctcgtcataaattccgtaagcttagagacgatcagaaaaatcaacagtctctctaaacggatgaagttttcccaggtcccgcccgccacgccaggggagat

SEQ ID NO: 15538 - DNA, 571 bp, Glycine max
tggtcggaacctttgggctgatttatgtgcttcgttatgtgcttgtttatctgcttgcttatctccctgcttatgtgcttgtttatgtgcgtgcgtggtcgtcagaagatgatagaggggcatcgtcgtcagaagatgatagacgggcatggtcgtgagaagatgatagaagggcatggtcgtgagaagatgatagaaggggcatcgtacaaaataaccaacaaagacgagcccgagagaatgctacgccgcggcgtcaaaggcgcgcccgccgtcctccccttccgcgggggccatagtcgtatgtacggaatcgagtcctcctaaaagcgactagctactaagccacgacgacgacgagcacctaaaattacgtcgcgactctcgtacgcgtatatgtctaacgttcctccaacgtacccgcgaagaccccaggtcgcacctacgttatctacaccgcaagagtcgcacgcgtctatctccacagtccccccagcgcccccgccccctatcaacccccccccctctccaccccgaccgcccccatcccccctcccaacgccaccccccc

SEQ ID NO: 15539 - DNA, 371 bp, Glycine max
gaaggggatactccaaataaccaacaaagacgagcccgaacgatatgacccccaaccggtcaaaggggcgggcttgccgtcctccccttccgagcggccgccatactcgtatgtacgcaatcgagtcctcctaaaagcgactatctaccacagccaccacgacgacgagcacctaaaattaccgtcgcgactctcgtacgcgtatatctctaacgttcttctaacgtagtcgcgaagacaccacgtcgaacctacgttatctacaccgctaacactcgcatcgcgtatatctccatacctaagaatagccgactcctcgccccgatattcctcatcttcttcataaactccgtatgccataccaacgatca

SEQ ID NO: 15540 - DNA, 535 bp, Glycine max
gcttcgaactttgggctgagttatgtgcttgaacctttgggctgatttatgtgcttgcatggtcgtgagaagatgatagaaggggacctatataatcaatcaagaaagctccttacagttttttaaaaacgaagagtattactcctcccgtctctccctctccccgcgttcctattattctacattcattcctagttactgtcgaccctgcgtctgacaacgaaggcaatttctccgaaaacggcggtatacaccacactccgctagatacaatagtacccggcggaacaagagtagttttaatgggaaacgaaagacgtttctctatcgcggcgtaactctgtaacgagtctgataaagggaccggaataactactctgcttttacactgaacttgccccactgttgaaggttacttcccgagttccaagcctgacctacccgtagccacaacgtcgcgcgccggaaccttcattgagcggctcgccgcggaggactcattagaaggattccgtcgcaaaaccggcgagaataa

SEQ ID NO: 15541 - DNA, 502 bp, Glycine max
cttggcttggaaccgttgggctgatttatgtgcttgcttatgtgcttgtttatgtgcttccttatgtgcttgcatggccgtgagaagatgatggaaggggacctatatgaatcaatcgagaaagctccttacagttttttaaaaacgaagagtattactcctcccgtctctccctctccccgcgttcctattattctacattcattcctagttactgtcgaccctgcgtctgacaacgaaggcaatttctccgaaaacggcggtatacaccacactccgctagatacaatagtacccggcggaacaagagtagctttaatgggaaacgaaagacgtttctctatcgcggcgtaactctgtaacgagtctgataaagggaccggaataactactctgcttttacactgaacttgccccactgttgaacgttacttcccgagttccaagcctgacctacccgtagacactacgtcgtgcgccggaaccttcattgagcggctcg

SEQ ID NO: 15542 - DNA, 487 bp, Glycine max
gttgcattggctctggaacctttgggctgatttatgtgcttgtggatgtgcggctgggccgggataagatgatagaacgcgctcctatataatcaatcaagaatgctccttgcagtgtccttaaaaacgaagagtgttactcctcccctctctccctctccccgcgttcctattattctacattcattcctagttactctcgaccctgcgtctgacaacgaaggcaatttctccgaaaacggcggtatacaccacactccgctagatacaatactacccggcggaacaagagtagtttcaatcggaaaccaaccacgtttctctatcgcggcgtaactctgtaacgagtctcataatgggaccggaataactactctgcttttacactgaacttgccccactgttgaaggttacttcccgagttccaagcctgacctacccgtagccacaacgtcgcgcgccggaatcctcattgagcggctcgccg

SEQ ID NO: 15543 - DNA, 495 bp, Glycine max
tggaacctttgggctgatttatgtgcttgtttatgtgctgatttatgtgcttgtttatgtgcttgtttatgtgcttgcatggtcgtcagaagatgatagaaggggacctatataatcaatcaagaaagctccttacagttttttaaaaacgaagagtattactcctcccgtctctccctctccccgcgttcctattattctacattcattcctagttactgtcgaccctgcgtctgacaacgaaggcaatttctccgaaaacggcggtatacaccacactccgctagatacaatagtacccggcggaacaagagtagttttaatgggaaacgaaagacgtttctctatcgcggcgtaactctgtaacgagtctgataaaagggaccggaataactactctgcttttacactgaacttgccccactgttgaaagttacttcctgagttccaaacctgacctactcgtagccacaacgtcgcgcgccggaaccttca

SEQ ID NO: 15544 - DNA, 463 bp, Glycine max
aacctttgggctgatttatgtgcttgtttatgtgcttgcggtcgtgagaagatgatagcaggggacctatataatcaatcaagaaagcgccttacagttttttaaaaacgaagagtattactcctcccgtctctccctctccccgcgttcctattattctacattcattcctagttactgtcgaccctgcgtctgacaacgaaggcaatttctccgaaaacggcggtatacaccacactccgctagatacaatagtacccggcggaacaagagtagttttaatgggaaacgaaagacgtttctctatcgcggcgtaactctgtaacgagtctgataaagggaccggaataactactctgcctttacactgaacttgcgccactggttaaagttacctcccgagttcccaagctgacctacccgtagccacaacgtcgcgcgccggaaccttcattgaacggct

SEQ ID NO: 15545 - DNA, 531 bp, Glycine max
tggcttcggaacctttgggctgatttatgtgcttgcatggtcgtgagaagatgatagaagggcatcgtcgtgagaagatgatagaagggcgtgcgtcgtgagaagatgatagaagggcatggtcgtgagaagatgatagaaggggacctatataatcaatcaagaaagctccttacagttttttaaaaacgaagagtattactcctcccgtctctccctctccccgcgttcctattattctacattcattcctagttactgtcgaccctgcgtctgacaacgaaggcaatttctccgaaaacggcggtatacaccacactccgctagatacaatagtacccggcggaacaagagtagttttaatgggaaacgaaagacgtttctctatcgcggcgtaactctgtaacgagtctgataaagggaccggaataactactctgcttttacactgaacttgccccactgttgaaggttacttcccgagttccaagcctgacctacccgtagccacaacgtcgcgcgccggaacct

SEQ ID NO: 15546 - DNA, 435 bp, Glycine max
  unsure (1)..(435): unsure at all n locations
aacctcttgggctgatttatgtgcttgcatggtcgtgagaagatgatagaaggggattgcgtgtcagcctcgagcacctcgactgtctttcgagagagtctgctgtggtggccgtagaagaagaccgtaagacgaagcctaatactgtgaactttattatcggacgttacaagaagtctgagactcatgatgactcgaaatcgtgagtaccccgggataagaggactctataggaggctactggagacgtatctggcgaggaacccaagggtcacgctcctaaaaccattggaggccgcgataaataaggacccttaacgaagtagggagcgtcgatcttcggctgcgccagatccccgtcctataggggaatcttccgtccttgcggacacggaaggtgcaacggagagtgcangagaaagctcgcctgcgggc

SEQ ID NO: 15547 - DNA, 616 bp, Glycine max
ggtgggaaggatgtaatgtaacagcacgtttgctcaaaggagagagcaaattagcattaaaaagaaaaaattaggatgcccccagatgtgcttcattttcgtcctctcctatcacctcttgttcaattttctccttcactcgcatctcgggcgctagaaaatcaaccttgtgctaaaaaatattggcaaggaatgaaagggatgaatctcaccaaaaagaaactcatccctatccttgttttgatcctttcagtcatatcaatcctcagacttctgagcctcaatgccaagacttcgcctttttccgctgggatatctgttttgtcctcagctcctcaacaaaattgttctcaacctttgtccacctgcaacaaaactgcatcacatacacctgaatcctcagataagcctatgaaacctcacaacatcaccaccaccctgactgagaaagaattctgagttctttctgatctcattgctcttaaatccccatgcaatcttctcatatttggctttcaacctcagtaccttatcctctcttccatgaatgcagctggtagcaccatctttctcgatgacgactcccatatgataagcaaggtaagaacaatctcca

SEQ ID NO: 15548 - DNA, 549 bp, Glycine max
tggctcggaacctttgggctgatttatgtgcttgtttatgtgcttgcatggtcgtgagaagatgatagaagggacatgctagacaagatgatgtaaggaaaacaaagaaacgaaaaaaaaaaaaaaaaaaaaaaaaaaaaaaagtggttgtctcagaggacttaagtccatgcatgtgcgtacgtgatgctacagtctcctcacagcgctattcaaacctaacctatcggttgctgccccataatgctgcgatcgggaaaatttcggtgccatttaatccaactgttccgtagtatactttttccctgttagtcggtgcaacagtgaagaggtttgtattgactgtttcctttaatagccgtgtagttcgaacggtgaacgggatgtgtttcgcagtggtgtaccaagtgtggtgggcgcggcggccatgtgtagtgcgattgtcatatccgttagtgtttcagtgtttgtcttccctgtccctcctttccttccctctgttatgcctgttggtcccttttgctaagtctcaaactgggggtctttccc

SEQ ID NO: 15549 - DNA, 659 bp, Glycine max
gcttggaacctttgggctgatttatgtggatttatgggcttgtttatgtgcttgcatggtcgtgagaagatgatagaagggcatggtcgtgagaagatgatagaagggcatggtcgtgagaagatgatagaagggcatggtcgtgagaagatgatagaagggcatggtcgtgagaagatgatagaagggcatggtcgtgagaagatgatagaagggcatggtcgtgagaagatgatagaaggggatagtcgtgagaacaagtataaaaaaaaaaaaaaaaaaaaaaaaaaaaaagtggttgtctcagaggacttaagtccatgcatgtgcgtacgtgatgctacagtctcctcacagcgctattcaaacctaacctatcggttgctgccccataatgctgcgatcgggaaaatttcggtgccatttaatccaactgttccgtagtatactttttccctgttagtcggtgcaacagtgaagaggtttgtattgactgtttcctttaatagccgtgtagttcgaacggtgaacgggatgtgtttcgcagtggtgtaccaagtgtggtgggcgcggcggccatgtgtagtgcgattgtcatatccgttagtgtttcaatgtttgtcttccctgtccctcctttccgtccctctgttatgcct

SEQ ID NO: 15550 - DNA, 716 bp, Glycine max
gaacctttgggctgatttatgtgcttgcatggtcgtgagaagatgatagaaggggatttcatcatacaaaccggactgatggcacggagaaaactgcaacccgcgacggcccaaaattactatcaaacgaccccaaattaccataaaacgtacaccctacgacgcagccagcccaaccgaaacgaaacgactaaactgacaaaaaaaccagacgattaaactaaattcaaacaacaagtcagaggaaaaaaaacaacccaataaaaggtcgtgagccgctcatacgaaggggcacggaatacccccagcacaaggctacgcccgcggacggccaccaacaaacgggaaaaaaaaagaaaaaaaaaaaaaaaaaaaagtggttgtctcagaggacttaagtccatgcatgtgcgtacgtgatgctacagtctcctcacagcgctattcaaacctaacctatcggttgctgccccataatgctgcgatcgggaaaatttcggtagccaatttaatccaactgttccgtagtatactttttccctgttagtcgcatgcaacagtcaagaggtttgtattcactgcttcctttaatagccgtgtagttcgaaccgtgaacgcgatctgtttcgcagtcatttaccaagtctggattgcccggcgcccatatttaccgcgattgtcatatccgttaaggtatcaatttttgacttccctac

SEQ ID NO: 15551 - DNA, 704 bp, Glycine max
ggcctggaacctttgggctgatttatgtgcttgctgggccgggggagatgatagacgggcatggtcgtgagaagatgatagaagggcatggtcgtgagaagatgatagaagggcatggtcgtgagaagatgatagaagggcatggtcgtgagaagatgatagaagggcatggtcgtgagaagatgatagaagggcatggtcgtgagaagatgatagaagggcatggtcgtgagaagatgatagaagggcatggtcgtgagaagatgatagaagggcatggtcgtgagaagatgatagaagggcatactctgagaacaagaagaaagaaaaaaaaaaaaaaaaaaaaaaaaaagtggttgtctcagaggacttaagtccatgcatgtgcgtacgtgatgctacagtctcctcacagcgctattcaaacctaacctatcggttgctgccccataatgctgcgatcgggaaaatttcggtgccatttaatccaactgttccgtagtatactttttccctgttagtcggtgcaacactgaacaggtttctattgactgtttcctttaatagccgtgtaattcgaacggtgaacgggatgtctttcgcagtcgatgtaccaagtgtcccatggctgcggcggccatgtgtaattccgattgtcattatccgctagtgtttcagtgtttaccttccctgtctcacccttc

SEQ ID NO: 15552 - DNA, 540 bp, Glycine max
aacctttggtctgatttatgtgcttgcatggtcgtgagaagatgatagaagggcatcgtcgtgagaagatgatagaagggcatgggcgtgagaagatgatagaagggcgtggtcgtgagaagatgatagaagggcatggtcgtgagaagatgatagaaggggaaaatatgttggcgcaccgcacggatcagaggctcctcgctaaccttgcatggtccgccaagatgatagtacaggagcatactatatgcaatcctaactcgggccaccgtgaccgcgaaaaaaaaaaaaaaaaaaaaaaaaaaaaaaagtggttgcctcagaggacttaagtccatgcatgtgcgtacgtgatgctacagtctcctcacagcgctattcaaacctaacctatcggttgctgccccataatgctgcgatcgggaaaatttcggtgccatttaatccaactgttccgtagtatactttttccctgttagtcggtgcaacagtgaaaaggtttgaattgactgtttccttaaatagccgtgtaattcgaac

SEQ ID NO: 15553 - DNA, 577 bp, Glycine max
tggcttggaacctttgggctgatttatgtgcttgatggtcgtgagaagatgatagaagggacaatttagcgagctcatttccactctcgattacgggccctctcgaagttaatcttaaaatcaatagatagaaagaaagagaaaaagaaatttaaccttcgccctaatcgaaatatagtatatataataactactaaccctctgcatggtcgcgagaggatgatagaaggggcatgccgaccacctcccctaacgatcgccaataaatgtaaaaaaaaaaaaaaaaaaaaaaaaaaaaaagtggttgtctcagaggacttaagtccatgcatgtgcgtacgtgatgctacagtctcctcacagcgctattcaaacctaacctatcggttgctgccccataatgctgcgatcgggaaaatttcggtgccatttaatccaactgttccgtagtatactttttccctgttagtcggtccaacagtcaataggtttgtattgactgattcacttaataaccgtgtagttcgaacggtcaacgggatgtgtctcgcactggtgtaccaactgtgtttggcgc

SEQ ID NO: 15554 - DNA, 498 bp, Glycine max
tggcttggaacctttgggctgatttatgtgcttgcatggtcgtgagaagataatagaaggggagactaaaaaaaattaatcccgtggtcgtctcgtcgtaaacagtgtgccgtactcgtctttaactacctacacccctgttaaatagttgaccttgccaagcgccctcattgtgcctgcatggccgtggaaggtggtagaccgggtcgggcggccccgcccaggaaccgtctccagtccggacgcggccccagttagtcctagccgcggcagacggtagcagaaaaaaaaaaaaaataagaaaaaaaaaaaaagtggttgtctcagaggacttaagtccatgcatgtgcgtacgtgatgctacagtctcctcacagcgctattcaaacctaacctatcggttgctgccccataatgctgcgatcgggaaaatttcggtgccatttaatccaactgttccgtagtatacttgttccctgttagtcggtgcaacagtga

SEQ ID NO: 15555 - DNA, 467 bp, Glycine max
gaacctttgggctgatttttgggctgatttatgtgcttgcatggtcgtgagaagatgatagaagggcatggtcgtgagaagatgatagaagggcatggtcgtgagaagatgatagaaggggcatgctgcacccctccgttggatgatcatgcacgggaaaaaaaaaaaaaaaaaaaaaaaaaaaaaagtggttgtctcagaggacttaagtccatgcatgtgcgtacgtgatgctacagtctcctcacagcgctattcaaacctaacctatcggttgctgccccataatgctgcgatcgggaaaatttcggtgccatttaatccaactgttccgtagtatactttttccctgttagtcggtgcaacagtgaagaggtttgtattgactgtttcctttaatagccgtgtagttcgaacggtgaacgggatgtgtttcgcagtggtgtaccaagtgtggtgggcgcggc

SEQ ID NO: 15556 - DNA, 590 bp, Glycine max
gttgttagcgcgtcggaacctgtttccctgagtggttgtttgggtaggcatactgcttaaacccgcaaccacacccaccgtagcactcaatgtaattaaagagaacgctacttccatatggttaaaacttcttaaagtatatactcctcaccttaaacttcggagaacccaaagcagccgaaagagccctagtggccaacgcattctggttgtgattatgtcaagggtgaacctcgtagacacttactatatcggtggttgtctcggtacgtactcagagggtttaacctgtttcacagcgagcggcaccataacctatcggttgctgccccataatgctgcgatcgggaaaatttcggtgccatttaatccaactgttccgtagtatactttttccctgttagtcggtgcaacagtgaagaggtttgtattgactgtttcctttaatagccgtgtagttcgaacggtgaacggatgtgtttcgcagtggtgtaccaagtgtggtgggcgcggcggccatgtgtagtgcgattgtcatatccgttagtgtttcagtgtttgtcttccctgtccctcctttccttccctct

SEQ ID NO: 15557 - DNA, 472 bp, Glycine max
ggctcggaacctttgggctgatttatgtgcttgtttatgtgcttgattatgtgcttgtttatctgtgtgtgtttttgtgtgtgtgcatgtgcgtgtgtatgtccttgcacggccatggtaatatgatagtaggcgaaggaaaggataacaagaaagggaaaaaaaaaaaaaaaaaaaaaaaaaaaaagtggttgtctcagaggacttaagtccatgcatgtgcgtacgtgatgctacagtctcctcacagcgctattcaaacctaacctatcggttgctgccccataatgctgcgatcgggaaaatttcggtgccatttaatccaactgttccgtagtatactttttccctgttagtcggtgcaacagtgaagaggtttgtattgactgtttcctttaatagccgtgtagttcgaacggtgaacgggatgtgtttcgcagtggtgtaccaaatgtggtggccgcggcggcca

SEQ ID NO: 15558 - DNA, 522 bp, Glycine max
tggcttggaacctttgggctgatttatgtgcttgtttatgtgcttgcatggtcggtgagagatcataagaagggcatgggtcggtgagaagatgatggaagggcatggtcgtgagaagatgatagaagggcatggtcgccagaagatgatagaagggcatcgtcgtcagaagatgatagaagggcatcgtcgtcagaagaatgatagaaggggatataaaatcgcagcccaaaccagccagcggcacaccggaaacgtaagtggttgtctcagaggacttaagtccatgcatgtccgtacgtgatgctacagtctcctcacagcgctaattcaaacctaacctatcggttgctgccccataatgctccgatcgggaaaatttcgctgccatttaatccaactgatccgtagtatacattttccctgttagtcggtgcaacagtgaagaggtttgaattgactgtttcccttaatagccgtgtagttcgaacggtgaacgggatgtgtttcgcagtggtgtac

SEQ ID NO: 15559 - DNA, 484 bp, Glycine max
tggaacctttgggctgatgtatgtgcttgtttatgtgcttgtttatgtgcttgcatggtcgtgagaagatgatagaaggggacagaagaagtataaagagaagtaccagtatcagcagtactaataatcagctctagtcgaaacggttctcctagcgacggtactcgcggtttctaaattcgttttccctatcgccgagaagcttctagcgagaggttcctttctctctctaaggaatctcctcctacctagagccgcggttagcggtaagaagactaagatcgataaattccacggaaccaacggcggtacggtcccgagggacggaatcgacgtactcggtaggaaaggaaagggaaagggcgcccattagcccgcagataaacatggcgtcaacgctgacggccatagcttcactcatgatattaaagatcggctcttaatttgcgacgctcatgtcggtggcatgatcggtccggtcact

SEQ ID NO: 15560 - DNA, 494 bp, Glycine max
tggcttggaacctttgggctgatttatgtgcttgtttatgtgcttgtttatgtgcttgcatggtcgtgagaagatgatagaagggggttgaaaagcagcattaagacggtcctagccgcgcactcttctcccggtccttactctaccgccactacgctaagccttccatttgtaatcagcgaagcgcccgtaaaatagcacttacttatagaatttgcggaagaaaaatctatttaatcttatcctcacccttacaataatacaatgggggaatatttaatcgtcacgaaaatcgccccgttcttcaaggggcttacctacggccccggggtcatccatacgacggacgatttctcaatcgaaggattaagcttaatcctaaagtccgcgggaagactctagggaacacatgtcccggtcctataatacgagttcgggccgtctacggcgataaacccctctcctatcccgggtacccataacggtaagtattt

SEQ ID NO: 15561 - DNA, 534 bp, Glycine max
tttgggctgattgatgtgcttgtttatgtgcttgtttatgtgcttgtttatgtgcttgtttatgtgcttgtttatgtgcttgtggatgtgctggtttatgtgcgtgtttatgtgcttgcatggtcgtgagatgatcatagaaggggatatcgaccgagagaaaaacaacggaggtccatatcaaggccgcccgtacctccggatccccaacccccgcaagtaccctagacacctacagagcggagggcgtaggggaacgcgggaggctcatcatcttagacaacgaagtaacaaagtccaccttccgcgctctcgttgtaaaagacgaaaacgccaaagccatcaagaaccgtcgcgtctagactgagaaatccggtaagaatttcagccgctcgcgcgtcgccacgtctcctaatatagtaaaaacgctcggagttgacttcaaggccgttacaattactctaaaatgtcgtaattccgtcaactgtttcgccggcataagcgcggattccatatctccttccaagacagcat

SEQ ID NO: 15562 - DNA, 453 bp, Glycine max
tggttggactttggctgatttatgtgcttgcatggtcgtgagaagatgataggagggggagcgcgagagaaattagcgatcgatcccctgagagagaaaaataataacgggcccttgctaccttactacgaatgtctcctttacctcttctcctccttctcctgccctcgtaccagccctcgtgaagaaaatcggcgacgcgatggagtcgtaaaccggtgcgaagtacaaattagcactacgcgaagcctaggtatataaaggcgatagagctaaagcatatcacaggggaaaatctatcgacggaatcgcccctgacctcagtcccgaatgaaacaacttaaccgaacccgagtccggcatcggctaagcgactaaaggccgggattagcgaccaccgggaacgcgctccggcgagaagtgcaagtcgaaaacattactaaaatccggtca

SEQ ID NO: 15563 - DNA, 516 bp, Glycine max
tggcttggaacctttgggctgatttatgtgcttgcatggtcgtgagaagatatatagtaggtggccgccccgatgaacaaaaggaaagacagcgaagggcccgggaagagagagcaacgccaggaaagggaaaaagaagacgagagaaagatcatacggtcgtctacggcgagtcatatcggttctgtcgtcgtattcgacgtccgcaaatacgatgtcccgtttcgtaaatcctgctaaactactcgccctatataaaatttattcggggtgaccgggcccctaaacgataagaaaaatgccggcgggtacgtttaaaacaagatcgttccaaaggatatacgcgacgccgagatcgcagacgctaaataggcgactcgcaacggataaccgaaggtattctaatcctcggacaggagcgaagaaaagtgcaccgaaagcggcggcgccgataagaaaaagaaaaaaagaaagaagaaggaggccaaagaatctacgcccgaaacggaaacggac

SEQ ID NO: 15564 - DNA, 523 bp, Glycine max
tggcttggaacctttgggctgacttttgtgctgatttatgtgcttgcatggtcgtgagaagatgatagaaggggatcccgagcctgaatcaaataacctaacctaactcgttctgactacggagaggaaaatacccgggcccccgcctccgtcttcttccgctccagtcctcgacgcgatggcgaagagagtagaggtgaaagaccgtccgataaggaggtatgggccttagggcagacgtccacctgataggtaacgcgtatacgcgcgtaggagtgacggccctactggcggctagcgttgaggtttctcctgtaaacgtccccgtagtaggttacgccgactgaaaccatcatcgttaaagaggttacgaaacaaataaataaataaacaaacaaacagtctcaattgatatacacgcatgcagcgctggggcctcagtcagtcaggcaggcatgcgcgctccccggcactgacttcagcccggcggaattagcgcggtactacgactcagccacacaca

SEQ ID NO: 15565 - DNA, 399 bp, Glycine max
gcttcgaacctttgggctgatttatgtgcttgcatggtcgtgagaagatgatagcagggcatggtcgtgagaagatgatagaagggcgtgggcgggagaagatgatagagggggttatcccgagcctgaatcaaataacctaacctaactcgttctgactacggagaggaaaatacccgggcccccgcctccgtcttcttccgctccagtcctcgacgcgatggcgaagagagtagaggtgaaagaccgtccgataaggaggtatgggccttagggcagacgtccacctgataggtaacgcgtatacgcgcgtacgagtgacggccctcctggcggctagcgttgaggtttctccggtaaacgtccccgtagcaagttacgccgactgaaaccatcatc

SEQ ID NO: 15566 - DNA, 629 bp, Glycine max
ggcttggaacctttgggctgattgatgtgcttgcgtgagaagatgatagaagggcatggtcgtgagaagatgatagaagggcatggtcgtgagaaggtggtagaagggcatggtcgtgagaagatgatagaagggcatggtcgtgagaagatgatagaagggcatggtctgggctggtttatgtgcttgcatggtcgtgagaagatgatagaaggggaactctcctatagaagaaaaaagagaagaagacgggcccgaagaataatacggcggcgtcaaaggcgcgcccggcgtcatccccttccgcggggggcatcatcagcgttaatccgaggtcgagcaagtccggttcgtctacgaaaagcgactactactaatatctaaacgacgacgagctcctaaaattacgtcgcgactaacgtgtacgtataaagctaaatttcctctaacgttgtcgcctagacacgaggtcgaacctgcgttacctagtccgtaaactccgcacccgtgtaccactgcacttcgtatagcgcccccgcgccgatacaattgaccctcgtcacgaattccgtaaatttaacgaggacgataaggaaaatcatcaacgaataaagcgcacgtacgcaagt

SEQ ID NO: 15567 - DNA, 476 bp, Glycine max
ggaacctttgggctgatttatgtgcttgcatggtcgtcagaagatcatagcaaggggacctatgtaatcaaacaagaaacgaagagcatcactcctcccgtctctccctcagcccgcgttcctattactctacattcgttcctagttattgtctagcctgcgtctgatatcgacgacgacttctcctaaaatggcggtatacatcacacgccgttagccacgagaggaaagggtggcggaacagaagcagacctaatcggaaaagaaacacgtttctctatcgccgcgtaactatttaacgagtctgacaaggggaccggatcagctcccatactcttaccatacgtttcccccactgttgaaggtcacttcccgagtaccaagcccggcctacccgtagccacaatgtcgcgcgttgctacgttcatcgagcgggtcaccgcggagagagagggctcataagtcgccaaatccgt

SEQ ID NO: 15568 - DNA, 501 bp, Glycine max
ggctctggacctttgggctgatttatgtgcttgtttatgtgcttgcatggtcgtgagaagatgctagaagggcatggtcgtgagaagatgatgggcttgcatggtcgtgagaagatgatagaaggggacctacacttacggtgctcaatctcgtccttgtctcccatccttccccacgttcactgtttactatcccgtcttccctcgtgtcctgcgcctaagtctaactctacgtcttagtctttatccctaagcatcgcgaaaagaacgtagatcacgtcgcgaaggcgagcggagcggaaacaccgttcgattttgcggagagaggagcgttacctattcccaagactttagtccacatcttcgaattaacctaaagtggcgatccgccacacgaaaccctccacgtcggaacagaagtataattcgtcataccctcttacgactctcgcgaggaagtattacgtttagcattcgtaggtaatcccgcgtctgcctata

SEQ ID NO: 15569 - DNA, 432 bp, Glycine max
tggaacctttgggctgatttatgtgcttgcatggtcgtcagaagatgatagcacggggacgaagaagggaagacgaatccgagacggacggaagtggcgtcgttgtcggggactacagtgggaacgtctcgtgctacgggaaatgtctagcaccatacctataaacttgtgtacggtagattcaagtatactgggaatgacacgcgggatgcggttacggaatgaagggataagaagtccgctgagtaagttctctttcttaaccaatactgccgccccgttaacgataccgcgaagaaaacaaatcgtctattcggacccatgatcgcgcctcagggaagtagggccaactataagaactaaaccttgctcgcccctccgcacgtaacctaatacaagacccacaaacacactcacgccttaactgtaaaa

SEQ ID NO: 15570 - DNA, 313 bp, Glycine max
  unsure (1)..(313): unsure at all n locations
tggaacctttgggctgttgtgagtgcttgnatggtcgtgagaagatgatagaagggcccctaccgaatgaacaccagggcccggagccgagtgggcccgaagtaggaccggtggttgaacacaatatgcaaggccagtagaaatttcgaaccgacaaggggaactggaaagcatctgaggctgtacacgcattataagaggggtacccgggtcactaaggctaaaaatggccgtgccccattctgctacgatttcaaatttaagttcgaactcgtcgtcgaaaaattatttcaaccccatttcgtccacgaca

SEQ ID NO: 15571 - DNA, 460 bp, Glycine max
gcttggaacctttgggctgatttatgtgcttgtttatgtgctggtttatgtgcttgcatggtcgtgagaagatgatagaaggggactaagaatgagcctaacacttcagcatattgcaccaaagaacccaagacacatcacgacgagagtgtggcctttaccatcgccgtcgggagccgccccttcggtactagccctcgctctacccggtaccgtgcaccgggaaaagtagaattttagctataataagcgttcttggagccgtaacagtgagagagatctgcataggaattaagtacgttatgtctgccgtaattcttccaaggcggaggaagaagaagaacgtgaagaaggctaaaccctatgattatgattataatatttggagagcgaatgctaggtatatggcgagaaaggagaagataaaggcgagtagttatgcttacctttaccttaatgt

SEQ ID NO: 15572 - DNA, 466 bp, Glycine max
ggcttggaacctttgggctgatttatgtgcttgcatggtcgtgagaagatgatagaagggggcctcagcgcgcgaccgcccgccgccgcaatctgcgtcctcctccccgccgcctcgcgcccgcgcccgcccccctctctattcgaaaacgctccgtcgtggcggcaatcgcggccgtggaagtcttcgtaagcgtggtaatggtcgtggaggtcgtaagacgcatttagatccgagtcatatcgagctaattattattgagattccggctacgggagcggtattcgccaaggtctaacccgagggcgtcgaaacgggcgcgtttgtcgagaatgacggtcgtaaacgcggattaaatcgtcttcgtaattttcgtatccgtaagcgaggcgccgggagagtaagtcctaagtagagacagtttccaaccaggaacaacgacaaatcaccaacgcacagtccaaaa

SEQ ID NO: 15573 - DNA, 565 bp, Glycine max
ggcttggaacctttgggctgatttatgtgcttgcatggtcgtgagaagatgatagcagggcatggtcgtggaagatgatagaagggcatggtcgtgagaggttgatgggcgggcatggtcgtgagaagatgatagaaggggacattaaaaataaaatataagttaagcgaaagcgggaaaaaacaaaaactaaagagtacaacgctagggactacctataggaccggggagatttcctacgcgggagggtataagaaggaggaggagtacaggggcgagtattacggcggaagaacgtaaaggggagtattacggcgaatatagcagcgagcataaaggagagtactacggcgaatataaagtcggagagcattacggcgagtataagttagagtataaagaggggccttcagataaagctaaggataagacttacggcgagggtggtgttgctgaaggtgagaagaagaagaaggagaagaagaagaaggagtacggttacgagtacggttacgatagtagtagtagtagcgatagcgaccaaatcgtcgtaccaatcacacac

SEQ ID NO: 15574 - DNA, 445 bp, Glycine max
ggcttcgaacctttgggctgatttatgtgcttgtttatgtgcttgtttatgtgcttgtttatgtgcctgtttatgtgcttgtttatgtgcttgcttggtcgtgagaagatgatagaaggggataggcgcccgtaacatcagtgacagtcgacaagagagacattaataagaaaagaaaaaaagaagagccgagacctttcccgaagaaaagacggtactttacaggtaaagtcacgaagtcggctaaatcaagggttgaatcgaggaaaagatgaattagatgacgggtaacaccggagagaaggtctaagtcgtaaaggagaagatttaggaaacggtttaagtcgtaaaggagaagatttaataaatagtttaagtcgttaaggataagatccgtgatatcctttaagtggtaagggagaagatttaatagaacataggagtc

SEQ ID NO: 15575 - DNA, 503 bp, Glycine max
aacctttgggctgatttatgtgcttgctgatttatgtgcttgcatggtcgtgagaagatgatagaaggggatctatctacataacagagattagtccccgtcctgccgcgaatacggagacgaggaaactacgcggtcctcctcctccgtcttcttcttccgctcccgtcctttaggcggcggcgtagatggagggaagagcgcgcgagctataaagttatgggccttacggcccgcgcaacagagattataatcgcgtcccggctcgtaggaatgaaggccctcttggcggtaggcgtaaaggtccttgttgttgtcgtccccgtattaggacccgccgagactctactaaatatcatctccgttacgtaaaccaacaaactacagtcaggttaaacaaaccgtactcatctcccacttacccgggagtcagtcattataattaatctacatccggctaccggaccgtcctttcccggtcctcgttcccgtccactctctca

SEQ ID NO: 15576 - DNA, 406 bp, Glycine max
gcttcgaacctttgggctgatttatgtgcgcgcctggtcgtgagaagatgatagaaggggataatgtacttcaaacaagtactccaaacctacagcgctgcctggcttccttccttcctcctcgtctaacaagcgcgcgttatctcggccaaccactacatttttcctcaggtacagcctcctctttctcgcctctcacctctcatatcgcgaaactaagacgaaggcagtacccgcagtcgcctcatccacccgttccgcttctagtcttcttccgcctgaggcgctaacggtcggcctcgtccctcgccttcttacgcgtctgcagaggcgcctcagggtcgggacgaaggataggcgtacgaagcctcgtgggacccgtcgtaataagcgttaattgcgcgtt

SEQ ID NO: 15577 - DNA, 462 bp, Glycine max
tggcttggaacctttggtgtgacctttgggctgatttatgtgcttgcatggtcgtgagaagatgatagaaggggatgacgagctgacccgacaatcaagacaccgccacctgcgacaccgacttaacccgacactactgaaacttaacccacattaccgccgaaccaaccactgacgaaagacccactactctcacgggaccaaactttgaaccccccaccggaaacccaagagaaacaaaatacaacaaagaccacggaagcaaacacctccgtacccaccgtcatcgtatcgcccacctcagccttcatcgtccccccatccacaacccatgcaaaaatggcaagctaaagcgatcaaccctatcgaaactcgatcctcctacccccactaacgcaactaacgaccaaaaaaaacgaaaaaggcccctaacccccggctccagcttgaaaaacaaccccc

SEQ ID NO: 15578 - DNA, 503 bp, Glycine max
tggcttggaacctttgggctgattgatgtgcttgcatggtcgtgagaagatgatagaagggggtacatacgagacaagttaaccgcgacaagttacctatctaggcgaaaagaaaaaaaaaatacacagcaataaaattacggcgacctatagatctgaaccgcgtacaaatacggcctaatctgttacagagcctgctgcgagtgctgtggaaatagcggctacagcctagtagagaattgcggagttctctggaacgccgaactgtgtaagcatattctccttccctcacggtcattcttgccgaacgccgaagagtactgtccgaccaaccatccctcagtccctcccctcctcacgaaaccttgtaacccccacagatttcgcgcccctcccttccccgggcgtactaagtgtcgaccgacgtaaatttatatgagccgtccccgcaaggaaaaccgacgtttccggcccccccctcgggccccggtcggatccctccg

SEQ ID NO: 15579 - DNA, 494 bp, Glycine max
tggcttggaacctttgggctgatttatgtgcttgcatggtcgtgagaagatgatagaaggggacagtagtactacataaagtaccgaacctaaagatccaagcctaccttccgcgccccgtccctccttctaaaattaaatacgctgaatatacgtggtaatcgtgatcgtgtcgataagatcagtcgtattaagggaaatagtcacggcgccaccgcagagatcgagaagagccatactgagatcgccgctacggacgccttagtagtcgagtacgacgggaagcgtaagcgcggtatcaatcgtatccgtatggatcgtattcgcggttaccaaggaacacgcacgaaaacgcaaccgttacgcgcccggtaacataaacacttaaacaacgcaactcctgcacgaacaaacgcgcgcgtcggcacttcatcctaggctcgcgcagctacgtagctcgaactaccctaagccttcgctcccagcaacacaat

SEQ ID NO: 15580 - DNA, 451 bp, Glycine max
gtttccgaggcgttggccccacagtggtatattccttcatgcaggttgctggtataaccattgaccatcttatcagttgcttcagattcgaggagtgtatagccgcagcagaagggaaggaagagaatggcatcatggacaatcatgctgatcagaaagagagtgaaaacatcatggaatcagatctgtctattgccatggaggacttgagcttcgcctctgaatgatgtcttagatttagtaatgacggacgagaatctgtataaatatcatccagtccctaaacatgatgaattcttagattgtagtttgctaaaagcacatgtatattaaatcaatatcgtaccctttctgctgtaccaggcttctgccttagaaattggtgtacaattttttgtacagtttaaaggatcagtaattagaattttctttgaagccagtggcagcaggc

SEQ ID NO: 15581 - DNA, 490 bp, Glycine max
tgggctgatttttgggctgatttatgtgcttgcatggtcgtgagaagatcatagaaggggatagtacccccgaagcagcccgcgcagatccaaagaagagccaagggaaaaaaacaagacgaatatcaccggagccacgaccacgactacgctcacgccagggcctgtataagtcaacaaccataacttcttacccgcgtaagccgagctaactagcgagatcaacagatccatccgcttataagtacgtagagcataacgcgtagtcccagtattagccgaattacggcacgataaacgcgccaaagaacgtatcgtaaaccgcaagtacgacgcgcttgccgtcaacgaccgtcccatcagccgcgttccaactaagcttaccaatactaataacgacgcctgcgactccctgattaacaccgcgacgaaccctcgtcccgtagaacgctaaaaatagaaacaagccgccataagaactcctaagaaa

SEQ ID NO: 15582 - DNA, 134 bp, Glycine max
gggatacgtcgcagcatgcacagactgactataggttttagagcgcaagaactcttctatatgtactcacgatacttcgtactatgctctgatgctagctaacgatagtcgattagcactattgctgctacctg

SEQ ID NO: 15583 - DNA, 501 bp, Glycine max
tggcttggaacctttgggctgatttatgtgcttgtggatgtgcgggcatggtcgtccagaagatgatagcagggggcatgtagtcctgctaatttcaatgtgcgtacagcagagctagagatagagatgtagttacggggtggagattcgtgaggcgccacaggtaaaccaagaataagttacattttaagctatgcccccgttgcggcgccttcgactttaagactaggacccacgacgccggcacgaagaagaagggcgccgacgagcccttccctcgcgcttactcggccagccgggagaaggaaaacgccctcagcgaggtttcggaagtcgtctgcaccgtccgtaataagcatacggttaaacccgtcggaaaggacgtcccttatccgagagctagggcgtatttaccttacgcctccaggactaataagacgtccctgcgcgtcggagtcgacaggtcttaaatcggaacgagaggcgtccccggaaagttat

SEQ ID NO: 15584 - DNA, 513 bp, Glycine max
tggctttggaacctttgggctgatttatgtgcttgtttatgtgcttgcatggtcgtgagaagatcatagaaggggatctctactataccacctcacactaaccccggccaagagctccgaaaaagtaagagaaaaaaaaacattaattacggtaattaccctcgactaattcagagggcttcatcttcacggaattctacacggagtatttcacggaattatgcacgagattaatattagtaccaataatttattcctatgttaaatagcgaagcctacaatcgtcgttatcaccggtactatatctccgtcttcgctcgggccgatttctataggtatcgctacaggcccgactaccgtaattttctcctccgccactcctagttttacttccgctttcgtcgtgcccgcgtcgccttcagccgtcctcggtcccccggcctctcgggggtcgcggcgcggtcgttaccggcgtcccgctccggacccataatcacgcgctcgggaattagt

SEQ ID NO: 15585 - DNA, 467 bp, Glycine max
tggcttggaacctttgggctgatttatgtgcttgtttatgtgcttgcatggtcgtgagaagatcatagaaggggaatatccggcccagtaagagaaaaaacattaattacggtaattaccctcatcgactaattaagaggacttcatctttacggaattcttcacggagtatttcacggaattattcacgagattaatagtagtaccaataatttcttcctatgttaaattgcgaagcctacaatcgtcgtaatcaccggtactatatctccatcttcgctcgggccgatttctataggtatcgctacaggcccgactaccgtaattttctcctccgccactcctagttttacttccgctttcgtcgtgcccgcgtcgccttcggccgtcctcggtcccccgcctctcgggggtcgcggcgcggtcgttaccgtcgtcccactcgggacccataatcatgccctcgg

SEQ ID NO: 15586 - DNA, 508 bp, Glycine max
aacctttgggctgatttatgtgcttgcatggtcgtgagaagatgatagaagggggtataagcgtgccccccgactgagacaatcaggaatagcgcgacgccacacgaaggcttccgcccctcctgccgtcataaccccggcagtacggtaacgttacgtgcatgacacgcctttctcttgaacgaatatcggtcacggcgtttgcatcttggaggcgaaacgtgtaagccggaggtccgtcgcggaagtatataatactcccggtcccgagattaccttcgaagagcgtgccgaagtaataaaggaacatacttacggtgaataacacatactagatcttaaaatagccaattaataagtccatccccacgttagagattctgaagcttactttaaggatatacccgcgcctagcacagacggtattgcatctctcaacaccttacatcataaaaaatacggacacggggcggagaaacccaatctgattccgcacgacgaacgggcc

SEQ ID NO: 15587 - DNA, 467 bp, Glycine max
tggcttggaacctttgggctgatttatgtgcttgcatggtcgtgagaagatcatagaaggggacttaacttaaccgaacctcttagagagaaggggaaatccaactgactactatcctatcctatcaacatactacggtagatgagatttagaataagcacgagagtctcgaggccgaggcttaggactgcggcgcccccgatccctctggcaagaaaaaggacgaagaagataagttctacttctaggaggaggctactgttattgagccctaaaaagctatcgctctagattaaggagagaataagtatagttctccagaaaagtcctattgactcgatagtagtctcagtctcctaagcgaggaggaaggagaagacggagagaaaaggaagaagaagaagacggaaaagaaagggtcgaaagagaagactgaggagaaaacagaaggcgactactactactat

SEQ ID NO: 15588 - DNA, 427 bp, Glycine max
gttggaacctttgggctgatttatgtgcttgcatggtcgtgaaagatgatagaaggcccactcactataactgaaagtaaagtcacacgggaccaccctttacactaagagaacgaaagctttcccccacccctttacttctgcgtccgccgctcctaccgtcctcggaaaataagcgtaaacgatagcggcattaaaccgcgcggcagaaagtccgctagcctaccgcgaaacacctaagaacttccgtcaatcctcccgttaataataccccggactatttgtagtatacggagtccgcggtaccaagccttacgcacgcgcccgccacccacgccaaacacaaagcccaattacaataactatagtccctacattcacccaacagcacgcaagttgacgaaaaaaacaaacacacaaacaaaac

SEQ ID NO: 15589 - DNA, 491 bp, Glycine max
ggcttggaacctttgggctgatttatgtgcttgcatggtcgtgagaagatgatagcaggggataatataaatacctctcttaccgctcccgaatatctactattacggttaagtccgcctccctttcccgcccttcctcccctagcggtcgtcctgtctcgagagagtaggtatagtaaaacgagcgttagacttaaaagtcgaacgtttctaaattggacaattgcacagagctggaaggcgggcctaccgagattcggaatttcaataataagttaccttagcgcgttggcgccgtttctctctgtcgtatttccaattgtaacgtttcctgcagattccttcatattaatggcttttaggaaactcatacataataaggcaacggcacccccggtacgacacctttgggccgcttcagtatccactaagagttgtaagaactctagtaatgaggatgaagttaggggttttaagattgctattaaaag

SEQ ID NO: 15590 - DNA, 417 bp, Glycine max
tgggttgatttatgtgcttgcatggtcgtgagatgatcatagcaggggagcctaacccagtcgaagtaaagtaacggtcagcctagagccgaaaatttagagcgcggccgcactctctctttcaattcctcttccggcatcggcgtcatcgattagtaaggtaaatctagtggaaatcgccctccctagtcggagtaagcctgcgttgaactaattaaatacgacttcttaacgagatgtcaccgcgattcttctgggaaagccataatctaacaaggccgatcaaaatggtattttacaatttctgctctccggctgtgtttctcatcttatttttacttatacccgggataaagaaattggcagtgccgttagtcctgttgtccttcctaatcctattcctcacgttttcgatat

SEQ ID NO: 15591 - DNA, 400 bp, Glycine max
ggaacctttgggctgatttatgtgcttgcatggtcgtgagaagatcatagacgggcatcgtcgtcagaagatgatagaagggcatggtcgtgagaagatcatcgacgggcatgggcgtgagaagatgatgagaggggggagggaaagacgacgagactaacggatccgcctggagagacggatgagtaggcactgctgacggtaacggatgcggatgatgctgatttctctgagactcctgttgagggtgctactgttgttgataataaatctgttgatgttgaccctcctaataacccttaaagatgaccctgacgatctcgacactaatcaaaattttccctcctcctacgggcacctctggggccaaacaaccctctggccagggccctggcacccc

SEQ ID NO: 15592 - DNA, 438 bp, Glycine max
cttggaacctttgggctgatttatgtgcttgtcgtgagaagatgatagaaggggggagccgagccgagaaggaaaggtcgaagaatatacagagagagagagaagcgtagaaaagacgagatcgcctgacttacggttcgcccctcctaagagagaacggaagtggaaccggtttcctccggccggacctgttactattggaatctctactattaaatccctttccggctctctcgaggaggaagttaaaaagctgaaacctgcttaggtatataagaggcgatcccagaacggaagacccgtagcggtcccgtataccgcaccagacgcgcgaagagagtccccgcccgcaacaaacgaagagagacgccgcacatatcttacgccttcacccttaccccggccgcccatcccaacgcgaccgagaaacctacatcg

SEQ ID NO: 15593 - DNA, 489 bp, Glycine max
  unsure (1)..(489): unsure at all n locations
ggcttggaacctttgggctgatttatgggctgatttatgtgcctgcatggtcgtgagaagatgatagcaccgggactccaaccctaaactacaaaacctccttattaagccacgggcccttccgcgccgtcctcccctctttctccaggctctctcctcagccttagtacactaatctactgccttacaccggattccgattcaattaagcccattatatagaaataggcgctcctatcgccttaatcacggaagagcgagtacggatgcgctcattacaattatgaagaagaggtaaagagatccgagacccctaagaacaatccgaatcacactagggatacgaacgtaaatagaaaactattttacctctactgcccaggaccgaataagcccgtcgatactatcttctaagagcctagtaaaaagcatccgtaagtctttaaggacgcgctgtagtaaactaaaacggttaatangaaaacgaag

SEQ ID NO: 15594 - DNA, 458 bp, Glycine max
tggaacctttgggctgatttatgtgcttgatggtcgtgagaagatgtagaagggggaggctcggttgggccaaaaagaacagtagtggcgttatcggggtagaggaggaggaggaggaggaagaagactaataatatactattaaataattccacggagacccgggttaatacgccccccttttctaggtgcgctcggtccctctctctcgtctgttctaagttccgtaaaaatggagtagggtcgtctaagtcctaggacgacgcatagatccgcggacactaagacgcataagcgacgcgggaaacgtcatagagaattgaaggcgaagccacagaaaattattacaagtgtaagtagccctttcctcggaggactcccgcacggcttaattacatctaactcgtaaactatgtcctaagccaaaattagatataagccccaagcccataaacaaa

SEQ ID NO: 15595 - DNA, 353 bp, Glycine max
tggcttggaacctttgggctgatttatgtgcttgcatggtcgtgagaagatgatagaaggggccagccagacatatatatcttatacaaagagggggaaaggagaagtcataccgtcctccgccggagatactaaatacggcaatcggcgttattttagacggaccacctcggctagcgcacgaacggcgtacacttcgtcatgacaatcgtgctgagtgatgatttcattattgcaatcgcggccgcgtatcttacaataagctatccaccaaccgtatgtataagtccgtaaggcgcaataacgcgctacatttcacgaggagggtacggaccgaatgaagtccggctccg

SEQ ID NO: 15596 - DNA, 398 bp, Glycine max
gttggaacctttgggctgatttatgtgcttgatggtcgtgagaagatgatagaaggggatagcgacctatctcaagagtcgagataataagcggttccttcctctcctcctcctcttaaaggtaaaggctcccgagaccgaagctccaaatttcaccgaaggtaacattcataagtctttagccggacatagacccgacttaagcgacgaaacctccgtcggccatcactccaaggaagaggactacggtttaattacttttcaacgattctacctaagatcgcgacgcccattaaatagccttccgggagtcgttacgaggcggcagcaagaacccgaaccggtagaggccccctccttacgacccgaggatttgctcgcctgaaaattctaataaa

SEQ ID NO: 15597 - DNA, 430 bp, Glycine max
gctggggccaagaggggaaggtgagaagcgaagatgagcagcgacacaaaagccaacagcaacgttggagggggatccagatcgaggttaaatcactacctctatagcggtgacaagaaacatgtcttcgttggtttaactctcatcaccgctgtctttaccatcccatggttccttatgaacagagggaccaaacaccaatctcatcaagattacttggaaaaagctgataaagcaaggagccaaagactctcatccagttctgcttctgccaaatgagcttcatcaacattctgttgaagagcatactttttccggtaacacttaattaaaaggctttaaatatgtttgttggatgtccttttctctctagttttattctatggaatggagatccatcttcctttttctgttgtcccgtactgctaaa

SEQ ID NO: 15598 - DNA, 1077 bp, Glycine max
ccctcgagccgctcgagccgctcggcccgcaatttctgcagtcggcaactcttccctttctcttgaagcttctattctgtgctgttgctgaatcagaatggatggtgctgtgttggcatgtacagatggagcagttcttcccgtcagtcaagtgtttgatgcaattagagagcttgggaatggagggcttgagcaatgggatcctcttgttcttacttctgcctcactcttaagcaagttgcctgtggattcttcctctgttgattttgtgattttaatctggctgtcaattgattgtcctgtggatcaactgattcaagaaattcttagagtgttaaaagtagatggtacaattcttattcgcaagtcatctcagtctgctgtgggttcatttgataagataatatcttctcttgagaacaagttattgttggcagggtttacagaaccacaagttttacaattaactgggatcaaagctaaaaagccttcatggaaaattggttcgtcttttgcgctaaagaaggtgattaggagttcacctaaaatgcaaattgattttgattcagatctgattgatgaagatagtcttttgactgaggaagatttaaagaaaccccagcttccacctggtgattgtgaaattgggagcacaagaaaagcctgcaaaaattgcacctgtgggagggctgaagaagaggaaaaagtattgaagttaggattgacaacagaacagattgataatcctcaatcagcttgtggcaattgtgggctaggggatgctttcaggtgcagtacctgcccttacaagggactgcctgccttcaaattgggcgagaaggttgcactgtccggtaactttcttgctgcagacatataaatggataaagttgcggtaacgctttgtcatgggaatggtattattatagattttaattatttagtatggaattgtcatcagttatgttaatgctagcagaaccattcatccgagttgtggttttgatacaattttacgtatgaccacacgagggattcgagttttccggatattatagagctgcaatgtcattgtct

SEQ ID NO: 15599 - DNA, 286 bp, Glycine max
tgaagcttcgattctgtgttgttgcttttacttcccatcagaatcagaatggatggtgcaaagacacatggtgctgtgttggcatgtacagatggagcagttcttcccgtcagtcaagtgtttgatgcaattagagagcttgggaatgaaggagttgagcaatgggatcctctagttcttacttctgcctcactcttgagcaagttgccagtggattcttcctctgttgattttctgattttaatttggctgtcaattgattgtcctgtggaccaactgattcacg

SEQ ID NO: 15600 - DNA, 443 bp, Glycine max
ggaagacgacagaaggggagagaaaaaaaaaaaaactttcgtttctactatttcagtattgttctctctcttcacctcactcgtctttctcttttcactctcccagcatgtaacccacgccctcatgcatcgccctcttcccttccctttcaagtgagtctcatcaccttacttcaacaccgcggcgaacgacaataatccgtattcagatttgctcaccgtggacaatagtcatcatcgatccagattcagatctgctcataacgcacaacgactatcgatctagattggttcgtgcggttgttctgtgatattggatcagatctgtgatttgattccaccatgacattaccgacgaccacaaccatgcatgcctcgaaactcccacacgtcggaggagtgacgattgataccgctacggaaccttgcaatgcaattctgca

SEQ ID NO: 15601 - DNA, 433 bp, Glycine max
ggctctaataactcattattcattaacacacacctcaaactaaaaaaaaaaaatgtattctgttgcttccacttcccttacttcaccactcctccacgaccttgagaacttccattactcaagaaggttactccttcactccccataccttaaccaatcagccaaacccccaagaagcagccacgattcttcaacagaaacatacctgggagatggcaatttcgatgcaaatgttgtcatggtactctcagtcctactctgtgctctcatatgctcactggggctaaactccatcataaggtgtgcactaaggtgttcaaattttgttgtgagtgactcagtggcaaccaataacaataacaacaaccctccagcagcaagagttgccacacacgagtgaagaagaaagcaaccaagacttttaccacagtga

SEQ ID NO: 15602 - DNA, 516 bp, Glycine max
caaatgtgcctggtcaattaggggaccgaatttcataactgagtgctttaggggaagaagaagcgaaacacagtgtcagtatctgagttttttcttcaaactcaaaccctaacaaacaaaaaccatgtatcgttttttctcttccattcgccatggccgtggatcttccctcgcatctcttctcgcgccgaaacctgcacttccattcaacgccgctctacgacctcgccgtttacctcaaaacgacgggcatgttagaggattttctagctcgaatttagattggaggaggcttattgtgaaccagaatgtgaatgcagatgcaaatgctcatccagattctatgcaggatatagagaaaagaaactccgaaaagtggaattatatgagaccgaatatgaatccagatggaaatgctcctccaaattttgtggagaatagagggaacataaacttccagagcctggataattatgcgcaagatggaaatgttctccaaaatttaaggtggcccca

SEQ ID NO: 15603 - DNA, 977 bp, Glycine max
cccacgcgtccagacagtgtcgcagctttttctccaatctccaccctgtaagtttagggtttttcacaaattgagctttcactccattttcgttcccaaatactatctccaaattttgattttaccatcgatatacgacacaacatcgcaatttctcgcgggtcgttttgataactggcgaaatcgcacgataccgacagcgtcgtgcggtaatacgacacatttgttgtttgatcatgttagccaagagattaagctctttcttcaaactctccccaaaacctcagatttccacttccatgaagaaagtggatgaagagactggcaaatactatggtagaaaggctgtgtcatttgtcttgattactattacaggtggtgttgctttgagtgcccttgatgaccttgccatctatcatggatgtagcagcaaggccatggagaaggtaagcaagaaccaggcaataatagattctattggagaaccaattgttaaaggtccatggtacaatgcatctcttgcagtagctcatgaaagacgttctgtttcatgctcatttcctgtttctggaccacaaggcaatggtgtcttgcagctgaaggctgttcgaaatggagatgacacttggtcttcctttttccttcctcgtgattgggacattttaatcatggatgctctcctccatatacctgagaatgagaagcaccgaaccttgcggatcaatcttgctgacaagcctctttcttgtactgcttgcaccgatagcacacctcatccatcagaaaattcaaaggcaaaattgagtgccaagcaataaaagcttaattggcagtttgacacaatctttaattcatctaaaatcaagtttttgacatttttatgttctaaaccttttacatgattttgaggctaggtgggcgtcaatatttggccgacagaataaatttattttcaaattttcttctggtaatgtgtt

SEQ ID NO: 15604 - DNA, 763 bp, Glycine max
aaaaagcatttggttgcgtgttggacctgggtattcggcatgtggcttacatcttcagttacaggaagaaagcagacaagggatgagaatgaacatagagaaagaaagttcagaagggatgaggatgatcgggaaggaagaaagttcagaagggatgaggatgtttatggagaaagaaagaacttaagggatgaggatgtgcatggagaacgaaagaacttgaggggggaggatgatgatagggaaagaaagcattcaaaggataaagatggtcgtggagaaagaaagcacagaagggatgatgatgatgatgttagtcatgaaagaaagcagtgcagaagggatgaagatgatcgtgaagaaagaaagcagcacagcagggatgatgatggtcgtggagagagaaagcacagaagggaggaggaagagcggggaaacaaaggttatgagagggaaagccgtggagattactccaagagaggcagatactaaggttctcgttcgagtgagaggtgtgaaagtgactcatgaactgtgatccaggcatcttgagaatgtttacttgctgctttaatatttgaattagatgtgtcagttgtcttatacatttgctttttagaggatgtaatttgtgtgtgaactatgtttcatgtgttttcgtttcaaattccgtattatgtttttctttacaaaattctgtaatatgttgtgactggtagttttttaaaaaataaaatacaaaatcctacgcaggtgttgttat

SEQ ID NO: 15605 - DNA, 525 bp, Glycine max
tgttgatcaggagatgtcatttgtcatgttcagatcagaagccaacgaagctagtagtgtgcaaatggatgacaatcaggctaatcaagaagagcaactccagaggttagttcaggaaagggtgaaagaaattcagttgattgcggaaaaggtaaccctgcatcttgggagctcaggggtggtggttaattagatttgtccttcccaagatggcatgggatgacaaggtcatgcatctatgatattgtgtgattgttttcccgtggacctattaagagtttgtttttctggacaatcactcggtagtgtatttgggttcttccttctaggatgtattttaagattctcttatagtagtctgtgaaggaaccagtgatctgttaagctgtaattaactgagattaaccacaacaaagttgattgagtgacattcagttgttattgtccattctaatacgtcttgctcgtacatttttttgacgtgcactaatatgatacatccaagaaatatgtgggttctggttt

SEQ ID NO: 15606 - DNA, 898 bp, Glycine max
aattcggctcgaggggtaacgcctccattatcagtcctttttcaggcgtggtttttacctaaccctacaattcgccgatccttccagttagggtttttcgctctcagcgaaaacggtgtatatagaaaccctatctattcctccgatgcaccaggggaattgaatatatataataagaaaaaggcaaaaaaaagaggtgaaaaaaatttgtctggtaaattgttaattctgttgttttgcgtgtttctggactcaggagctgcgctgttcccggggaaaagcatgtacagtatgaacactaaatgcagtgctggggattgccaattgatgtcatggtcttcaccattgccaccacagtttctttgaaactgctcaaggtctagggttctatttaacttctgcacctgagcttttatatttaagagtgtttatagatattgggctagttgatagaaatggaagcaaaaatcgcaaaggcattggatagggttgcactcaatctgaagcgcaagcgagcgacccgatatgctgcacatttaagtggagcttcacaaccaatgttagggcattggtcatcttttacgtcaccaacaagcagggctgtcaaacgcatgagattgggtggatatagaaacaggctgacaaatgctggtcctcatattggacggtccttagctaggcgttttttgaattataaaaagagtgggagactggagcgtttgatgttctatgagaatgggtcatggttggactttccaaaggatgttgttgacttggttaagaaggatctttgaattcaagcgggcagcttgtggagatagagtcacatggggatcatcttttgtttgattttttacgtctgcataagatggaccttaaaactggcttgcaacaacct

SEQ ID NO: 15607 - DNA, 478 bp, Glycine max
ctccattatcagtcctttttcaggcgtggtttttacctaaccctacaattcgccgatccttccagttagggtttttcgctctcagcgagaacggtgtatatagaaaccctatctattcctccgatgcaccaggggaattgaatatatatagtaagaaaaaggcaaaaaaaagaggtgaaaaaaatttgtctggtagattgttaattctgttgttttgcgtgtttctggactcaggtaatttctaaagcttatctcggttttccatgcgctattcgattcaggattttaatatctgccagggtttaggacttttttatttttatgtccgtttgactttgcgatttggggcttggatttagtagatcaggattgagtttggttgttcttgctgtttggaatgattctctgcttatttgtaatttttggagctgatttggttttagaagtgatatttatagagtttgttttttatttttta

SEQ ID NO: 15608 - DNA, 494 bp, Glycine max
gactaaattcaggcgtggtttttacctaaccctacaattcgtcgatccttccagttagggtttttcgctctcagcgaaaacggtgtatatagaaaccctatctattcctccgatgcaccaggggaattgaatatatataataagaaaaaggcacaaaaaagaggtgaaaaaaatttgtctggtaaattgttaattctgttgttttgcgtgtttctggactcagggattgccaattgatgtcatggtcttcaccattgccaccacagtttctttgaaactgctcaaggtctagggttctatttaacttctgcacctgagcttttatatttaagagtgtttatagatattgggctagttgatagaaatggaagcaaaaatcgcaaaggcattggatagggttgcactcaatctgaagcgcaagcgagcgacccgatatgccgcacatttaagtggagcttcacaaccaatgttagggcattggtcatcttttacgt

SEQ ID NO: 15609 - DNA, 329 bp, Glycine max
ggatgttgttgtaaatgtcgtcgtcgttgtctttttgggaatacacggtgctcctccttctgcggcccctcttcgccgtagcgttcgttctcttcttaatatccctcggttggtttgtggcgtggaaactggtgctggtgcacgtgccattggtgcaagaggttttcggcctcaagaagaaagctgttcgagtgaagcccccaactggtcgcttttccaaaatctacagcacccttcacgcccaaaaatcaccttccacctcataagatcattaaatttgtaaatatgaagtgacatgttggaggtggttagcatgggatcttggacag

SEQ ID NO: 15610 - DNA, 402 bp, Glycine max
cctcgagccgaatcggctcgagctagacgatcacggttgacgccacttgctccctccctcactgagatgagagagaagaaagcctccaaaacttcatcttcaacctctccatgtgctcaacttcgcgacgcataccacaattgcttcaacaggtggtacgccgagaaattcatgaagggtcactgggacaaacaagaatgcgtttccgagtggcaaaaatacagagcctgtctttctgaacatttggaagataagcatctgattcgtttcttacaagctgactgcgttgttcaagacaatggtgttgcttctcagtaacttgtaaggactaacgtcgctaactaccacgcctaatcatgtgacgaccactgttcatgtcggactttgtcgtcttgcctgccc

SEQ ID NO: 15611 - DNA, 483 bp, Glycine max
tataagagacgactaccatgaaaatatctcattgtattaatatgataaaagatgatgaattattacaaagatattcctatttataccagtgatgtgtgtctaacaaactaagtcaatctgaaccattgaacataacagtgatcttatgatgtttaacagaattcagaagagaaaaggcagaaaggaatctgaaaagaaagtaccaggaaagagatggaggaaccaaacccaacagagaggaatcgaccgaggcaagaatcagcaatgaaagcacctatgagtggtgtgagattgcttgttgcagaggataagagaagcacctgagttgctttggctaaatgaaacttgtaactccccatcaaatacaatatcatgttcggcagaagaccgattttcgccacgcttgcaagtgcttcatttgctgcgaacacaaccaaaaccaaaaacaatgagaatccttaaccaaaccaaatccatgttttt

SEQ ID NO: 15612 - DNA, 287 bp, Glycine max
aagacaagaatcagcaatgaaagcacctatgagtggcgtgagattgcttgttgcagaggataacagaaacacctgagttgctttggctaaatgaaacctgtaactccccatcaaatacaatatcatgttcggctgaagaccgatattcgccacgcttgcaagtgcttcatttgccatgatgaaaggcatggtaacaataccaccctttttcttctgtggttgtggactgtgttgagaagccatttccacttcacttgtacaaagctccatttccttgtccactcgag

SEQ ID NO: 15613 - DNA, 1028 bp, Glycine max
gatagtgacacgtaaacatcgcaggaaccaaaagcagaacgcaacatcatcaacatcacagaggtagagagtaagacgccggcaatgtccgctgtgagagttcaagtttcggcgtgtgcggtttccgccaccgtcaaccaccttcgcctccgccaaaacgccgtcgtttccttcaggaagaagaagcctctcactctcagagtggtctcaatgtcttccgttcctccttcccaacccttcgaaatcgccgttaaagcttccgtcaccacacccaacaggctcggcgactgccctttttgccaaagggtgctgctgacactggaggaaaaacatctaccttatgaccccaagttggtggatttgaccaacaagccagaatggttccttaaagtcaaccctgatggtaaagttcctgtcataaagtttgatgagaagtgggttcctgattcagatattattactcaaacattggaagagaagtatcccagccccccattggtgaccccacctgaaagggccacggcggggtcaaagatcttttctacatttattggttttctcaagagcaaggatcccaatgatggaacagaacaagcattacttagtgaactgagctctttcagtgattacatcaaggaaaagggtcctttcatcaacggtagtgagatatctgcagctgacctatcacttggaccaaaggtataccatttggagattgctttggggcattataagaaatggacagtgcctgattcacttacctctttgaagtcttatatgaaggccattttctcgagggaatcgttcgttaaaacaagtgcacaaccacaggatgtcattgaaggttggcgtcctaaagtggaaggctaatattcactgatcacgcactatcatttctatgagactctgaggactataccccaacaaatagcaatccatcaagagttctagacctatatcggtttgtattatataaccttatttatttattcactatgcactatggaataattatttattaagaatag

SEQ ID NO: 15614 - DNA, 559 bp, Glycine max
gcaaaagaagctgctaacggaaggaaacttgttagtaaatggcatcccacaacaaagggtacacttagaagaaactatagagtcccatccaagctcgaggggcgacgtcttcttaaagctattgcatctctattatcagatgatgatcactttgttgatgccacctctcacaagggttgccaaatccgtagggaaagtgctcatggagaaagtgtgtgttgcaacaatgtgagagctctttttgatgagctcccaacaccccatatcattgtggaaatcacaccttttcctgctggaccccttaatgacaatgattacattaaagctgagaagcttgagaaggttctcaggtctagtccttctgtttgatttgtctatgtatgggtgtttcatgctttcatgtacatattctttgctaccttgtaaatattgacttgatgaacagaaatttgtatcctttcaactcctcaaacgttttactgttgaggtgaatcatagttacccctttaaaagacaataacatctttccatgtttagtgtgagatgacacttaacatgg

SEQ ID NO: 15615 - DNA, 396 bp, Glycine max
  unsure (1)..(396): unsure at all n locations
gaaaacaaaatcagcaaaaataaaaggccccaaaatccgtttctcttatcttccaattaattgagtaactgattaagcgcttcatcttcaacaacaccaaaaaaaaaacatacaccaaaaaggagttacatttgttcatcttcttcttcttcttcaactccaatttgggtcaccaaaatatcctccacctttatcaaactgaagcatttaaaaaacccagaagggtcaattatttccttgcatttcctagcttaaaatattcagtangtgcacttggtccatttgcttctttctctccattagcaattattattaccatccccttttaacccctcccttttcttattttcncatttgcaattttaatcaacctttcttcttgataccccaacccat

SEQ ID NO: 15616 - DNA, 804 bp, Glycine max
acgagactgagagcaagcctggtgatcagtatggaagttatgttctccagtttgcagatgattttacatacaccgatcctgtagatggaagtgtggtatcaaaacaaggtgttcggtttgtttttacagacggttcaaggattatatatcgtttatcaggaactggttctgcaggggctacggttagagtgtacattgaacagtttgaaccagatgtctctaaacatgatgttgatgctcaaattgccttaaaaccattaatagatttggcaatatccgtgtcaaagctcaaagacttcacagggagggagaagcctacagtcatcacataatggacaattccacaaccacttgatcaagttgttatatgttccaaggtgtgctctaagttgagtgcatacgcaggttgtttattgcatgcctatccatatctgagctcgctcgagttcggtcacttttggttgttcaagaattttggagcgataggtcccctgtaaaatatgctacttatatatttatgtgcaaagtatgaagcaccgacgtgcaacaaaataataataaaaaagaatagtttgctgctctaaggagctaggcctttcaaagttttgtccaattttttctaagtttagaaactggagttacttctcatcaagcagaataccaatttcacgtatgttccaaaacttctttctctgttatgattagtagtcctctttgattcctgatgtctctaggatgccaaaagtatgaatgttattgtcaagaatctattttttagcacttgagatgaaagcagagacaagg

SEQ ID NO: 15617 - DNA, 548 bp, Glycine max
acgagcaccctcatccagaaaacacctgcttctggcgtcttaaaaatacgtcacactccttctcaaccctaaaatcagtgttctttgtttttttgcagaaaagattaggagatggcgaacgcttgattccctgcttcaatcgcattctcatcgagaaaatcgtccctccctccaaaaccagcgccggcattctactcccggagaagacctcccagcttaattccggtaaggtgatagcggttggacctggatcacgtgacaaggcggggaacttgattccggtgtctgtgaaggaaggtgatcacgtgctcttgccggagtacggtggcacgcagatcaagctcgatgacaaagagttccatttgtttagggatgaggacattttgggtattctgcatgattgatgttgtgaatgtgatgcgtcctacaacatgcaaattgtgattgagttggaaaataatttgtcttagtttatgaatgcaacttgttacaaacatttgagggggacttgttttaagaatttatatcctgttttgtattctgaatat

SEQ ID NO: 15618 - DNA, 805 bp, Glycine max
acgaacctcaacaaacacaaataccgtctcccatcattccttacagtttcaaacacttgtttttcttctctcttctccttttgtttctgtgtggatctacacccactaagatgttacccctattctgaaaatggaaaacaatcatagtgcagctggaacacaagatagttctatgatgaagtctgttgatcaaagagtacgttcaaaagcgcgtaatgacataatgactcgacgtctgaagaatcgagagagacaacgaagatatagggcacgtaagcgtctagaagccgaaacaaagaagtcatttgttgtagaagagacaccagctgtgcaagtagaactacaaccaaacaggaaccacaacaacaacaacaacttcgtcacccgtatctattgtaaacgagattggaaaaaggatgcaagacgagcccatgtttttaagcatcaacaaatgaatggatccattgatcctccagccataactagtgtacctgaggtgacatgcttagccattggaaacaagccagaaacagtgccagagagggaaattcagtctggatcttctggtgttgttagtactgatactcctagagtggtgctgggtcgaagagattggaaagcagaagctagaagaaagaaaaactagttgactcttcatttcttcttgtaaaaaaagtatttatcccagtggactttctgttgtattatagacattatataatgtaaagaatgctggacaatcgctgttccattacctggcaagctttgaaattataaacgcggaagaaaatctgtcccttttact

SEQ ID NO: 15619 - DNA, 489 bp, Glycine max
ccgctcgagccgctcgagcggttcaaaagaagaatatattcctgcgttttttctattaacattacacataaagctgaataactttctttgtaataagataatataaattaaaaacggaaatgcgaagattcttaattttattgaggtgttgtgattcgaaatcaaactgaaggcaacgccactgcaatctgttctaattagaaatagaaggttcatcatctcaaaaaggcttttgtgattctcgatttgatttggatcgcacagaacgaaggcatgggtcaagcttttcggaagctcttcgacaccttcttcggcaacaccgagatgcgggttgtgatgcttggtctagatgctgctggcaaaacaactatactgtacaagctccacattggagaagttttatctactgttcctacaataggttttaatgtggagaaggttcagtataagaatgttgtttcacggtttgggatgttggagggcaagaga

SEQ ID NO: 15620 - DNA, 333 bp, Glycine max
atttgtattattgagttcaaggctggctagggaaggcaatctcttccgattagagatagaaggttcatcatctcatctcaaaaaggcttttgtgattgataatcagttctcgatttgatttgatcggaacagaacagaggcatgggtcaagcttttcggaagctcttcgacaccttcttcggcaataccgagatgcgggttgtgatgcttggtctagatgctgctggcaaaacaactatactgtacaagctccacattggagaagttttatctactgttcctacaataggtgcgtttgtggctataaactcttaatttaatctaattattcta

SEQ ID NO: 15621 - DNA, 548 bp, Glycine max
atataagtggaatccaatggacactgctggctaaagaaatagcagtacagagcaaatcaagggaattaaatagcacaaattattgaacaaagaaagctagaaattaagaggtcccaaaagctgcacacattgcccttcttgtccaggaatttgagatctaacattaacaacaactatctaagcactagcaagctagttagcaaggcaataatgaagttcttgttccagtgcccctgctgctcttgcttttgcttcatgaagccaaagcaagggaaggcaaaggtcaaggaagtcaaagaaaccaaggtggaagaaaaaaaggttgaagagaagattgaagaaaagaaagattgaccatgtaactccatttcaagctctctttggttattattagtattttttttttttgcttttttcttctcaccgatattatataagcatgcacaacaaatttgtgcttctttgttcctataattaccactgccatgatgcattcctactactgttagtttgaaaatgtccaatgcctttgcaagtaacttcttaaa

SEQ ID NO: 15622 - DNA, 425 bp, Glycine max
cccacgcgtccgcccacgcgtccggcaatcttcactcatcaacctgttgaagaagaaacgaggaacaacgacacaacatgtgtgtgtatatatacatacatagcctaagaaactgaacatgtatacatgaagatgataagctagctactacggtccgtggagggaagaacggtcatctatttgtatatatactctcttcattgttgtgcacctgcagcagttgaagctgccagcatgatctgagttcaccttctattggtaagaacagatcatgtggctgcttcacctgttgaatggaagcatatagaaaccctaatttgctttctgatcctcctcgaagattttcatccggtttcatagaaccctaaaaaaggatgcttcaatacattcttgcatcttgtatttatacgatggatgcggatact

SEQ ID NO: 15623 - DNA, 552 bp, Glycine max
ttaaaattagttgcatatcaggtttatcagaatggaggtttgcaaattggaagttctcgtgttgttgaccaaccaaagtgcttgcacaattgcattggtgaagttattaggataaaacatcttggaaatgagaggtttggaattattaaacgatttgataagtattcccgaaaacactcgatcatgtttgaggatggttgtgttgaaatttatgacatgtcaaaagaggactgggaacttgtgagatagtgatgcaactgttgggtaggaactacgtgcgaatatttcttttgcatgattgtatctatctgcatgacattgtgaaatattatatcttaatatataggcaataggcatctctccaaattggtaggcttttccatttttattcccatacaatttgtccccgagtaatttgcataatcagttgtattgaaaatggtactacatatataccaagatatctgatactgaatgcgagattgactagcagcagtatgtatgattgtagatgccgatgcttaagctaatagaatgaagattgtatttttt

SEQ ID NO: 15624 - DNA, 413 bp, Glycine max
ggatgaaccaaatgagaggtatttctggttctggttcgagtagcagagaagcaaggagaagaaaggcgaggtcgacgtcaccagtgaaggaccgatccaaaacctcttcatctaagttaacctcttcttcttcttcatccaaacgaagcacctcaccctctgccactctcctcgacgtcgatgatgacgtcacctcactctttcacgattaccctagccctaaccctaaccctaatcctaaccctcggagcttccctcacagcgttaagcagaaatgctgggaaaaggccgacaaagtcaaaggacgcgaccccgatcgctggcgcagggacgccctcggcaacactctctttcgcaagctcgtaggttgcccccgttgtctctgccatgactacgaacacattattccttac

SEQ ID NO: 15625 - DNA, 250 bp, Glycine max
agcaagacgacagaaggggttgtgataaactataccaagtacaagaagaaaaatatatcatttggggatcttgtttgggttgaagaaggtggaacacacactgttaggaggcccattgtactggcaccaagtggaattgtatgagttgtactttgacttttttactccttgatggagcccccacaacaataaataatttgatcgtgaagcgaaaaaacccaaatccccctcaaaaaagaaagcggccgct

SEQ ID NO: 15626 - DNA, 661 bp, Glycine max
ctcgagccgattcggctcgagcaactactgatatcaattataacaaaacattgaaggattattagggaagttgtagtttgaaactgcaccaattatatatacaacatgtgtcgtggaacttttgtggttgcaaccactgttggagtggtggaggcgttgaaggatcaagggtattgcaaaatgaacagcacaatgatgaagttggtggctcaacatgccaagaaccacatagggtcagtaactgaggccaagaagctggcttctccttctccttctccttctacttcttcttcttcagtaacttcaaataacctgagagatgatgagaagagaaggatggcagaggagtctctcagaacagttatgtatttgagcacatggggtcctaattcttagagttagaaaacattagattaatatcataaatatttagcataattcagcagggcacaaaaaatatgatgccagtgatcagctcagccacttaattctataaaactggagagtgctcataacatatatagcactcttggtgcactgattgtgcaaggttttgatcctcattaattgttggtgggtgtgtattgcgatttggatgtgactgtaaattgccatatcaataaaaagttacgtgctttggcacggaaattattgtgtgaaa

SEQ ID NO: 15627 - DNA, 452 bp, Glycine max
gatagtttcaacttcaactactgatatcatatcacaaagcggtgagggattattagggaagttttattagttcgaaaccgcaccaatttattatataacatgtgtcgtggaacttttgtggttgcaaccactgttggagtggtggaggcgttgaacgatcaagggtattgcaaaatgaacaacacaatgatgaagtcggcggctcaacaagccaagagccacttatggtcagcaactcgggccaagaagctggcttctccttctccttcttcttcttcagcaacttcaaataatgagaatgagaagagaaggatggcagaggagtctctcataacagttatgtatttgagcacctggggtcccaattcttaagagttagaaaacattagattaatgataaatattagtataattcagcaaggcacacaaatatgatgccagtgatgatcagc

SEQ ID NO: 15628 - DNA, 487 bp, Glycine max
  unsure (1)..(487): unsure at all n locations
gaacacaaatcattcacatcccaaagaaattcaaaattctcaacacttctcttcaaccattctcttctcagatcaatacaacaatgggttttcgtttacctggcatcagaaaggcatcaaaagcggcggacgcaccaaaaggctatcttgcagtctatgtcggagagaaattgaagcggtttgtgattcccgtatcatacttgaaccaaccttcattccaggacttgttgagtcaagctgaggaagagtttggatatgatcatcccatgggtggcctcacaattccttgcagtgaagatgtcttccaacgtataacttcttgcttgaattgagcagaaatctcagtataggagactgacatagattagaggagacattctgtataataggcgtcttctctaagtgtacagatccccctttctcaagagagaggaaatacanacataatatgtcattctattgattaattgcaatgaagtcagcaact

SEQ ID NO: 15629 - DNA, 267 bp, Glycine max
ctagaatttggagctcaaaaacttccatcttctttacaagtcttatttgacactctcttcacaagtttcaacacatacaacaatgggttttcgcctacctggaatcaggaagacatcattttctgcaaacaaatttgcatcttcaaaagtcatggatgtgccgaagggcaaccttgcagtctatgttggagacaaaatgaggcggtttgtgattcctgtatcatacttgaaccaaccttcattccaggacttgttaagccaagctga

SEQ ID NO: 15630 - DNA, 308 bp, Glycine max
gatccttctcaattgttgttatgttcactaacaaaatgaatctgatcaagccctttattttgctttgttttctgtatggggtgatcctcatcgctgcggtggtggctggtgagccatcgaaggatgaggaaaaaggaacaaatggaattcacgaagagtttagtggatgcgatgacgtgcagggaagccttttgagcggaaggaaattccaactaaatcatgataccgatcactgtgcactaggaaaaggacagggaaagggaggcggtgacaaagggggaggaggcgatgaaggtggaccaggaggt

SEQ ID NO: 15631 - DNA, 540 bp, Glycine max
cccaccccccctccaccttctttcttctctctcatatatctgtctctctttaagcgcatcccatcatcaccctctcaatttctctctgcacgccttcatgccagtccaaacattaagttaatttgctacgaccataccatcaggagtaatgcataacaccgaattttgttgctatagctagctacctccacatatgggtctcgaaatcctagacgaatttcggccaattatgcccatccgaacagttcctgttcctaaggttagaaccttcagccaaggctcggagctggtagaggcatcagcgaaggaggagatgctggtgcaagagtgccacacacccacgtcatcatcaaaagtggctcaaacgttgttggtttgtccaccacctccgaagaaaccacgagtgtccagaaggacttctcattctcattctcaagctggcttctttcaagtgccccacgatgatctcgcttctgtctttctgcttcggaccaaaccttccgttccgaggaagctctttgctagctagccacaaaatac

SEQ ID NO: 15632 - DNA, 784 bp, Glycine max
gtaaaagttgggaaatccctccaccgctaacgtagtaggaaggaacacgataatagatagagtcgtgaaaaaaacacagaatggagctcatgcgaactgtgtacccaaccaccgctgttcctcttcctctttcaaaccttcccgttaggaccaatttcgccgttcggtgttccaacgttcactcgcaaccgcagctcgactcgcgcaagttgcagttagttcttgcagtgaaggaaaagcttgaaaaagaacatcatagtctccctgttggcagaaatggaagggatgacgaagatatgatactgtggtttctcaaagatcgcaagttttctgttgatgatgctatttacaagttgactaaagccattaaatggcgtcaagattttgaggtgtctaaattaactgaagaagtcgtgaaagatgctcttcaaactggaaaaggatatgtacatgactttctagatatcaatggccaacccgtgctcgtggtggttggatcaaagcatattcctcaagcactggaccctgcagacgacgagaggctctgtgttttcttaattgagaaggcattgagtaagtttccaactgggaaagaacaaatacttacaatagttgatctcagaggtttcagtacagaaaatgctgatcttaaattcttgacattcttgttcgatatattctactattactatcccaagcgattggctcaagtcctatttgtagatgcaccttttgtttttaagccaatttggcagctagtcaagcccatgttaaaatcatatgc

SEQ ID NO: 15633 - DNA, 419 bp, Glycine max
  unsure (1)..(419): unsure at all n locations
ggggagcaagctagaagttgggaagttcctcctccgctaacgtagtaggaaggaacacgacaggtagaacacagaatggtgctcatgcgaactgtgtacccaaccatcgctgttcctcttcctcttcctctttcaaaccttcccgttaggaccaatttcgccgttcgatgtgccaacgttcactcgcaaacgcaactcgactcgcgcaagttggttcttgccgtgaaggaaaagcttgaaaaagaacaccataacctccctgttggcagaaatggaagagatgatgaagatatgatactgtggtttctcaaagatcgcaagttttctattgatgatgctatttacaagttgactaaagccattaaatggcgtcgagattttgaggtgtctaaattaactgaagaagtcgttanagatgc

SEQ ID NO: 15634 - DNA, 565 bp, Glycine max
gggaatctagcaactaccaaaaccaatctctttcaataatcaacaacaatgacaaacttgaagcctctaattctcttcttttatctcctagccattgttgttatgatttcaataccatcaagccactgcagcagaaccttgcttccagaaaacgaaaagctgatagagaacacttgcaagaaaactcccaactacaacgtttgccttgagtctctgaaggcaagccctgggagctccagtgctgacgtcacagggctggctcaaatcatggtgaaagagatgaaggccaaagcaaacgatgcattgaaaagaatccaagagttgcagagggtgggagcatcggggcctaagcaaagaagagccttgagttcttgtgctgataaatacaaagcggttttaattgctgatgttccacaagccactgaggctctgcagaaaggtgaccccaagtttgctgaagatggggctaatgatgctgctaatgaggctacttattgtgagactgatttctctgcagcagggaattccccactcaccaaacagaacaatgctatgcatgatgttg

SEQ ID NO: 15635 - DNA, 399 bp, Glycine max
gaggttttagtctattctctaatctctcgcttcacaattcacatggctctggaagcttacgcagcagcaaaccctgacaaaatccacacagatgtcctcaccaaagctagggattcttgttacaaggctcgtgatgcgttctatgcctgcctggagaaggaatcggacaagaagcccacagagattgcatctgtgggtttgttatacccattagaatgcaaagagtgcaggaatgaatatgtcaaacagtgccgatcttcttgggtgaaacatttcgataggcaatactgccagaacaagagggttcagagacttttggatgacaaagggtcccggaggagtccgttgacgctcccacagccttacactttcaaacccattgcttgaattttatcaata

SEQ ID NO: 15636 - DNA, 401 bp, Glycine max
gacatccaattcactcaaactcagtaatggctctgcaggaaggagggtggcctttgggtttgagactattcaatgaaagaattgggttagcaagaaatggtgatttctctggatcagtctccttcagcactatgctcactgcttctcccacccgttcaactgattcttcctcagatcttgacacacagtccactgggtcattcttccgcgataagagcatcactcttggcagccttattggtatttctagcttcctagaactatcaaggagatcaaccaggggaagaatattggtggaaccctcaaaggacaacaaaaagattaacaagctgaggccttggttgttctcactttgttcaatgctatctactgatgcagtgagtgtgaatgttgctccctct

SEQ ID NO: 15637 - DNA, 415 bp, Glycine max
ggcaacaagaatttatcatttatacaaaactttgagataggttgcaaaggcttagagaagagttatggctaaaagtgagatgaaattcattggagtagtgattctgatgatgattatagtgggctctacacaagctgataacaacagccctgacttgactgggtgtgaagttaaatgtggtttcaaatgcatagcatatttctatagtaaaaaaaaatttgacgaatgttgtctcccttgtattcgaaaatgtcatcatgaaatgtccatcgatgttgtccatgattgcattactggttgccgcttaaccaagtccattgatgacaacattgatgctcgtgttcttaccgttcatgcaatggattcttgtgtgcaagagtgcaagaacaagtaagagtttgttgcaaaaatgctc

SEQ ID NO: 15638 - DNA, 502 bp, Glycine max
gaaccacaaaagtagcaaagcaattcactcaccctcttcaccacctctttaagctcaagctatctaagaattgttattacttctttctttgcaagtttacatctttttgtgtgtgagaaaaatggcatgcattagcaagagcagagcaatgttcttcttcatggctttctttgtggggcttctatttgctgcaggggtgagtgctcagaccagtgagttccctcaagcgccagcaccagcaccaacaatggacgctggagctggatttttggtgacttactctggagcatttgtttgctcctcactgctcctctctcttattgcccttctatgccattaattcttcatgctgcaaggagtgaaacctatctactctattcaatttatttttttcttccccagattctgttctcttatatcttcattctactaaatgtgagtgcttttgttgatggcattattatttgtgtgttatcttattaattgagctcctctactaaga

SEQ ID NO: 15639 - DNA, 584 bp, Glycine max
  unsure (1)..(584): unsure at all n locations
tggtattttctcaaacattagtactaataacccaaaaatggcaccatcattttcatcagcaaccaagctcttctccttctcattgcttttgctaaccacaacaatggtttatgaagccaattctcaattacctctgcaaacgacgttggtgttctacctccaagacatagcaacaggacccaacgcaacagtttccccaatcaccggcctcaccggaagggattggacctacgaacaattcggaacaatattcgcagtggacgaccccgtgatgatgagcccaagcccggtctcagctcaagtgggccgggcccagggcctgctggtagtgtcagcccacgacggcgctaacgtgaacgcggtgctttcgattgtgttcacgaacttgcagtacagtgggagcagcattgagattcaaggcattagtcgtcagcgtgagagttataaagagctttccgttgtgtctgggactggtaggtttcgctttgctaagggctatgctgcgtttgaaactgtgttttatgatccgggaactgcacactcggtcattcgcttgactataaatntgagacaatcttgacaag

SEQ ID NO: 15640 - DNA, 851 bp, Glycine max
cacacgcgtccgtgcggaagacgacagaaggggatatttagatattttacttttagatttatttggagtttagtttagaacaggcctgtcttctcttaaacgaggtcgtgttgtttggttttgaatttgaagtgatttgatgatggagatgaatatattggcttcttcgttctctggttatgcaaaaccctttgtaagagtaaacccttctcttcttacgctcagggcatcttctctgcgccatgactaccctcttgcaagcaaaattgttgtcaaaaatttaccatattctaccggtgagactactttgcagaaggaattttcaaattttggcaagatagctgaagttaaaatggttaaagatatgaacacaaaaagatctaagggtattgctttcattcaatatacatgtcaagatgatgccatgcttgcactagaaaccatggatcagaaggatttttatggtcgaacaatcggcgtggaaattgcaagactgggttgggatgattttggtgcatccccaagggcctcaggacccccaaagaagtgggatttgccagagcaaggggaagtggtagattgctggtactgatcaaaattcatgattgagtaaagctgtagaagagaaaatgatggaacaacagatatcaagttatacaagaatggccatactataggattgatggaacattatattttagtaataatatttgatgcaacactgtagttcatgtgatctctcacggtactcttcattttggcacaaaataaaatgtagtccttccggaaattaactttgatcaatctgtagagctcctacatttataaattttactgtactagttagattc

SEQ ID NO: 15641 - DNA, 771 bp, Glycine max
agttcacctctaccccttgctgatgtttattttatttttgttaaataaaacttcagtttcgattctaaattgttgccggctccagcaacctctgccaatctttaatgggtgtgattgatttctacaacactggtgctttgtgctgggttaagtccaacgccaatctgaagcagcaagtgggtttggcaccaagacccatttgttcatttgaggggaataatcagaggaagtttgtggcaatggcttctaccgttcctgtggagcaagtcaacaatggccccctgcaggtgacaggtgactccttcatcagagagcatctgaggaagttggctccttatcagcccattttgccctttgaggttttatcagctcgccttggacgtaagcctgaggatatcgtgaagttagatgctaatgaaaatccttatggtccccctccagaggtcatggaagccctaggatcaatgcaattcccatatgtctatcctgacccagagagccgcagattgcgcgcactcttgcccatgattcaggccttgaagctgaatatattcttgcagggtgtggtgcagatgagcttattgatttgatcatgcgttgtgtgctggatcctggagacaagattgtggactgccctccgaccttcacaatgtatgaatttgatgctgcggttaatggagcacttgttatcaaagttccaaggaggccagatttcagcttgaatgttgaacaaattgctgaagttgttaaacaagagaagcccaaatgcat

SEQ ID NO: 15642 - DNA, 490 bp, Glycine max
  unsure (1)..(490): unsure at all n locations
ccccgtccgtaagcttcggaatntcggcttcgagggaaaaaaataatggaggcttacactaaggttgtttgcattcttggacttttaatttttgtaagcatttcagatattcatagagtggagggtgcaggggaatgtgggaggtctactactccagataatgaagcaataaagcttattccttgtgtctctgccgcaaaagatgaaaatgttaaagttactaagaattgctgtgctcagatcgagaaacttggcaagaaccctagttgtctgtgtgctgttatgctctccaacacagcaaaaatgtctggagccgatcctaaggttgccataaccatcccaaaacgctgcaaccttgctaatcgccctgttggttacaagtgtggaccttacactcttccttaagatagtactgaggacaaggagggatttgggcgtgaaggcacaaaagctggtggctacaactgtgactacaaaactatgttttatt

SEQ ID NO: 15643 - DNA, 414 bp, Glycine max
ggcgggcgattgtatcttcctctctttctatctatctctgctccaattcacagataacaatgcgcatgtctcttatcaatttagctttcaagacccctcaactcttcccaatacaccaccccattttccctacaaaggcaccactgtaccaccaccaagttctaacgcaaagccatgtcaacaatgtcctgaaagggtcccccgcgtatttgtcagaaatcagcaaagcagttctgctgactcatttttcaccaagatatactatacaggatattcgtcaagctgcatcaaaaattccagtccaggttgtctgcttaaaagtggttcctctcacagtaaggcttcaaatctatgttctcttatagtgttaaaaaaaatgtcactagttgtatctccggttcattttttttatgc

SEQ ID NO: 15644 - DNA, 534 bp, Glycine max
gaaggttcaggcagacaccaacgttgttaaaacccagattaaaccctccattttctcttcctctctttctagctctctctgctccaattcacagagaacaatgcaaatttctcttagcaatttagccttcaagacccctcaactcttcccaatacaccaccccattttccctccaaagccaccactgaaccaccaagtttcaacgcagagccatgtcaacaatgtcctgaaaggttcgtcggggtatttgtccgaaatcagcaaagtgattgatcacgaagaacagtaccgggtagcccggtcgcaggttagccgtaaagttttggacttggaaggttattccatagagggtctttcagttggaggccaagagacatgcatcataatccctgagttcaagtgttcttttgatattgggaggtgccctagtagggctattcaacaaaacttcctttttattactcatgctcatcttgatcacattggagggctgccaatgtatgtagctagccgtggtttgttcaatttgaaacc

SEQ ID NO: 15645 - DNA, 549 bp, Glycine max
agaaggggagacacaacactagtaagcccctttcattagcctttctactattcctatataaaccacactcacctcagctccaaccttcatgcagagaggagagaacaaagagttttaattattgcctcattagtttctaagtgctgagaaaaatgtctgctatggtagaggtatgggttggggagctgacaaagcttcgagaaaaagttcttgcccgcaagcctttcttattatccaaagccaaagaaggatcagaaaggaaccaagaagaaaaggaaactcaaactgcggtggttaagagagacactactaatggaaccatgtctgaggcaacggtgtgtttgcttatggatcgatttgtgccttggtgatatgagcaatagcacaaccaagatgtcttgtattttcttcaacttttcggggttatgatatgtcttgtatatttactatttccatctatgagttcttagtcagcgaaatatgtaatggaaatgttatcaactattggacagaagtactgatatctaatcaaaacaaaatattggtatg

SEQ ID NO: 15646 - DNA, 354 bp, Glycine max
ggaagtgatagaggaaactgtagaagcgcacagagagagctaagtggaggaagaaaatgaaggcattgggatggtggctgatagcggtaggcacgcttcgattagcttccgtgtggttcggtttcttcgacatttgggctcttcgtctcgccgtcttctccaacactacaatgactgaagttcatgggcgcacatttggaacttggacactgttgacctgcaccctttgttatatctgcgcattcaaccttgaaaataagcctctctacctggctacttttttgtcattcatctatgcattcggtcatttcttgaccgaatatctaatttatcatacaatggagattaagaatc

SEQ ID NO: 15647 - DNA, 259 bp, Glycine max
gggagttacttgaaacgacatcgtttcagggaagggagtgaagtgatagaggaaaccgtagaacagtggtggaaaaatgaaggcattgggatcgtggctgatagcggtaggcacgcttcgattggcctccgtgtggttcggtttcttcgacatttgggctcttcgactcgccgtcttctccaacactacaatgactgaagttcatgggcgcacatttggaacttggacactgttgacctgcaccctttgctatatctgc

SEQ ID NO: 15648 - DNA, 446 bp, Glycine max
gctcaaagaggatatctcaacttatgttctgcagcctatattgagcgtaaaaaatagagactataaacagctaacaagaaaaaagttgaaagaattgcaggaatggatagtggagatgtatcttgattatgtggaatcgatctggccctactattgtcgaacaatcagattcggctcgagggctaatctaatttaggtttgaaaattgaaaatattcttaggggtagtctcctgaaaggctaaagagagggatgaaggagggaatactacgtagcgttgaaatttttaaatgagatatggccaatcccattttctgttgggttttggtgttgagcaagttaatggtcatgaggaagttaagtttctaattcatgttatattgaaaacgttactttattcttagattagctcgtaatattttttctaatcgctgcttttgttttcgg

SEQ ID NO: 15649 - DNA, 865 bp, Glycine max
  unsure (1)..(865): unsure at all n locations
tggactcgtgggtgcgtactcttcccttccgcaccaaatcaaacctttttcttagtgtagaattctccgaattgaggtatggggaggctgtttgtggcccatctggaggggcagatctatagctgcaaacactgccgcacccaccttgctctctatgaagacatcgtttccaagtctttccacagcagacatgggagagcttatctcttcagtaaggtcgtgaatgttactgttggagtaaatgaggacagacagatgctcactgggatgcatactgtggctgacattttctgtgtgggctgtggatcaattgtgggttggagatatgagactgctcatgaaaaaagccagaagtacaaggaaggaaaatctgtacttgaacggtacaaggtgtcaggtcctgatggcaataataataataattattgggtcagccatgaagcacatgttggtggaagtgatgcagatgatgcttagtcatctgccattgacaattcaattgtacattccttaatcccccttcttctgttgttcaatgaatgttgatcttattagggcaatttagcaacattagctttttgcccaaaagacatttggaatacatttgtttgttaattctgatgtaaaaaaaactattctaatcaatgctgtttatctagttgtaaaaaaaaaaaaaaaaaactcgagcgttgaaatttttaaatgagatatggccaatcccattttctgttgngttttggtgttgagcaagttaatggtcatgaggaagttaagtttctaattcatgttatattgaaaacgttactttattcttagattagattgtaatattttttctaatcgctgcttttgttttgaggttctg

SEQ ID NO: 15650 - DNA, 766 bp, Glycine max
gaagaccacatttttttgttttgcaactacattgtagcaattgacaaaacacaacacggagtaatggggaggttgtttgtggtgaatctggaaggaaagatctatagctgcaaacactgccatacccatcttgcgctttacgatgacatctactccaggacattccattgcagacatgggaaagcttatctcttcaataatgttgtgaatgtttctgttggcgaaatggaggacagaccgatgatgactgggttacatacggtggctgacattttctgtgtgggttgtggatcgattgtgggttggaaatatgaaactgcatatgaaaaaaaccagaagtacaaggaaggaaaatcggtgcttgaacggtacaaagtgtcaggtcctgatggaagcaattattggatcagcaatgaggcacatgttggtggaagtgatgcagatgatgcttagtcatcctaccattcccaattaaccgtatttggatgaagaaagcctttcaagtgccctgtctctgactctctctcactctcttaaatggaatgtattgaaataaaagactgctgaaaaaaatgtattataaccaaaactttgttggttgaatttactctagtttcttcaaatggattttcatcaattctgttgtcaaatacaatattgcttgaatgtatacctgacataaccggattgatatccacatattggcattcgtgtcgtagtgcatgagtggttgagtgggatatactaaaaggacaaaacttataca

SEQ ID NO: 15651 - DNA, 712 bp, Glycine max
gcaaatctaatgagattcatcttcaccgcttcaatttgacctttgcgtgatttcggtttgactgggtcgtttctcgagttttcgctttgacccatttatctggttgatcttcttcagtgtagaattttcagaatttgaggtatggggaggctgtttgtgacccatctggaggggcagatctatacctgcaaacactgccgcacccacctcgctctctatgaagacatcgtttccaaggctttccacagcagacatgggagagcttatctcttcagtaaggtcgtgaatgttactactggagaaaatgaggacagacagatggccactgggatgcatcctgtggctgacattttctgtgtgggctgtggatcaattgtgggttggaaatatgagactgctcatgaaaaaagccagaagtacaaggaaggaaaatctgtaattgaacggtacaaggtgtcaggtcctgatggcaataacaataataattattgggtcggcaatgaagcacatgttggtggaagtaatgcagatgatgcttagtcatctgcctttgacaattcaattgtacattctttaatcccccttcttttgttgttcaaaacatctgcgttttgcccaaaagacaatttaaaaacattttattgttaattctgatgtaaaaaaactaatgttaaaacttctaatcaatgctgtccacctagttgtattattg

SEQ ID NO: 15652 - DNA, 360 bp, Glycine max
gaagacacgtcttttcgggtccttctttcgcagaaaaagcgatgattgattgcttctctctccacaattcttgcgcgcgcttctcttctcttccccaccaaactaaaccttttctcagtctagaattttcagaatttgaggtatggggaggctgtttgtgacccatctggaggggcagatctatacctgcaaacactgccgcacccacctcgctctctatgaagacatcgtttccaaggctttccacagcagacatgggacagcttatctcttcagtaaggtgtaagttatccttgattttagattttggaaccctatcattatgtgattactataaacaaaaactcagatacatgttct

SEQ ID NO: 15653 - DNA, 314 bp, Glycine max
attatagcaattcacacaacacaacacaggcaaataatcttcaaccattcttctttttctttcttctttatctcaattgtttgtggttactgtgcagattaatggggaggttgtttgtggtgaatctggaagggaagatctatagctgcaaacactgccatacccatcttgcgctttacgatgacatctactccaggacattccattgcagacatgggaaagcttatctcttcaataaggttgtgaatgtttctattggcgaaatgggggacagacccatgatgactcgggttcatacccgggctgacattttc

SEQ ID NO: 15654 - DNA, 427 bp, Glycine max
gactcaacaaagaatttgatcagtgataaaaaaaaaaaagaaagacgaatagagagaacccaatatgtctaaacgagccactctcttgactttggctcttctactgagcttcaatttaatctatgcctcccgtccaaacccttcacttatcagtgtctcttctttgcatggggatgttgcggctacaaaggcagaagagatagatggtgagagttgtgaagaagggacagaggaatgtttggcaagaaggacacttgctgcgcatctcgattatatctacactcagaaggataaactgggtcagcattcttaacggcatcacaggcatatgaattgcaatactataaataaattaatgtaccacacatatatgtatgtgtgtacttatttcattaacaaacaaatgctttgcttgaatgttcgcata

SEQ ID NO: 15655 - DNA, 506 bp, Glycine max
cttgactcacttggcaggccaagcaatgctgagtaacttgttgcccccatcatttatttgtgggtgctgtgatgaaaatagaaactgagatgatatcatagcctaattatgcttccatagaaatggaagactacgaaatgaagaagcaaacaatcaatggagataataagtggaagaatgacaaaggctagtgatttgaaatgaagatgatgccaccacgtgaagtggtaaggtggaggattcttgtacctaaaaatcacaaaaaatgtatagaatgtaggatatttgacgcggatccttgaggtctgttttgctttcctctcctcttgattttgtctcgtgatgttcaattttctttgtaacttgctgcatcctcattgtagcttattttgtttatgaatatgtgttagatcatgcaaataagctacaatgaggatgcagcaagttacaaagaaaattgaacatcacgagacaaaataagctgcatcctcattgtagcttatttt

SEQ ID NO: 15656 - DNA, 543 bp, Glycine max
gactgcatcaaaacaaaacaaaagggttttctattcgattcgacccatacttcttcaaatcgccatctcatcctttctcaccaaccaattacaaagactatggcgagcgcgggcaagtttccaagtccgactcccccatcgataatagaagtgaagaagccgccgccggcgaccataatctctggaccctctggaccctctggaacctctggagccttatacaactatgctgggaatgggaatagcaagacccaaactaagaatggaaaccttcttggcaaccgtcttggcaatgaaaagtgacaacaatcagaacaagaaaaagactttcaagtgaaaactcactcacttacttgcttcttggacagacagtttcatttcaatagctttggtgaatagtacatacatgatgatgctctagtaaaagtgttttgcttgtttcttaaattactattacagtattatgctttggtttttctttctagtacaaaaatcaattgcggtgtgtgaatttgtgaaataagaagaaacgaattcgttttg

SEQ ID NO: 15657 - DNA, 655 bp, Glycine max
tttcatgcgtccgaggagtgatagccacatgctccaatcaagattagtctctaacccagcaccaaaaggcaaaaaaagaagagtcaattcttcaatgtgacaccaaacatgtaaacatttacctaacatgatgctagactatggggagcaagggaccaagttggtctgaccaatggggaagtggagggtttgccagtgaccactatgagaaggaggaagaggagaagatgaagatgaagaagagtgggagcagcaagaagatggcagatgcaaaggctgtggcatcagctggaatggacaaggccaaaactgcagcagttgtgggtgcccagaaggtgaagagtggaacctctgctggcctcaaatgggtcaagaatcagtatcagaaaaggacttccaagtgaaactcactcactcacttgcttcttggacagtttcatttccatagctttggtaaataatacatgatgctctagtaaagtaaagtgttttgcttgtttcttaaattattacagtaattatgctttggtttttctttctagtacaacagtccagattaacttgttatttttatatatttttcatttgcttatagaaaaatgttggatgttaatcatgttataaatttaccctccacctaaaaaaaaaaaaaaaa

SEQ ID NO: 15658 - DNA, 423 bp, Glycine max
caacggggaatgcacgctagatccatatatcaatggcgacgaatcacgaaccggttttagggtacgttgtgctttacgtcaaagacgtagccgagtccgtggctttctatgccaaagccttcggctattctgttcgtcgcttagacgagtctcacagatggggagagttggaaacggggaacacaactattgctttcactccgattcaccagcacgagaccgatgatctgaccggtgcggttcataaccctggatcttgtcgagaaagaccacccatggaggtttgttttgtttactctgacgttgatgctgcttacaagcatgcggtggagaatggagcggtggcggtgagcgagcctgagctgaacgagtggggacagaaggttgggtacgtcagagatattgacggcaacgttgtgagaa

SEQ ID NO: 15659 - DNA, 516 bp, Glycine max
caattttccagaaggaatggcagtgttccttggatccttaaagggcctccgtgttggcctcaacttagcattagccattgctctgcacaatatcccagagggtgttgctgttgcacttcctgtttattttgcgacacaaagtaaatggcaggcattcaaattagcatcactttctggctttgctgaacccctgggagttataatcgtagcctatctattccctagcagcttaagtcctgagattctggaaggtttacttggatcagttggtggagttatggcttttctgacccttcatgaaatgcttccattggcttttgattatgcgggacagaagcaatctgtgaaggctgtctttttggggatggctttcatgtctgcaagcctgtattttctaagtatcagcttacctgaggacttaagcttgtaggtgggaacaacctcttctcttctctaaatgtcatgaatttcagtcacattgtgatgtgtttcctgattctatcacctatcgcagca

SEQ ID NO: 15660 - DNA, 315 bp, Glycine max
gggatggctttcatgtctgcaagcctgtattttctaagtatcagcttacctgaggacttaagcttgtagcaaagttccttcagaaggggtctcacagagtgtccaaggacaataatgcaccaccatgtgtttaggatacctatcaatcagacatcaattttagggatgcattccacctatgattgtggttcccctatagactaatgtacaaaaaaaaaaaaaggattaggagtacggcccctttaattcttttactgacccaccttgtatactgtatcatcaacgtgattggactttaaattgcgcaatttgcgc

SEQ ID NO: 15661 - DNA, 305 bp, Glycine max
ggagagaacaatttgaaaacagcagtggcagtgtttgcattacatgcagtgtagccgaaggcaatgagttccaaagagagttgcagaagtgaacttcgcattgcgatccgccaactcagtgatcgatgtctctactctgcttctaaatgggctgcagaacagttggtgggtattgagcaagaccctgccaagttcactccctcgaacacgagatttcagcgtgggagttcgagcattcgcaggaagtacaagactcacgagatcgcggggtacccaagcgcgggtgtttcgtatgttgccacgct

SEQ ID NO: 15662 - DNA, 440 bp, Glycine max
gatcccagagacagtgacagatataaattgaaaacagagaaagatgaacggcgacgacgacaagggtttgctgtggaagctcccagtggtgaagtccgaccactttggcaaggtgggccccgccttcggcatcggtgccggctgcggcctcggtttcggccttggccttctcggaggagtgggtgttggccctggaattcctggattccaagttggttttggatttggtgctggatgtggtgttggtttagggtttggctatggtgtggggaaaggaattgcacaagatgacaacaagagatactctaatgttggaaatcctttccgtggttctagaagcatcatttctgaggatgatattactgcacttgtggacgaccttgtcattaatactaaaaagcttatcaaggcaacatcaaaagaaattgacaagtggagaa

SEQ ID NO: 15663 - DNA, 1630 bp, Glycine max
ctcatctatctttgcttccccttagtcaaacaaagtaacacaccatccatcctctctctcttctcttcttctgttctctagtttcctgctcttgtttcttagaatccgtacggtctaatcaacacaacaaaatggatgcaattagttgcctggatgagagcaccaccaccgagtcactctccataagtcaggcgaagcttcttcgacgattatgtcgtccgagaaggcttctccttccccgccgccgccgaacaggctgtgccgcgtcggtagcggtgctagcgcagtcgtggattccgacggcggcggcgggggtggcagcaccgaggtggagtcgcggaagctcccctcgtccaagtataagggcgtcgtgccccagcccaacggccgctggggctcgcagatttacgagaagcaccagcgcgtgtggctgggaacgttcaacgaggaagacgaggcggcgcgtgcgtacgacatcgccgcgcagcggttccgcggcaacgacgccgtcacgaacttcaagccgctcgccggcgccgacgacgacgacggagaatcggagtttctcaactcgcattccaaacccgagatcgtcgacatgctgcgaaagcacacgtacaatgacgagctggagcagagcaagcgcagcgcggcgtcgtccggcggcgaggctccgccgccgccggcaccgcaaactcaatttccggcgcgtgctttactaaggcacgtgagcagctattcgagaaggctgttacgccgagcgacgttgggaaattgaaccgtttggtgataccgaagcagcacgcggagaagcactttccgttacagagctctaacggcgttagcgcgacgacgatagcggcggtgacggcgacgccgacggcggcgaagggcgttttgttgaacttcgaagacgttggagggaaagtgtggcggtttcgttactcgtattggaacagtagccagagttacgtcttaaccaaaggttggagccggttcgttaaggagaagaatctgaaagctggtgacacggtttgttttcaccggtccactggaccggacaagcagctttacatcgattggaagacgaggaatgttgttaacaacgaggtcgcgttgttcggaccggtcggaccggttgtcgaaccgatccagatggttcggctctttggggttaacattttgaaactacccggttcagattctattgttggcaataacaataatgcaagtgggtgctgcaatggcaagagaagagaaatggaactcttttcattagagtgtagcaagaaacctaagattattggtgctttgtagcgttacgttactttttttgagttttttttttttttggagttttgtgactgatgaaagaaagaaggtacaagaagaacggcggtgtagtggcatagtggcatcgcaagttgctgcaaaaggtgaattgtatattacttaatattagttgatgctgaaatattaggtgtaatgtaacaaaaaactgtacaaggagaagaaaaaaggttctaagaaggggagaagcctagaagaaaaaaaatgatgtcatcatgggataacggtttaatggtatatggtgataatattgttgaatgttgattattatgttcacggc

SEQ ID NO: 15664 - DNA, 488 bp, Glycine max
ccctcgagcagaatcggctcgagctctctaatgctacctcttagtcaaacaaagtaacaaaccatcctcccctctcttctcttcttttgttctctagatttcttctctcttgtttcttagaatccgtacaatctaatcaacataacaaaaatggatgcaattagttgcatggatgagagcaccaccactgagtcactctctataagtctttctccgacgtcatcgtcggagaaagcgaagccttcttcgatgattacatcgtcggagaaggtttctctgtccccgccgccgtcaaacagactatgccgtgttggaagcggcgcgagcgcagtcgtggatcctgatggcggcggcagcggcgctgaggtagagtcgcggaaactcccctcgtcgaagtacaagggcgtggtgccccagcccaacggccgctggggtgcgcagatttacgagaagcaccagcgcgtgtggcttggaacgttcaacgagga

SEQ ID NO: 15665 - DNA, 492 bp, Glycine max
gagttgtgtgttcgacgcgaaagcgcgtgagcagctgttcgagaaaacggttacgccgagcgacggcgggaagctgaatcgattagtgataccgaagcagcacgcggagaagcactttccgttaagcggatccggcgacgaaagctcgccgtgcgtggcgggggcttcggcggcgaagggaatgttgttgaactttgaggacgttggagggaaagtgtggcggtttcgttactcttattggaacagtagccagagctacgtgcttaccaaaggatggagccggttcgttaaggagaagaatcttcgagccggtgacgcggttcagttcttcaagtcgaccggaccggaccggcagctatatatagactgcaaggcgaggagtggtgaggttaacaataatgctggcggtttgtttgttccgattggaccggtcgttgagccggttcagatggttcggcttttcggggtcaaccttttgaaactacccgtacc

SEQ ID NO: 15666 - DNA, 282 bp, Glycine max
  unsure (1)..(282): unsure at all n locations
aaggcacaagttaccatggactaaatttgaacaaacagaaaagacatatcatcaccttcagacggggaggaatgcttttgctgcagtgctttgaatttaattttttctcctcagctgttagtatctctaatgaaaaatattttatgaacatccaatgtgttatatgacacccagtgaaaaaggaaaaagagtaaaaatatatgtattagaagttatattatatgatctaatgggaggaaacagataaagaaaaataataaattgttaacgtagtgttcanna

SEQ ID NO: 15667 - DNA, 671 bp, Glycine max
gtcttttcactgagtttttttttttattatttatttcaacagaggttcgcgtaccttctcgcatctttctcttcttcctaatcctcttcctttcatcttcagatctggatttttttcatttattttcttacgattttcctataatcattcgttattattttttttcaacagaggaaacgcgatctagaacttgccaaacggtgttggaatttgtgatctggtgaatcatgaatgctaggagagatggtcgtaacaacagagttgctctttttgatggtattgaggagggtggcatcagagcatcgtctctttactcctcaacttcttcccatgaaattgatgaacatgataatgaacaagcattggatggattgcaagatagagttaatctgctgaaaagattgtcaggtgatataaatgaggaagtggatagtcataaccggatgctggatcgtatgggaaatgatatggattcttcgagaggagtcctctcaggcactatggataaattcaaaatggtatttgagacaaaatccagccgaagaatgttttcgcttgtagcatcctttggtgtgctctttcttataatatactacctcactagggtaatgatctttctactaaacaggtattgaatccaacgagtaatgtccatatccgatttgcggtat

SEQ ID NO: 15668 - DNA, 482 bp, Glycine max
  unsure (1)..(482): unsure at all n locations
gttcttgaaaccctttcttagagtgtttaaagaccttgaatgcacgcaattgtatcctgtaaagatgttaacattgtgcagttttgtgctggtttaatatcttttactttatcaactatattgaagttttgaagagcataattgctgaaaacagttgtcaggtgatataaatgaggaggtggagaggcataaccgcatgctggatcgtatggggaacgatatggatccctcgacaggggtcctctcgggcactatggacaaattcaaaatggtattcgagaccaaatccaaccatagaatgttcacgcttgtagcatcctttgttgtgctctttcttataatatactacctcactaggtaatttgatctttcattcaactgccatctttatgttaggtccaagatgacgctatttcctctattactgtaaataatgctactacctctggctctgtaagataactgntctgtataaaggtttg

SEQ ID NO: 15669 - DNA, 257 bp, Glycine max
cttcgcatctgattttttgttttgtgcactttcttcgcttctatagtttccgtgttcatctatttgaatgatccgttaattaattgctataattttgttcctggaaacagagactggacgatctcgcgagccatgaatgctagacgagacaatcgtaacaatagagtttccctttttgatggtattgaggagggtggcatcagagcatcatctgtttactcctcttctcatgaaattgatgaacatgataatgagca

SEQ ID NO: 15670 - DNA, 718 bp, Glycine max
aggggaagcaggcaaacaaagtcatagaggggtggttgagaattttctttttccaaagaaaaacaagcgaacaactcaacgcgttctagtttttcttatagacaccttctagaaaaaaataactcaaccccaacattctcgtacgcttgatccttcctgggctgtcaacaattttccctcttttcattttctgtttctgaaaaatcataccttgaaattgaaagtcccttgttttttttttattccttggtgttttttttgttgctgtgagggaaatgtgccctttaaggtttatcttggtgttctcctccgccgtgctggcgggttattttgcgtggaaaacggtgcgttctgacccgaagatcgaggtgttttccgaggattctgccaatgaagataaatccttcaagaaggaagattttgatttcaagaagatgattcagaatggattttggggtttcgttgacatggctagtgggagctatctgtggaggaatttgaggccaaccaacaaagatgccgaattgaagagttcttagtgacctaaccctcttctttaatcatgagtctttgtttagtgatttgtcttgtggaaatgtatgtgtaaattattgtattcccacttctctttatccttgtttgtgggttcaagaatgtttggtggataaatttggccaaagaaacgttgtggaattctcacccttctgcaggttgtcgc

SEQ ID NO: 15671 - DNA, 411 bp, Glycine max
tggtggttgagaattttctttttccaaagaaaaacaagcgaacaactcaacgcgttctagttttttttatagacaccttctaaaaaaaactcaaccccaacattctcgtacacttgatccttcttgggttgtcaacaattttccctcttttcattttccattgctgaaaaatcataccttgaaatcgaaagcccctgttttgtttttcttttcgctggtgttgtgagagaaatgtgccctttaaggtttatcttggtgttcttctccgccgtgctggcgggttattttgcgtggaaaacggtgcgttctaacccgatcgaggtgttttccgaggattctgccgatgaagataaatcctccaagaagggagattttgatttcaagaagatgattcagaatggattttggggt

SEQ ID NO: 15672 - DNA, 826 bp, Glycine max
ggctgaaaaagttcaatgagtttcaagaacatgtatcagaagataattttgagttaattattgatgctatggagaaggtttattattataatccagatgagacatttgatgaaaaatctgctgccaatggttgtcaggaccttggtagcaaggaagtggtagaagctgtatataactattggatagaaacgcaagcgctaaagcgctctccccggcttagggttttccagggtcatcaatcaaagagagctccacttatcccgaagcccttgctgcgaaaaaggaggtcgttcaagagacaacctagtcagtttagtagaggcaatcaaccaagtgtgttgaaagcatttgcagctgaacaagatgccatggaagaaaatgcaatgctcaagattgaagaagccaaggccaatgcaaacatgtccatggaattagccataaataaacgcaaaagggctcaatgtcttgctcagaatgcagatttggccacctacaaggccacaatgttaattagaatagccgaagcagctatggctgcagaatcattagatgatgcagcagcatattttcttgattgattgatggttaaatcaattccattgctaattatcacaccacaaatttttattacaggatggggggtcataatagatttgctgctgtttagttgtaaaattgtacagatttttgcttgtatttataacttggatttaaatgataggccgcacacctatcttttgtatgagtaggttggttgatcctccttggaagaaagaaaactaaaaaagttgaaccgaaaaagaaaatacaggatttttatgccctc

SEQ ID NO: 15673 - DNA, 725 bp, Glycine max
atccctcaatttggttgcagagaacaactcagtcctcaaagcgcagcacggtagtggaatccctgttgttagccgttaagaaacactatctctatccctaatcgaaacgacaccgccggatctgttcctccctcctctcagattttgctgcaatgggcaagaaaaggttagattcaaagttcgatcgcaagttcgaaaagaaggtccaattttattccaaggtgaaagatgctgttacctccttgagtacccaaaagtctattactaagaaaaagaaaaagagcaaacaacaaaggcggcagagcaaattgaaggcatataatctatcttcacttttagagtcccttcccgaggtgaagtcatcaaagaaaccagtttgtgagaatgacggcaaacttaagtgtaaatccaggcagatattagtattgactgaaagagatcgaatttctgctgttctcaacgaccctaactttcgagcagatcccctgtctgccattcatcaatatatacagagcaaacaacttgtagtagaggaacaacccaagaaaaaagtgaacaaaaatggatccaaaaagatgaagaaatcaaaggcttcaactggattacaatctatggaaatgtagtgtctttgtgtggctgctataatgatctgcttttttcaaggtctttccataattttattaacttcttccgtaaaacattagaccgctcgaattatgtatgcg

SEQ ID NO: 15674 - DNA, 373 bp, Glycine max
gcagaacacacattaagaaacactatctctaatatccatcgagagagtgacacaaaaccctaaccaaaacgacaccgtgggatctgttcctcctctcagattttgctgcaatgggcaagaaaaagttagattcaaagtccgatcgcaaattcgaaaagaaggtccaattttattccaaggtgaaagatgctgttacctccttgagtgcccaaaagtctattactaagaaaaagaaaaagagcaaacaacaaaggcggcagaagaaattgaaggcatataatctatcttcacttttagagtcccttcctgaggtgaaggcatcaaagaaaccaggttgtgcgaatgacagcaaacttacgtgtaaatccaggca

SEQ ID NO: 15675 - DNA, 542 bp, Glycine max
gagtggagaagcaagtggcgaatacgacgtcgtgggggtagcgaacctatttccgaagcaagatcgtggacgttgttgggggttcagacagcgcaattgaaagctcaggagcattgttccgataaatctgtcgcaggaaaacaaaacaaaagggaaaggatgattagcattctcacccaggaacggcttctgggagcttcgttgggagtggtattaacgggggtggttgtgtttgagcaacgcagatacatctacgcttctatttccgattcccaatctcaggttaaagaacctatatttgggaagaagtcgcgttctgaatttgcacatgtatggaacaaaactgtggatcagacatttggacctttgataaagtctctcagctcacgtggatggtagaaatgttatgagtgattttatttttagtaccatctcttgtaattttgatatcaaaacatacaatacttggccttttattttttccttgacattctaaagtgtttgttaaatggttgtgctcatgggcagtgcttacaatgttt

SEQ ID NO: 15676 - DNA, 1409 bp, Glycine max
gcgtccggtttatgaatcttatccttacttgttcggtgttcgactctctcatttttacccaatatgagactttcacttcacacttgtcctccaatacctcgttaagaactcaatgttacacattaagaaatatgtaatattgttttatctagttattagttttaatgagttaagaaaatagattgcatatggattcatgcaaaaatgtttctttaatgtgtatgattgagatgtatccaaagttatattgtacatgaaataagcctcacacctgatgtactgagcatctgtgtgtttgaatgatccctaccaattcttgcagcactttcggaaatgatcttgaacccacaagcaactggctagaagtgattttcagtatatgcatagtactcagtggactattgcttttcacattattgattggtaacattcaggtattcttacatgcagtcatggcaaagaagagaaagatgcagctgagatgtcgtgacatggaatggtggatgaggaggaggcagttgccatcgcgattaagacaaagagttcgccattttgaacgtcaaagatgggcagcgatgggaggagaagatgagatggaaatgatcaaagacttgccggaggggctgaggagggacatcaagcgccatctttgcctcgacctcattagaaaggttcctctattccacaacttggatgatcttattcttgacaacatctgtgacagggtgaaacccctagtcttctctaaagatgaaaagataatcagagaaggtgatcctgtaccaaggatggtgttcatcgtccgagggcgcataaaacgcaaccaaagccttagcaaaggcatggtagcctcaagcatccttgagccaggagggtttttgggtgacgagctgctttcatggtgccttcgcaggccgtttatcgatagacttccggcctcctcggctacatttgtgtgtcttgaatcatcagaagcctttggccttgatgccaatcacttgaggtacatcactgatcacttccggtacaaatttgcgaacgagaggctgaagagaacagcaagatattattcatccaattggagaacctgggctgctgtcaacattcaatttgcttggagacgttacaggcagaggactaaaggtccagtgacccctgtaagggacactaatggaggcactgaacgcaggctcttgcaatatgctgcaatgttcatgtcaataaggccacatgaccaccttgaatgaaaactggtgtgtccatgatttttcttattgttgttggttattgatcctcaataaaattgtatttcaaatccattagacctgttgaaggtgaaatgtattaaaaaaaaaaaaacaacaaagtgagtacgagtaattgacaaaattattgagaccccttctttc

SEQ ID NO: 15677 - DNA, 411 bp, Glycine max
aaaaaaaagccacaatcaagtgtcatttttctcccttctcattctatttattcaagggtgggagtagtggttttttgtgtgttttctttcctttgtgcaacaacaacaactgaagatgaataagcatcaagcgtcagagaagaagaacgataacatggagaagccactaactccattgatgcctcctcctcctcccacacttgaaaggacaacttccattgatgatgagcctaaaactttgcttgaggaggagatgaaagttgcaagggaggcagctctcaaaatcatcaattctcactcaaaagaagatgccctgaaaatattcctggcgggtttggtgccagtgggaacaagctcaaagcaagtgaaagaagatggtgtcgtgtctgactacgatgacgacgacgaatg

SEQ ID NO: 15678 - DNA, 426 bp, Glycine max
ggcacaaagaagaatcaatgtgtcacccgggaattccttttgtgaaccgagaagggttgatggtgcatagaagatggcttgtgtcatcaccactggcaaggcagattcatgatggtggcagctctggagagagtggttcggtgcagcgatgcgtgtgctctccgtcgcagcatccggggtcgttccggtgccggttgcatcatgtcaagtatgtatggtgtggtagaacaattaagtgatgggatgttatacaattctaagcgtccataaaggttctggtttataagcatgcatgtaaataagtgtctcctcttttcctccttcaccatgaatggtgagagaatttgagaccacaaaaagtttggaactaacttcaattgtgaattataatgaccaacagaatactgtttttccttggttttcccg

SEQ ID NO: 15679 - DNA, 581 bp, Glycine max
ggactaatcataagagggtgggcgcctcaagtgttgattcttgaacaccaagcgattggcacgtttgtgacacattgtggatggaattcaacgttggaagcagtgactgcaggggttcccatggtcacttggcctattttcgccgaccaatttttcaatgagaagttggtgattgaggtccttaaaattggggtacctgttggtgctaaaacatggcttggaatgcagggagatagtatttcatgtgatgcagtggagaaggcagtgaagaggataatgacaggggaagaagccattgaaatgaggaacaaagcaaaggtgctttcacatcaagctaggcgggccatggaagaaggtggatcatccaactctgattttaaagctttaattgagggattaagttcgttgagccactaatataccaccatcaacactatgcatgcatttactctcaagattatttgttatctaaattttaatgatttaagctaaaatagtttaaaatcctgtcgacctaatttttttttatctagtgaaaatcaaatactatttataataactcaatcaacttaagttttaat

SEQ ID NO: 15680 - DNA, 499 bp, Glycine max
ctcttacacatacatagctagcttcaattcctcccatggcagacccacagcaacaagacaactacatgaagcgaaagccttccaattccaatgttctcgtcctcgccgccctcgtgcctttcggcgtctctcttctcatcctcgtcggcctcaccctctccgccaccgtcatcagcctcaccgtcgtcaccccactcttcgtcattttcagccccgtcttgctccccgcggccctattcatcgctctcgccgtcgccggcttcctcacatccggagtcttcggcatcacctccatctcttcctttgcttggttagccaccaatctccgccgctcacactcaccggaacacccgcaacgtcctcgggacgacgcggaccgcgtggcccagaaaaccgatgaagccgtgcgtcaggcccaggaaacagcccatcaggcccaaaaagagaccgcaaccaaggcccagaaagacattagtgaaacaagaaaagcccacaaaga

SEQ ID NO: 15681 - DNA, 519 bp, Glycine max
  unsure (1)..(519): unsure at all n locations
ntccgcccacgcgtnccgctctccctcacagtctatgtagatgatgcacttccatttcccattgcgggcattctcaaatctcaatcagtgcaggcacagaatcctttgaatcaacttctcctagataatgtaatggataatcaaattaccttaaaaagaagaatcctggtcgcatgatttgacagtgattagcacaaaatgcatctggcttccgctcataaatccaacttctaattttccattacgctcaagccgcacaaccaccacctctttcattttcaaccatagaacaagataatcacagtccaagtgcattaggagccaccagtccacagtacagcagaggtggactcttcagggcatgacagctctcgtcactggtggtactcgcggaattgggcacgccattgtggaggaattgacggggtttggagccagactgcatacctgtgccaggaatgaacatcatctcatcaagtgcctcacgaactggaatgattccggttttgatgtcactgg

SEQ ID NO: 15682 - DNA, 721 bp, Glycine max
ggcacaacagggggtaggtgaggaaaactttggacaaaaaatggagtgctacacaaggccaaacaggagtgacatccacctctcagcagaggaagaagccaccatagaagcaaagaccagagagtactttgatggagtcgcaccacaacgccacacaaagcctcaacgaagtgactattcagctcaatatgtcgatgctttctccaatgcccatcactcttcttctactctataccagaattaacacaattccaactcctccagaatgatccccaagagaaggttggttcctaatatcatctctaattttttcttcttcataatttcacttttatagaataataacaaaagaagtaataaaaaatgaaaattgcgtcccgtcctaaccgttggactacaaacgcttgtcatgttacttagcattactttttgaacttaatataaaaataatcttgaataagtacccagattattagttatctgattcacttctgattttggagactttgagttatacaaattatgtttttcttttaaataaccttcgtatgggctagatctgttatttatttaacaaaagggttgacgtagtggtaagatctcattgtgttcagatgtggaataactcatttaacagcagaatttttcttagactaacaacagttacacaccgtgttctgacccaaaaaaaaaaaaaaaaaactcgagactagttcctcgt

SEQ ID NO: 15683 - DNA, 898 bp, Glycine max
  unsure (1)..(898): unsure at all n locations
cccacgcgtccgcccacgcgtccgcccacgcgtccgggaaaactttggacaaaaaatggagtgctacacaaggccaaacaggagtgacatccacctctcagcagaggaagaagccaccatagaggcaaagaccagagagtactttgatggggtcgcaccacaacgccacacaaagcctcaacgaagtgactattcagctcaatatgtcgatgctttctccaatgcccatcactcttctttaactataccagaattaacacaattccaactcctccagaatgatccccaagagaagaaattggtgtacaatggaagtcaagtaccggaagaatttgtggaaacagagtattaccaagatctcaacagcgtggacaaacaccaccatacgactggaacaggatttatcaaagtagagaaaaatggaaatgactttcacatagaaccagataatgacactggttgccatcactcttgcaagtgcaatccagcaaccaatgattgggttccttctccttccaacgaggtgggtttcaattcagacaaacctaacaggagtgacaactaagaatggaggagtggttacatgaagatatcaatatctcagcttcttttcagattgtgtggattccacgtggcgtttagagttgcaaaccaaataaatttaaataaacaaaaaaaacttgtgagttggattcaaggttattgtgtttgagatatggtactagttagcatttcatcttgtatcattgatgattgatgtcttacattcctggatatgtctttaatcgcatacatataaagatttttaaagcaaactaatattntagtgatgcatatattaatcttatgatgatgtcatggacacagtcttttcactatatgaaaggcanaagtgact

SEQ ID NO: 15684 - DNA, 428 bp, Glycine max
  unsure (1)..(428): unsure at all n locations
gatgcttcgggggaaaaggagggtgaagaggagactgtagacacagctgctgcaaagaagaagaagaagaaggaggaaaaggagaaggagaagaaggcagctgcggcggcagcagcagcagcagcagcagtagcaggaactgtaccagaaaatgaaacagcagaagataaagctgaggtaattgaaccaaagaagaatgattcaaaggctaaaaaagcagctgataagaaagtgccaaagcatgttagggagatgcaagaggcactagctcgaagacaagaggctgaagaaaggaagaaaagagaagaggaagaaaggttaaggaaggaggaagacgagcgacgtaggcaagaggaacttgagagacaagcagaagaggctagacgtagaaaaaaaaatagaaaaacataaanaatgaaactatctag

SEQ ID NO: 15685 - DNA, 426 bp, Glycine max
acgaggtgcatcagaaatttcccaacctcagaatttttgcactcaaaagttaaaaccctaaccctagcaatcagaagaacaacagaagcagagaaaaatgacgcagaaggcgaatcttttcaagggtaaagcaaagaagaaatcaatacctcccaatcgtcatgggaaagtccctgttactcgtaaaggaaagagattcgtgaagccatccaaggttacaaaggatatggatactgatcgtgaggtgagcaaattcattaaccactgcaatgagatcaaagcagcgactctagcaacgaaggatggtgggcaactaggcatcattaagccgccacaagagccagcacgtaaatagtttatgatccgagaaacaaagatggttttgaatgtaccctgtgaatggcgcattgtccttgaagcctttgt

SEQ ID NO: 15686 - DNA, 635 bp, Glycine max
acgcgtccggagaattcgacttaccattattaacaatctgttgaaatatcatcctgagtccagtgaactactagcgatgggtgaagtgtttggcataaaggctccaaagaaaaagcttgatgatgatatcaaaactcgtatacaagttaaggaagatggacccaagaggagcttgctatatatagagacagcagataggccgggattgctggttgaaatcatcaaagtcattgcagatgtaaacattgatgttgaatcggctgagattgatacagagggtttggttgctaaggatacatttcatgttagttacggcggggctgcattgaacagttcaatggctcaggttttggtgaattgtctgcgttactacctgcgaacgccagagacagatattgacagttactgaagaaaccacccttgtaggataagccaatgcaatggttctttcctataccaaatcgccagttactgctaccacattatggaatgagttatgagtacctgtaactaactatggaatgaatacgtgttgcctgtggtatggaatctatgaatacctgaaactcactgaacgtccgttaaatctgatatgaaagctaaaaaaattgaaaatgaattttgcctcatttccc

SEQ ID NO: 15687 - DNA, 361 bp, Glycine max
cgcaggtttggtctagttgagtaacatcagcttgtgagccaggtgggtacaccaaggtagtgggacaggtctctggcttagccaggttgggttggtggctgcaccatgctgcctgcccgctccaagttcagagttgaactatgagaactgagtgaagacacaggtctcctggttcctagacaaggggatactgcgtgaggctgccttcacagagcagcgttcacccctgcctcttcacagtggagggaataccggctgctgcactgtcagcccatataacctttactttttttaaaaaaaacttaattacaatttaccaacaaaaaagcttccattctaaaggatccaagcttacttactc

SEQ ID NO: 15688 - DNA, 1319 bp, Glycine max
aataattaataaaataataataataatgaataaaaaaatcaaataataattaataaaaagaaaaaagtgtaaatcaaatagaaatttataaaatctatgatcctagagtagttccctagacaaaatagaagtaagttcacaaacaagattcaagaataagattctctgatgaaaggagagaaatatgtctgaggatccgctgggtataaggagtgaaagaggggatcatttgtttcttgaacagttcttttaaaaaaattttctatcggatttttgagtcataggagattttatgatttatgacttggaggatttttaagaatagaaaggaataactacattgagttcatcgatttgccctagatatcaatagactcataaattattttttatttcgaaaccaattaaaattaaaaaagaagggaaagtgtacgagaaaattatctctctctatatatagatagataaatgataaaagcctcgagggtccgtcccatccctgaaaatgctatgaggtgttgggaaatggttgaagtagttgaataggaggatcgctatgactatagctcttggtaaatttaccaaagatgaaaatgatttatttgatattatggatgactggttgcggagggaccgtttcgtttttgtaggttggtccggtctattactcttcccttgcgcctatttcgccttggggggttggttcacaggtacgacctttgtaacttcatggtatactcatggattggcaagttcttatttggaaggctgcaacttcttaaccgctgcagtctccactcctgctaatagtttagcacactctttgttgttactgtggggtcctgaagcacagggagattttacccgttggtgtcaattaggtggtctgtggacttttgttgctctccacggcgctttcgcattaataggtttcatgttacgtcaatttgaacttgctcgatctgttcaattgcggccttataatgcaatcgcattctctggtccaattgctgtttttgtttctgtattccttatttatccactgggtcagtctggttggttctttgctcctagttttggtgtagcagctatatttcgattcatcctctttttccaagggtttcataattggacattaaacccatttcatatgatgggagttgctggtgtattgggcgcggcactactatgcgctattcatggtgccaccgtagaaaatactttatttgaagatggtgatggcgcaaatacattccgtgcttttaacccaacccaagctgaagaaacttattcaatggttactgctaatcgcttttggt

SEQ ID NO: 15689 - DNA, 326 bp, Glycine max
ggcctctgccgtttcctccttattccacaccacacgttcaatatatggaagaagcactttctccttctatctcccacctactttatctcctccttctttacctatgaaccaattaaacaacacacttcatcacaaaactttctttattccatttcctcaaacttagtttatatatatatattaatctatttctcttgtgtcatgggggctggtgtttcttcatgtaataaagttgaaaaagaaggaggagggtctatttcttcatcatcaagagattcaaggccccgtcctggttaccttccaaaaaggttcattttcttcctggt

SEQ ID NO: 15690 - DNA, 566 bp, Glycine max
agatgacctcaaaactttctatgaggacactcaactagacaaacataggcagactctggagagagttccagaggttcaaccatacttctcttcttccctttacatccgcactgtttcctctcctacagccataatggttcgcattctgacggaaaatggcggagtggaacgcatggaggagatcatcagggaccatttggaccccatttcaaagcaagtgttggggatctggttggatcattgtgcttgtgccaagcgacaagttggagaggcagaaagagcttatcttaagaaaagggatggtctcattagaaacaagaccattgagattgatcttggttcaagctttcccagattgtttggtccagaagtagcaaaccgggtactggatgctatcaaggagtattttacagtctgagatgcaaatttatttggaattgttggatattctatgtattacatacacgtacctaatttgctgtgcaatctaatgaggcctcagtattttctgaatctctctagtcaagtatcccctctgtaaatgattatgatcgtttctccttccc

SEQ ID NO: 15691 - DNA, 454 bp, Glycine max
gggagtggtttagcccaagaagaagtggaagggtggtggcacttgggttggtagcggcgaagaacgtcgttaatggaagaagagaaagaagcagtgatggtaacaccgggagaagtgttgggtagaaccagcgatgtcaaagctggaagaggagcatacgcggcgcttcacaacaacaccgtatacgcctccctaaccggcttccgccacaccgtacctcccgcccccgactcttccgacctgagaccgactgttgaagtaactggtcacaaggcccatggacctgttccacagcctggatctgtagtcattgctcgggtcaccaaagtgatggctcggtccgcttcagctgatattatgtgtgttggaccaaagtctgttccagaaaaatttactggcatcattaggcagcaagatgttagagcgactgagattgataaagtagacatgcact

SEQ ID NO: 15692 - DNA, 579 bp, Glycine max
aaaaaaccttcacctaccactttataaaacccgtcccttctcttctcctttcccaaatcatttgatcactctgtattgtgttttgttccttccttggttcgttccctccacaaaccaaaaacccaacaaaagaacgttcatttttcattttcgtttctaataaagagcatggccggtggttctatcaagagacattctttctccgaagaggaccatggtttcgcttcttccatggagcctgggtattctgggcacaaccaccacttccatcatggtttcgtgtctaggactttgggttatggcactttctacaaccgaggtgttaggagccattcgattttctcgccgagatctgggagattttatgatgcaagattcgaagatcaccaaccccactttcttcaagcttgttctctttgcaagaagcgtctcggggataatagtgacatcttcatgtacaaagggacacgcctttttgcagcgaagagtgtagacaagagcaaatggagagagacgaagccaaggagaagaataataacctttcttcttcgatgaaggctttgagaaaaaaagagcaaa

SEQ ID NO: 15693 - DNA, 474 bp, Glycine max
ccggggtcacccacgcgtccggaaagaagacgacagaaggggaacgaacaaaacaaaaaaccttcacctactactttataaaaaccgtcccttctcttctcctttcccaaatcaattattcatcactgtgttgtgttgtgttgtgttgtgttgttccttcgttcgttccctccactaagcaaaacccaaaagacattcattttcgtttcgtttgtatagagcatggccggtggttctatcaagagacattgtttctccgaagaggacgatgtggagcctgggtattctgggcacaaccacttccatcattaccaacacggttttatttctaggacattgggttatggcactttctacaaccgacgtgtgaggagccattcgattttctcgccgagatctgggagattttatgatgccagattcgaagaccaccaaccccactttcttcaagcttgttctctttgcaagaaactc

SEQ ID NO: 15694 - DNA, 499 bp, Glycine max
ggttctcgcaactgttcagtttggttcttagaccgtttatttcctatccaaccttgccgtgtctgattccatagaataagaccatgattcacaaactcagtggggttgcatgaacctccatgaggatctgcagcttggtttgttatactggctgatgagatgcttccctgtgactgaacagcactgttgtccatatcatgcgtgctggtgatccagaaatcttctgatgtgctaggtttctttgctgccttaccttgtttcctcaatccttttggcggaacatctgcagtagcaattagtgggggctttttaaagggtccaagacaaccactgctcccatatgcatgcagtgtagtgagatctgctgcaatgaagaagacagaacccgattccagggagtaatcctgtcgtggctggctgtgttcctcccttccgatgagggaggggactgccgttttcgactctcttctgtttcttcttcttttccacctatagagcc

SEQ ID NO: 15695 - DNA, 520 bp, Glycine max
aactacactcagaccacatttcatatattatatcaacatgcatcaggtacattttgccagacacagaatggttcgcccaataatgagcccatgggttaactaattttgtcttaaacaaattcaaccaataggtgatttgcaaagctgtataatttatttttttctttaaattttttcatatgttaatgtaatgaaataccagaaaaataaaagcaatgtagtacaccatgattcacaaactcagtggggttgcatgaacctccatgaggatctgcagcttggtttgttatactggctgatgagatgcttccctgtgactgaacagcactgttgtccatatcatgcgtgctggtgatccagaaatcctctgatgtgctaggtttctttgctgccttaccttgtttcctcaggccttttggcggaacatcccatatgcatgcagtgtagtgagatatgctggctgtgttcgtctcccttccgatgagcgagtgccggtttcgacgctctctctctctcgtct

SEQ ID NO: 15696 - DNA, 474 bp, Glycine max
cgggtcggcccacgcgtccgagctacgaagacaacagaagggggcggaagcaaccgtctctttttatctgcggcaagtttccaaagcagcaaacaacaaacccacaattcttcttcttcacttccctcagcattgccgttctcaaagatggcacatttgctggcaatggtggtggaaggtgttggaggcttcgtcaaaacgctttgggctcttcaagaacggcgttggtcctacaccttcgacgctgtggcctctgctgcggtgtccgtgaccatggcattggtgctctgcttgttgtctattcgtactagttatagacatagacgaggtgatatgttgtttgcctctttctgatgtaactactgtgtgtttctcttcttatccgttcagcaatttttatcaaaattcctgaattatgatatcttggttgccacgcagaacatcaataaagaaagattagccgtgtttttattc

SEQ ID NO: 15697 - DNA, 474 bp, Glycine max
cgtccgaacgcgaaaagacgacagaagggggaaattggacaataacaaataccgattccaccaaacacaacacagaaaatgcaaacaccaaactgcgaagccgagaggcgaatccagaggctaaccctacacctaaaccccacggcgttggtcgcggcgaagcagttggagatggcaacgtgcgctcgcgggaagctgagcgtggacacgccgtccttgtctagttacatgcgagggaaacacgtggacattcaggagaaggtgttcgattacttcaacgcgaacccgcgccttcaaactcccgttgagatctccaaggacgagcatcgcgacctctgcatgaagcagttaacgggactcgtcagagaagccgggattcgacccctccgttacgtagtcgacgatcccgctaagtacttcgccattttggaagccgttggaagcgttgacatgtcgctcgggatcaagatgggg

SEQ ID NO: 15698 - DNA, 454 bp, Glycine max
caactcgctcctaccaagtttatccttaaaactttaagtatatatgtggtgacgaggttttaaaaatcaaatcgcgaatcatcactttaacgaagcaaattggatatttgttggattattcttcggctccaccttcacctttaataaggcctcatctccacgcgacagtgtattgcgcacacatagaaatttccttaaaaaaatgtctgagaaggctgctcttggatcatggtcgagtggcttgtgcggctgcttctctgactgcagcagctgttgcctcacgttctggtgcccttgtgctagtttcggaagaataggaaagatcgtggacaaaggaacaacttcttgttgtcttcatggatcacctttctgcctacttggtggtttctcttatttagccggtatctacgcctgtatgtaccgtacaaaaataagaggcaatacgggaatgagg

SEQ ID NO: 15699 - DNA, 686 bp, Glycine max
attaaatcggggaacggtaaatacccaatgccggtgaacacttcgggtggtaatgtggacgtaagaaaacacaatgttatggcggtgattgcttatgttttggtggcatttgtggcaactcaattaggtggcccttcactgccaaagttgcattaaaatggctgggctatgactttctattaattaatacacagtgcatgatggcaatggccagtctctatcggttgggcgatcaacttgcatcagattcttacttgtgtgtgaagagatgcaatgggaaccggtgcaaagattgtcacttctcaacttgtaaaactaaaacattaatttgccatgtcttcatatggagcacttatttagagtaggaaggttcagatgcacagacagaattaggcagctgccttttacttcggctcacgagtctcataccattcatgtgttgtcctctatcttcagagacaaacaggagggcattttgggaagaattgtgacatttttataaataaaatgccattgcctttaatttgctccaattgtaaatatgaacatcaagtttattgaggtgaacaaggagtagaacaattttgcatttgctggagcagttattttctcgcctaatggcaccagatagatgtatgtgcgtttgacctacttttatatatacatatatatcataaattttgctt

SEQ ID NO: 15700 - DNA, 174 bp, Glycine max
caaataacaggaggacattttgggaagaatttgtgacattttatgaaaataaatatcattaccattaatttgctccaattgtaaatttgatgttcatatttacaattggagcaaattaatggtaaatatgaacatcaaatttattgaggttaacaaagtagtactcaaattttc

SEQ ID NO: 15701 - DNA, 251 bp, Glycine max
cttcccttcccttctcttccctctcacactagggtttacctctcttcacacttcacacttcacccttcacacttcacacattgccatttgaacactatttgggaatagtgggtcagggagtttaaaggagtggtcttttcgttttcctttgtatcctttacgacttgggagattataatatgcagacaccaaaagcaagagttggtgcttcagaagtgccccaaaagaaatctcctgcaactcctcgaact

SEQ ID NO: 15702 - DNA, 322 bp, Glycine max
ggaaccgggtattgcgcacgctccttctttggagactgtttccgacagagggtgaaactgaaactcccgtgtcggggtgtttacactgcactgtcacaatgacatcctccaactctccgaaacctgaaaagaagataaccaaaaacacagaaatctccaaaacccaaaagaagaaaaccaaaaacgctgaaacccccaaaaccgaaaagaagaaaaccaaaaacgctgaaacccccaaaaccgaaaagaagaaaaacgctgaaatccccaaaatcgaaaagaagaaaaccataagcgctgaaatccctctaaccgatggcaa

SEQ ID NO: 15703 - DNA, 398 bp, Glycine max
ggtacattgcaagcaacaacaacaacaaccactccatcatcatcaattcatcacaatggaacacaccaattacaatgatgttcattgtgaagaaactatagtaaacgctcctttctcatgggaacacaaacctggtctctctaaagtgactacacatggccaaactggcactagcatggtgcttcagcctcctccatgttcatcatcaggatctggaagtgatcatagatataaagtggaggaggagtctcagattcttcgagccgtgcaaacctcactcagaatcagctcttttcggatggagagtcagaaggaagaagacccttttgttgaagcttacaagaaatgcactcaaagcccctttatacatgaacagagtgatagggtccaaaagaaca

SEQ ID NO: 15704 - DNA, 480 bp, Glycine max
  unsure (1)..(480): unsure at all n locations
ggagaatcccaacccaagtttccaagccaaaaaagcagattcctctctatctctctctctcacgtaaacaaaagttacaaaaaaccaaacaccccttctcccaattcccattcccaccagaatcctccattactccgagacccagcacatgctagctccttcttttctcatttctttatttgcaaaatccacacaccctaaattcctttcccttcgaagaatcccttacatcaccgtaacccaataagaagtacctcatttcgctatctcgatccaaaacaccagaaaaaaaataatgcttacgtgcatagcacgtccgaagaaactcgtcggcgactcggcagcgagcgaggatccgagttcgcggggagtgaagtcgctgacgggtcagctgaaggagatggcgctgaaggcgtcgggggcgtacaagcagtgcggcgggccgtgcgcgacggcgccgncgagtcgagtgagtcgcgg

SEQ ID NO: 15705 - DNA, 1074 bp, Glycine max
tacactgcgacttgaaaccagagaatattttggttaaaagctatagtaggtgtgaggtgaaggtcattgatcttggaagtagttgttttgaaacagatcacctttgctcttatgttcagtcaaggtcctatcgtgctcctgaggttattttgggacttccatacgacaagaagattgatatctggtctcttggctgcatcttggcagaactttgtactggcaatgtcctcttccaaaatgattcacctgcaacattacttgctcgggtgattgggatcattggtccaattgatcaaaatatgcttgcaaaaggacgggacacatataagtacttcaccaaaaatcacatgctttatgaaaggaatcaggccttcacctccagcaagctggagacgctccaccaccacctctgccatttcgcacagttgaaggagttggagatcgaagaggtgtgcaaggctcactgccaggacttcatcctcgccgtcaacaacctccgatccctcctctccaaggttgattcgctcaagtcctctctctccgatttcaactcacggctccagcacgtcacgtgtctgctcctcttgccactcaacgcctttgttgagaatgcaattgtctcgaagaatgtgaacatcgccagccatcaactcggtccacacggacaaaccaccacttagtggacgacaacttctgatcaagcgtgagtatggacaaaacggtgtcggccatgctgaagcagatgccggagaagattatagagattcaatcctacatgagagggaagcgaacaaggtccctctgtacctcttttacttcaaaacaccaaagcttgaatcatttcccaagtggcggtataacccaagtcacacgttgcagcattcacaagtgggtgttcccctccctctgccagcgtagccactgtgatcttctactaaagatagatctgctttaattcttatgatttttggtattctaaaattttgatgtagatctgttcaccgttggacatgtaaagcaaattatgatgctcagaaggtgtttgataaaagttgagtcaaattgtttcttgtt

SEQ ID NO: 15706 - DNA, 641 bp, Glycine max
ggcttcacaactctttgcttacaagcagtggctccacatgttgcagctcgagaacctgtgtctgcaactcagaaacaaaaaccagtcatttccaaatctctttccagcatccttaccctgggacccatgcaggggaaggctgcttaagaaaagtcatagcaaagctaggaagaggaagaatagtaacagaagatgtgtgattacaaagtgtgctgttgcttttgctgtgggattaggcctcgctggtgctggtttgcttcttggttggacaatgggatggatgtttcctcccttataaaggacattgactaacatcaattgcaggcttctgctatgcttttctggaatttgagttctgttgttgtgctgataagattgacacgagtggatatatgatgttaaacatggtttccgttgccatcatttgtaaatactcctcatacatttgagaccattagttgtatatatttaagaacatagtgcagaaagatccccctaataggaaaaaggcttagttgttgttgtagtgcagaaggaatacgtttggtagatttggatatatgctttgctttaaatatcaaattgtacttagctacttgaactacttgaaatatgtacaaggccatatgtagtcctttatt

SEQ ID NO: 15707 - DNA, 472 bp, Glycine max
ggcacaaagcagagctaaattcaaccaacaacaggcgcaacattttcatttcccattatacccctctgcgcagaagacctcagaaaatatttcgatggcgggaaccctaaatctcacgcctctcaccggtgccggcaggactctccggcctccgttcaggatctcaattcgggcattcacggcgacggcgatcgattcccggcgagcggcgagcctctatgaggtgctccggatcaagcagaacgcttcggcggtggagataaagtcggcataccggaaccttgcgaaggtgtatcaccctgattcggcgctccgtcggtcggaatcggacgaacgggacttcatcgagatccacgacgcttacgagacgctgtcggatccgtcggcgagagcactgtatgatctgtcgttgatggcggcgcgcgatgataatcgctcgttctcgtctttggttgctgctccgaatggctct

SEQ ID NO: 15708 - DNA, 428 bp, Glycine max
gattgatccattgctgtggttgtgggtgtgatgtcagagaactacacactggaatcgttcaccgtcgaaggcagcgacggagtgaagctccgtacaagggtgttcaagccagatgctggaacagaagcggatgggaagttggggatcgttctggtgcacccgtattctattttgggtggctgccagggtctcctcaaaggaatcgcttctggcttggctctcaatggttacaccgctgtcacctttgacatgagaggcgttggcaagtccaccggcagggcttctctcaccggcttctccgaagttaaggatgtcgttgctgtctgcaactggctttccaacactttctctcttcccaggattttgttgcttggttcttccgctggtgcacctatagcagggtctgccgttgatcagattgaacaagt

SEQ ID NO: 15709 - DNA, 440 bp, Glycine max
ggcatttgttgaactcactccttcagttcagttcagaccaaacttggctacatcgtttgatattttgaagtctttgtgattgagaatgtcgtacactctgtgctttgctcccatttgttccttgaaatccccaaacagacctgggacaattgccggtaattcagttacccaaaaggcttttgggatgaacgaagtgtgtcagaattctaaagttccaagctttcagtccttgaaggttaaggctacagaagataaaactacacaaagcaaaacaattaggagcattgtttgttctgattgtgatggaaatggtgcaaaatcatgtactcaatgcaaaggtactggagttaattctgtagatcacttcaatggacaatttaaagctggtggattgtgttggctatgcaggggaaaaaaggatattttgtgtggatcttgta

SEQ ID NO: 15710 - DNA, 418 bp, Glycine max
ggttgttaccattaccagcaagttaaagagtgtttattcagagtacttgaattgaggttccgaatggcacactctctgagttttgctcctatttgttccttcaagtcctcttgcacacaaggggcaatttccggtaattcggttgcccgaaaggcttttcagataaatgaggcatgtcaggattctaaggctcgaaactttcaatctttgaaggccgcggatggtaatccaagcaccaaaacaaagagtatagtttgtcctgattgtgaaggaaatggtgcaatattatgcactcaatgcaaaggtactggagttaattctgtagatcacttcaacggacaatttaaagctggtggataatgttggctatgcaggtatgtgcactaaatatcacatttctggttttggctctaaattt

SEQ ID NO: 15711 - DNA, 428 bp, Glycine max
gacgacagaaggggatagcaaataaacataacaatttatatatataaatagtgtattttgctttagatattttgagtaacatggcatccctcaaggctgacaaacccgttggcactcaactttttgggcagggtaaaaaggaagctgctcccaaagctagtgatggtgcatcatccaaatccaagggttcagcttccaaatctgctaccaagaaagttccagtacagaagccccaagaatccaagaaaaagggaaaaggaggcaaatcatctacaaagcactagccagaaagccttattaatttactgaaggaaagtgtggtttaattgtaagaataaaaagccacacaaatattggatacaataaaaattgtaccttgttttcctattcagtcaaggtatcttggctgtctatgtgatcagcttgct

SEQ ID NO: 15712 - DNA, 652 bp, Glycine max
gggcgacccacgcgtgctcccacgcctacgacggctgctagttgacgactgggggggactacctcaagcataacttgcatagactattgattaagaaagctattgtcattgatttgctagctccaacaatgggttctagcagattatcattcattttagtacttgtgcttgtaaccttttcatccatgatcattgactcaagggttgcagaggcacgtaccctgccaaaatcagccttattgccttccaaagttgatatacctactgttgttcctcttccactggtggcaccactgccaaatttgcctgttactctccctccagtgcctgaactacctgcagtacctaaagtaccaattcctgaagtaatagttaataacgccaaaataatcccttgagtacctatgatctatccagtcactactacttattttgtcacttgctaaattaacttgttgttgccatcccagggtggttctggttctgttggggtttaatttctgtcattcaattacatgctatgttcagtttatatgttgcttcagtcagttgaacttcagcatattatttattgtgacctgtgtaatgtaatgtatcaacttatcttctagttcaataaattctggaatttctgaatactgtcatcatggag

SEQ ID NO: 15713 - DNA, 572 bp, Glycine max
acggcataacttgcatagactattgattaagatagctattgtcattgatttgctagcggcgaacgatgggttctagcagatggtcattcattttagtacttgcagaggcacgtaccctgccaaaatcagccttattgccttccaaagttgatatacctactgttgttcctcttccactggtggcaccactgccaaatttgcctgttactctccctccagtgcctgaactacctgcagtacctaaagtaccaattcctgaagtaatagttaataacgccaaaataatcccttgagtacctatgatctatccagtcactactacttattttgtcacttgctaaattaacttgttgttgccatcccagggtggttctggttctgttggggtttaatttctgtcattcaattacatgctatgttcagtttatatgttgcttcagtcagttgaacttcagcaaaaaaaaaagcaacaataagaaaaaaatgttaggactgatgaaaaaattaacaataaagaattattctgaatatgctgctttagaatattctttattgtaaataaattaataaaa

SEQ ID NO: 15714 - DNA, 275 bp, Glycine max
tattgaactagaagataagttgatacattacattacacaggtcacaataaataatatgctgaagttcaactgactgaagcaacatataaactgaacatagcatgtaattgaatgacagaaattaaacccctgcagtacctaaagtaccaattcctgaagtaatagttaataacgccaaaataatcccttgagtacctatgatctatccagtcactactacttattttgtcacttgctacattaaaccccaacagaaccagaaccaccctgggatg

SEQ ID NO: 15715 - DNA, 272 bp, Glycine max
ataagctcttggtcattcatttgctagctccaataatgggttctagcagattgtcattcattttagcacttgtgcttgtaacattttcattcatcatgatcattgactcaagggttgcagaggcacgtaccctgccaaaatcagccttattgccttccaaagtttatatacctactgttcctcttcctactctgccattactgccaaaggaagagttgcctgttccagtccctccagtaactgtgcctgacctaccaattcctgaagtacct

SEQ ID NO: 15716 - DNA, 1733 bp, Glycine max
atgatgcacagtcttatctgaaaatgaaatgtcggaaacgctatacccatgattcgtgcgcttaaggacaaggatcacgaccacgacgaccataacttttgatccttataaattggcataccctttgctgctgctctttacccatccattcttcaaatggaaaagctccatgcttctgtgctcgcccttgtattccttcttgtcatactatttcaggaaggattggtaacatgtatgaagaatgaagacggatcagaagaatggggatatgtgcaagttagaccaaaagcccacttgttctggtggctttacagaagtccatacagagtggagaatccctccaagccttggccaatcattctctggcttcagggaggaccaggctcttcaggagttgggtttggaaattttggagaggttggtcctttggatgctaatttgaagccacgaaatttcacatggttgagaaaagcagatctcttgtttgtggacaacccagttggaaccgggtacagttacgtggaggattccaatctctatgccaaaacagacgaagaggcaaccacagacttgacaacattgttagttgaattattcaacaatgatgcaagtctccaaaagagtcctctgttcattgtggcagagtcttatggtggcaaatttgctgttgctcttgcattatcggctctcaaagctattcaacacggaacattgaagcttacacttggaggtgtggtattaggagacacctggatctccccagaagattttgtgttttcatggggtcctctgcttaaagacctatctagaattgacgacaatggactgcaaaaagcaaacagtatagctgagaggatcaagcagcaacttgaggcaggtcaatttgttgatgcaacttactcatgggctgatcttgagaatgagattgtcgctagcagcaacaatgtggatttctataattttctacaagattcaaaaagtgattcggacaccttaaacgcaatggagctgggattattcaaagaagtatcaatgatgcgatactccaagtatcttagttcaaagacttcatatcttggcagtgaggatgatgatcttgaaagattactaaatggtgtcataaggaagaagttgaagatcattcctgagaatgttacgtatgcagtgcagtccttggatgctttcgaaagtctagtacctgattttatgaagccaagaattagtgaggttgatgagctgctggctcttggggtcaacgtgactgtgtacagtgggcaagtggatctcatttgtgcaaccaaggggactgaagcttggcttaaaaaactcgagtggacagggcttcaaaatttcttggagaaagacagaacccccctctactgtggaagtgacaaaacgaccaaagggttttttaagtcatacaaaaacctacaattctattggatccttggagcgggtcattttgtacctactgaccagccctgcgtagcactggatatggtgggtgcaattacacaatcaccagcggcttgaggataatatgccccgaatgaaataaaatataaaattgtccaattaaataaaccctaaaataaaatcccccagataatggctatgaggtttatattacgagttttgtcgggtatattcaatttttttttttaatttgggcatatctatgatgttaggtgtagcaatgatgataagtaatgactaaaattaagtttgaccag

SEQ ID NO: 15717 - DNA, 473 bp, Glycine max
cccacgcgtccgcggacgcgtccgcccacgcgtccgcggacgcgtgggtgctggctcttggggtcaacgtgactgtgtacagtgggcaagtggatctcatttgtgcaaccaaggggactgaagcttggcttaaaaaactcgagtggacagggcttcaaaatttcttggagaaagacagaacccccctctactgtggaagtgacaaaacgaccaaagggttttttaagtcatacaaaaacctacaattctattggatccttggagcgggtcattttgtacctactgaccagccctgcgtagcactggatatggtgggtgcaattacacaatcaccagcggcttgaggataatatgcaccgaatgaaataaaatataaaattgtacaattaaataaacactaatataaacctcatagccattatctggagcgatttattttagtggttcatttattgtacaatttataaacctaa

SEQ ID NO: 15718 - DNA, 542 bp, Glycine max
gaacaacaaacaaattgcaggtacatatgcacaacttgggggataggaatggatattaaagatgatgtaaaaagggaggaggtgacaacacttgtgaaagaaatgataaccggagaaagggggaaggaaatgagccaaaagtgtctggagtggaaaaagaaagcaatagaagccactgatatgggaggatcatcatataatgatttccatcgattagtgaaggaggttcttcacaatgatgttgtttgagtctttcaatatattgggggtccgaaggtagggtattaggtgtttcaatattggagatcctagtgttgggctgggctatcaaacaaaatattatgaagaaactagcatgacttgatggctgaaaatcaagtctattaaataaagatttgtgtggatgtaattcatcatatattgtattgatttgaagtgtatgtcggtttacaatatacatgtaaactttcaattcgatgtaattgaggttaaataataattttgattccccaaaaaaaaaaaaagtcgattcaaagaaaaag

SEQ ID NO: 15719 - DNA, 326 bp, Glycine max
gaccagaaaatgcaatgatttgtaaggaatgaagcagtaagcttttgtgaagggtggaaatggagtctcaaaaatctcaaaatcatgctaaaaaggcaaacaagtacattattatggaagttaccaagcgcaacatagcaccatgtagcaaaaactgcctaccgccagcatcaaatccttacaacagaggatgctccaggatatgcaaatgcagaaaatgaagtcttcagttcgttcaatgggaagaataaggaaatcatatacctatttttcatcttttatatttatgcagtcgtctatgatgaattgatgagtgttttcctggc

SEQ ID NO: 15720 - DNA, 869 bp, Glycine max
gatcaaaagcttttagttttctatatcactctcaactttactcctcttcaatcagttgcatattctttgctattccaatggccactgttgaggttgtgtcagccaaggttgccctcccagaggacacaaaagaggcatcattgaaggttgacgaggagaagaacacagaagaagttgttgagactccaacaccagaaactgtggtcactgagcaaaccaaggaggaaagtactgaggccccacgacctgcagcttcagaagacaagccctcggttgaagttcagactaaagaggtggcagaggaagttgtgtctgagaccatcacacaagagccaacagttgagaagcaagaagctgctgagggaacaaaagaaaatgccgatcctgctgagattaagacaccagaagctgcagaagatgttaatattaaggaagagaaagaagctgaggctgaggctgaagctaaggaggaagaggccccggcagagaaaagtgaggagaaggttgagacagaagggtcagctgaaaagaaagaggaggaagtgattgaagaagctgaggctgagaagaaggaggaggtcacagtcacggacacagaggctccaacagagtaaaagaacgtgaagaggggaaatgtgcagtttaagtgagtgtttgagagggtatttttttcttagttgcatcgtgtcttgttgctccatgcatgtcttttctttgtttagtggtctaataaaaagtctagctagggaagggatgagtgatgcgaatgccaaccactcagtacaagaaccacatggcatgtagtctttcaatctgatctatggggtgtgcatggctagctctccatccaatgaattatgttatggtcc

SEQ ID NO: 15721 - DNA, 817 bp, Glycine max
tacggctgcgaaaggacaacgaaaggggacacaactgaacaagataagctatccatagcagccaaagaaatgaagagtaccttgttcgccctctttctactttgtgccctcacctcttacctaccttcagccaccgctggtgatgtggtcgacactgatggtaatcctgttgaaaatggaggcacatactttgtgttgccaactataatattaaacggcggtggaatagaatatgccacatttggaaatgaaacttgccctgtcactgttgcgcaatctcgcgatcagttctgcaagggctttccgataaccatttcatccccagcccgaatccgtcacatcagcgaaggccttagtttgaacattgggttcactttcgcatccccgtgttcccccgcttctgagtggaccattgtgaaggatcaaccagaaggactcgctgttaaactcactgggtttaaaaatacagtgcccggtgtgtttacattgaagagagttcccgccgatgaaattatcggctacaacatcttgttctgtcctcttgataataacccatgtgggtatgttgcggttcatttcgaccaattccgaaacaggcgtttggtggtgtctgaggttcacgacgatgggttatgggttatgtttcagaaactttcatatgcatcaggattaactctttcatctgcatgaagcacccgttgccctcaaaagtcatatatgtactttcacgtagtgagagacatgagtgagactaaataaatgcttcatgctgcattcaattatggcaagtctacataaaataatcgaagtttatgtc

SEQ ID NO: 15722 - DNA, 341 bp, Glycine max
gaagagaagaagaaattaaatttaaactctgactaccttcttctccgttttctcggcccccattcattctcactgatatttcctctgtactaaagactaaagagagacgaaacaatctctgtctctgtgtgcgtgcgtgcgtgttttcctctatctgtctgatagatagaataatatcccaaaccatcgaaaggaagcaacgaggaaaaaagaaataaatgaaaagcgtagagagccatataatgctccgctttgtttgcatatccatgtgagggttctgacacattctcttcccctatcgctgggtggcttgttcgccttggtggtttctactgagtcac

SEQ ID NO: 15723 - DNA, 422 bp, Glycine max
gaacgatggctatccgaatcaactccttgacgctctcttccgctttacctaagatggactcaagaggtggaatttcgggcctctgggctggctcgcagatgatgccccaaatgcgaaaggaggctcgtggacgacgagtttggaggcgaagaaaattgataaaaaaggatgaatatatgcaccccaaaatggagcgcattccttttatggaggagcaggtaaggatggtaagggaacagggaaagctcttgacgatggacatagagaggttaatgttgttagaagataatcggtttgattttgtgaatgagatagcagctgaggccaattcttatgttgagaacaacagggatgagtatggaagtgagaagaaggccattcttcatgttttgagcaatcgaatgaatgatactggaatttac

SEQ ID NO: 15724 - DNA, 372 bp, Glycine max
gtccagttctgaagagagaatctcccgtcttgtcactagtaaaattttcagatattcaaatagatcccgttgctgcattcagtaatcacaaccacctggaacgccattattcaattcaattggaaataaatcatgggtcgacctagaggtgatgaaaagtactggaatgaagtaacgagttttgaagagaacgggaagcagaagtggaagtgcaagcattgtgaaaaaacgtatggtggaggttattcaagaattaaactgcatttagataaagaacaaaaaggacaaggcattactaaacgcaccgtttattgtagcaatgaagaagttctcaacatcattgcttccacttcaatccatccacaagaaact

SEQ ID NO: 15725 - DNA, 1281 bp, Glycine max
ggattttcttattatgctgcgattatgaagtcaaaactgcatgagtacagcgatgtctcgcaaggaaaacctgatctttgaattgcataccaagaaaggggcttggaagatagcaatatgaatcactgatatgtggcacgttaacaagcacaatgggtgcaatgattggcgttactctatggcaataactgtttgctgaatttgaggcaaagttgcattgtggttctgcatatttgattcagaacattaaagttgttgacaatcattctacatacaaaacaaatatcccttcaatgtccaaaatatcaagcatgggtcaaagttgtatgtcaacattgatatagcaaaaatccaagaattccataatagatgtaggtatgtcgttctatgctggcagagtatcaaatgaaggaagtgtttctcaatcacaatatagctaatattcccaacgaaactcagttgaaaagttcttgcataatgctcaaatggttaggttagttgaaataagcagactgagaaaggactgttactagttgatcgttggtacggtggatgaagtcatcattgatacacaatggagttatgataattatctctactgtactacgacatttgatccattgaaaattggtgtcaatttttgttcgtgctagaactaagttactcacaccgttccaaggtataagttagttctaaaaatggaacagaatgaggagaaggctaacttccatttttgggatgcaacatgtatcaaaatttttggcaaaacgatcgatcaatgtcgccaagagtagattgcaagtggcgatgagatcaaggttttccctccctattttgatgaattattgggaaagacttgggctgtcagattttagtaccatgcacgatgctcaaaaaggcctacaatgtgttgctgaaccttggtaccaatatttgagagacaatgccttcagtgttggagatgagatatgtttctactttaggccttataaaaaagtatgagagttgataataaaaaaatagttggcttgggatgatagtgactccaattgaagatggtagtttagtagcttattttagaattgtttgttggtgaaattattatgtgtcgtctatgctaaagtacttctatgttgtaattcaattacctagcattaccagacaatgtttcctttcggtatttacgactatctgaacaacgttacagaactatatggttatttactatttgttgaaatatataacttccattttggatatattcaaaaaaagagacgaaag

SEQ ID NO: 15726 - DNA, 499 bp, Glycine max
tattttcaaagtgttctgcctctctatgttgttgggatttatatctactgggtgtatatatacatttgtttttatgtccttggtctatatatacatttggtgataattgtctattttatttgtgtgtgttctctttgcaacatagactgatactttttgttattccccactatgtgcttcagacagtgtatgtccacagcgcgaggaaaacctgatatctgaatggtagcagtatgaatcactgatatgtggcatgttaacaagcacaatggcagggtgcaatgattggcgtcactctatggcaataactatttgctgaatttgaggcaaagttgcattgtggttctgcatatttgattcagaacattaaagttgttgacaatcattctacatacaaatgatggtgagatgatcatgaccgtgtaggaggaatatgcttttcagcttgatgatgctatcgagaaaaatcattttgttagaaagccattggtggttatgt

SEQ ID NO: 15727 - DNA, 523 bp, Glycine max
gatgtctcgcaaggaaaacctgatcctcgtattgcataccaagaaaggggcttggaagatagcaatatgaatcactgatatgtggcacgccaacaagcacaatggtaggcaagcaattaagatggcgttgatggaccaaatgacgattttgatgttattcgatatactggaattgagtacattcattttagtgctttgatacattcatgagtttcattcctgactcttgtagggtgcaatgattggcgttactctatggcaataactgtttgctgaatttgaggcaaagttgcattgtggttctgcatatttgattcagaacattaaagttgttgacaatcattctacatacaaaacaaatatcccttcaatgtccaaaatatcaagcatgggtcaaagttgtatgtcaacattgatatagcataaatccaagaattccataatagatgtaggtatgtacgttctatgctggcggagtatcaaatgaaggaagtgtttctcaatcacaatatagctaatattt

SEQ ID NO: 15728 - DNA, 354 bp, Glycine max
tggtgtgtgttctctttgcaacatagactgatagtttttgttattccccactatgtgcttcagacagtgtatgtccacagtttgagggtgcaatgattggcgtcactctatggcaataactgtgtgctgaatttgaggcaaagttgcattgtggttctgcatatttgattcagaacattaaaggtgttgacaatcattctacatacaaaacaaatatcccttcaatgtccaaaatatcaagcatgggtcaaagttgtatgtcaacattgatacagcaaaaatccaagaattccataataggtacaatgcatatatttttggaacactcaaatttgaccttcatcttttgttgca

SEQ ID NO: 15729 - DNA, 468 bp, Glycine max
gtcttgatacaaaaggtaaaaagaccaaccttctttcatcctgaacatggctacattctttggttcccctccaattttctccctccccctcactagaactcaccacatttcttcatcatcacaaactccaccaccaactcctcctccacaatctcagcctccaacttcgtctccacagcagctaagaacaacaaatttgaatgatgaatcaatgcaagtgtgcactgaagctaagcaacagaagcccatcaaaccatccactaaggttgaatccacagattggatagccacttccttgaccagaaggtttgggataggagctggtcttgcatgggttggctttcttgcatttggtgtcatctcagaacaaatcaagactcgccttgaggtgtctcagcaagaggcaaatacaaggagcgttgagaaggtggaagaggtggtgcttcctaatggcataagggactatga

SEQ ID NO: 15730 - DNA, 566 bp, Glycine max
aagacgacagaaggggactcacagaaagagaaagtgagagacagagagatgatggagttgaagaaggtggcattggtgaaggtagctttgttgcttttcctgttagggttcagtgcaaccactgcagatgctactcgcttcgacccacgttccttcattactcaggtgctccccaacaattactatgtaaaaatcaaatccacagccactgcatgttgtgatctttgtctttgcacaaaatcaaaccctccccagtgccaatgtgtagatgggagcgagacaggctgccactcatgttgcaaaaattgcatttgcaataagaaatttcctcggacgtgtttttgtggagatataaccaacttctgctatgacaaatgtaactcaactgaagccaattaaagctcactagctaggaatatgaatgagcatgtttccataaataagttgtgaggccaagcccctttaggctttgtctacttgtcttcgtgcatgtatgcatgcatattaattactatttcaataaataaataaataaaaactacttgggcttagataaaaaaaataaa

SEQ ID NO: 15731 - DNA, 572 bp, Glycine max
gcgagacgagccgtttctattaatgaaggacaagtggctataacactacttgcattgagttagactttgatagtttgattagctctaataaggttaaggaccagagagagaaagagaaataagaagaaaaacacaagatgggttattggaagtctaaggttcttcccaagatcaagaaggttttcgagaagaatagcaccaagaaagctgctgctgctgaggccaccaagtcctttgatgagtcaaaggaggaatacaacaaagcctttgaagaaaagaagactgaacttcaaaccaaagttgttgaaatatatgaggcttcatcaactgaaatcaagagtttggttaaagaacccaaggaagctggtttgaagaagaactccacagaagtccagaagttcctagaagagctggttaaaattgatttccctggatcaaaggcggcatctgaagcatcttcaaagtttggaccagccttggcttcaggctcagttttctttgtgtttgagaaggtgtcaactttcattgttacagaagagaaagatgttgaagcccctcctgcagtagaaact

SEQ ID NO: 15732 - DNA, 498 bp, Glycine max
ggaggcatttgaaaaagaaaagccgtccatagcctcccaaaaaatgaagagcactaccttgttcgctctctttctactttgtgccctcacttcatcatacctaccttcagccaccgctgatgtggtgctggacatggatggtaatcctcttggaaacggttggcaaaatgaatatttcatgttgccagttacaagaggaagcggtggtggaatagcactagctgcaactggaaatgaaagatgccctgtaactgtcgtgcaatctcacattgagcgcgataaggggtatgcggcaacttttagagctccattccacctcccttttatcgcagaaggccttcctttgacgatttcattcgataactttgaagtgttaccgcggtgtgtccccactcctctttggtgggctattgtggatggtctagctgaaggacccgctgttaaaattgagtatagagatatagtaaaaggttggtttaaaattcagaaagcttaccc

SEQ ID NO: 15733 - DNA, 1376 bp, Glycine max
  unsure (1)..(1376): unsure at all n locations
tgacttcttatcttctaaagaattggtcctatagggagctccattcttattgctaggcctactatttagatttttttcattatatatggtattcgcaagtttagaacatatattaactcatatatcgttttcggtcgtatctattttaatttcaattcatttgataaccttattatttgtcaaagaaatcataggattatctgattcgtccaaaaaaggcatgataataacttttttttgcttaccaggattgttagttactcgttgggttttttcaggccatttaccgtttagggatttatatgaatcattaatatttctttcatggactttttccattttttatatggttccttgcttcaacaaatctaaaaactactatttaaatacaataataacaccaagtgttatttttacccaaggctttgctacttcggggcttttaacgaaaatgcatgaatcgttaatattagtacctgctttacagtcccattggttaatgatgcacgtaagtatgatgatattgggttatgcaactcttttatgcggatcattattatcagtggctattttagtcattacatttcaagaactcatacaaattattggtaaaagcaagaatttctattttttaaatgaatcattttcttttgctgaaatcaaatacatgaatatgactgataaaaataatgttttacaaaaaacttcttttttgtcttatagaaattattatagatctcaatttcttcaacaattggatcgttggggttaccgtactattagtctaaggtttatctttttaacgataggtattatttcaggagcagtatgggctaatgaggcatggggatcatattggaattgggatccaaaggaaacttgggcttttattacttggactatattcgcgatttatttacatactagaaaaaataaaaaattggaagatctaaattcttcaatagtcgcctccataggttttcttataatttgggtatgttatttaggtataaatcttttaggaataggactacatagttatggttcatttacacctaattgaattaaaataagtaaagaacttcacaaataaaaatatcgaaaacataatatatatataataccaaagaaancttcgaataaaatgattgagaaccccttgaatcactactacagtacttgattcaaggggttctcaaaacaacaaacatattcaattagaattcaaattcatttttatggaattaatataataccaaaagaaatatagggtttttgtattgggaaaggatttcctttttaatttaggttttaattatccggtgaaacctatccatcaaaaattagataggaaagcttccaccctggcaaccggg

SEQ ID NO: 15734 - DNA, 508 bp, Glycine max
gacacaactgaacaagatagataagccttccacagcctcacaaaaatgaagaacactacctcgttcgctctctttctactttgtgccttcttcacctcatacctaccttcagccaccggtgcttttgtgcttgacagtgatggaaaccctcttgaaaatggtggcacatactatgtgccagcaccaaataactgcggtggaatagaatacactacatcaggaaacgaaacttgccctatcactgttgtgcaacatcacgacccaacctgtaaggggtttccgataacgatttcgtccccggcccgaatccgttacatctccgaaggccttaatgtgaacatagggttcactttcagaccccctccgtgtgccccctcttctttgtggactgttctcaaggatcaatctgaacacccagacccctacgaaggagtaatattgcctgttaaacttaataatgaggacaacagcaacaatacagttcccggttggtttaaaattcagaaac

SEQ ID NO: 15735 - DNA, 444 bp, Glycine max
gaaaatcactgttaaataaacctaatctttgtttagctgggtttgcaccttgatgaatggagcctgcaaccgagaagagagaggattttgggaagttgcagtacggatgcgagcactataagagacgatgcaaaattcgagcaccatgctgcaatcagatttttccatgtcgtcactgccacaacgacgccgcgaactcatctagcaaccccgcagatcgtcatgaacttgttagacgcgatgttaagcaagttatatgctctgtctgtgatactgaacaggaggttgccaaggtgtgttctagctgtggcgtcaatatgggaggatattattgcgagatttgcaaattctatgatgatgatacggataaaggacaattccattgtgatgaatgcggcatttgcagggttggtggtcgtgataagttctttcactgtaagaaat

SEQ ID NO: 15736 - DNA, 512 bp, Glycine max
gatctgatttggtctatgttgaggatcttgtaatgcaagttcagcgtgcactgtattcaagtcgatcagaattcaatgggaacgtagaatatgagagtgtcctggagagccgtattgacctgcgatttagtgcgctacagaaggcattgaagatacctcacaaggcttcagaagcgcggttaatggtgtccaacaagttcctttctctattcaggcccggtaagcttggaccgttcattctagatgatgtcccggatgtcaagcctgtgtcataaggtagattgaatcatggtttttccccctccgttttcttgtgtagtagatctccgaccgttcctcctttcccatttgtgcaatatgtattgcaatccagattttgctgtaacctgtgaatatcgcatggatttaagttagaaagagaaatttgagcttcctgtggatgcgggtgattcgccagaatttcagttatagagtcttttacctacccatttaagcatatcaacatttcgtcc

SEQ ID NO: 15737 - DNA, 394 bp, Glycine max
ggagtggattggagttaagcaaccactcctggactcgtacgttgtagacatatcctgtttcagttggcttaaggttttctttttattatataggaagaaacgaaatgaaacttgcttctttgatttctggtttcactgattacactcacctcctctctattaaggacaatgtgatgagggaagagaagacaattcctacaaggaagaatgaagtgaagtttttcaagagcttggctcctcctcttgtggctgcttttctagtcttatctccaatttgcagcactccagtttcaagtgctcaaaccgtagatattcagagaggaaccacattgtttcgtcaagcttgtattggatgccacgatgcatgtggaaacataatacataccggggcaac

SEQ ID NO: 15738 - DNA, 459 bp, Glycine max
atcgagcgaatcggctcgagagaagactcattttctatatgatgcgggtacgtttggtgtcaatattggatgattataaactggccagacaacagaaagaggaagataagagacgacatagggaccttaagaagatgcaagatctactcctaaatcaaaaggaagccatgtatggttctaaacctagtccaagaaaaaataacagctttagaaagactaatagttaccgcgcaaatggcaatggatctatgcctcctacaccccgtcgtaactccctaagtggtggaacaacatctgaactactgacaccgcggtcctactctggccgtcagaatggatattttaaggaaatgagaagattgtctactgcaccactgaactttgtggctatatccaaggaagatacaatgtcttatgcttccctttgtggttcagagcctgattcccctccccaagttt

SEQ ID NO: 15739 - DNA, 753 bp, Glycine max
tggaagaccatatgccaacttttttctccagacagcgcatagattaaacgttactacaataacaacactatgcacgtcacatccactattacttctcctatttcatactttaggaattataataataccaatcatgtggctcacatactttctacccgcccccccgtccgcccagttttgtcctttaaagctcccattatagcttccaatttctctgtgatccatatggctcttgaacctctcaggttttagaagctcagctaagcacaatagagagtttaattaggccattaacatatcatatgggtgtgactaagcctcatgtgcttatgctgttgatcatcatggttgtctcaattgcagagaaaccatcagtaatagaaggaagggctctttccttgatatctggtcaagggtactcaaagatttttgcaacgcttggacttgtatgcaagtgttgtgatggggttggaggtgcctgcactagtacatggacagaatcttgcaataacttgcagtgtttaccttggaaatcacactagttaattattttctgtatctttccttgtattccattagctgtatattgagttttgaaattataatatatagtataattatgtagtcggtgttctgttctgggtaatgtgaacagtttgactttgtgatgaactttgagaagtatccatggtgtataatgtgaggcaaatcaataacaataataaatggatatatgatcaccaaatacccaaa

SEQ ID NO: 15740 - DNA, 1256 bp, Glycine max
gctcgagcagctcgagcggctcgagcttgaattcacatttcaacaaccatagccatggctttctccttctccaaagcacttgtccttgcctgctccttctgcttatttgcgtctttggcttttggacgcgatttctccattgtgggctattcatcggaggacttaaagtccatggataagctcattgaactctttgaatcatggatgtcaaaacatggcaagatttaccaaagcattgaggagaagcttcttaggttcgagattttcaaggataacctaaagcacattgatgagagaaacaaggtggtcagcaactactggcttggcttgaatgagtttgctgatttgagccaccaagagttcaagaacaaatatctggggcttaaggtggactactctagaaggagagagtcccctgaagaattcacttacaaagatgttgaattgcctaagtcagtggattggagaaagaaaggtgctgtaacccaagtcaagaaccaaggttcatgtggtagctgctgggcattttccactgttgcagcagttgagggtataaaccagatagtcacgggaaatttgacatcactgtctgagcaagagttgattgactgtgacagaacatacaacaatggttgcaatgggggtctcatggactatgcattctcctttattgtagaaaacggtggactccacaaagaggaagattatccttacattatggaggaaggtacttgcgagatgactaaggaagaaaccgaagttgtcaccattagcgggtaccatgatgtgccacaaaacaatgaacagagcctattgaaggcacttgcaaaccaacccctcagtgtggccatagaggcttcaggcagagatttccaattttacagtgggggtgttttcgacgggcattgcggaagtgacttagatcatggtgtggcagctgttggatacggaactgcgaaaggtgtggattatatcatagtgaaaaattcatggggatctaagtggggagagaaaggatacataagaatgaggaggaacattggaaaacccgagggaatctgcggtatctacaagatggcttcttatcccactaagaagaaataagattcattccctctatcgcttactacattgttgtttctgaatttctttccttcttctgatcaattctctattgtcggcctatttcagcttttccttgaaaacaatgtaacgttttccatacaataataaaaacttgattaactctattcatt

SEQ ID NO: 15741 - DNA, 571 bp, Glycine max
  unsure (1)..(571): unsure at all n locations
gcgctgacaatgaacagaagaccaagaccatattaggtttgaagccaatattttgtgaatatatatattaggctgctactaacaagctttggctcacgggtatgctagttgctagctatgggggaattcaagcactttgtaattgttaagttcaaggaaggtgtggccgttgacgagctcacaaaagggatggaaaagttggtcacggagattggtgctgtcaagtcctttgaatggggacaagacattgaaagcctagatgtgttgagacaaggtttcactcatgcattcttgatgacattcaacaagaaagaagactttgttgcatttcagagccacccaaatcatgtcgagttctcgacaaagttttcggcagctattgagaatattgtgctactggatttcccatctactcttgtgaaggccccagcatgatcctaaagatattccaccaataaagattccctctttaaaatttgtttagtgtatgcttgtgcttgtgttttctgtctgtagttntgttatgagtggttactaccacttgtaataattcatggtcataacattntga

SEQ ID NO: 15742 - DNA, 523 bp, Glycine max
tttccctttgttgcaaaatctcacctctatatccttctattaacattgcccttcttccacaatgtgtacttgaaacctcaaaccaaccagaacctctttgattgaaaataatccaagttttttttttcacagttaatttatttgtggagaaagaaaaaaaatgtctgcttccactgttgttcacaatttttgttccgtcgcttgttgcatttcaaattgcggccataaccgaaccttggttcctacccatcatcagtttcattcacccaattcccttttgaggttaaagaagcaaactttcctcacgaacatttacttcaagagttccagaacccagaaacctcgctccagttttgtagtttccgcagcacaatcgaattttgttaaagttctgcagaatgcatggaaagttggtagggatggaattgaggcaggcactaatctcgttcctaattctgttccaaggccaatagcaaggatttcagtaacaattgtggctttgagtgttacgctttttgtactc

SEQ ID NO: 15743 - DNA, 420 bp, Glycine max
gaaagaagtgtgagtaagatcataagcaaaagcggcggtgaactgaagatgccggttctcaccctttctactaacgttagccttaatgatttagacgcctcttcgatactctcccaagtaatctccaccgtcgccagcatcatgcgcacacctgagccttttgtgatggtttcactggaaggatcaacaaccacatgttttggtgggactgaggagccagctgcctatggtgaactggtgtccatgggtgctcttaacccagaattgaacaaaaaactgagtgctggaattgcctgcgttcttgaaaccaagttgttggtgccaaagtcacggttcttcttaaaattctataacacagagggctataattgtgcatttgaacgggtctatcatggtagtcgagtccaaatgatggaaaga

SEQ ID NO: 15744 - DNA, 1120 bp, Glycine max
ggaatcatcaattgtccaacaagtacttcgaataaagcctttgttgatttgattcttaaaccctcagaagacgacatcaagatttggcctcacagttttgaatttcgtcttagggtagctcttggacctggaggagatctgttgatgacatctcggatcaggaacactaacattgatgggaagccattttcattcacatttgcttatcatacatatttctctgtgtcagatataagtgaagtgcgggttgaaggattagagacattggattatcttgacaacttgcagaaaagggaacgctttactgaacagggggatgctttaacatttgaatcagaatttgacaggatatatctcagcactcctacaaagattgcaattcttgatcatgagaaaaagagaacaattgtattgcgtaaagatggtcttcctgatgctgtggtgtggaatccttgggataagaaagcaaaggctatatctgatttcggtgatgatgagtataagtacatgctttgtgtagaggctgctgctattgaaaagcctatcactttgaaacctggtgaggaatggaagggaagactagaactttcaactgtttcttctagttattgtagtggacagcttgatcccaaaagagttattcaaggaagctgaagatcatcgttgtgttttgtgtcctgtacaggtagcttgttgccgcaccgatgaacgctgaaaggaaagtgtctccaacaatttccccccttcatgttccacttaaaccttcatgtaggacggccggatgaactcatgcatagagttttgttaaataatattttcctgcaactgatgactagttcggtcataatttacgtacaagtagaatagcccacagttgtttatggaaaatcgaaattaaaacctccaattttattgtattttcacgttgggttctcgtactcataaaatgtttgtttttacatatcgtaggcaatgaatgcatgtatttgacaattgacgggatcattttacaacactataagttggcctgtatgtcgttaagttgttgctgttatctacatattcatgtaatgaagcaagataattattaaatatataattgttatttcaatgatgtaat

SEQ ID NO: 15745 - DNA, 282 bp, Glycine max
agaaaactgaaaagttaaagcgggctacagtgtgggaatggcgggcaaaggtggatcaactccggccacatattcgccgtctccgacgaccgataagaagaaaccatcgcttttcaatgaggatttggctcgacctgatggccgcagtttccaccagtgcagacccgcatttttcaggactggtgctgtgaatgctgcatctggatctgcttatgctgaggttggaaataccaaggtcattgtatcagtatttgggccaagaaagagccagaaggggatgat

SEQ ID NO: 15746 - DNA, 862 bp, Glycine max
  unsure (1)..(862): unsure at all n locations
gatgagagcggaagttatgtgcatgcaagggggttctcagttcatcatgtgtttagacatattacggagtatgcatcaacagctctgcagtattttcttgggaaccaatctgaaacgtgtctgtattttcttatgcactggatttgcagctaccagacactgttttgaagaccttgcagcatatgttcccggctacttgcaatggataaacaatcaactatattgttacctncagttcatcgtccctattggcagttntacttntctaaaattgtggtgaacatatcctcaaaggaccagaattctgatactactcaggcttatcatattgactgcctctctgaggaaacataattgcatctaccagtgactcacgtataacccaagtgcccaattcaatgtggaactaccaggagcaagagtttccatttcattgttgtatgtatgttccccttttcctgtcatgtacaggttggaaggtaaggggttggagaagcaatttggttatctttggtctatattttccatctcttagattggaattggatcttcaggaaattgacgagtgcctggcttgttttgtaagcctcatgaaagtggctgccatctgttctaaagatttctcagatattcattgagaagttctcacgtataattgccactagaccaaaaagtacaagataggaacattatgacctgcgtatgctaaatgaaagtgccagctgactgtaatttttgaaatttatcagcatgtgaatacattataatgaccgtctgcaatatttcttattttaaaatgatgctgactacaatgtagtacacaactaccttctccgtataatggttattatataatcactac

SEQ ID NO: 15747 - DNA, 759 bp, Glycine max
tcgctttatatcaacctaaaactaaaagagaaggtccctcaaaagcttccatatatcttggaagtggaagagttgccgacacattgctttggaaggataaaaagcaaactttcatcgcattgggagtcttgattgcaatatactgcaacttcattgcatcggaaaataccatcattagtgctctgacaaagcttctgttgtttgcatcgatctttttattcattcatgccattcgacctgcaaaaatattggggtttactcttgagaaaatacccaaatcatggtttcacttatcagaatatttgtctcatcaaattgctctctcagaggcctcatcatggaatattgctgtgaatgttccgaaatcccttgcagaagggaatgattggctgctgatcttcaaggttgggctctctctgttcattctcagcttccttggagccttttcactgcagagcttgtatactataggggttacctttgcgtttatagctttctacgtatacgagcagaaggaggaagacattggtggcctattcatcaaaacacattctcttggatgcaaattgaaatctgatctcaccaggaagtttctttcttcaaagaagattgattgatagcttttgtggcgctagcttttttcttagttgcaccttacttatccgttggagttctgtgtatgattgtacaataattgtaatttaatttgatttgatatagccaacttgcaaatatttttatagaaaattcttactttgg

SEQ ID NO: 15748 - DNA, 887 bp, Glycine max
ccctcgagccgattcggcccgtcgtttcgcccattcccatttttcacaccaccaagccaacagaagatgtttctccacattgtgttcctccttttccttctctcatccacttcccatgccactgtccaagacttctgtgtggcagacctcaaaggtgcagacacccctgcaggctacccctgcaagccacctgctaatgtcacttcagatgactttgtgtacactggcttagctgaagctgcaaatgtcacaaacataatcaatgctgctgtgaccccagcttttgttgctcaattcccaggtctcaatggccttgaactatctgcagcaaggttggaccttggtcctagtggtgttatcccactccacactcatcctggtgccaatgaactactcattgtgcttcaaggtcacatccttgctggattcatatcttcaggtaacatagtttatcagaaggtgctaaaaaagggagagctcatggttttcccacaagggttgttgcacttccaaattgctgttggtaagagaaaggcccttgcttttcctgtcttcagcagtgcttttcctggccttcaaatccttgactttgcactctttgccagcaatttctccactcctttggtgacacagaccactttccttgatcctgacctagtgaagaagcttaaggtgttcttgggggtagtggctaggctaacccttatggttaattaataattgcttattattttgctcaattcattacttttgtgctttcaattcgctaaacttgtccagctcaattgactgagctacgtgagtgactagttttaaatcctttaatatttatgtttgattcttacgtataaaaaaataaattcattagaaaaaaaaaaaaaactcgt

SEQ ID NO: 15749 - DNA, 698 bp, Glycine max
  unsure (1)..(698): unsure at all n locations
agcctgtgtacacaaagtcatctgaagttacttttgcaggtctcaatggccttgaccgctgggcagcatgattagaccttggtcctggtggtgttatcccactccacactcaccctggtgccaatgaactactcattgttctccaaggtcacatccttgctggatttatatcttcaggtaacatagtttatcagaaggtgctaaaaaagggacgagctcatggttttcccacaagggttgttgcacttccaaattgctgttggtaagagaaaggcccttgcttttcctgtcttcagcggtgcgggtcctggccttcaaatccttgactttgcactctttgccagcaatttctccactcctttggtgacacagaccaccttccttgaccctgccatagtgaagaagcttaggggtgttcttgggggaagtggctagagtactacttatttgtgttcatggatagttttttattattttgctcaatttattaacactcccagggatggattccactagttttgcctttgcaggaattgagggttttcccttctatccggttaaagctgtgggaaatccataaaaaaaaatttcccttgcccatgtagccaggttgcaacttttgcctttgaataaatggagggttttcctttccnnnnnnnnnnnnnnnnnnnnnnnnnnnnnnnnnnnnnnnnnnnnnn

SEQ ID NO: 15750 - DNA, 594 bp, Glycine max
acgagtggtgttggcactgccacacaacagagagaacagaagagaaccgagcatggtgatggccatggccatttcatctccttcttacaacctcactttccttcttcctcgctcaggctcacttcaacctctttctttaactccgccatcttgttctttttttgctcaacctctccgaaacctttcactcaagttctgtgcaaaaattcagagcgttggagttggaagagaaggtccagcttccgatcccaaggccggcgtctcactttacaaacctaaatcctacgaagttctcgttagcgatgccgccaattccctctcttatgctcttcaagacggaaaacttcgcctcgaaatcgatttcccgcctttgcccagcaacatttcttcttatacgggatcttcagatgagttcattgatgccaacattcaacttgccttggctgttgtacgaaagctcaaggaaaagaaggaaaccagagcttgcatagtattccctgataaaccagaaaagcgccgggcctgtcaattgttcaaagcagctctagattcaattgatggcattaccataggttccttagatgatgtccctac

SEQ ID NO: 15751 - DNA, 1217 bp, Glycine max
gtaatatttcgagtccaagcttctcttggtgctctgtaagggaccaaaaaccaatttcatccactcgtaacatacccctatcggttttagaaaagccaagaaagtttgtgtccaccaacctctattttacacgagtctctcatactatgatactatagctacacttcccactgtgtctcagagggtctgtgacacacacagactcacttcaagttcccagcttttgccatttttcccactgtttattgagaagaactgcagaacatggcacagattttggctccctctacgcaatggcagatgagaatctcaaaatcctctcccaatgcaactcccattacatcaaacatgtggagttctttattgtggaaacaaaataagaaagtttcacctaccagttctgctaaatttagagtgctggcaattaagtctgacaatagcatcatcaacaggctagagggtctacttaatttggatatcactccattcacggacaagataattgctgagtacatttggattggggggacaggaattgatgtgcgcagtaaatcaagaacaatatcaaagcctgttgaacatccctctgagctccctaaatggaactatgatggatctagcactggacaggcaccgggtgatgatagtgaagtaatcctatatcctcaagcaattttcaaagatcctttccgtggtggtaacaatattttggtcatttgcgattcttacaccccacaaggtgagcctatccctacaaacaagagacacagagctgctgaaattttcagtaacccaaaggtccaagcagaagttccatggtatggaatagaacaagagtacaccttacttcaaacaaatgtgaaatggccattaggatggccggttggtggctatcccggtcctcagggtccttattattgcagtgctggggcagataagtcatttggacgtgacatatctgatgctcattacaaggcttgcttatatgctggaattaacatcagtggcaccaatggggaggttatgcctgggcagtgggagtaccaagttggtcctagtgtaggtattgaggctggtgatcatatctgggcttcaaggtacatcctcgagagaattactgagcaagctggtgttgtgctctctcttgatccataaccaatatagggtgactggaatggagcaggatgccacaccaattacagtacaaagagcatgag

SEQ ID NO: 15752 - DNA, 267 bp, Glycine max
ttgatgttaaatcaagtgaatttaatccatggcagtatggtaatttggtcacggaatgaactagtttcaatttgctcttggtttttggatgctacagctagttcatgtaacttttttattgatacatagaataaatcaaaatcctctcccaatgcaactcccattacatcaaacatgtggagttctttattgtggaaacaaaataagaaagtttcacctaccagttctgctaaatttagagtgatatccaaattaagtagaccctcg

SEQ ID NO: 15753 - DNA, 437 bp, Glycine max
aagcatcccacaagtacacgcatacatgagataagccaattgtgataagccattcactcaggtgaaaagaaaaaaaaaacatatagtaacaaaaccatggtgattcacagactcgaattgtgcataaacatggttcaactcgccatagagttcgtcgtgagcgtcgcggaaacagtggtcatagttcagcagagaaccgtggagcctctcggaatgttgaatcgcgcaagtacacctcttcctttctatggctacctccgttgaatgttgaagagcatcgcttgattaattactttctagctttcttttcttctatgaaattccgcaatttttatagaccccgtggtttctttccttttgggtgcatcaagcgctgattgatgcatacccacgcgagttgctggtgttagggaaattgatgcccttgtttttttttt

SEQ ID NO: 15754 - DNA, 447 bp, Glycine max
  unsure (1)..(447): unsure at all n locations
gatttatttattcatgagataagccattgcattcactcaagtgagaaaaaaaaagtaacaaaaataaacaccaaaaacagatcagaacagagcaacaaccatggtgattcacagactcgaattgtgcataaccatggttcgactagccatagagttcgtcgtgagcgtcgcggaaacagtggtcatagttcaacagagaaccgctgagcctcttggaacgttgaatcgcgcaagtacacctcttcctttctatggctacctccgttgagttgaagaatatctcttatttattttcttttcttctgtgaaattccgcaatttgtatagaccctatgttttcttttccttttgggtgcatcaaacgctgattgatgcaaacccagttgttgttgttgtaagcaaaattgatgccctttttttttttttnnnnnnnnnnnnnnnnnnnnn

SEQ ID NO: 15755 - DNA, 485 bp, Glycine max
ggagggacacaaaaaattctctcttttctctgagtcgcagcttttacgttttcctaattctttgtccttagcatcaccatctccatggccaacaccaaacacctcacatttactttcaccatcgttctcacgctcctcttctcattcgccacagcaaaatccccaacggctttgggtgtccagaaggagaagctcagccaccttcacttcttcttccacgacatagtgagcggtccaaagcccaccgcggtgagagtggcccaggcccacatgaccaacacctcctccacgcttttcgggctcctgatgatggccgacgacccattgaccgtgggccccgagcccgggtccaaactcgtgggaaaggcccaaggaatttacggatttgcgtcccaggaagatatgggtttattgatgatcatgaatttcgcgttcaccgaagggaaatacaatggcagcacacttagcttgttggggtggaacgc

SEQ ID NO: 15756 - DNA, 599 bp, Glycine max
ggcaatggcaagagatgaatttgaggacaactctgcctctagccagatattttggctattgaaagaaagtgagctaactcctagtaatgccaatatattggatggtcgatatgccgtctttggctatgtaacagaaaatgaggataacttggcagatctcaaagttggtgatgtcatagaatccattaaagtagtttctggcctggataatttggtgaatcccacctacaagattgctggctagttctgtgcttttgctatcaaatactgcatgagtgtttatttggcacttgcttcaaggctatattcaggaatgctggctattacattgctaagttcactcccccctggtttgtttccattgctattggaaaaagccattaatcattttactagaacctagcattcagttaaacagcttgagattttattctgttttaagactattcaccaccccggcttgtaactttcgttctaccaattcatgaataaaattatgattgttcagtaggaaattgtaggtcatactcatacagtttctgacattcatgtactggagttattcttatctgaagagagaattattttaattttgcctt

SEQ ID NO: 15757 - DNA, 663 bp, Glycine max
agggattctataaattggaatcactgctcctcataagattaatacaacctcaaaaagagttctttcaaaatgcaaacagccttaaccttcgctgcccccaacgttgtgccattggcacccacaaagagtgtctcccatattaccatctttcctaccaaattgaaagccccgcgctcctcacctcgttactctccgattagggttgcaaccgtggagcccgacacttcaactgtcgactacaactctgcgttctcagtgtttcctgcagaagcatgcgaaactgtaggaggggaagcctgcatggcggagatgtaccctgaaacgaagctacagccagaggctaagactccacgagtcgttacagagaacgttgagagagagtatcttgaatacgatgatcctaaaacggtatttcgaggagaggcttgtgatgatcttggaggaactttctgtgagaccgagtatcagaagggtgtctactagagaaatgtgaaaaccctttttattgccatgactactgcgttttcaatgtcaaccagtagtaattgtagtgttgaatgtacataggtataaggctatggatctcagtttatattgagtttcagtatcgctataaaactttacaataattatacactaaatttcataaattcggccctctct

SEQ ID NO: 15758 - DNA, 531 bp, Glycine max
atcccacgcgtacgcccacgcgttcgcccacgcgtccgtatgactctagcagtctatacacatgcgaccgaggaccgggacacttgaactgtcgactacaactctgcgttctcagtgtttccagcggaagcatgcgaaactgtaggaggggaagcctgcatggcagaaatgtaccctgaagtgaagctacagccagaagctaagacaccacgagttgttacagagaacgttgagagagagtatcttgaatacgatgatcctaaaacggtatttagaggagaggcttgtgatgatcttggaggaacctttttgtgagacccaatatcaaaaggtgtctactagagaaaaaagaaaaccctttttaatggccatggctactgcgtttttaatggctaccagtaatgattggagtggtgaatgtacattaggtttaggctatggagctcagttttaaaatttttaattttttggggaaaaaggtttttttttcccaaattttttttttttggcgcggcgttttttttttttatt

SEQ ID NO: 15759 - DNA, 487 bp, Glycine max
ctcgagcgaatcggctcactagttctagatcgcgagcggcagtcggatgaaaaagagttctttcaaaatgcaaacagccttaaccttcgctgcccccaacgttgtgccattggcacccacaaagagtgtctcccatattaccatctttcctaccaaattgaaagccccgcgctcctcacctcgttactctccgattagggttgcaaccgtggagcccgacacttcaactgtcgactacaactctgcgttctcagtgtttcctgcagaagcatgcgaaactgtaagaggggaagcctgcatggcggagatgtaccctgaaacgaagctacagccagaggctaagactccacgagtcgttacagagaacgttgagagagagtatcttgaatacgatgatcctaacacgtaagatatataggaatcaattcagatacactcttattatagaggtttttaaagtgacaactaaatagaaatcatcatggac

SEQ ID NO: 15760 - DNA, 432 bp, Glycine max
gaggcgtacgaccacccattctgcccacaacggtgtgcctttgggacaaacaaagagtatctggcgatttggcatcttgcctacgaattcgcaagcatcactctcttaacctcgttactctgcgatcagggttgcaaccggggaccccgacccttcgactgtcgactacaactctgcgttctcagtgtttcctgcggaagcatgcgaaactgttggaggggaagcctgcatggcggagatgtaccctgaagcgaagctacagccagaggctaagactccacgagtcgttacagagaacgttggagagagagtatcctggattcgatgatcctaaaacggtatttcgaggagaggcttgtgatgatcttggaggaaaaaacctttcttggtggaagaaccccgggagggtatcaagaagggtgtctactagag

SEQ ID NO: 15761 - DNA, 383 bp, Glycine max
ggttcaagggactgatcaggatcgtttgatcctccacatatctgaatcgtggctggatgaacgaatgcaaatgcagctggaagcaggtcagaatggttttacggacaaatccatagtcgataaactaagtcttgaaatagagactttccttaaagctaaacaaaatagtaggggttcagaaaatgttgcagtaaggaatcgccgtaattccttggaatctgtaccactgaatgatcccgtcagtgcaccacaagaggttggtgatgacgatgattctgtgggcagtgattcaaattgttttgagttgaacaagccaagcaacaagggatctaaggtacatggagaagagcctgtcggcaaaatttttgaggagacatcaaaaa

SEQ ID NO: 15762 - DNA, 445 bp, Glycine max
tggtcttcgacgactacgagcaggaatgaaaactcaaaacggcggcgtttgaacgaaacgatcgcattcgcaggtcgcttcgcttcccctttctccttatctcgccgttgccagagaacactgcggtaccttttctcgttttgttagggcattggtgcaatctagaaaatgctttcaggggtgaaattcattccccgggaccaggtgcatggtgaggacttggattctgtctcgaaagaaaggaaaaaatcagataggaggagggaaaagagtaagaggaaggggaggagctctagggacagctctgatgatgatgatgggcttgagaagattaagaaaggatctagaaagaagaagtggtattcgtcggatgaagactcttctatttacacaactgaaagcgagagtgagaaaggtgaaaagaagagaaggatgagagcaaaaa

SEQ ID NO: 15763 - DNA, 644 bp, Glycine max
accaagtcttggagcgttggtacccttctgtagaagaagggaacaacaagggcattgtggtgcttgtcacgagtcagaaagaaggagcagtcactggtggcccggcttttgtcgaagctgtgggggaaaagatccttgatgctaccgtctcagagaacctcccagtattggctacggatgagaagtacaatgaagctatttttagcactgctaaacggctagcggctgccatagatgggctttcggatcctggtgggccaacagttaaagacaacaaacgtgagtctaatttcaaacccaaggaagagacagaagagaagcgtggacaattcactcttgtagttggaggtttgttggtcattgcatttgttgttcctatggcacagtactatgcctatgtatccaaaaaataagataatataaatagatctgtttttcaaattctcactgttcaaattcagatgtataatgtgcagttgtaaccatgctcatgttacaattgagtttgagaaagctgaagaagaataagatgacagtttttgcttgtaaatgctattccaaagtatatgtatttgaccatttttatatgctggttggcgatcttaagtcaggtagagcaagttctagttccttgcccctctttc

SEQ ID NO: 15764 - DNA, 773 bp, Glycine max
atttctaataatacttataaaaaaaataatagtaggtatccagaattagagaaaaagaatagatatatttgatagaaaatctttggtaactacatttttttttttcaatctaatcagtaaattttcaaaaaaattagtatcaagcttgagttttgaagcactttctttatttccagaacatgaacaagtaaaaataaattatgaagaagaaaaaaaacaaataataaaaatattatttgatgcaattagaactgatttgaacgaaaaaacaatagtaaatggaaatagaacaaagtgtattagaataaacgaaatccgtaaaaaagttcctcgatggtcatacaaatttattgacgaattggaacaactggagggaaaaaatgaagcagagaattatcaaattcgttctagaaaagccaaacgtgtagtaattttgactaataaatctaaattttttaagaagtacgatacttataatcctacaggagatactgataacgctgaaaaaaaaaaaaatgaattggctttaatacgttattcccaacaatcggattttcggcgagacataatcaaaggatctatacgtgctcaaaggcgtaaaacagttacttggaaattttttcaaaaaagggtgcattcccccctttttttggataaaattgaaaaacctttattcttttcttttgatagtttcaaatcaatgaaaatattttttatgttcaaaatttggatgcgaaaaaaggaagaatttgaaatttctagttatacagagg

SEQ ID NO: 15765 - DNA, 467 bp, Glycine max
tgttatagggatctgcaaagatttctagcagaaagtgcagccgggaatgaatcaaccaattccacaatttgtgatgaagtctgccagattaaatcatctcttctagagggaattttagtgggtatagttttgctaataattttgatatcgggcctttgctgcatgatgggaattgacaccccaacaagatttgagacgccacaagagtaatgatccatttgctgaagctaataattgttatgatgctccggcctactggattaaaatattactgctatattatttgcgaattttacgggaggctctaataagtgttctgtagttgatgacttgtctcagggcctttttatattgaattttaaaataatttgtatcagtatataaaaataaaacttcatcctaggtttaatgttgatcccgcccctgtcagttgaaaaattcccacccccaatttcagattgtgttgt

SEQ ID NO: 15766 - DNA, 455 bp, Glycine max
gacgaccgaagtgttcctaatttgaagttgtctctcgacacagtggaacgaccaaggcttctcttcaccctttccctagctgcctcaccccacctcggttcttgggagggcctccgaactgaaaagagatgggattaccaaatgtttctgaggacttgtcatcagagatggaggttgatgcctttagacgcctttttccacttcgatattttgagcgtcatcttgctgaatctataaggcctgatggtagaccacttggaaaagctagagaaacaagtatttttcttggtgctgttgcgtctgctaatgggtcggctctagtgaagattggatcaactactatattgactgctattaaaatggaagttatgactccgtccttggagtcaccggatgagggctgtctagctattgatttccacatgcctccaatttgttctccaatagttaggcct

SEQ ID NO: 15767 - DNA, 364 bp, Glycine max
gttttgaagttctctttcgcgacacaggaaagaaagatcgaggtttctcttcactcatccttcgccctagctgcgtatccctaccaccgttctagacaggacctacaaacatagaaaatagatgggattgtcgaatgcttctgaggatttgtcatcagagatggaggttgatgcctttagacgcctttttccacttcgatattttgagcgtcatcttgctgaatctataaggccagatggtagaccacttggaaaagctagagaaacaagtatttttcttggtgctgttgcgtctgctaatgggtcggctcttgtgaagattggatcaactactatgttgactgctattaaaatggaagtcatg

SEQ ID NO: 15768 - DNA, 474 bp, Glycine max
tttcctcacgcgtccgattactccttattcattcaccaccctatccaacatggctgaggagactccaaaccagacaaccacaccaccccctcctcaagagtcagtggtgcaagtggaggaagtggtggtaaccgatgttccacagcccgacaaaacaacaactacagttccagttgaaagagattcgcaacctcaaccttatgagccagagaagaagaagcccgttgaggaaaccgtcactctcgagactcacctctccaaacccaacaatgctgaccacaccaacaacatccctgaattcattgaagaaagcaccaaactttctgacctcccagaaaacgaaaacaaggctctccaagagctcaagaagctcgttcaagacgctctcaacaatcaccacttctcttccaaacatgataacaagaagccaccacaaacaactgctgctgacaacaaggaagaacaacaaccaca

SEQ ID NO: 15769 - DNA, 928 bp, Glycine max
cgcgtccggtcagtcttcagagctaaaaatgttctcactcttccatctcagtatgtgttgacatgctggacaaggaatgctaaaaccggtacattgttagatgaacatgcatctgaattgccaagtacttctcgtgaatctgtaccagtttgttataacaatttacgacaagaagcaatcaaatatgttgaagaaggtgcaaaatcaatccaaatctatcatgttgccatgagagctctgaaagaagctgctaagaaggtttgcaccataaaaaatcagagttctggaacagcagagggagctacagcaaccaatggaagcaggggtgaattgcttgtagcagatgaagatgttccaagcaatcaatctgtggcggagaagcaaaagaaaataggagagttgactgctgagttagaggccacaaatcaacgatgtgaagtttatagagcaaacttgctgactgtgctaaaggatatggaagaacagaagttaaagctatcagtaaaggttcaaaatgcgagttttagtttgaaagagtgactgtcccgattgcaaagggtttatttaatgtatgcctatctgtccatttggattcctcttaggatatgttaataacctttgcgtagtttatcgtggtccgtgtttaaatataatgattgtgcttctgtgttttctaatcctgtaatctgattgaatatttcaatttctcgataagttattaattgtattattaatttctcgcgcctgttaacgaatagaagaaaaaatcagggatcttcagatgaatgtgtatgttttcttctattcttaagttacaatatattttggtgggtctcccatctcattgattcattattctgatttagatgtgagtaggggtagaaataagataggtcaaactttggtgaatctgagtctgacttacatt

SEQ ID NO: 15770 - DNA, 654 bp, Glycine max
tcggtcagtcttcatagctaaaaatgttctttctcttccatctcagtatttgttgacatgcgggacatggtattggggggaccgggtccattgtatatatgaaacatccattctaattgtcaagtacttctcgtgaatttgtaccagtttgtcaaaccaatttacgacatgaagcaatcaaatatgtttaagaaggtgcaaaatcaatccaaatctatcatgtttccatgagagcttttaaagaagctgctaacaaggtttgcaccattaaaaatcatagttctggaacagcgagaggagctacaggtaccaatggaagccagggtgaattggttggaacagatgaagaatcttcaagccattaaatctgtgccgagaaaggaaagaaaattcgagagttgactgctgagttagaggtcacaaatcaacgatgtgaagtttatagagcaaacttgctgactgtgctaaaggatatatggaagaccagatgttagcgctctcattaagggttcaatgcgcgagatagattgagagagagtctgtgcccattgcgcaaggggtatataaagtgtgcgtatatgtgcatatggatacctcttatgatatgtgaataacctttgcgtagattatagcgggccgcgttaaaatataatg

SEQ ID NO: 15771 - DNA, 601 bp, Glycine max
accagcattttctcaaagctgccatgatatgatgagcatgtggaagggaatggtgtcatcagatggaaaatgtgagattgacatttggcctttccttcagaatttaactcgggatgtaatttctcaaacagcatttggaagcagctatgcagaaggagaaaaattttttcgaaatctgagaatgcaggggtatcttttaatggcaggaaagtacaagaacataccaatattgcggcatctacgtacaactaccaccaagaggatggaagcaattgaaagagagatacgagattcaattgagggtatcataaaaaaacgagagaaagccatggagaatggtgaaacctctaatgaagatttattaagcatacttttggaatcaaatcacaaggaaatccagggacatggaaacagtagggctgttggaatgaccaagcaagaagtaattgaggaatgcaagctattttacctggcagggcaagagaccacttcatctctgctggtttggacaatggtcttattggctaggtatccagaatggcaagcacgagcaagggacgaagtttttcaagtttttggaaaccaaaatccaaacactgat

SEQ ID NO: 15772 - DNA, 393 bp, Glycine max
gacagacacgcacgctgcttgattcaaaagtagtacatacaagattcttcgctcatagggtttatactccaacatcatctgtttttccatggcgaccgaacccaaagcagtcactgaggacgtcaagatcgatctcttcgaagacgatgatgagtttgaagagtttgaaatcaatgaagagtgggatgacaaagaggaaggaaaagaagtgactcagcagtgggaggatgattgggatgatgatgatgttagtgatgatttctctctccagttgaaaagggagttggagagcaacactaataagaattaaatcacctgctagttattattgcttgatataacatgttatatgactggggtgtttaagctctatgaaggaaatgaaaattatgc

SEQ ID NO: 15773 - DNA, 484 bp, Glycine max
gtcttctcctcattcgaagtttgctgtgcatagatatggcaaaaccgcgctttttggtttcgacgattcctgtgtctgtcagttttcagcctggttcctaggcacagtcatggcaatctatgctttggtgggacaaaagttgaacctctagtaaaaatcaggcacacattctgccctagcaggataagagttgccgaagaatatcaagaaggtttgtctgatgaagatgatgatctctgtcccgttgaatgtgtaagagaattcaccactgatgaagagttcagcaaaattctggacaaggctaaagaaactggatctttggttgtggtggatttctttcgcacctcttgtggaagctgcaagtatatagagcagggttttgcaaaactgtgcaagaaatctggtgatcatgaagctccggtaatcttcctaaagcataatgtaatggatgagtacgatgagcaatccgaggttgctgaccgac

SEQ ID NO: 15774 - DNA, 355 bp, Glycine max
caccaacatggacttgaccctttccccttcttcttcttcttcttctttagtaatctcgagaccttcttactcttcatcctcttccaccttgtccttcttggccaccaactcaattctctctaggaaagctagaatcagcaccagaagaagcaaggctctaacttgcaacgcattgttcggattgggcgttcccgaactcgtcgttattgctggagttgctgtcctcgctttcggacctaagaatttcccccaagtgggtcgctccatcggcaaaaccattaagagcttccaacaggcagcaaaggagtttgagtccgagattaaaaaggaacctgattccacagaagagaaccct

SEQ ID NO: 15775 - DNA, 387 bp, Glycine max
attctggcggacaagacagagactttgcactcacaagcccaggaattcaaaaagcaaggaactcatgtccgtcggaagatgtggtatcagaacatgaaaatcaaattggttgttcttggaattttgttgcttttggtcctggttatctggctttctgtttgccatggattcaactgcgcaaactagaaacaaatgaaagtttatggataggtatttaaatgatgtttaaagagcaatttcttaaaagctttagcaagaatctgcttagaaggggggagtttggcaactggagaaaaagtttcctaccttctttatttgttgataatcatatacgatattcttggaaattcttaagagaaaggagatcgggtgtatttgtaatgtatc

SEQ ID NO: 15776 - DNA, 533 bp, Glycine max
ggttgggaataggattcgatggaaaacgggatcaagcttgattactttccgttgtgatcaattgttgtaccgatgggggtttatgaaagtggagcttcgggaaagatgggcactcgtcatgtgctgcaactcgatttgtcgcaacaagaggagaagaagataccttgatgaaacccaatcaggatgtgaacaaaggccactgctcaaactcttcgatatgcgctagctaggcaatccctttacttaatctgataattgatctcttgctaccagatctgcccttacggatctgttgaagggaggattgaaaaaaaaaaaacaaggcatatttcatatatggtggtagggaggggatggcctctcatcagcggtaggaagatccaagttaggagtttgtacaggggagaatcggtcttgaagcttagttgaaggttacggaaaagggaaaggaagtgtttggctagggggtctccaccttttttggataggggataggaaacgagccaaccggcgaacagttagttaccgaacac

SEQ ID NO: 15777 - DNA, 728 bp, Glycine max
gacacatactcatacactgcacactctctctacttaaacttcagcctttgcatatctctctctcttcatcattgtgctctagtaatcacactagtagtcagtagcagtagtacttgtacccataacataacaaccatggctaatgtgtcccttctccttttccttttgttcttgtctctctcatcaggagggaatttgatcatggctaatgggcagaaaacttggtgtgtggcaaagccttcatcagatcaagcaacccttttggccaacctcaattatgcctgttctcaagttgattgcaggattcttcagaaaggatgcccctgctcttaccctgacaatctcatgaaccatgcttccatagccatgaatctctattaccaatccaggggaaaaaaccactggaattgtgatttcagggcctctggaatcgttgttgtcactgatccaagttatggtaactgcatttatgcatagaagaagggtggagtacataaactaaagtatccaatgtaagcaaaatttgttggtgaacttatgtgctgctgtaattttgtggtgtatgtagttgtatttaattaggttgtaatataaatgtatgccgcattacaagaaatcaaaatatgccctttcttatgttggaaatttcaataacctaagttgtgtttacggaatgcaatatgcggtgaaaggaagaaggtttgttttatccaaaaaaaaaatataaa

SEQ ID NO: 15778 - DNA, 698 bp, Glycine max
agaagttgtgcaataatgcgaactatgatagttgctcttttattcgatacctcggagggaatcgttagatgttttgaatgagtggcttaatgttcttcagtcagtccagatcccctttgcacttattcccttgctttgtctggtgtcaaaggagcagataatgggcactttcagaattggtgctgtcctcaagactacttcatggctcgtggctgctctggtgatagtgattaatggctatcttttgacggaattcttttcctctgaagtgaatggaccaatgattggcactgtagtgggtgtaataactgctgcatatgttgccttcgtagtataccttatttggcaagccatcacctatttaccttggcaaagtgtaacacaaccaaagacaattgctcattcagagggttgaggttgagtgatcaatctttaaaatcgcggaataggaagtgccatccatttttaagtatgctcatgcttgtttgttactcgtgtgacaagttgatgcaataggtggtggcaccttattctttgcctgtaattataaactatgtcagagtagattttagctctgtattagtactttcaaattttgttgtcaaaatgccttggcaacactctaattagttgagacaccttcgaagctgtagtgtgcaaaccagcaatgtagttctttttccttgctccctcataaa

SEQ ID NO: 15779 - DNA, 507 bp, Glycine max
ggagtcaacaacacaagctaggccacaaccgaggcagtcttttattttatatagtataattcattctgtcatatatatctgtgtgtgtaacaatggtggtctttatttgcaaggaagaatatggtgttcccttgagcaatggctgggctgcaacacatgaatttggccacaagttttgcatctcaaatgaaggtgatgatgacgatgatgataatggcgtcatcgatgtggccccagctgcatagaagaatttggcagaaaaacatgcatagatgaggaggagggatatagtagctagcttagtagtcactgtaagcttcattctgtcgtcttgcttagttacatttgtgtttactcttggaatatataggttatagtgttatgcttgtgtgacataatagaatttatattagtaattatggcttagttcctctctgtcggacccaataattttcttgtcgatcgtctttgacaatctattatctgatcatagtttttgtatatata

SEQ ID NO: 15780 - DNA, 1041 bp, Glycine max
agcatcaattatcagttatcagcatggtcaaaactgtagtttggtccacttttgtgagaccgcaatataaacctgcacatttcaatcactcaccccttccatttctgaagctcagtacacccaatttgagctttcgtgggaccaacacagtacataataagcgatccaattggccaaaacctttgtcactgcgctcaaaatctgttcttgctgttgctggggctgaccctttggaaatggcagaggattggaaccgcacagcccttcttgtgatcgacatgcagaaagattttatagaagatgggggtcccatgctagtaaaaggagggaaagacattgtcccaaatgttattaaggctgtcgatgttgctaggcagcgtggaattctcatagtttgggtagtacgggaacatgatcccttaggaagagatgttgaactctttcgtcggcatctatatgcagcagggaaagttggtccaacctctaaaggaagtgaaggtgcagaattagttgatggactggtaattaaagaaggggattataaacttgtgaaaaccaggtttagtgcattctttgctacacaccttcattcagtccttcaaggagcaggaattaatagtcttgtggtcactggtgttcaaactcctaactgtattaggcaaactgtctatgatgctgtagcattggactatcaacctgtaactgttattgttgatgctacagcagcagccacacctgatattcatctcgccaatgtgtttgacatggaaaatattggagttgcaaccccaacattacaagaatggagcgaacccaaagcttgatctatatgaactatgaagcatgctactttttgcacccagtggtgtactggtgttcaattccaagactcaagaaaggtttgaagtgaagcaaacgtatctatgtttactgcataataaaatgatttacatggctaagtttgtttattttggtattcacttcacttttgttgtgactactatgaacttattttttctagtccaatgcactccaatttag

SEQ ID NO: 15781 - DNA, 256 bp, Glycine max
ctgagttgctgattgatggttcctactttggggttcatatatgtttcaagttcttgtgcagaaacctttgtcactgcactcaaaatctgcactagctaggtggaacagaaatggcagaggattggaaccgcacggctcttcttgtgatcgatatgcagaaagattttatagaagattggagtcctgtggcactaaaaggagggaaagacattgtcccaaatgtgattaaggccgtggaagttgccaggcagcgtgg

SEQ ID NO: 15782 - DNA, 547 bp, Glycine max
gttctagatcgcgagcggccgccctttttttttttttttttttttttttttttgttgatcgagtctgactcatggcggagattgaactgaaaactgcacctgctgattttcgttttcctacaacaaatcaaaccagacattgtttcactcgctacatagagtttcacagatgcttggcagcaaagggtgaaaactctggtgaatgtgagagatttgctaaatattaccgctccctttgcccgggtgaatgggttgaaaggtggaatgaacagagggagagtgggacttttccaggacctctttgaaatcatgtggcacttggatatccttctgaggcatgagaagtcttgaacattctgttggctcattttcttcagttgttgagcaattgtgaataaggcagtttgtggatattcattacttcacaaatggttgaagccattttgcttttgaagttgatataattgttctgactgtggtattttctttcttcagcattgaattgaatattaattagtaaactctatccccacaacaagctacccta

SEQ ID NO: 15783 - DNA, 437 bp, Glycine max
ggtgccatgaattggaacttggcaatataataaccaacaaacttggtcaggttccaactcttcgaacaaactaactagctaggtgagaaaaagagaaacatgcccttgcctttacatcaccaccaaccttaacctagatggagttgacaccaaccccgtcttttctgaagccaccactgctgtctctacaatcattggcaaacctgagaagtttgtaatggtcatattgaagtcatcagtaccaatatcatttgagggtaacaaggaaccagcagcatatgctgagatagtttcaatgggtggcataaatacagaagtgaagaggaagctgattgctaccattggaaccattttgcagtccaacctgtctatcccaagaacacgatttttcctcaaagtcttttgatgtagtgcgtttcgtaccaacttcaaaatgt

SEQ ID NO: 15784 - DNA, 543 bp, Glycine max
ctgaattctattatccagcaaacactatctcaatagtgaagctctaaaccactgtcaagtatggcagtttcttcgtgctctttgagctggatttcaccctgcttatcccataagctaaacttgccacatacaaattgtttgcctcgcaacactgcaacttcatcttccaacactgtcttttgtgcattggagacaacccccagcggagaaatcttctgccagagaagaccgctactgttgggcgttggagcattaactgcaaatttacaaccaataaatttggtctttgctcaagaaaaaccagacagataccgagcttttgtggactatgaagatggatattcttacgtatatcccattgattggaaggaatttgacttcagggctcatgattctgcattcaaagacagatatctacagttacagaatgtaagggtgagatttataccaactgagaagaaagacatccgagaattgggtcccatggaagaggttgtatacgatttggtgaaacatagatacgctgcaccaaaccaaagacca

SEQ ID NO: 15785 - DNA, 422 bp, Glycine max
gagcgcaaaacaatgggcagtgcattttctgccctattcggccgcgggtccaccgtcgccgaagggtcgtcggagagtttacacgtgttgccgttccactcgtcggagcgctggcagctacacttcaacgaggtcaaagagacctctaagctcgttgtgatagatttcacggcgtcgtggtgcggcccttgcagattcatagctccggtatttaacgagatggccaagaagtttagcaacgctgagtttgtcaagatcgatgtcgacgaattacctgatgtggctaaggattttaaggtggaggcgatgccgacgtttgtgttgtgtaagaaaggaaaagaagttgatagggttgtgggcgccaggaaggacgagctccagaacaagattcagaaacattatcaataaaacgtggaatcaat

SEQ ID NO: 15786 - DNA, 409 bp, Glycine max
gttcagtaggttccaggagaagcgttgataatagggagggaaagctatcagtaaaattgaaggcgggtagaatttcacgtgacttacatcctgcatcccacaaattatcttcaatagaggtccgggttgaggatgctaaagacacagccagggtccaagctaaaaaatcttctgaactaaagaatagtcatttgcttgaaggtggtgttcatgttgaacaacctggttattgtgctaatggtaaacgttatgaggagaaagtaaacaaggacaatcaggaaagtgaattttcttggcagaaatctggtaaggtttcatcattgcacagcaaggagaaggacagaaagtctggttctcatgttggtacagataagatgaagatttcagtttcagagactggtggttattc

SEQ ID NO: 15787 - DNA, 478 bp, Glycine max
gtagacacagaagtcacggtatttgccaatggtcaactaaaagtgtgtcttcttccttgaactctcctctaagaatacccttagcaagttcaaggaagtacgcacaattttagtagacacagaagtcacggtattggccaatggtcaacttccccaacaaaagctagtttttaggagggttgaagctgattccaattctactgttgaagacagaagggaaggctttccacagattctgtgaacgcacgttactgctccttatttctccacatgctaggtttcacaacaaattttgagtataggtcgttttcttacactaatgcaactctgatcttgttcatagcatgatatagtttatagttcttcacacaataacttttattggtcaatacaaataccatgctttagaagtgttggtgtggttcatttcttttagaataaaaatattttgggcagtccgtcttttttccctttttta

SEQ ID NO: 15788 - DNA, 209 bp, Glycine max
gtccattccattccatcacggctctgtgcaacacagcttctatttcaccttccccagaaaatacccttggctttttccctcaccagcagtgttcctttgctgttattctagcttcattaatcacacactcacacgcgtagcgccaggtggagtaaaacacactagccaaacggccatgctttagagctcaagaaccttcccagcaaccg

SEQ ID NO: 15789 - DNA, 406 bp, Glycine max
gatccctgcgtgtcttagtcttaattaagactctcacccttcttagtctctctttgaaaatgaagacctcatatgcaacattgtgcatcatgcttactttgcttcttctaggtcagagtgagttgttgtgtatggcagcagtgacgtgtaacgcgttgcagctgagtgcatgtgccagcgccatcacgtcctcaactcctccttcagctctttgctgtagcaaactgaaggaacaaaggccttgcctttgccagtatttgaaagaccccaacctcaagaagcttgttaactctcctaatgctaggatggtagctaatgcatgtggttccccattccccacctgctagaaagaattcagtatttcactagtctctctcaatccaaccactatataggagcatcttat

SEQ ID NO: 15790 - DNA, 790 bp, Glycine max
gactgtgcaaattgttagggtttgcaacctcagtgtgctctgaagaatctccatctttccatcgacgatgaagaagaacgaggaacgcagcgataatcagagcatgaagaagaaacaaataatgatgaagaagaagaacgtttcgaggttgggcggaagtggcctttcgctcaacgctttcgccaacgcaaaattcaagaacaatcactataacccagccatcataaagaagcaaagggagttctataaaaatgctaagaatgtgaataagtttaagaagttggtaaagcagcaaaaccagcagaatgaaccctccttggctcagagacatatagagaatgtaaatgaaactgaagagaacaaggacgatagtgagaggaggaagaggaagaatagtgcccttagtttggaagagttgtacaagaagcagcatgaagagaaggagaaagaaataatggagagagaggctgtcctgagggtaaagaaggaagagagagaacaagctgaagctcggagaaaggctatgcgagaaaaaatgcttaagaagacacgaaaagggcagcctgttatgaaatacagaattgagcatctcttggacgactattcaaggttcaactaaaaatgcagctggcagtaaatcctgagtcgtggagtagaaaaagggccaatcgtgacgtctattcggtgagccagcttgagtagaacagttactgaggaacgatgctctgcttaatgatatattgactttagcatatttgatgggtgcagtatactgttcatcacaattttg

SEQ ID NO: 15791 - DNA, 577 bp, Glycine max
gtcttgttgtgtggactgtgttataatacgagaaaacggataacagcatccgataggtagagaagcaagcaaaccattaaccacaacacatggcgctatgttcctcactctcacttgtctctcccatcaaactcacttccaagtccttcttatctccaacaccagtcagttggcatggcatcttgataaagaataacacctcaacaagattcttgctgaaagctggttttaatgagattgaacctgacctcagtgaagatcctagagaccaatttgccaccaatggcgttgacgctgatgattttgtgtatggaatatatgatgaccaccacacttaccatgaaggagaacagaaaggaacattttggggctcaattaaagaagagatggcagaagcagaaccccccacaggattccaggggcttatttcatggctcttcccaccagccattgctcttggggtgtacttcaatgttccgggggagtacttatacattggagcaggcatatttacaatcatattttgcattattgagatggataaacctgataaaccccatcactttgaacctcacat

SEQ ID NO: 15792 - DNA, 385 bp, Glycine max
  unsure (1)..(385): unsure at all n locations
ggcacattcaacaggtactttctgtctgtgatatcttaggagggagcatggaatagaacagaaaataagtggtggccttctaatggtgcttgttccatagtcaagtgattgaggttgacaaacaccaaattgaaggagaatatgggaaaacctgacaatgatgacactgattgtggaattagaagtagaaagcaatcaggaaataacaacatgaagaaagggttgttacaatcagaagctttcaaggtttaattacctaattgatcatatgggtgttgccattttactgctttacaacttttggttcatgtacttaccttgttggatctaaatctgagagcttttaatttctaattttagggtgaaaaaaaaataatnatttttt

SEQ ID NO: 15793 - DNA, 469 bp, Glycine max
gaggaaaaagaatcaaaagaaagaaatggcaatctcatcctcatcagagataggttggagttggagggttttgtgtcagagagttaacccagcaataccaaacacgcccttgttcctccaaatcccaaagtcaactcgcttcactgggtcttcttctgttgttgctcgcgcttgggaccctaaaacggcctcttcgcaagaggaggatctagtgtacgtgggaaaactagtggcgggttcttttgcgggtggggctgcaatcaagtacggcagtgctctattccctgagataacgactccgaaccttgtgctggctctgctcctcattctaactcctgtgcttgttgctcgttttcttttgatcaaggaaagtcgtacaaacccataataccaaccttttttttatttacaatccagatcatcaaattcgtgctactatgtctccattttttctcagaatcggacatct

SEQ ID NO: 15794 - DNA, 483 bp, Glycine max
ggagaagattcaggaatccctatgttttctgactgtaatatcaatgttgtccacttctccttccattcctccaccgtcataaacccacccacaaacaatggaaatcaaatcatgcttagttaatactacaacattgaaaaacaattaataaaatagaacttgatgaaatggctcttctcttctccagaagcttccattgtctctggttaccatgctgcaatgttccaccaaaatcttctgaaaggcttagaatttatgctcctattccacttcccaaaccttgggtcagcttcacacaccatacccgcctgcttcccaatgccacttcttccccaaactctgatcctgaagattttgatattctctcttcaactgaacattccgatggtaggtttgtgttccggttcgccagtgctaatgagattagagaacaattagatgaattgaacacaaagaaaaaatcagatgcattgaacaaaaaga

SEQ ID NO: 15795 - DNA, 458 bp, Glycine max
gagtggtgagggagaagaaaacaaggagaaaaagggagagggtgaagccaaagcagaagaggaatccaaagaagaaaccgcagtgttggagctgaaaaagagtgagtactattacaacccaccaccgaggtatggcatggagttctatgcctcctaccctggaccatcgtacccgcctcagatcttcagtgatgagaaccccaatgcctgttctgtcatgtaaaaatggtggaatgtcaggggtaatactggaactttgggggaattatggaatttgagtgagtgattgattggcattgcctcctgagatagatgtgccctactccttcttcttctgtacttttcccctaatatcaaaaagttaaatgaaatctacagataagctgtagagttttgtaatgcctctacttttttcctaaattgttgttaatatgtatatggaaatataagtgaaagta

SEQ ID NO: 15796 - DNA, 1119 bp, Glycine max
ataagattcaacacaaggggcactttacaactccaaaccccttccaacgctatctctatctataataatcagctcggagttagagcactgagcaactaccatggctaccgctccttcgcttctacactcatctgggtcctcttttttctctcaatttcgtgcctttcaattctcttcttcttcgctgtttcctcatggaaacaggcatgggaatgccgtggtctctgtgaaggcctctgcttctggggttgtgttggtggagaagtctgaggcagagaaggccaataggctcaaaacagcttacactgagaaaattattcccttgctcatggaagagttctcttacaccaacaaacaccaggtgcctaaaattgagaagattgtggtgaactgtggtattggagatgctgcgcaaaatgcaaagggtttggacgcggcaataagtgatctagcactgatcacagggcagagacctattaagactcgggccagggcttctcttgccacttttaagatcagggaaggtcaaccgcttgggattgctgtgacactaagaggaaatatgatgtattcattcctagaccgagttatcaacctgggacttcctaggacaagagatttccaaggtgtgaaccccaacagctttgatgggcatgggaactacagcattggcattaaggaccagggtgtcttcccagagatcagagctgatgttgttggtaagcctcggggaatggatatctgcatcgcaacaacagctaaaaccgaccaagaagcacacaaattgttggctcttatgggtatgcccttcagagagggaagtggtcccgccaccacaattcggaaaaagaagctcaagtctcatcattttgatgcaaaatcaaagggaagaggaaggaagtgacatagttttgatgcaaaatcataggataaaaggaagtaaggttgaggaccaggagacactgtgttgtattcctggtttcattcagatgtaatgttaatatgttgttgattctttttgtaagaggcttgcacatgccatcaactatgtcgctatgaggttataatgtggtcttgcagatcttgcttgctaattgatttccatttatttcctgtttt

SEQ ID NO: 15797 - DNA, 376 bp, Glycine max
  unsure (1)..(376): unsure at all n locations
cagctgcaacagtgacagggacaacagctatagttgtggcatcagttaccggaaaagccgccgtggcagctggaactgctatagccaacagtagctactttgccaaaggtgctctttgggtttcagatatgctgacacgtgcagcgaaaacggctgctgatttgggccagaatgaaaagaaatgaaactccaaacatgaattactgtataatatgttaagttgttgaacacaaacaaatagcagcatttgtttgttgctattgtattataagacgtgaacttgctttacatatgtggctactcatttggtgcaaatgttcatatcagntaattttgagaatccatggtaagcagccaaaaaaaaaaaataannaat

SEQ ID NO: 15798 - DNA, 677 bp, Glycine max
  unsure (1)..(677): unsure at all n locations
actcgagccgattcggctcgagcggctcgagcggctcgagcaagaacaagcagcattagcaaccaagcaagagaatggcgacgacagcagccttgtgcggcactatgatgagcagctccttcctgaggagaaaagcagtggtcacaagcctgaaggcattccccaatgctaacgcagtgtttggtgtaaagggtggacgtggaggtggtgtgactgccatggctagcttcaaggtgaagctgataaccccagagggagagaaagaatttgaatgcccagatgatgtatacattcttgaccaggcagaggaggaagggcttgagcttccctactcatgcagggctggttcttgctctgtgtgtgctggcaaagttgtatctggcaaagttgacaattcagatgccaccttccttgaggatgaacaattagaagcaggatttactctcacctgtgttgcttaccccacctcagacgttgtcattgaaacccacaaggaggaagacctctctgctgcttaactttcttcctttctcaccaacatattatgcattcatgagcattcattacttccacctgtagtagcaactgaactttcattgtgtattgtaactctataataantcttccttactggttttgcacacaatggttcaataacaactctcattttccttgat

SEQ ID NO: 15799 - DNA, 413 bp, Glycine max
aatccctctgtcaaggtcaactagtgatgggtatgaggcctctggtggggaagatagtgacagggttcccaccaggattgttcagaggtccacaaattggactaatatgctcttcagtgctgatcagtacgagagaccttttgagccaaaatcatcatctagcgtggtttatagcagaaagttgtgaccaatttgggtgttaattagacaaaactattatcagattatattgatgggaattgttcattctttgatttgtgagcccaaaggtactctctcaccttcaacaacccttaactctctcaccttcttgaggttgagttgatgcccctcaaagtttttggggtaagctaaatgggaagtgggaacccatgtacaaggtttaagtcacaagagctgattgagtattccaa

SEQ ID NO: 15800 - DNA, 500 bp, Glycine max
cccacgcgtccgcccacgcgtccgcgtgtagaactagaaggtaaagaagcaattgacgtgagcggccatccatggtttcgcttcatccacatacactaacactagcgtgccctttgtccgtttcctcttcatcctcccgttttctcagatgctccgtaaattctgccccgaagcgaagaagaagcagcttcattactgcttcgtggcaagagctcgcgggagttttactattctccgcgattcctttcactgccgtgaaagctatagctaatagtccgctaggggagtcgcttcagaggaaaatggaggagagaaagacatttgctgtagaaaactcgtctacattcaaggccttagccggcaaggcccgaaaggagagcttttggtatggagaagatcggcctcgttggcttggtcctatttcatatgaatacccatcatatcttactggggaactgccccgggattacggctttgacattgctgggcttggccaggat

SEQ ID NO: 15801 - DNA, 394 bp, Glycine max
atgataatattgaagaagatggagatagtgtggaagatgcaggaccaaacccgtgtgagattgcgacaaataattaaacgtgcttcagtggacaccgttgaagtagacaagataaggaattttctgaatggagaaaaatttacgtgtgtgcttaaatttacttttacttatttcggaaaaaaatagtcctttattttttttatcattgttttagacttcaaattgtgattatttcttaaggaaaacaaatgttgggtatagtatagtcattcaattttctatttttcggatggggttgtaacatgctactgaaaaaaattgtcatagattgatgacattaaagacgaaaaaatttaaaatttcgaactattaaaaagcggcgctctagaggatc

SEQ ID NO: 15802 - DNA, 611 bp, Glycine max
cggctcgagcgttgcttaaccgcacatgacaagctagaaatgtcattacacgatctttcaaggacaggagacattcaagcctgtaaagcaactcgaaaatcagtcgatagcttactgaaagagctctctaaagagttgaagcaaccattggcaattttgcaatcttctccgcaagctgctcaaatattccccaaggtggaggaacttgttaccaaggagagagagttgcaggataaacttctagtaaaacactctacaattgtagacgcctatgagaagaaagcaggaagggaaattgagaatcggattgcttcacaacagcagaaaattactgctttgagacgggagattgatgatcttatggacttgattgatgagatatgataggtgactatgctgctcgagataataatgtgctcccattttgtccttgttttattttatttaggtcacgggtttgttgcggatatataattgcaaagagattagtgatacttctgacggttggaattttggtgcagatcattgtctttagtattatggtaacatttagcataaagatcgctaatttaatatccatgcttatctaacaaacagatgtattgctttcc

SEQ ID NO: 15803 - DNA, 368 bp, Glycine max
agaagacgacagaagggggagtggcaatggaatccagaaacttgggcagactgggcatagcatccacgctttaatcgaccactgcttcttctacttttctttcctcaaggttttggcgggagtcgtcgtcgtcattgaatcagccatgcctcggtactactgtgactactgcgacacctatttgacccacgattctccatctgttagaaagcagcacaatgcaggttacaaacacaaggcaaatgtgaggacctactaccagcaatttgaagaacaacaaacacaaagtttaattgatcaaaggatcaaagaacatcttgggcaagctgcaacgtttcagcaggttggtgtggcttataatcatctaa

SEQ ID NO: 15804 - DNA, 255 bp, Glycine max
acggggcacagcagcgtccacgctttaatcgacgactacgtgcttcttctcgttttcttccctcgagttgttatcggtttttggcgggagtcgtcgcggtcgtcatcgtcattgaatcagccatgcctcggtactactgtgactactgcgacacctatttgacccacgattctccatctgttagaaagcagcacaatgcaggttacaaacacaaggcaaatgtgaggacttactaccagcaatttgaagaacaac

SEQ ID NO: 15805 - DNA, 586 bp, Glycine max
gacttcacagaacgacaactgtgccagcattcattatagagagacgtagtactacacttcttgagatcgatcataataaacactcaaaccaaacaagcaaaactaaacttaccaatgaagttgaagcagcagaaaatgagagtagtagtagggtcagtgtggctgtgcctctttctgttggctgtcggggagtcggagggagcggatttggcggcgaagtgcaacctgctggttcagaaagtgctgccgtgcctgaacttcgcgacggggcaggcggcggttccgaccaaggactgctgcgaggcgacgtcggagataaagaagagcgacccggagtgcctgtgctttgcgatccaacagactcacaagggtagtccggaggtgaaaaatatgggcatacaagaggctaggctgcttcagctaccttctgcttgtaacttgaagaatgccagcaccaccaactgtcttaagcttctgggtctatctccaaactccgctgacgctgctatcttcagaaatggttcgttgaaaacgaattcagcttcaacagtctcagaagaaatccacaagggctcttatggaaaca

SEQ ID NO: 15806 - DNA, 514 bp, Glycine max
cccacgcgtccgtattttttaacgatatgcaataagcaaggccacccgaaccagggaaccctaaacgccgtcgacgccgtggctggaagaatatggcttcatttgtttctacccactgtatccttcctagcggggttggatttgtgcatgaccaagatcgttcttgtggtagaactaacactttgcatcttcaaaatgctcctaaaagccctagctctctctcctttttgctctccgtgcgagcttcagaaagtagatcagatgccgttgttgttcagagcaagggtcgatcgtctttttctcaaacagctgctgtgaggcatcttacaggttctgttaccagagcccatggacttcgttttgctgtggttgttgctagatttaatgaaattgttaccaaaccgctcttggaaggtgctttgggtactttcaataattattcagttcaagatgaggatatcgatgttgtctgggtacctggtagttttgaaattggtgttgttgcagaaaggct

SEQ ID NO: 15807 - DNA, 841 bp, Glycine max
cagcagttggtgcggtggaatcactagtcaagataaaaacaggtgatctaatttcattatcagaccaggaggggggggatggtcctacatcctctagtagggggtgcggtggaggagatatacaacatggctatatctacatcagaaagaatggcatcagtctcgaaaaggattacccttaccgtggtgacgagggtaaatgtgactcaaataagaaaaatgctattgttactattgatggccacggatgggttcctacccaacttgaggaagccttgaaacagggcattgcaaatcagccagtggccgtacctattccagcagacgactatgaatttcaatattatacatcaggtgtattcaaagggaaatgcggtacagaattaaatcatgctctcctgcttgtggggtatggtacagaaaaagatggagattattggatagcaaagaattcatatagtgataaatggggagagaatggctatatcagaatacaaagaaaactgagcacttgtaaatttggaaacgggggttactatcccattataaaagtcaccgatcaacaagccaccaaatatgtgtgacaatggcatcggctagctgtgcccattgagcctttggaagtaattaataacaaggccaaaatttcaaggagactatctttgagctattttatctttatataagtattgtaatttctgttccctaaatcatctggttgctgcacgtgttggccccagattgagtatctgtttagtctatctacagtatctatctaaataaaggtgcgatggctctatgggcatcattataaatgcatactcattttgtgtttaaaaaa

SEQ ID NO: 15808 - DNA, 363 bp, Glycine max
gattattgacagtcacataaataaaagtggggagggtttgagaaagagaaagagaaaggaacacactaagcagatatggatgggatgcaaatagctctacctattgttggagttattgcggctgcagctgcgaccttctatgcagtaagctttgctgaacttagagagaaatcgtttagagatttggaagaatctgaatatgaagatggggtttataggccatcccctagctcccgagagaggcgtgccagaagacaagctaacaaaaataacaaaagatgaatgacttcattcaatcatctatgcttttcccaaaggtgtggagtggtggaattgctttcacgggaccgattttctatcttc

SEQ ID NO: 15809 - DNA, 680 bp, Glycine max
gctgctgccacttttcgctgagttgcgtcgtctctctaacaaaacaaacaaacaaaaaaaatgatttctgcgatttcgtgggtgcccaaaggggtttcgaagtcggaacctgtcgtggctgatcctcctcccgaagaggaaatccaagaaatcatcgccagccacactaccaaaagtggagacagtgacaatgaagtcgccaacaacgatgaagttgtggcacaagcattaaacgtagctgatgcagttggcaaagcctccaccggaagctgtgacgaaataacccttgcgttgaaggaccttgacatggacctttatgatgacgaagatgaaggaattgaggtgttcagttctggaattggcgatctttattatcccagtaacgacatggatccctatatcaaagataaaaacgatgatgattctgaagaactcgaagacatgatcattaacccaactgattctgtcgttgtttatgcatgtactgaggatgaagtcagttatcttgaggtttgggttatcgaggatgccgattctagtgaaatgaacatgtatcctcaccataatatcattattccagcatttccactctgcacagcttggctcgattgcccccttaaaggaggagaaagagggaacttcatagctgttggttcaatggaaccgtccatagaaatttg

SEQ ID NO: 15810 - DNA, 306 bp, Glycine max
aggaaaggttgagttgaaagaacaggaaggagacataggaatgggaaagttgaaagtgcacgagctggagaaagcaaacggagaggaaacatacctttctggacataaagagaacaccaagtcttttggtgtagaagttaaagcccacatgcataaagaagatgctaatcccattaaagatgatggtgaaggactacagagttgacagaactggagggaccatgggaaggaagagttgaaagaacaggaaggagagaaagggaaggaatagttgggagaactggatgaaaaacagaataaaatttt

SEQ ID NO: 15811 - DNA, 1511 bp, Glycine max
atcttattttctggtcataactttaaattcttttgcacccctcattttgttttctaatatataataactcctctgcttcaacacactacttctcactctctccctctctaatagtaacagtaatagtaatatacataagtaacataaccaatggaagcgcgtgcaggagccaatcagcgtattgcaagaatctctgctcatcttcagcctccaaatttccaggaagggagtgatgttcttcttaagagtgctgagtgcagagcaaagggtggggcacctggattcaaagttgcaattttgggggctgctgggggaattggtcaacccctttctttgctgatgaagatgaacccattggtttcagttcttcatctttatgatgttgtcaacacccctggtgtcacagctgatgttagccacatggacactggtgctgtggttcgtggctttctggggcagcaacaacttgagagtgcactcactggcatggacttggtaatcatacctgctggggtaccaaggaaacctgggatgacaagagatgatttatttaaaataaatgctggaattgtgaggaccctttgtgaaggaattgccaagagctgccccaatgcaattgtcaacttgattagtaatccagtgaattccacagttgctattgctgcagaggttttcaagaaagccggtacatatgatccaaagcgactactgggtgttacgacccttgatgttgtgagggcaaatacttttgtggcagaggtacttggagttgatccaagagaggttgatgttccagtggttggaggtcatgctggtgtcacaattttgcctcttttgtcacaggttaagcctcgcagtagcttcactgcagaagaaactgaatacctgacaaatcgcatccaaaatggtggaactgaagttgttgaggcaaaagctgggacaggttctgcaacactatcaatggcatatgcagctgccaagtttgctggtgcatgcctccgtggcttaaaaggagaagctggggtagtggagtgtgcttttgttgattctcaggttacggaacttcccttctttgcaaccaaggtacgtctaggtcgtgctggagcagaagaggtttatcaactgggtcccctgaatgagtatgaaaggattggattggaaaaggcaaagagagagttagcaggaagcatccagaagggtgtagagttcatcagaaaataaatgtgataaggaaaaactagtttttgtctcttatatataaggaccatgtgtaatgcttctctttgttcatagatttttttcttcttcttaagaatagtactctaaatttttggtgtcatccgtaattgctgatgataacggatttgacatcagtggaactgcttaataatctcagaaagatactaaaatatcagccttttgtactaattccagatcttattttctttaatattaaaatatttataacaaaaaaaaaaaaaagcccgccccccccccgactagcaccctcc

SEQ ID NO: 15812 - DNA, 362 bp, Glycine max
ttcggcacgagggaaaaagcaaagagagagttagcaggaagcatccagaagggtgtagagttcatcagaaaataaatgtgataaggaaaaactagtttttgtctcttatattttaaggcccatgtgtaatacttctctttgttcatagatttttttcttcttcttaagaatagtactctaaatttttggtgtcatccgtaattgctgatgataacggatttgacatcaataatctcagaaagatactaaaatatcagccttttgtactaattccagatcttattttctttaatctttaacatattcataacacatttggcagtgcaaaagaaatagtaatggctcttttgtccctttaaaaa

SEQ ID NO: 15813 - DNA, 431 bp, Glycine max
gacccaaatgcaaagttgtatgattatatataacaagtctggggcgctgaaaaaatctctctaagccaaaccagcctttacccacatgctaaggttatgatatgctctttggaaagaagcagggcccgaaggagaatcgaacatctaaaaacatgaccaaaatgggcatggaattctcatcatcttccccttaagtttatcttcattattatattggttaatttgaagctgcacgtacagtggtaagtaacggaaaatggggttgcacatggtggctgtggcgaagttccacttgcatgttgccagacacagtgtaggccctgtggtggcttggaccgtttgtcctatagccttcaagctcttattgagtctgaggatgttccgagaagaagcactttactcaacgaggttcttcttctttcgattggggc

SEQ ID NO: 15814 - DNA, 587 bp, Glycine max
taccggtgggagaagaccaccgaagggggtcttagaatggcttcctttcctactcttcatggcctgcacaaccctcttcctcgatctcagttcctaaggccaagatcaccctctcactcaccaattccctctcaaacaacaagggcctcacaaaacaagcaccaactcatgaagttctaatgccacgtgctgcaaagttcaacatattggaaatgatgggagggagaggactatgcaacggggaaaaaggtcttcagcaagagctgaaaaggcaagttgttgttccacaatcatcaatatcatcacaagaagaagaagcaccaagtggtgaaaaagaggagcaagaaggtgaaggtggtgatgatgatgaaggaagtgttgaggtaccagaagatggttttgagaaggaaatgatggggctaacagggggttttcctgggggtgagaaagggttgaaaaagtttattgagaaaaaacaaccctcctacaaaagcaactaataatgttgtctccctctcattttgaaagaggccattgtgaagaatattcaaaggaaattaatgttcatttttatttgatgttaaaaa

SEQ ID NO: 15815 - DNA, 494 bp, Glycine max
ggcaggaactggtttctccacctcctgtctttcctcttccagggaaactacctggaactgtaaggagaagattgtcattcataaaagcagaagtgaagtatgtgaacgctgaaaaggctaaggaacttgtggaagctgatggatatactgaccttgatgtgcgggacaaaactcagtttgagcgagctcacataaaatcttgttctcatgtgcctctttttgttgaaaacaaagacaatgatcccggtactattataaaaaggcagctgcacaataatttttctgggttgttctatgggttaccattcactaagccaaatcctgaatttgtacaatctgttaagagccagcttccccctgaaagtaaactcttgggtgtatgtcaggaaggactgaggtctgctgcagcagcaagtaagttagaagcagctggtttcgaaaatatagcatgcataacatttggcctttaaacttgtaaaccaggaacttttgat

SEQ ID NO: 15816 - DNA, 477 bp, Glycine max
caatctcatacaatggcaggaactgctttctccacctcctgtctttcctcttctagcaacttagggacatgttggttggtattaaaaactcacaatgcaagggccgtgccagggaaactactacctggaaatggaaggagaagaatggcattaataaaagcagaagtgaagtatgtgaacgctgaaaaagctaaggaacttgtggaagctgatggatatacggttcttgatgtgcgggacaaaaatcagtttgagcgagctcacatcaaatcttgttctcatgtgcctctttttgttgaaaacaaagacaatgatcccggtactattataaaaaggcagctgcacaataatttttctgggttgttctatgggttaccattcactaagcctaataaatccattgtagtctttcttgattttgctcttcgtgactcattatgcatttatgcatgtagcataattaaggaagtgtgatta

SEQ ID NO: 15817 - DNA, 522 bp, Glycine max
tctcgagccgaatcggctcgagtactaatctcttaattctctttggccatttctttagtaacattaagataatgtattctgtggaaatggcaccttatggtagattcattgctaacattttgatagctgtgatgtttgtttgcttgttttttgtgaccaacattgtggcacaggattcagagattgctcctacaggtcaattggaggctggaactgggtttgatttgcctgtttctaaggtgatgatgtgttcttcagtgttggcatctcttttggcattcatgttgcagtgaattggaagacagtgggtttcaaatttgaacttgttggggataatcttactttgtatgtgggttaaaattcatatggttatatatatactatatactatatgtttggttgttgaaaatggtactgtatttttgggcattttgtaagattagctttatgaggagctacagttacaagtatgtaatttctactcagctattattggtgtgagctgatatattaatataattg

SEQ ID NO: 15818 - DNA, 866 bp, Glycine max
  unsure (1)..(866): unsure at all n locations
tattggttgtgatgcaaaggttgctttggacattcataatctgcgtgaagagaatccagataagttttataaccagtttatgaataaagttctatatgcaagagaaggtgctaaaagtattatggataggacatttgcagatttaccttggcagattcgagttgaggttgatggagttgaaattgaggtccctgaggatgcggaaggtgtgcttgttgcaaatattggaagctacatgggaggtgtagatttgtggcaaaatgaggatgaaaattatgataattttgatcaacaatccatgcatgataagatacttgaagttgtgagcatatctggaacatggcacctcgggaaacttcaggtcgggctttctcgagctcgaagacttgcacaaggacagtcaattaagatacaattgtttgccatgtttcctgttcaaattgatggagagccttggtttcagcaaccctgcacaattaacataacccatcatggccaggctttcatgttgaagagggtggctgaggaaccccttggccctgcatctgcaataattgctgaagtgcttgagaatgctgaaacacataatgtaattaatgcttcacaaaagcgagctcttcttcatgaaatggcactgaggctgtcctagaattctctccaccctgcgaatgtgattaaagattttgtatttcttttgaaatatattttgcacactttgtgtattacttttcctttttgaatcctttgtccaaactccaaacttcctgctacttctgaagcaggcttgtgtattacgaatctttacatgaaaagaaagaatgaaatcagcaatatacaattatatgaaccaaaaaaaaaaaaanaaa

SEQ ID NO: 15819 - DNA, 518 bp, Glycine max
atattcttatgatgaatgagtttatctaatgtgtgctcatttatttcattaacagactattgcagcagatctatctcgtgcaccaaataatatatgccaacttgccagtgccagtgagaacgcagttacttcaccatttgagaatgaaaaaggttcaaatctaatgatgatgagaggaatgacagccaaggactttgaccctgtaagatattcaggaagatggttcgaagttgcttcacttaaacgtggatttgcaggacaaggccaagaagactgtcattgcactcagggtgtatatacatttgatagggaagcaccatctatccaagttgataccttttgtgttcatggaggccctaatggatttataactggaattagaggaagggttcaatgtctttcagaagaagatttggggaaaactgagacacagctagagaagcaggaaatgatcaaagaaaaatgctatctccgctttcctacactgccattcattcccaaggaaccttatgatgtga

SEQ ID NO: 15820 - DNA, 374 bp, Glycine max
cccacgcgtccgcccacgcgtccgcccacgcgtccgcccacgcgtccgcaaagacatggtagaggcttcttctacgagcatcacctcctccacctcacccttcttcttatccgagacaatgcaggacagtgtcaggaaggacattggtgaagtgctcgttggaagtcccaagtaaggttctgacaaagcatgtcttatctgggcttgctgcttccttgatatttatttctccagcaaatcagactattgcagcagatctatctcgtgcaccaaataatatatgccaacttgccagtgccagtgagaacgcagttacttcaccatttgagaatgaaaaaggttcaaatctaatgatgatgagaggaatggacagc

SEQ ID NO: 15821 - DNA, 294 bp, Glycine max
caaaccaagcagaatagaaagttcagaaggggcaaccgtggacaagtgaaaaaggctaagacatggtagatgcttcttctacgagcatcacctcctccacttcacccttcttcttatccgagacaatgcaggacagtgtcaggaaggacattggtgaagtgctcattggaagtcccaagtaaggttctgacaaagcatgtcttatccgggcttgctgcttccttgatatttatttctccagcgaatcagactattgcagcagatctatctcgtgcaccatataatctatgccaa

SEQ ID NO: 15822 - DNA, 586 bp, Glycine max
gatttttgtttaatcttcccatacttattctcttctactggctctttgctcctttactctctttggggcccctccagaagacaatagagtgcactgctttatctgagaaagcaagagtgcaagagaagaaaaagggtttgatgtgtgagtgatgagagggtgagttgggaagatggagggtgcacaggaggagctagaaagaagaagcaagtttctcaaaagcttgatacagaagaagaaaaccatagagcaacaagagcagcatgatcacctacaacacaataacgttcgtgtcagagcttgtgacatgcctctccctcttcagaaccgtgcctttcgttgtgcacgtgatctcctggattctatgccatcaaagaagcttgatagtaaacgcctggctctcacacttaagaaggaatttgatacttcgtatggtccagcttggcactgcattgtgggtactagttttggctcctatgttactcattcccttggtgggttcgtgtatttttccattgacaaggttttatgttcttctcttcaaagacagctgttggaccattagaccattcatagctctcacaat

SEQ ID NO: 15823 - DNA, 553 bp, Glycine max
  unsure (1)..(553): unsure at all n locations
accagatctgagaaagcaagagtgcaagagaagaaaaagggtttgatgtgtgagtgatgagagggtgagttgggaggatggagggtcgcagaggaggagcctagaaagaagaagcaagtttctcaaaagcttgatacagaagaagaaaaccatagagcaacaagagcagcatgatcacctacaacacaacaacgttcgtgtcagagcttgtgacatgcctctccctcttcagagccgtgcctttcgatgtgcacgtgatctcctggattctatgccaccaaagaagcttgatagtaaactgcctggccctcacacttaagatgatgcgcaagagatgatattgagcagaatcagcagttgcctttttgaggcttcaccaattttattggagaagacttgaagtttcaataaatggaaagaatttgattcttcttatggtccagcttggcactgcatttgtggtactagttttggctcctatgttactcattcnctttgtgggttcgtgtatttttccatttgacagggttatgtccttctcttcaagacagct

SEQ ID NO: 15824 - DNA, 403 bp, Glycine max
gaaattcaaagtatggaggttgaataatatctgctgagcattaaaagttccccaaccatgaaggcaatccttgttttcattttactcttggcctctatttttttccttcccagttcaactcttgctcgacaactggaggtggtgacaggcggtacccagaaccctaataatcccgcttttaaatgtagccgcggcggcagttataggccttgcgccccatcgaactcgccaccaagaccaccatgtaatgggtacattaggtcttgccacatcgcatcgccaccaagaccaccatgtaatcagtattgtagggaaggttgcttaccatgaaactaccccccaccgtactataatgatatatggtccttttaattcttggtacttgctgccatctttttaacac

SEQ ID NO: 15825 - DNA, 434 bp, Glycine max
gacgacagaaggggatgatggttggttgatgtaatgtgatgttttgtgtgtcagtgggtgtgaattttattggtggattcgcattcgcctctggaattcccaaatcatcagtttcagcgaccatggcttccaactccgtccgagttgccgccgctcagatgacatccatcagcgacctcgctgccaatttggccacttgctctcgtctcatcaaagaagcagcatcagctggagccaaattgctttgctttccggaggccttttcttacgtgggtactaaggatggcgacagtgttcgtgttgctgaaccattggatggaccaattatgagccactactgctctttggccagagaatccagcatttggttgtcacttggaggcttccaagaaaaaggatcccatcctcaacgcttgtctaatactcatgttatc

SEQ ID NO: 15826 - DNA, 473 bp, Glycine max
tatcaagggggggccgggtctactggggggagagaactgagaagcagagcagcggtgtggttgattgggatgtcggatccgtgccagcgggtgaaaggaggaagattagcattcaaaggaggaatccttgccagtcgctccaaatccattgacaaaaaggggaagaagaagaagaagaacaagggcttgggcaacgacaacaaccctaaccctaaccctaaccctgaagaacaggaactggaacaggaacagaaacaggagcaggaagaaacccccctcctcgaggacgagggcgagggatctgaatacaccatcgatgcggccaagcgtatgaagtacgaacaactgttccctgtcgaagccaagaagttcggttatcaacccaaaaccaacttcaagtcagttgaggatgccctcgatgatcgcgtcaagaagaaggctgatcgctattgtaaatagtaagtctatacttg

SEQ ID NO: 15827 - DNA, 838 bp, Glycine max
ccctcaacgaaacgcaagaactggtatatagtcatggtcggaaattggaattaacttcccagaaattaaacgaaagtatgtaccctaaaaaataacagtataaaatttgcaaagttacatttttaatttaactttagccgcggaaaaggtttttgcgttgcgttgcactagcccctgcacagtagtgtggtacgatgatttgattttgataagataggtctgtgctgtggggaaaattggaagcatcgatcggaaaatgcaatcgttatcgttgagtatgagtctgaggagtagtagcttagtgaattttcttttgctgggttcagagacgagagtgagaagcagaaggagtgtcatcgtagcgtgtgcttcagagggagacagtggcagcagtagcacaagctcgtttctctctcggacccaaacctacgctcttcttaagcaacaattgcaagtagctgctaaatccgaggattacaaggaagccgctagaattcgagactcgttgaagctatttgaggacgaggaacctgttttgcgtctgaggagactattgaaggaagcagttgctgaagagagatttcaggatgctgctagttatcgtgatgagctaaacaaaattgctccacactctcttttaaaatgttgcagtgatgctacaacattgggaatcagggttcaagttaggagtgtatatatagagggcagaactcagccgtcaaaggggctatacttctttgcatatacaataagaattaccaataactcagaccaccctgttcaacttcttagaaggcattggattataactgatgctaatgggagaacggaaaatgtc

SEQ ID NO: 15828 - DNA, 482 bp, Glycine max
gttctttgcgttgtgttgcgtttcagtagtgaggtacgatgatttgattttgatttggatggttgcgccagaggaataattaataacactaataggataggtttgtggggaaaattggaagcatcgatcggaaaatgcaatccttatcgttaagtatgagtctgaggagtagtagtttagcgaattttctgttgctgagttcagagacgagagtgagaagaagaagaaggagtgtcatcgtagcgtgtgctttggagggagacagtggtagcagtagcacaagctcctttctctctcggacccaaacctacgcccttcttaagcaacaattgcaagtggctgctaaatctgaggattacaaggaagcagctagaattcgagactcgttgaagcaatttgaggacgaggagcctgttttgcgtctgaggagactattgaaggaagcaattgctgaagagagattccaggatgctgctagttac

SEQ ID NO: 15829 - DNA, 659 bp, Glycine max
ataagaacagagctcttagaactgcttttgtgaaatctgactcaggatccttccttaaaatagaaattgacgatcctgctgcacaagccattgagttcctcatacttgatgaggctaaaaataagtggtttaagaataaaggtgagaactttcacatcaagttaccagttaaaagtaagctatctcaagaagtttcagttcctgaagaccttgtacagattcaagcgtatcttaggtgggaacgaaggggtaagcagatgtacactccacagcaagagagggaggaatatgacgcagctcggaatgaactatttgaggaagtagctaggggtacttctgtacaagatctccgtgcaaagttaactaagaaaactaaagctgccgaagtaaaggagctttttgtttttgaaacaaagaccatccctgatgaacttgtacagattcaagcttttatacggtgggaaaaagttgggaagcctaactactctcaggaacaacaactcatggaatttgaggaagcaagaaaagaattgttagcagaacttgagaagggggcttctctggatgagatacggaagaagattaccaaaggagagatacaaattaaagttgccaagcaatccacaaaccaaaaaatactttcgtgttgaaagaatccc

SEQ ID NO: 15830 - DNA, 683 bp, Glycine max
gcgccccccatcagtaccagtcgattaagaaaacgcgaaaatcatcgctgaaaaacaaacatggtctgcctctgttagcagcaaatattaggttgtttgttccgaacccaaccatggaagagttcagatccaaatcgtacggtgacggaaggatgcagattgaggcctaccgtggaaccaacatgcaagatctccggtgctacagcgcctcctacgcctcttcggtgcacccaacaacaacacagcaaacccagatgggaaataacgacgccaagtttaagaagggaaagtcaacgaatgggtccacatccaaaagttggagctttagtgaccctgagttgcagaggaaaaagagggtcgctagttacaaggtctatgctgttgaaggaaaactcaaaggctctctcaggaagagtttcaagtggttcaaggacaggtgcaacagagttgtctatggctggtagttattacaacaacaacaacaactatgggtgttttatataatgtaagaataataattttataatttatttggctttgtttatctatttgctgcacttagtgtttcttttctgtggctgctaaagtaccacataaagggtgtaatatggaagagaaattgtgattcttgtgttccttttggtccatgtaaagagtgcaatcaccttgattgcttgctgttt

SEQ ID NO: 15831 - DNA, 518 bp, Glycine max
gatagttgtcagcgccccactatcagtgccagtccattaagaaaacgcaaaaatcatcgctgaaaacataaacaaacatggtctgcctctgctgttagcagctactacctcgctccacaaaaaacaccccctttctcaaatcttaggttgttccaacgatggaagagttcagatccaaatcgtacggtgacggaaggatgcagattgacgcctaccgtggagcgaacattcaagatctccgctgctacagcgcctcctacgcctcttcggtgcacccaacaacaacaacaacaacaacaacgcagacccagatgggaggaaacaacaacaacgaagccaagttcaagaagggaaagtccacaaacgggtccacatcgaaaagttggagctttagtgaccccgaattgcagaggaaaaagagggtcgctagttacaaggtctatgctgttgaaggaaaactcaaaggctctctcacgaagagtttcaagtggctcaaggacaggtgcaacagagttgtc

SEQ ID NO: 15832 - DNA, 924 bp, Glycine max
  unsure (1)..(924): unsure at all n locations
gttgaattttatgcaactccagagcactcaacaaataatcaagaatacagttcacaaaatcaatctgtcattgtacgttgctctgaaaataaaaaaccagtggtgtctgaggtttccttttcttctgccacatccactctttgctctctttcagaatctctcgcgagcttttctgctcccaaaaatgctgaggagcatattaacaacaatgcaacgtattattgattttgaagagtttgctgaaagaatatccaacagtgcatgtgaatcttcattatctcctgctgtgtatcatgaaagctcggttaaaccactgggtgatcttcagaagagatttgatacaaaatccattgtggacgagagtgatgattctgattcagagatatttagggtaaagcgcccttcttctctgaaagcagagaggagaaatatgaatgatgctatgccttcaaaacatactgcgcagcagggacttaaacgactgaagaaaatccttcctgaaggaaagagcgggcaaccaatggattccagtagaagcaatgaatcaagttacaaatacggtcaccctgttaaccataaaggtcatgctgaaatttcgtctagggacagatttgcaacgggtaatggtattcccatttctataagatgtaagaagttaggcaacgaggaaataagcatgcaacgagatcacaaccggagagataggttgcagcagacatttagggaaccaccttccatggagcttgagccaaagcgccttaaagtccgaggcccttcatttttaggcttagagagcagcagatcgaattgatgtttcaagttggctcgaaatgactgtggaacgccatcaagagtctgactttgctaacttcattntagcttattggctttctaacaatacagtaaatccaaatgattgattga

SEQ ID NO: 15833 - DNA, 423 bp, Glycine max
ggggaataatggcatcaactacgattacgcttattcgtccagcactcagattcctctcgtgtcggagtagcaataataattctagttctagtgttagcgctgcttctagaatctttcatttccgttcaatctccgctatgagcactccgcaaggctcatcggactcggcttccaccaaaacggagagggtggtgataaaggggagggtgcagggagtgttttacaggaactggacgattgagaacgcgacgcaattagggttgaaggggtgggtgaggaaccggagggacgggtcggtggaggctctgttctccgggagtgttgacgcggtgcaggaaatggagcagaggtgtcggcgtggccctcccgatgcggttgtcaccggccttcaggttttcccctccgacgatgaacctgccacta

SEQ ID NO: 15834 - DNA, 399 bp, Glycine max
acgagaagatgttaaagaggagtgtacaaagcttggtcctgtggattcagtcaagatatgtgagaatcatcctcagggagttgttttggtaagattcaaggataggaaggatgcccaaaagtgcatagaattgatgaatggaagatggtttggtggtagacagatacatgccagtgaagatgatggttcagttaaccatgccttagtccgggatctggaagaagatgccattcggctggagcagtttggtgccgaacttgaaggtgactgagttaatgaggatagcattgcaccagattcacagttccatataagtccggacctaggaatatttcacgatggctggagcttgtggaactaggccatcacttttctcggttttgcaaagatattaatttt

SEQ ID NO: 15835 - DNA, 268 bp, Glycine max
gaaccacagcaagcaatattttcagctgtattattttctctctttgtgcaaagatgggaaaattgcacagctatgtttcagtacttgctgtggcatttgtattggtgataggagtagctgaatgcagaaaaataaaagacactgagttagttgacggttttggaggaggtggattgggtggtggtgccggtggaggttttggtggaggagctggtgcaggaattggaggtggaggtggtgcaggtgggggtgctggtggtggtttcgg

SEQ ID NO: 15836 - DNA, 693 bp, Glycine max
ggctgcgtcaaggcaaagaatagaaaaccgacttgactccttcatgcatgctccactcggctcggggggatatagctcagttggtagagctccgctcttgcaattgggtcgttgcgattacgggttggatgtctaattgtccaggcggtaatgatagtatcttgtacctgaaccggtggctcacttcttctaagtaatgggaaagaggaccgaaacatgccactgaaagactctactgagacaaagacgggctgtcaagaacgtagaggaggtaggatgggcagttggtcagatctagtatggatcgtacatggacggtagttggagtcggtggctctcctagggtttcctcatttgggatcctggggaagaggatcaagctggcccttgcgaacagcttgatgcactatctcccttcaaccctttgagcgaaatgtggcaaaaggaaaaagaatccatggaccgaccccatcgtctccaccccgtaggaactacgagatcaccccaaggacgccttcggcatccaggggtcgcggaccgaccatagaaccctgttcaataagcggaacgcattagctgtccgctcgcaggttgggcagtaagggtcggagaagggcaatcactcattcttaaaaaccagcattcgtaagagctgggagtcgggcgaaaaaaaaaaaaaaagggcggccgccg

SEQ ID NO: 15837 - DNA, 717 bp, Glycine max
cggtcgagcccggatgcaaccctaattgaatccaagcaagcaggggaagtgggggtattatttgatcagaagtacaaagctcttcaaaacccaaacaacagctccacggaccacccctactgctctgctctgcaatggccgacgaggaacctgttgatcagaagagatatcttgaagagtcttgcaaaccaaaatgtgtaaaaccattactggaataccaggcgtgcattaaaaggatacatggtgatgaatctgggcagaaacactgcactggacaatattttgattattggtcttgtattgacaaatgtgttgcaccgaagctattcaccaaactgaagtaaatcgggaaggatttgatggctatcattgcattctgttctgttttcattcccaaataacttcgtctaaacattcgatgttataatatccaaactatatgccctatatggttaatattgtgtttactgtgaagttttgagcctgtggagaccttagagtatgattaataagaacattatgccaaatttttacttccgagatttggaaggatgtattttggatggatccaacgttgttattgagttttgaaataagttctgaagtgtggatttttgtattttctgtttacttggctggctaaaaacgtagccctgcaccaaaaaatagtcctccccttacatctaatcgaatcaaactgtagttggcatttcagag

SEQ ID NO: 15838 - DNA, 889 bp, Glycine max
cccacgattacctataatttcagagctagctagttcacagcttcagttcgtttttgttgatcctgtgaacttatggctgacggggtggttctgttggatacatgggccagcatgtttgggatgagggttaggattgcattagctgaaaagggtgttgagtatgaatacaaggaagaaaatctcaggaacaagagtcctttgcttttgcaaatgaacccaattcacaagaaaattccagttctgatccataatggcaaaccaatttgtgaatctgcaattatagtgcagtacattgatgaggtctggaatgataaagctccaatcttgccctctgacccttatgagagagctcaagccagattctgggtagattacattgacaaaaaggtgtatgacacttggaggaaaatgtggctttctaaaggagaggagcatgaggcagggaagaaggagtttatctctatctttaagcagctagaagagacactgagtgacaaagcttattatggaagtgacacctttgggttccttgatattggtttgatccctttctacagttggttttatacctttgagacatatggtaacttcaaaatggaagaagagtgtcctaaactcgttgcttgggctaagagatgcatgcaaagagaggctgtgtccaaatctcttcctgatgagaagaaggtgtatgactatgttgtggccgtaacaaaagtacttgagtcaaactagagagacttcttgaataaattcacgtaaggtcttgtgtaatttttatcttatgtttgctggggagttacttatagcttcctagacacttgagtgtgtctagtgtctgcaggatttgtaactttatcttatgtttgctagccttcagttacttatgatt

SEQ ID NO: 15839 - DNA, 583 bp, Glycine max
cgtacgcgcccacgcgttcgcctcatcttcctctttttctcaaccaaaaggggttcaattctagctagttctattacatcgtccgcgaccatgaacatggcgatcgtgcttctgttcatggttttcgcagtttcatcagctttagacatgtcaataatatcacatgacaacgctcatgcggatagggccacgaggcgcaccgacgacgaggtgatgtcaatgttcgaggagtggctggtgaaacacgacaaggtgtacaacgcgctcggtgagaaggagaagaggtttcaaatcttcaagcacaatctgcgcattatcgatgaacgaaactctctgaaccgaacctacaagttgggactcaacgtgttcgctgatctcaccaatgcggagtacagagccatgtacctgcgaaccttggacgagggtccgaggttgggcttggatacgccgccaagaaaccactacgtgccacgtgttggagataccatacccaaatccgttgattggaggaaggaaggtgctgttaccccagtcaaaaaccaaggagctacttgtaatagctgttgggcattcacagcagttg

SEQ ID NO: 15840 - DNA, 1868 bp, Glycine max
taaaaagctagctagctagtttcatctgggttacgcttatgtctggcacagaacaggtgaccatgggaggattaggactcaatttgactccaattactacatttgctatcattactgtgattgctacggtgctaatatggtggttttggaatgcactcaactgggtgtggctgagacccaagaggatagagaggcgtctcaaggagcagggtatccaaggaaattcctaccgccctttgattggagacatcagagatatggttaagatgattaaggaagccaaatccaaacctatggatcctcactctaatgacattgcaccccgtgtgttgccttacgttgttcacaccatcgctaaatacggtaagagttcatttatgtggcttggtccaacaccaagggtattcatcttggatcctgacaaattcaaagaaatggctactaaggtctatgattttcaaaagcccgacactagtccacttttcaagcttctagcatcagggtttgcaaattatgatggcgacaagtgggctaaacacagaaagatcgtgagtccagcattcaatgtagagaaaatgaagctcttggtaccgatattttgccagagttgcgatgatttgatcagcaaatgggagagtttgttatcttcgtctaatgggtcttgtgagttagatgtgtggccttttgtccaaaacgtgtcaagcgacgttcttgctcgtgcaggctttggaagtagctatcaagaagggaaaaaaatattcgaacttcaaagggaaatgattcagcttacaatgacgctctttaagtttgctttcattccaggttacaggtttctgccaacgcataccaacaggaggatgaaagcaattgacaaagaaatacgagaatcacttatggtaatcatcaaccgaagattaaaagcaatcaaagcaggggagcctactaacaatgacttgttaggcatactcttggaatcaaattacaaggaatctgaaaaaagtagtggtggaggaatgagtttaagggaagtagtggaagaagtgaagctattttacttggcagggcaggaagcaaatgcagaattgctggtctggacattgttgttattaagcaggcatccagattggcaagaaaaggctagggaggaggttttccaagtgttcgggaatgaaaagccagattatgaaaggattggtcaactgaaaattgtgtcgatgattctacaggagagtctcagattatacccaccagtggttatgttcgctcggtatcttcgtaaagatacaaaacttggagagcttacaattcccgcaggagtggagcttgttgtacctgtgtcaatgctacaccaggataaggagttttggggagatgatgccggggaattcaacccagaaagattctcggaaggagtatcaaaggcaacaaaaggcaagctttcctacttgccatttggatggggtcctcgactctgcataggacaaaactttggcttgttagaagcaaaagtagctgtgtcaatgatcctgcaacgtttctccctccatttttccccctcctatgctcatgccccctcctttattatcactcttcagcctgagcgtggggctcatctcattttacgcaaactctagaatgcactttttagtctaaataaggcttcttcatttgaggcgtgtttgcaattttagttttcctattcctgctagtttcttatgtagacgatagatctgaaccttcacttcaaatctatttccaagatcaatatatacctgttttgcctaagttactggtgtaattactcccccttatataacctttatcatgtttgaattttaaattgatagagtttaccttttggcttttgc

SEQ ID NO: 15841 - DNA, 255 bp, Glycine max
ggaagtagctatcaagaagggaaaaaaatattcgaacttcaaagggaaatgattcagcttacaatgacgctctttaagtttgctttcattccaggttacaggaggatgaaagcaattgacaaagatatacgagaatcacttatggtaatcatcaaccgaagattaaaagcaatcaaagcaggggagcctactaacaatgacttgttaggcatactcttggaatcaaattacaaggaatctgaaaaaagtagtggt

SEQ ID NO: 15842 - DNA, 609 bp, Glycine max
gaatgaaggaaaaacgcataactgaatcgacgaaactgaggcaaaacctacatagggaaggttgccccaatatcagcatgcttcccattgcactgcactcatcccatgcgaattaagctttccgattcgttattactacccttctcttgtgaattggtcgaatatatgctccaactatggataatatgaagaaagatgaaccccaaaatcggaagcaagatgaacttgctgaatcgcttgatggtctattcagtagtgtttccaccatgatcaaatcagagcttcaggggacaaataatcatctagagctcttggagaagatgaatgtaagagtagcagaagagtacaaagggtttggtgacttggcttcagggttgagggtttttgtggagccggtcaaatgcaagagtggtagctttaacgagtatgtcgagcagattgatagcattgagaagcaggtaactgagtttgaagctgtggtctctatgcttgataagtacatcgtgttgttggaatcaagagtgcaatctgtgtaccaaaccaaaatccatcttcccagtcaacaatgatgtaaaatttttccttttcgtgataaaattccatagttat

SEQ ID NO: 15843 - DNA, 471 bp, Glycine max
ggaatcgacgaaaccgaggcaaaacctacatagggaaggttgctccaatatcagcatgcttcccattgcactgcactcgtcccatgcgaattaagctttccaatgaattcgtttggacctgaaaaacaacacctggtttgattgtcaccttgggtcgcacagttattactacccttctcttgtgaattggtcgaatatatgctccaactatggataatatgaagaaagatgaaccccaagatcggaagcaagatgaacttgctgaatcgcttgatggtctattcagtagcgtttccaccatgatcaaatcagagcttcaggggacaaataatcacctagagctcttggagaagatgaatgtaagagtggcagaagagtacaaagggttcggtgacttggcttcagggttgagggtttttgtggagcagttgaaatgcaagagtggtagctttaacgagtatgtcgagcaga

SEQ ID NO: 15844 - DNA, 695 bp, Glycine max
gaaaggatcaacttccaaaggctggaattaactttggtgcttgagaggtaagtaaaactagaaagagaatgatggagcaaaggtaatagagggtggagaatgagtctgatgagtcttctacctcctcttgctgctgcttcttacacaaacacagttcctaaactgaaaactcacagtccaaaccttgtacttggacaaagggtcctacctaatctcctctcattggcccttgctgtaaccttagcctctcctttaccttcatatgcaatcccatcccttaattctcaatcccctccaatctctttcaccgctcctttttctcaatccaagaacttggagcttggactagaaaatggaaaaattagaccttgcccatcaatcaatccaggttgtatatcaacaaatcccaagtcatcatcttttgcgtttccttggcttattccctcaaattccttggacgatgcaattcagaaactacgtgaagcaatcctaaagacccagaaaaatgtgaaatttcagcctgtggaagatagcccagatggtcaatatctacaagctgaagttgatggaggatttggtagagatgttattgagtatctggtgaaaggtgatgtggttgcatacaggtgtgtggcaatgaaagtgactgatgtgtaccctttcactactgcattaggagattcaaagggtcaaga

SEQ ID NO: 15845 - DNA, 354 bp, Glycine max
gagaaaagaaagagaaagagcgatgccaccattattaaggcctcagtttgttatgttcggttcttccattgttcagtatggtctttatgatgaaggttggatggctgatctttctcacttgtatgctcgcaaggttgatatagttttgcgaggatatgctggttggaattcaaggcgtgctctgcaggttctggataaaatctttcctaaggatgcccctgtacaaccttcattggtcattgcctactttggtggtaatgattcttctactccccactcatcaggcctaggtcctcatgtgcctctccaagaatacattgaaaatttgaggaagattgttaaccatctcaaggt

SEQ ID NO: 15846 - DNA, 564 bp, Glycine max
agagattgcaaataaacgacggaaaaccatgtcacaagttgctataaattggtgcatatgcaaaggtacggttccaattcctggagttaaaacaattaaacaagcagaggaaaatttaggtgctcttggttggcgcctctcctcagacgagttgcttcagttggaggatgcagcaaacgaatcacctcgcaggatgatccaaaacattttccaaaccagataaaacctgtggcgagacctcagcactcggttcgaaggaatgcatacttttcactcaatgatggtcactggtttgtatcatctggtatcatgaaaggcagagagcaaacaaccttgaccaggagaattgacaacgtaccactctattgtggcacatgggcttaaaactaatgcgaagagtccgtgacagtgatggtgcaacgtattttggataatctcgttgtcggataatattgctttattgttaaaaattatactgacgggtagaaatgtacaatggaatgattctatactgaccaaaagccacgcttacattcacaaaaattaaaaaaatcagttgctttc

SEQ ID NO: 15847 - DNA, 664 bp, Glycine max
ataaccaagaagataattcaaaaaagaagagaccaagagagagagagagagatggggcgcaagaacacaattttcttggcattggttgttactttgatcactaaggagacaatggcagaacaacatgtagttggtggaagccaaggttgggatgaatcaacagacttcaattcttgggtttcaggccaaacatttaaggttggcgatcaacttgttttcaagtactcttctttgcatagtgtggttgaactaggtagtgagagtgagtacaagaattgtgatcttggcaatgcagtgaactcaatgagcagtggcaatgatgttgtgaaactgaacaagcctggcacacgttactttgcatgtggtacaatgggccattgcgatcaaggcatgaaggtgaagatcacaacagtgtctggctctgagacctcttcccctgcatcatcatcttcttcttcatctaattcatcttcggcctcacaatgtctcgtttatcttgtgctcattgttggattgttgattgcctctcttcttaactaggtttggtccatgatttatgaagtttggccatggatttcattgtctatgttgaaataatagtttaataagagtggtcatgtgaaatttcttttaatcaatttggaaatgttattcatagaatgtc

SEQ ID NO: 15848 - DNA, 485 bp, Glycine max
acgattacgcgtgcggtgagggtgcacgttggcatcatcaagctataaaagaaaagaaaagaaaaaaagaaggttggagttagatacacacacatcacaaaaagaaaaaaaaaaaaaagaagctacattgcttcttgttggagacatcaaacatggcaactggtgccaccccagatggattattctggtcagtgtatgaagggtgcatatcctgctacgataactgcgtcgagcgacgaccctaccaccgtaactgtggctgtgcactccataacaagtcacttattaattgcacgcacaagcttccaaggtgtaacaatgtgtcataccctatgaagagggcatggagtgaaggaagcttggtcttggcagcttcttcttcttctccttctcaagttgcaactgggggaaggccacaaccaagtttggcaaacgttgaggaggaaaataagaattgctttagttaatgtttgacaataattaat

SEQ ID NO: 15849 - DNA, 391 bp, Glycine max
ggtcgcatatcaatcaaatcgtgcgagctagagagctgggttctgcgatctccttttccatcatcgtcatcatcttcatctcactggctatgccatgctcgccctttcgagaggcctcgtttctcgtctgcaacgtgtcgccgtcgattcgcagttgtcgctccgatttctgagctccgatgcggcggcgattcggtctcggataattgaaccgaagcccagtgcgatgacccctaattccaagcgaactgggcttattgcggtgaagtgtggaatgagcgcgctatgggataaatggggtgctagaattccaattactgtgctttgggtggatgataacattgtgtctcagattaagaccccagagaaagaaggtttctgtgctctccag

SEQ ID NO: 15850 - DNA, 497 bp, Glycine max
ggtacctatgacactttgccgtcgtgagttgcatctgcgtgtgactgcaagatatggctcttgttctcaacgtctcattgtgttccacttgtaaaccccatctttctctctcaacctccaatcccaacaaagcttcttctacttttcctcttcctcttcctcttctgggactcaacataaagcaaagtctccaaccatctcagaaactcacattttcattgggtgaatccgtgtctggtgccaccctcgttgctctcctctctgcttctttcatctttgttgatcccgcacttgcattcaagggtggagggccatacgggcaggaagtgacaaggggacaagatctcactgggaaggactttagtggcaagactctgatcaaacaagacttcaaaacgtccatactgagacaagcgaagggaacaccccaaagagggggcccccccaaaaaatttttttttttttaaaaaaaaaaggggggtgttttgggccccccc

SEQ ID NO: 15851 - DNA, 339 bp, Glycine max
ttcaaatgtttgcatagaatggtttcatagctaacacatacgtccgttcatgttgctggaatcttgttagctatgaaaccattctatgcaaacatttgaaggtcttggagtgagtattcagcaatggaatactaattgcagaacaatgtatcacgcgtagcatttccagttgttgcgttcactccatcagcaactttgcagaggtattcacgttgatcttctcttagtggtacatccgtgaagtcagcgcctgtaatatttgaccccgtaaaagatgtatttcctggcaaatgtgacacaggcaaatttaagcaatgctaacttggaaggtgcacttgc

SEQ ID NO: 15852 - DNA, 580 bp, Glycine max
cttctctctcaacctccaatcccaacaaagcttcttctacttgtcctcttcctcttcctcttctggttcgtatactatacttatacccttctcttaaacaattcccactctttgttccctctgcttcatttcactcatcttcacagggactcaacataaagaaaagtctccaaccatctcagaaactcacattttcattgggtgaatccgtgtctggtgccaccctcgttgctctcctctctgcttctttcatctttgaagatcccgcacttgcattcaagggtggagggccatacaggcaggaagtgacaaggggacaagatcccactgggaaggactttagtggcaagactctgatcaaacaagacttcaaaacgtccatactgagacaagccaattttaaaggtgcaaagttaataggtgctagcttctttgatgctgatttaacaggtgctgacctttcggatgctgatcttagaaatgcagatttttccctggcaaatgggacaaacgcaaattgaagcaatgctgacttggaaggtgcacttgcaacaagaaacacttatttgaagggatcaaa

SEQ ID NO: 15853 - DNA, 406 bp, Glycine max
ggagacacgtggcattgtgtttctcttcatggcgttctctgctactctatcctacacctccttcccttgccttcctcgtttcccgcaaactttgagaacaaaaagtgttcatttccctctgattcgtgcagtgcaaggtggtcaagcagagacacccgagagcaagaagagtgaagggtcatctaatgctcagtcttcaagtgctgctgctcctaaacccaagaaacccgtctattccttgaagaaaggtcagattgtgagggtggacaaggagaaatatctcaatagcgtcaattatctttctgttgggcacccaccttattacaaaggattagattacatttatgaggaccgtggtgaggtcctggatatgcgtatatttgaaacggcagattatgcacttatt

SEQ ID NO: 15854 - DNA, 601 bp, Glycine max
acgagctcgtgccgaattcggcacgagggaaaacatgaagcttaagcagttggaaggtctcctcggtggtcttcaacagttccctcaacccaaggtcgagcttgaacagtacccaacaggaccccatatagcttctcgaatgcttttcactgcagagaattcttttgaggatgtgagcgacaaagtagtggctgactttggatgcggttgtggtacgttaggtgttgcagctgcactgttgagtgcagaacatgttcttggcattgacattgatccagaatctcttgaaatagcttccaataatgctgaggaacttgaggttgacatcgattttattcagtctaatgtcatggacttgggatggagaggtcgaattgttgatacagttataatgaatcctccatttggtactcggaaaaaaggtgcagatttggattttctctccgttgctttgaaggttgcttctcaagctgtttattccttgcataagacttcaacaagagatcatgtgaaacgaacagcattaagggatttcaatgctagcagtgctgaagttatatgtgagcttcgatatgatgtaccgaaaatgtacaaatttcat

SEQ ID NO: 15855 - DNA, 714 bp, Glycine max
acctccggtgctgttactttgacatcaccaccgactcggtctctacaacccctgtggaggaaggacagatccagcatcaagataatgtgtctctctttcgtcccgtttaccctgtaacccctgaaggaagctacatgaatggttttccaatgatgtccatgtatccaaaggatgttggttctcgagtcatgtcagttcaagctgggaatccaatggaaacactcactttagaacaaggaaatgtggaacagaatgatccaagtactaagcttgtttgtacaatccctattgttccagatcatagtggctccacagtgtctgatatcactgcaagtttgagttccattgatccaccaacactgtctctcgggttatctttgtcatctagtcaaagacaaacatcatcaacacattctgctttacatgcactgccatgcttcaacaatcaagatagcatcataagtgttgcttaagaaagataacatatctctgtggcccattatctagagctacattggattcacagagatgtttatctcttatttcctttctcttttggtgggagaaggataaaagatgttaaaggaaaggacgatgaatcagagaaggcaaggtaataagtcatgagaacaatttgatccttctgttccttgtacggaccctgaaaaggtcctgtcaggtttttgttaatggttaatgggcccttttttggtt

SEQ ID NO: 15856 - DNA, 560 bp, Glycine max
cgacgacagaggggggggaatagagatgagaggcacagaagttgtgcttgttcgcaaaaccatcaatggcatcagcattatcttctctctcctccacctcttcttcactgttacagcacagtttcaccggaaactcgaaggctcctcccactactcaattccccaacaaaaatgtacgcttttcggtcttcgctcaaaagaaggcaaagaaacttcgaaagattattttgaaggaagatgtggcttatgtaggaaagcaagggcaacttcttgatgtgaaggctggctttttcagaaattacctgcttcctatgggaaaagcacaacttgttactccccagcttctcaaggaaatgaagatagaagaggaaagaattgaggctgagaaaaaacgggtaaaagaagaggcacagcaacttgctctaatttttgaaactgttggggctttcaaggtgaagcgtaaaggtggtaaaggaaaacaaatttttggaagtgtcactgctcaagatcttgttgacataatcaaggcacaacttcaaagggaggtggacaagagaatt

SEQ ID NO: 15857 - DNA, 728 bp, Glycine max
tccggaattcccgggtcgacccaagccttccttccggttgcaaaaaaacaacagaaggggacatacattcaacaccagaacaactacttcttcaaacaacaacagattcaagttcatagttttttttggtaaaacagaaatggcctaccactcttctcaaaattcccaacctgctctccctatgcacctatgtttcttcttgctcaccttgttcatgttccttagtttctcattttactcaagctacgagccaataatggagagtttcatggaccaagtgaagttggttctaatggtttctccccttctgcttctgctagttgtgcacttcctttgcaactatggtagtggaggggttttgtcttcactgattcctcttccagagagagagtcactgcacagagcaggtggaactccttggggtgttggcttggttcttgttcttcttctcttcatggtgtcttaccagtcttctttccaggaacgttggtttcctctgctcacaaggtgaaaagttttgggttcttagtttttttatccgtaaagtttaaagacaacaattgagttagattcttgattgagttcttagtatatggaacatggatggatggaaacttgttgaattagtgtatttatgagttctcaagatttcagattcatttttttttggattattggtttggtgaattaaaggaaatatatgggtaaaaaaaaaaaaaaaaaccagg

SEQ ID NO: 15858 - DNA, 620 bp, Glycine max
cttgctcactttgttcatgttccttagtttctcattgtactcaagctacgagccaataatggagagcttcatggaccaagtgaagttggttctaatggtttctccactgctgcttctgcttgttgtgcacttcctttgcaactatggaagtgctggaggggtcatgtctacactgattcctttgccagagagagagtcactgcacagagcaggtggaactccttggggtgttgggttggttctggttcttcttctcttcatggtctcttaccagtcttctttccaagaacgttggtttcctatcctcacaaggtgaaaagtgtgggattcttgggtttttatccgtagaaatcaaaaacaagtatcatgatttacaacaaagactcgcacaccctacttaactaattagctgaatccttgattggagttcttatttatgaggtaacatgacatggcatggaactttgtttgtaattactgtaatttaatttagtgagttctcagggtttttcatgaaatgagatttcactttgttcttgtatttatttgtttttgttcaaagggatatggtgttcttgcaatatatgaagatgtattttcaggttttttggcaaaaaaaa

SEQ ID NO: 15859 - DNA, 864 bp, Glycine max
acgtcgagctcgagccgtggtagtaaagttagcgtagcacgcaagtaactcccttccgtaattaacataaacacagaatccaagaggtattgcaactggaattccatggcgacgagtgggtcagagacaaagcaagtgatggtgattggaatcgacgacagtgatttcagcacgtacgctctccaatggactctggatcacttgctatcccctgcaaatgttcctaagttcaagatttttcttgtttatgccaagccttctgttgcctctgctgtcggttttgttggccctggagccgctgaggtgttacctgttgttgaggccgatttgagaaaaacagctgccaaaatcactgaacgtgctacagaactatgcaagaagaaatccgtaaatgacgtagcagtggaagtgctagaaggtgatcctagaaatgttctttgcgaggcagtggaaaagcaccaagcttcaatgttggttgtgggtagtcatggttatgggactttaaaaagagcggctctaggtagtgtaagtgactattgtgctcatcatgctcactgcactgtcatgatcgtgaagaaaccaaagcacaaacactgatctcaatcgttggctccgattaaatagcagtgcacataaatcttttcagcaacagggaaaataaatgttcttaagaattcataatattgttttctgcatgcctagctgactttgtggtttaaggttcatttacttttttattttcaaagttacaacccacaaataatgtatgtaagcacaatactttttccttcacggccactggtggtgcttggtttattttgttcaagagcaatttatttaaataaatgtcactgttgtgtgtgt

SEQ ID NO: 15860 - DNA, 225 bp, Glycine max
gggcggtgcaattttcatcaccagaaattgtaagaacatggtagaacgttgtacgagtccgattgtgttgctctgtctcttctcattttctgcacttactctagctttttcgccatgccccctcactgggttaccgctggtgagaaatatcagtgagactccccaggataactaccgtagggctgctctctctcacatgactgttgcatggtcattgtcgcaccg

SEQ ID NO: 15861 - DNA, 572 bp, Glycine max
  unsure (1)..(572): unsure at all n locations
cccaatcccatggctctgcttttcaattccaagcttctccgatggagactctctctccatccaaaccctatctccgccttctccaccgccgaagctctctccgaccacgaccaccctcctctcccctccccgcagccccaacccccacccattgttccccctcgcgagcacaatctcgaactcaccatctgcaagatgatgtccaaccgcgcgtggaccacgcgcctccaaaactccatccgctccctcgtccctgaatttgacccttcccttgtctacaacgtcctccacggcgccgtctcgccggagcacgcgcttcagttctatcgcttggttgagcgcgcctgcctttttatccacttccttgaatccacttcttatgatcgtttaaattctttggtctgtaattttagcttttatctcatttctttgtattcttttttacgattcgttcgtannnnnnnnnnnnnnnnnnnnnnnnnnnnnnnnnnnnnnnnnnnnnnnnnnnnnnnnnnnnnnnnnnnnnnnnnnnnnnnnnnnnnnnnnnnnnnnnnnnnnnnnnnnnnnnnnnn

SEQ ID NO: 15862 - DNA, 781 bp, Glycine max
cccacgcgtccgggtgtttaatcttaaatggggttagctagctaggttaaagccaagggcccatgggctcatgcttatgatttgcaagtgttgctttcaagggaaaaaagagagctttttcttcggttggcccttttagcagattgatgttctgagaggttttgcaatttgaaaccaaggtttgtcattatgtcatgctttattggtggggaggggatgtagtcatgttatgtatgtagatacaatattacattcatacattgaattttagtcacaagatattatccacattttcagtgcttgaattcagaatcagaaggtaaaagttgagttgagagtactgttagttaattgctcagtaagctttccctgaacacttaaacatgtatcttctcttcgatgaaatttgattttgtttttgtagtgcactggtctgtttgatgtgattttctggatcatagagattaattagtttggacattaagtattttaggaggttgaacaatttcaaattgttttcaatgtgatttgaggacaaagatgaaatccttgagtagtgtaggtcttggtctgagtattatttttggttgtctcttgttggctctagtagctgaggtttactatttgctatggtggaagaagaggataaccaacagagagattgagaatgattatggcaaccctgtgaaggaattattctacatgttttgttggaaaaggccatcatcatcttctttgaggcaaacaagtttcactcctcctgagttttgttcttcaatga

SEQ ID NO: 15863 - DNA, 430 bp, Glycine max
aggacatactaatgcgtgttttggctcaaaatctttctcctgagttgactctcgtggaaaaggtaatgactccaaacccagattgtgcatcagtagatacaacgatactggattctctgcatatgatgcatgatgggaaattcttacatcttcctgtggtagacaaagatgggtatgtagtggcttgcatggatgttttgcagataactcatgctgcaatctccatggttgagagtagctctggaactgttaatgatgttgcaaatacaattctgcaaaaattttgggactcagcttttaatctagaaccaccggaagattctgatactcatagtgaaatttctgggctaatgacatcagatggggctgatacatcgaagtctgcatatcaatctgtaggttttggaaattcatttgccttcaaatttaa

SEQ ID NO: 15864 - DNA, 549 bp, Glycine max
cggacgcgtggggaacagttatctgaatggatcttcgtctgagtgtgcggcttcctgtttcacttccctgcttctctcactctcagaatgtgaagttacaattgcaaagaaggagattatccaccgtttcttctgccctggctgagactgcagcgtcaatggcagtagctgtaactgtcgttggtgcagcagctacccttcttgtaaagagatccaaaacttctgagtcatcacagattcaattcaaagcatgtgaagattgtggaggttctggtatatgttctgaatgcaaaggtgaaggattcgttcttaggaaacgttccgatgaaagtgctgagaaggcaagagtgcaagctaagaacatggcaacccgattcacagcgggacttccaaagaaatggagctattgcacaaagtgctcttctggtcgatcctgttcaacctgtggtggcagtggaaagctaagttactagtttagcattacatgttgtctacccagttcaaaagacagttagtttcctaacatttcacatgttcttggttaaatca

SEQ ID NO: 15865 - DNA, 371 bp, Glycine max
gagcgaaatcgaagcatatagtcggagcatgaattggacaccggcatcacacggcggaagacgaggatgtctccaaagctcccttcacatctcttcccgtggctcatcctactaacattcgcatctttctatttcttctcttctttcctctctctcagcacattctcctcctcctcttcatcttcatcaccaacctcacaatctctctcaatctccaacacctgtaacctcttcagaggccactgggtctcggatcccaaccacacccctctctacgaccaaacttgccccttccaccgaaacgcatggaactgcctccggaatgagcggcagaacatgaccctcatcaactcgtggagatgggtcccacg

SEQ ID NO: 15866 - DNA, 580 bp, Glycine max
gttttcggttacccccattttgaaagccatgtatataaacccttgctatgcttgttacgcactcccacgttctaaaactgcaattggagctcgccacagcaactagaattggaacaaaccctatttctcttgtcaaggtttggccttttttctgctccaaaaccgtagaacaagcataggagagtgagaaggagcagcccctgaatttgtttttgcatgatataggcagaacaatgtcttcagatctcagtgattataaaatcatcaaggaaggagaagctgagattcttatgcacgcaaagaatgaagtcttctataacaaaactcaggtcaataacagggatatatcaatcgctgttttgagaacatttatatcgaagcggaagcaagagcatgaggcctacttgtccaaaagaacaaaaggggcacaaaaggcatctgaaaatggtgattcttctgaattggttaaggaggaagtacctgcctcaactgcacccgaagatcataaatctaatggggaatgcgaagtagaggaagagatatctccagaagaacagtgcagcactatggaagaagattc

SEQ ID NO: 15867 - DNA, 363 bp, Glycine max
  unsure (1)..(363): unsure at all n locations
cacaaaacctcttttcatattccacccatggcagacccttactccaatttcttctcaccaggtaggggcttccaccactatccttctccaaacccttcaccccaccaccatccctatgctcacaacttcctcaaccaaaatggttccaacatccataaccacaacacctttttccacttccaccactttcagaccactatttggtcttcttcacctccttcccctcccttgagagaagcccttcctcttctaactctcagctcaagaaatgaagaggaacaagaagaggatgaccaagatcaagatcaggagattcttcaggacaatatntgcactgcgatggatgtgngagagattacaaca

SEQ ID NO: 15868 - DNA, 350 bp, Glycine max
  unsure (1)..(350): unsure at all n locations
gtctatttcttccattctcatttctctctctttctctgtttccacatgccatggttcgttcttccgtgctctactgctactctcaacgccgtcttgcaggctctttcaggggcttcttcttcattcccacaaccttagctctcttcacctctttcttcattctcttctacatttactccacttcaaacatcttcacccatcacaaccaccacccttccacttcacatttcaaaccacaccctcccttttccactaccccttttattgctaccactcctcacttcgtccctgtcttcaaccacaatgcttccgagtccacaaaatcttctncgactttccaattggggtat

SEQ ID NO: 15869 - DNA, 768 bp, Glycine max
gaagctcatcgtaaaggctcgaacccagctgggtagttgaaccaccaaagtctcaagaagggtatcagcatttaatagccgaaagataaaatatcttttgctcgacgttgctattagtcagaagccagaaattcgtgtaggtgagtgaggaagagagaaaagaaaaccggtgctgttgaggcagagattcaagagaatggaaggtgtgagccctgagcccttgagatcagaattggattccaaatccaaacaagacacagcgaaagaagaagatgacgacacattcaaagaaagcactgacgccgaggtcactaaaattcgtctcatgagagcctttgttgaaagccgagatccctcttccaaggaagtagatgatttgatgatgagaagattcttgcgggctcgtagtttggatgtggagaaggcttcggcaatgttccttaagtacttgaaatggaagcgttcatttgttccaaatggttgcatatcaccgtcagagattgccgaagatattgcacaggacaaggtgtttacgcaaggactcgacaagaagggtcgacctatagttgttacctttgctgcaaaacattttcaaagcaaaaatggtgccgatggtttcaaacggtatgtggtgtttgttcttgagaagctttgttcaaggatgccaccggggcaagaaaagtttcttgccattgcagacattaaaggatgggcatacgtaaacagtgaccttcgtggataccttaattctctatccattttgcagga

SEQ ID NO: 15870 - DNA, 411 bp, Glycine max
cccacgcgtccgcgaaaaactcccgtcaatacgaaccaccaaagtcaccaccaaaaggttatcagcatttaatagccaaaaaataaaaacacattttgcttgtcattgttattagtcagaagctagaaattcgtgttgagtgttgagttgaggcagagattcaagagaatggagggtgtgagccccgagcccctgagatcagaattggattccaaatccaaacatgacacagcaaaagaagatgatgacgctttgaaagacagcactgaagccgaagtcaccaaaattcgtctcatgagagcctttgttgaaagccgagatccctcttccaaggaagaaaatgatttgatgatgagaagattcttgcgggctcgtagtttggatgtggagacggcttcggcaatgttcctt

SEQ ID NO: 15871 - DNA, 525 bp, Glycine max
cccacgcgtccgcccacgcgtccgcccacgcgtcccctttttatatcttcactagatctacgacactcccaactccacacttcttcttcttcttcttcttcttcttcattgcacagtgcatccataaacatgaagtaatgaggtaatctaaagtggaaaaaatgggtgggggccggttcaaaccgacgcagaagaggaagagggttccaaagagggtgtggttaagcttccaaaaatcaatgggtgtcctcgtgggtggaaaccatacctcctccaggttttgcactcgctaactcccctcccttccccctttcggctttcaaaagatccatctttctctcactttctcttaactcgattagttcaacatggacaccaaggcattcaaattccagatccttactagctccatcgccaggcgcgtgctccttcgcacaatcctactcgcgtgcgctggctcggttggctctctggaccggggcctattcctcttcgaattcggaacccttggttccattggcacct

SEQ ID NO: 15872 - DNA, 274 bp, Glycine max
caccactcatcacagactctgcttcagatccccctcaccaaaaataaaacctgccaaatctcattacacacacagtcacagtccatgtgcatccataaacatcaagtaatgaggtaatctaaagtgggaaaaaatgggtgtgggtcggttcaaaccgacgctgaagaggaagagggttccgatgagggtctggttaagcttccaaaaatcaatgggtgtcctcgtgggtggaaaccatacttcctccaggttttgcactcgctaatccccctct

SEQ ID NO: 15873 - DNA, 794 bp, Glycine max
gcttgccgcagtatcggacactaaatccgcagctatactaccatgatggaggccatggaactcagttttcaactccaagttcttcagaactttactgcactttggagtcatcttctgtagctctttacaactccccttcgactgttagtttctcacccaatggtagccccatatcgcagcaagactctcagtcatatccacctgaccagtatcattcccctgagaatacctatggctctcctatgagtggctcctgcataactgatgatttaagcagcttcaacttcaagcacaagctcagagagttggaaagtgtaatgcttggccctgactctgataatcttgatagttatgacagtgccatcagcaatggaaacaactttgttccactagagatggacggttggaaacaaacaatggtggcaatttctagcaaaaacctaaagcacatccttattgcatgtgccaaagccatttcagacaatgatttgctaacggcacaatggctgatggatgaattaaggcagatggtgtcagtttctggcgatccggttcagcggttgggagcatacatgttggaaggacttgttgcccgattggccgcctctgggagttcaatatacaaatctttaagatgcaaagaaccagaaagtgctgagcttctctcctacatgcacatattgtatgaggtttgcccctacttcaagtttgggtacatgtctgcaaatggagccattgcagatgccatgaaagatgaagacagagttcacataattgatttccaaattggtcaa

SEQ ID NO: 15874 - DNA, 666 bp, Glycine max
gatgccttcaatagatttgtggatgacatcaatagtttagctacttatcactggtgggaagggtctatttacagtatcctttgcatcattgcatatcccctagcttggtcatggcttcaaatgtgtcggagaaagaaattacagaaacttagagaatttgttcgatcagagtatgaccatgcatgcttgcgctcttgccgttcacgagcactttatgaagggctgaaggtagctgcaacatctgatctgatgctgggatatctggatttcttccttggtggggatgagaaaagacctgatctgcctcctcgtctttatcaaagatttcccatgtctataatttttgggggagatggaagttacatgagtcctttctctattcacagtgataatattcttactagcatcatgagtcagtctgttccaccaactatatggtatcgattagtggctggtcttaatgctcaactacgattggttcgccgtggacatctaaaaataacttttggtcctgttatcagctggcttgatgtatatgcaaaccctaagttggctacgtatggggtacgtgttgatcttgcatggtttcagcctacagcctctggatattgccaatttggacttgtggtatatgctactgagaatgaaagcatgtcctcatcatgc

SEQ ID NO: 15875 - DNA, 395 bp, Glycine max
cggaattctagctccgatctcacgaaattgctcgaatcttagggctgaagcaatggatgtcgatgcgtcgatggtgccggagaccgatcacgatcccgccgtacagaaccacgccgccgatgacccggcgccggacgcggcggagggagaacagctaggggagccgccgtcgtccggaggcggatctccggagcagacgcagccggcgcctgcttcggcgccgcagagtccggtggtcggaccgaggctggcgcctagttacacagtggtgaatgcaattttggagaagaaggaggacggaccggggccgaggtgcggccacacgctaacggcggtggcggcggtcggagaggaggggaccccagggtacattggtccgaggttgattttgttcg

SEQ ID NO: 15876 - DNA, 433 bp, Glycine max
ataggcaaaaagcaaaagcccctcaacccaacacacctaagacggttatctccaagcctcactccctcgtttcttccgcccccttcactcaccttctatctgccaattctcttctattaataacacccacctctttggttcctcttcccttcaattcatcacataataacgacactacaaaacattgtttttagctcttttttgttgcagcgaaaccaaaatgtctttcactgcaactaagtttgcaccttctcctctccctctcaattccaccacccccagatccaatgacaagcctctctctttctccttcgatcactccaagcccaacccttcttactctatacttggatccactcgcaagcttcttcgcttcaatgctctcgctaaacctcatgctcacacacgtgcttctttttacctgttgctgctg

SEQ ID NO: 15877 - DNA, 615 bp, Glycine max
agatgatgagtttgctgatctctatattgtgaaatggacatcccttatgattccacctatgacaggtatgatggtcaacttaatagcaatagcagttggagtaagcagaaccatatacagtgtcataccacagtggagccgtctactaggtggtgttttcttcagtttttgggtcttggctcatctctatccctttgcaaaaggtttgatgggaagaagagggaggacacctaccatagtttttgtgtggtcaggcctcatagcaatcacaatttctctcctctgggtggctatcaacccccctgctggtactgaccaaattgggggttcattccagttcccttgacaggtcattcttttttgtcagatgaatgaatctgtcagctatttttttatttaaaattagtttcttttttctcttgattctacatattggtggttctactaatgaatggacttaaattatgttgtctattgtgcttatgaatcttgtatagtacttaattccagaaatgtgatcatatttagcattctgctgaaaaaaaaaaaaaaagggctgccgccgactattattcccgtcgccccggaatttaattcggttccggtccctcaagg

SEQ ID NO: 15878 - DNA, 493 bp, Glycine max
tgggagcttaactatgtcaaatttaccgtatgtgttttcaaatgtaaatgggttgatagcaacatgggtgtgcgcactgatgatataggatttacgctggtagacctaaagaaacttggttaccacaatgaccctttcatcatggcagaacaagctagacaagtattttacgtgcaagacccttgtgatgaaaggtggtgcgtggttctgcagggcaaaacaattggtgttaatgtagaagatgtgattcatacatggacacctatgttagtcctttgactgcacaaatcactcctaacattgtcggagaagaagaagttgacgacgttcatgctaatcgtaatgatcatgatgaaggagaattaattaacatcatctaatgtaattttctatttatatatttcattttcctagatggattttcacaaaccaatactacatttgtattcaaaacatgcatgtattgaatgaaagctttgataatggaacttat

SEQ ID NO: 15879 - DNA, 1269 bp, Glycine max
  unsure (1)..(1269): unsure at all n locations
tttgaggtcaagtgctccggttgcatggctatttaaagacaactatgcacattatggtcttagtaaagcacgagttgtcttcacaattcataaccttgaatttggagcccattccattggaaaagctatggcatatgctgacaaagctacaactgtctctcccacatattcaagagagattgctggtaatcctgtaattgctcctcatcttcacaagttccatggtataataaatggaatcgacccagatatatgggacccatataatgataaattcattcccgtatcatactcttcagaaaatgttgttgaaggaaaaagagcttcgaaggaaaccttgcaacaaaggcttagtttaaaaaaagctgatcttcctttagtgggaattattactcgattgactcatcagaaaggaatccatctcatcaaacatgccatatggcgcaccctagaacgtggtggacaggttgtactacttggttcagctccagatcctcgtatccaaaatgattttgtgaatttggccaatgaattgcattccgctcatcatgatcgtgctagactttgccttgcatatgatgagcctctttcacacttgatatatgctggtgctgatttcattctagttccttcaatctttgagccatgtggactcactcaactcacagcaatgagatatggttcaatacctgttgttcggaaaactggaggactttacgatacagtattcgacgttgaccatgataaggatagagcccaagcgcaaggtcttgagccaaatggatttagttttgatggagctgatactggaggtgttgattatgctctcaatagggcaatatcagcatggtatgaaggccgtgattggtttaacagtttatgcaaaagggtgatggagcaagactggtcttggaaccggcctgctcttgactatttggagctttaccatgcagcacgcaaggcagaatgagatttaaatgaacagaggaagtaagatggaaattaaaattcattccttttatacagatttagtggtaagcttttagtcttagaataatttagttgcatatagccaatcttagtgaaaaataaccgctaggtgacaccagtttgtagagacaaaactcaaatggttcattattttgttagcacgcaataatatgtaggtaagctttacatggtagtatatgctaagagatcatgtttttaatttgtggaatgcattgcagaataaatcgaaagctgcaagtatcttttgttcattccnna

SEQ ID NO: 15880 - DNA, 1951 bp, Glycine max
gttacacattattctctctctcactcacacacactcagagtgcaagctagagagagagagatggaggatctcgaggaggaagagaacggagcggaggaggtgttggggtcaagcttgaccatggagaaggtggcggcggcgaagaagttcattgagaatcattatagggctcagatgaagaacatccaagagaggaaggagaggcgttgggttttagaaagaaaattggcgtcatcggatgtgccaaatgaggaacggatcaacctcatcaaagatttagagaggaaggagactgaatatatgcgattgaaaagacacaagatttgtgttaatgattttgaacttttgaccatcattggaaggggggcttttggggaggttagactgtgccgggagaagaaatctggaaatatttatgctatgaaaaagctgaagaaatctgaaatgcttaggagaggccaggtggaacatgttagagctgagaggaatttgctggctgaagttgccagtcattgcattgtgaaactttactactcatttcaggatgctgagtacttgtatttaattatggagtatctgcctgggggtgatattatgactttgctgatgagggaagacaccttaagtgaaaatgttgctagattttacattgcacaaagtgttctggccatagaatctattcacaaacacaactacattcacagagatattaaacctgataaccttcttctggataaaaatggtcacatgaagctctctgattttggtctctgtaagcctctcgattgtaatgccttgtctacactgcatgaaaatcagaccatagatgatgaaactttggcagaaccaatggatgttgatgatgcggacaatcgaagtagctggagaagtccacgtgaacagcttcaacattggcagatgaacaggaggaagttggcattttcaacagtggggacaccagactacattgctcctgaagtacttttgaaaaaaggatatgggatggaatgtgattggtggtcactgggagcaataatgtatgaaatgctggttggttaccctccatttttctctgatgacccaataaccacatgcagaaagattgttcattggagaaatcatttaagatttccagatgaggcccagttaacacttgaggctaaggatctaatttataggttgctgtgtgatgttgatcataggctaggtactcgaggagccaatgaaataaaggctcatccttggttcaaaggtgtggagtgggataaactgtatgaaatggaggcagcatttaaacctcaagtcaacggggagctggatacccaaaacttcatgaagtttgatgaggtagatccacctacagcagcaagaactgggtctggatcctcacgaaagatgctaactaccaaagatctaagctttgttggctacacttacaagaacttcgatgctgtaaaggaagggcttcgtcaatcttttggtgattccatgcaagagtatgcttctaaacgggcagctgaagagacaagtttacaaatgcttgcatcctctggagatcccatggtacacatagctttgtgcaaattgaatgaagtccatcatcgtgttgagtttttgtgtacttgctttgggtttaaatatttggcctagaacattagtcaacttttatttgcaagaacaatgtgtacagcaagtagttgaacagcattgtcaaagcttgtagggcaactccgtgtgtgtgtatttgaattttcaacttaggaactgagagttgtgcgaccgagtgctcctgtcctggctgcccaggttggctgtggaagacttgccttctctagtggcagttgctggttaaatgttagttatggacaaaattgctgaggaactattaaagcatcctgaaaattattcgatgtgatgtgtacatttattggaagataacataaattaaact

SEQ ID NO: 15881 - DNA, 453 bp, Glycine max
ttcctaactaagcttcactgtttctcattatcatcatcttcctccttaattcaatttcagaacccggcctggtcctttcttcacttcccaattcaatggacacccaaaccccaatactcacgtgcttgccacgggtcccttggaattaccctttttttcttcttcttccactcacccacaaatccacttccccccaaacttctaccctttttaaaaaggcttttcaaaggttgaatctttagcccaaaacaaacagaaccagaattttttttcccgcaatgctgcgagaccaatgattgagtagcgaagattctgtgatcgttcagcaatgggggtctgcacttcgaagccgcagaagccgagcccttacgcgcttcgcggcgccgaagccgaagccgaccaatcgcaaatcccgaaaaccccactcagcaccgccgcagccgacacccctcg

SEQ ID NO: 15882 - DNA, 787 bp, Glycine max
agcgcctttctccaagtatcctcccatgaaggttcttttgatgaccattcagaatgctcctccggggcttgattatgatcgtgatagaaagttctccaagtcttttaaggaaatggttgctatgtgcctggtaaaagatcaaacaaagaggccatctgtggagaagttactcaaacactccttcttcaaacaagctaagccaccggagctttctgtaaagaaattatttgctgatttaccgcctttgtggaaccgtgtaaaatccctccagcataaagatgcagccgagctagcactaaagaaaatgccttctgcagaacaagaagctatatctcaaagtgaatatcaccgaggagttagtgcatggaacttcgatattgatgatttgaaagcacaagcggcattgatgcaagacgatgatgatattgcagagatgagggaagaagatgaaaacaaattcttcagctcttacaagggcacaactgattcccagtttattgtggacaaaaagaattcaaataacttgcaacaagatgagttcacatcacaagtaggtagtaatgacataccaaagagtgagaaaagaaatggatcagttgctgaagcaacaccatctactttagagaatgatgtgggaacaagcaaagttaaaactcaatcagtgaaacttggtaaaacccaaagtggacccctgatgccaggcttagtgcttggtcattcttcatctgaaagagggcgtacatttgaaaggtttgagaatgaaaaccagttagcgggtgagaaaagt

SEQ ID NO: 15883 - DNA, 502 bp, Glycine max
aattcccgggtcgacgccacgcgttcgcccacgcgtccgcagtaagtaaagagaagcagtttccagtctccgtcagtaaaacgatgggcgacttcacggttgcgttaaaccctcccaaaaccttccgctccgacaatctcctatccaccaccaaccgcatttccccagcggcgcgtggctttcaaacctcactcgcgttcaaaccgcgcgtttttcgaggaatccgcgcttcggtgatgccaagagagggccagccacaacaacaacaacaacaagcgtcgtctctcggagacgctctcgtcaacagtccgcgccgaaacgacgtcgtcgaggccatcggaagaaccgcatcgctctccaactgcctctccgaaacgaacctccacgccaccgttcccggcctcgagtccaaaacccgcggcaaagttcgagatatatacgacgcttgggattaccctcgttttggtgaccactgatcggcagagtgcgtttgatcggattc

SEQ ID NO: 15884 - DNA, 508 bp, Glycine max
aattcccgggtcgaccgcacgcgtccgcccacgcgtccgcactcactaacgataagctgcttttattctacgactgtataacgatcttcgacttggcggattctttaaaccctgccagagtccttccactatgacaatcttctatccaccaccaaccgcatttccccagcggcacgtgtctttcaaacctcactcgcgttcataccgcgcgttaaccgaggaatccactcttccgtgataccgagagagggccagccacaccagcaacaacaacaagcgtcgtctctcggagacgctctcgtcaacagatcatgccgaatcgacttcgtcgaggccatccgatgaaccgcatcgctctccaactgcctctccgaaacgaaccttcacgccaccgttccatgcctctagtccaacactcgtggcaaaattcgagatatatactacactgatgattacctcgtttttatgaccactgatctgcataatacgattgatcagaattcttgct

SEQ ID NO: 15885 - DNA, 773 bp, Glycine max
gatgattcttcttcagactctgaagatgagaaacctgtagcaaaagctgccgtaccttcaaaaaagacacctgctaaaagcagcaatataagtaccccagccaagaaaggcaagccagctagcagctccagttcttctgattcatctgaagatgactcttctgatgaggatgaactggctacaaaaaagcaaatgaacgaagtgaaagtgcgaaagggtatggaggaaagtagttcagatgattcttcatccgattctgaagatgagaaacctgcagcaaaagttgccgttccttcaaaaaatcaatctgccaaaaatggtactctaagtactctagctaagaaaggcaagccagctgccagttcaagctcttctgaatcttctgatgataactctgatgaggatgaggcaccaaaaaccaaggtggcccctgctgcaggcaaaaatggacatgcttctacaaagaaaactcagccaagtgaaagctctgacagtgatagctctgattctgatagcagctctgatgaaggcaaaagtaaggataaacctacaactgctaagctgcctacattgccagttgctccagcgaagaaagtggaaagctcagatgatgaatcaagtgaaagctctgatgaagacaatgatgcaaaacctgctgtaactgctgtatcaaagccttctgctcgtgcacaaaagaaggttgaaagctctgattctgatgatagcagctctgatgaagacaaggggaagatggatatcgatgatgatgatga

SEQ ID NO: 15886 - DNA, 643 bp, Glycine max
aagaggttgcagtgtttttgaggaagattggttttgaaaaggatactacaatctatgtgacacaatcaaggtgggatgaaagcctagattctcttaaagatttgttccctaaaacatatacaaaggaatccatcattcccgcagataaaaagaaaaagttcctagactctgaagattctgagttggagaaagtgattgacttttatattagttctgagagtgatgttttcgtaccggcaatatcaggtctattttatgcaaatgtagctggtaagagaatcggctcgggtaaatcccagatactggttccggccaatattccagattcatctgcttctgcctccagtttcttgtcccattatgtctccaagaaaaaccactttgcctattcttgttactgttagttcgaagtgaagacattcttagcatccagtgggtaatgttgtgtaccaattgtactgaatgatgctttccaaaatgtaccctttcgggaatttcagtgttatggcctaaggcctcttgtttgagtgttcaccaaaaaattcaagttactgtgatttgacatgtacacagggctttctgaacggatatttagtttgttaaattatggttgcccccatatttatttttcatagctggtgaa

SEQ ID NO: 15887 - DNA, 802 bp, Glycine max
ccgttccgtaattccagcgtcgaccgcacgcgtccgccgacgcgtgggctttcctactctcttctattccactcagtcattacactatttaatctcccatggcgcgttcctttaccaccctcacttgactgcttacggctcacttgcactcacgccattctttctttgctgaatcactctgcattttgaactttctgacaagctcagtgtttatgatccacatggaaaccgacgaattctctagcgtgattccctttcagcttcaattcgataaacccctagcttctcagatcaaaattgcagattggaatcccgagaaggacttgctcgccatggtgactgacgattctaagatcttgctccatcgtttcaattggcaacgcttgtggaccattactccaggaagatgcataacatctttgtgttggcgtcctgatggaaaagcaattgctgttgggcttgatgacgggacattgtcactgcatgatgttgagaatggaaagctattaagaagcttaaaatcacattgcgctgccattatatgtctcaactgggaggaggagagtcagctaattacagatgactttggtcacacttccaaatatgaagatagaacctctcgtttctttcctcctgctccaagagttcctcggatgcctggattggtatctggggataatggcttcatggatgatagcgaagattcatttcaggagctgtcaaattcttctcaccaacgattcaacatcctatgcagtgcagataaagatggaaacatttgttttagtatatttggcatctt

SEQ ID NO: 15888 - DNA, 863 bp, Glycine max
tcggtcggtgaccatggcgctgtctccgaagccgatatcttcctccgctccgttgccgccggtgatcgatttctcgtcggagaagcgcggaaaaataaaaccaactagctccgtgagcaaagccaaattcgagttggagaatttaggtgaatgggttgcatgctcagttggtgctaattttactccccatatcatcactgttaattctggggaggatgttactatgaaggtaatatcattttctcagcaaggacctcgagctatatgcattctttcagctaatggtgtcatatcaagtgtcacacttcgtcagcccgattcttctgggggcacattgacatgagggacggtttgagattctgtcattgtctggctcattcatgcccaatgaaagtggaggaacacgaagcagatccggtggcatgagtgtatctttggctagccctgatggacgtgttgtacgtggcggagtagctggtctgttggtggctgcaagtcctgtgcaggtagtggtaggaagttttctggcaggaaaccaacatgagcagaagccaagaaaacagaaacacgaggttatatcaagtgtgacaccagctgcagttgttccaatctctacacttgatccagtatcaattctatcagcagcgtcttccatccgcaacgataattggtctgctatgccggcagaggccaaggataagccagctgacattaacgtgtcgcttcctgcagggtaattaacttatatagggcttcattccatctgaatttacatttgctgctgacaacattgtaaatgggatggtttcctagtgttggctttgatttccgttgtttgtgtgtctgtattgttgactggtacc

SEQ ID NO: 15889 - DNA, 366 bp, Glycine max
ggagaaaagaggaaacgagaggagcattgcagaggtggggaacctggaatggaatctctgatccattttgtgtgttgaatttgattttgtattgttatagattacagatttggtgggcaatggatagggacaacaaatctcctccaccttcttctctttatgtgaaatcatcatcttcatccttcagccacgacgacataagcgccatgccggagaatccacccaagaacagaggccacagacgcgcccattccgagattataaccctaccggacgacctatccttcgacgctgatctcctccccgacgacgacaacgacttgctctccctctaccttcaattcgatcagctcgattcctcttcac

SEQ ID NO: 15890 - DNA, 455 bp, Glycine max
ccgaattcccggtcgccttacgcgtcgggttttagaatcaatcaaacaaacctcagtaccaagaaccctatgccttgacaaaccctaacgttgatttaaatcgtttgttcgcacttcaatctccaagtcataaatacactcttctctccccattcactcgcattggcttttggtagttgaagtctttcattgttgtcaaattcagatcaggactactcaggcaagtgatagcagctctgggcttcgagggctagaatcctccgaagaattcaagagaagagggaaacaattgagagaaaagcataatcctaacagaaaggaatctacggcactaatggcagacaaagctaagggaatggccagctcagcgcatcacacgaaatcctttagtccatctgcagtttagtttgttcccggtggggcaattcacacgctacccatgaatcccattttga

SEQ ID NO: 15891 - DNA, 705 bp, Glycine max
agccttgacaaacctcagtaccaagaaccccggtttgttcgcacttcaatctccaagtcataagtacactcttctctccccattcactggcattggcttttggtagttgaagtcttcctttgttgtcaaattcagaccagtatttgaaaaatagacaagaagagcaagagaataaagcagcagaaggggtgaagatagggatggcgggcatgtctggatgtagttgccgttggcagtgggcggaggcgaaatccatgggagtgggctgttggttcccttcctcaactaccaaaaggagtttccggcctgtgattgtttctgtttctgctatctccgataataactctcactcttacactagcagcggaagaaagctagaagaagaaggcatcaaagggtcaggaactaccgccagagatcgcaggttgcttagaattcgccaagagaaacgacagcgggaatacgaccgccttaacaactaccctgcttgggcaaaagtcctggaaaacgcttgcaaagacgatgctgaactccgtgccgttctcggagatagcattggcaacccagaactcatgaggaaacgagtcgaagatagggttagaaagaagggtagagactttcaaaagtctaaaacaggatccgtccttgctttcaaagtcaccttcagagacttcaatccacttgattcatatatctggcttgaat

SEQ ID NO: 15892 - DNA, 497 bp, Glycine max
ggacacatattccctttggcctgggttgcacttcccaaattagataatctaaagcgaaacactgaaatcattccgtatgatatagcttctctctaaatctgagttcttaacttcctcagatttgatcccatcccagtcattctttgaatcccctatcagtgtcaatttctacaaactttataaggcagctggatcatgctatctagtttgaaatttggaggttgctagttaaagtgttcttttggatggtaaatttggtgcttcatgtctggtgaaacaggatctgagttgtgatcagttttagtccataagtaggttttcaccaaaaaaagaaaagtccataagtaggcagtgaaaggtatattgtggatttccattattttaaactgataaatgacgaggggaagatctgatggattgcaaaagaagcatttagatgcttccgttagtggggtggcaatcttactggatttcctatatgagtacaatggatccat

SEQ ID NO: 15893 - DNA, 490 bp, Glycine max
attcaattgtgttttactaccaaatcttattgcttctactcaccggcgcctctatatacagatcatagataaataataccaatacttcatatattcacgaaccattctatttccattcggcagcaacaaaatcaccatccttcttctgcaccgcaatgctcttcctcttccctccgtcattagtttgttagttagattacccttttcccttccatgcttacgtcaccaccgctcaccattcactctctttttacccctaaaccattgaatcgatctaaatctctcccaaatcgcaaaccccttttgctcaattgagtcaattctctccctaagttcctctgtcggcgtctgggtgggtaaaagttgttgttttgtcttctgggttttggagcaaagacaaaagatgggtgagggagaacgtttccagcttgggactgtgggtgcgttgactctttctgtggtctcatctgtgtccattgtgatttgcaat

SEQ ID NO: 15894 - DNA, 456 bp, Glycine max
gcatcaccaaaccccatttccatgtttcgtattcaattgtgttttactaccaaatctccgttgcttccttactctccagcgcctactcatatcacagatcatggataattcatagtactactatttcgtacaagtattcacgaaccattccattccaatttccattcagcagcaaccaaatcaccatcttcttttgcatcattagttttttagttagattaccctcttccgtttcaccttcctttcatgcttacgtcaccaccactcactctttttctaccctaaaccattgaatcgatctaaatctctcccaaatcgcaaaccccttttgctcaattcagtcaattctctccctaagttccgctgtcggcgtctaggtgggtaaaagatgatgatttgtcttctgggttttggagcatacgacaaaaagatgggtgagggagaacgtttccagct

SEQ ID NO: 15895 - DNA, 395 bp, Glycine max
ctccgactaaatggtcatgggttacgcagtgaccggcgcctactcatatgggagatgatagacaaataataccaatacttcatatattcacgaaccattctatttccattcggcagcaacaaaatcaccatccttcttctgcaccgcaatgctcttcctcttccctccgtcattagtttgttagttagattacccttgtcccttccatgcttacgtcaccaccgctcaccaaccactctctttttacccgataaaccattgaatcgatctaaatctctcccagatcgcaaacccctgttgctcaattgagtcaattctctccctaagttcctctggcggcgtctgggtgttggagcaaagacaatagatgggttagggagaacgtttccagcttg

SEQ ID NO: 15896 - DNA, 473 bp, Glycine max
gccacgcgttcgcacaaacccttgtctttcctcgcgctcctgtccagccaccgtcgtgccctggtcgcactcaaacaccatcgcggtttcagtcgcacatcgttggcgaccgtcgtcctgccgccgccgttgcgcctccgtcaccactggtttgggccttttgcctctctcgtaagtggtttgtcatcaattgagcctaaaccacttcttttctgaagagagaatgggatttgcaggagccctaagaaacattgttcgccctctttcagttgcatcatcaagagctttaacgcctcggatctccaccaatgcttcgatggcaccattttgtcctgcttttccgtctccctgcaaaactcctcaatggcttcatcccctttggaatcacttccacagcttgacagacactcgctttcccaagagacgaccctcggaaaaacctcgtcgaaagagagccagcttgagaccctctg

SEQ ID NO: 15897 - DNA, 410 bp, Glycine max
ggggctctcttttccgcgaatccaatacctctcccaacccctccctctctctaggatgatatctctctcttccgcattccaccgttcgctctccgcgaagacggaactacgcgggttttccatgactgcgcgaacatcttccgtcactctcccgacaaaatcacgatacgctctcctcttccccctctccgcttcttcgcattctccgattctttcttccgtccgcggattttgatacgttcgagagcggattagggttttgataggttcgcgatttcggtggagaaagagagggacggagatagatagatagagagagggagaaagtgtttggtagggttttttgtttggcgtatttcttgttttggagatggggagcgacgatcgggacggcaaccggctgatcaagg

SEQ ID NO: 15898 - DNA, 694 bp, Glycine max
cccgcgcgtccgcacacttacactatcacacagcattactctcactcaacaacaatgttgccgccagcgggaaccatcgtattcaacaccgtcggaagagtccaatacggtttcgacgttttctctgtcgacctcaatcaccaacagcctccgccccacgccaccgcagaccaccgcctcaccgacggtgtctcgattaacttcaacgcacaattcattaacccccaaaacgacgtcgtcttcgtatccgaaagaaccgggtcgccccgcttctacattacaaaacccgacactaaaccccagcctttaccctttctgcccaacgctctcttccacgatcgcccaatcgttaaaaacggaaagctctacttcgtttccacgcacgaagaaaacgccgccgttttcactagctggagcgccgtttactccaccgccatagatgactccaccgccaccgtcaagagactcaccccgcgcggcgaggtggactacagccccgccgtctccctcaccgggaaattcctcggcgtcgcttcttaccgctctcgccgctggcaaaccaacgatttccgcgaactccaaacggagatcgtcgttttccccgagtccgatccaaaaaaccgagtcacggtgagcgagcgcggtggctggccatcgtggtcccaagattcaaccattttcttccaccgaatcg

SEQ ID NO: 15899 - DNA, 259 bp, Glycine max
attgatttctttctcgatccccaacatcactagctagctccttgtacacactctacaaccccacctagctacatcacttaattagttttaccaatttcaaattctcacctgtcactagctatatttcataactgatcattaccaactcatcactacatattattggctaggattcaccattagacttaagattagttgatttattacatatataagatgtctagcaggaggtcacggtcaaggcaaacaagtagttcaa

SEQ ID NO: 15900 - DNA, 725 bp, Glycine max
aagcagtatctgcatgattacatgaatcggggtattgcctggcatcaagtcataccctggaatgaaataagacagataaaccttcgtcttaaattccttggtagttacataatacaattttagatattcattgaaaaaaatgttgacttgaaccttttctgaatgccaggaggattgcacaagtaaaagagaaccaatgtcaaattgctgtagaagatgttatgtacttgctgattttttacaagttttctgagatcagggtccctatggttccaaagctttctagttgtctttataatggcaggctagagatattgccttctaaggactgggaactagagtctattcatagctcggaagttttggatatgataagggaacacataactactgtaactggcttgagagcaaaatctagtgtaactgagtgttgggcaacaacccaagttagacaattcttacttgcccgggtttacgttgcctccatattatatggttactttttgaagtcagtttcattgaggtaccacctagaacgaaatctctctttggccaatcatgatcttcaccttggtcataggacttccgttatgttttcttatggattcaaagatgccatctttggccacttaagtaatatgccatccttagggcaagggttaataaagccggaagaggaaattgaggacttaaaatgttatgttatgagctttcattccggatca

SEQ ID NO: 15901 - DNA, 458 bp, Glycine max
acctcgagccgaatcggctcgagaaagagagcagtatcacttagagcgtctccaacaaatccctaattgcaacaatgccggaatcacccggcggcggagacgcggcgctccaccgcagacgacggagactgagaatcgcaaaaccgaccaaaccgccgcggatcctccggtcctctcaaagaacgcgcggaagaagctggcaaagcaacagaggtttgaggcgaagaaggcggagaagaaagccgcggcgaaggagcagaagcgaagagacgtagagagaaagcgcaaggagtgggaagagagcctcgccggggtctccgaagaggagaaagcgaagctgatagagtctcgaaggaacctccgcaaggagagaatggaaaagaggtcacaggagaaagaggacaaaagagagagactcaccgtagcgagagaaaaaggccagaacgtcgtcgtcgatc

SEQ ID NO: 15902 - DNA, 361 bp, Glycine max
cactatctatacacaaacaacatggttcgctacattgaaggctatgttcagaaggtgaaccgagggaatgcacctttagttgttgggcagctgctagatgatgaatgcgcagaagattttatcaaaggcttgaccctttctgttcgttcattactgccagtggagccccttgtggaggaatgtgagaagaggaatcgacttcgtatgctcacacagttcttggaacacctcgtaagtgagggaagccaggatgtacatgtacacaatgcactgggacaaattatcattgatagcatcaacaacccataacattttctcacaaccaacccatactatgattctcgagttgtgggcatgtatt

SEQ ID NO: 15903 - DNA, 895 bp, Glycine max
gttgcgtatgatgcagagggggtctaattgggggctataaggtaaatgcaggagctatctgcgtcgtcgtggttgtgggtcccgttcgtgatcttcagatattgtgggagtgtcttgaaagaaagcgctcccaaaaaaattgtgcaccctcgattatttgaattgaagataaataagagaataaggcgttgttttgttgtgttgcgttgcgttgcgttgtgtgggtgtgaaactgggaaaatggggagagcctttgtgtatgtgattcttggaggaggcgtggctgctggctatgctgctcttgaattcgtcaagaaaggagtctctcatggtgaactctgtattatttccgatgaaccagttgctccttatgaaaggcctgcattgagcaaaggatttttgcttccagaagctgctgcccggcttccatcctttcatacctgtgttggtgcaaatgaggagaggctaactccaaaatggtataaagagcatgggattgaattagttcttggaaccggagttaaatccactgatgtgaaacgtaagacactattaacaacaactggagagaccataagttacaagattctgattgttgctactggtgctcgggctttgaagctggaagaatttggggtgagtggatcagatgcagaaaatgtatgttatttaagacatatagcagatgcaaataggcttgttgatgttatgcagtcttgtcctggaggtaatgctgttgtcattggtggtggatacataggcatggagtgtgcagcgtctttagtgatcaataaaataaatgtaacaatggtctttcctgaggaacattgcatgggtcgattatttacctcaaagatagcaaactactatgaagaatattataaatcaagaggag

SEQ ID NO: 15904 - DNA, 564 bp, Glycine max
  unsure (1)..(564): unsure at all n locations
tctcgaccgattcggctgagttcatttgatttgattttgcgacagaacggaacaacaacaacaacgatcaatgattcgaagccttgctctgcacttggctgcacgattccgacacaaccacaacctcgtgcgtctttcttcttcttcttctgccgcttctgcctccactcttcatcatgccactccctctccttcttcctctgagcccgttcacatcacccaaaactgcgttcgaagaatgaaggaactggaaggtagtgaatcatcaacagatggaaaaatgcttcgtttgagtgtggaaactggtggatgttctggattccagtatgtttttaatctagataacagaatcaactcagatgacaaagtttttgagagagaangagttaaattggtcgttgacaacatatcatacgattttgtaaaaggggcgactgttgattatgttgaggagctaatccgttcagcttttgtggtgactgaaaaccccagtgcagttggtggttgcagntgtaaaagttccttcatggtgaaacagtagtgattttcttagtccttgcccct

SEQ ID NO: 15905 - DNA, 446 bp, Glycine max
cggtccggacttcccggctggacccacgcgtccggggtttttcttttggtcctgggtctgagaccgcggtgtcccctaacccattggtcagagaattatctgctcgcggtgtgtggtgtgtggctgctgctgtcacaagagaattttgcacatgacattttgatgagaagacaaatagatggaaaaatgtgctatgatcaattggtgcgctcttgattcattatcaggagatgcacatgcagcacgtcatgctattgttaaggaacctgttgccgatattttgggagcgcattattatgggttcttcaatgcaaaagtgaggctttgttaagcatggcatcagatgtggcagtaaagaagttgcaacaccctgtgctatggctttgaatttggtaatctcaaatttgagtgctacaagtgagaaggcagttatggaagcattgaaa

SEQ ID NO: 15906 - DNA, 421 bp, Glycine max
caccgtgccaacccatacttccaaataagcctaatgaagggagtgtcaaaaggagaaatgagaagaaacgcatgaggcaacgccgtgcctttatattggctgaaaagaagaaaaggaaggctcagctgcaagaggctaatcggaagaaaaatattcagagggtagaacgtaaaatggctgcagttgcaagggaaagagagtgggcagaaagactggctgagttgcagcgacttgaggaagagaagaaaaaatctatggcttgaatttgtgaactttctaaacactgttgctttattttaaaaatgttctatggtttctgttatttgggagactgataggaatattatcacggggtccaagcccaaatcgaaatggaatgagccctcacttgtgtattctcgtaagtccaaagggaatagag

SEQ ID NO: 15907 - DNA, 326 bp, Glycine max
  unsure (1)..(326): unsure at all n locations
tttctcaacaacttctgctaactcctactccaaccgaccttctgctccgcaattatcgtgggcaaggtcaagatcggaatcaacggatttggaagaattggccgtttggtagccagcgtggctctgcagagagacgatgttgaactcgttgcccgtaacgaccctttcatcaccaccgattacatgacatacatgtttaaatacgacagtgttcatgggcactggcagcatcacgatgtcgccggtaaggacgagaagacccttctcttcggtgacaagccaagcactatntttggacacagaaaccctgaagagatcccatgggg

SEQ ID NO: 15908 - DNA, 376 bp, Glycine max
cttggcccttcccaatagccaacttctaggttccgtttctgaagactgaggcttgatccaataccttcgccacatcgatctctccaacaatttccttaatggctctctacccaacactatcttcaactcttctcaacttcaagtactttccctctcaaacaatgttatctcaggcaaactacctgagctaattggcaaaatgacaaaccttaaacttctcaacctctctgacaatgccttttccggtttgatcccagaaaacctctctactctaccaaacttaaccgttgtttcactgaagagtaactacttttctggcagtgtcccacccgggttcaactacgtggagattctggatctgtcattcaatttgctc

SEQ ID NO: 15909 - DNA, 420 bp, Glycine max
cccacgcgtccggcccaccgtctacttatactatacacattatttaaggatcaccaaagcctatttctttagtccttatgttatgtctaactctacctcgttcaagatcaaacattgattcttagttgcatagcccttgtcatatctctttctatagttgaataaaatgtctgctgcaacttttgcagctcatattgctggggctggctttgtaggcttgaagcccaactcatcaaatctttgccccagtactggatccataggatggaaaaggaagattgtttcacatggttctaaaacttactgcatgaagacatggaatcccatcaacaataagaagtttgaaacactgtcctacctgccacccctttcagatgaatccattgcaaaggagattgactacatgctcaagaagggatg

SEQ ID NO: 15910 - DNA, 383 bp, Glycine max
  unsure (1)..(383): unsure at all n locations
acgcgtccgagggatacggtctactctacctcgttcaagatcaaacattgattcttagttgcatagcccttgtcatatctctttttttaatcaaaaccttccattcaacacttatagttgaataaaatgtctgctgcaacttttgcagctcatattgctggggctggctttgtaggcttgaagtccaactcatcaaatctttgccccagtactggatccataggatggaaaaggaagattgtttcaaatggttctaaaacttactgcatgaagacatggaatcccatcaacaataagaagtttgaaacactgtcctacctgccacccctttcagatgaatccattgcaaaggagattgactacatgctcaagaanggatggat

SEQ ID NO: 15911 - DNA, 1189 bp, Glycine max
atgagttgaaaatgaatggagaaaaaaagacgaagcggtgaagaagctgagcgaattgcaatatgaaattgaaagcggttccatggtggcataattggttagtggtaaaagcaggatcaagtcacagcagcctcatggtacgcaagaagcagactcaggattctgaatccactcctccaagaatcacatccaacgtcaaacaaaacctccgcttcctaaagctatggaagagcttccagaatagaaattctagcactcctaggccttctaccagttaccgcaagaagaaggtcgagaaggaagatgatgttgttgacacagacctctatcgtgatcccaccacctccctctactacacaaaccagcagggtatattagacaatgccgtccctgtacttcttgtggatggctataatgtgtgtggctattggatgaagctcaagaaacatttcgtcaaaggaagacttgatattgctcgccaaaagctgattgatgagcttctaacctttagcatgcttagagaggtcaaaatcgttgttgtctttgatgcaatgatgtctggactccccactcacaaggaagatttcgctggtcttgatatcattttctcaggtgaaacatgtgctgacacatggattgaaaaagaggttgcagctttaaaggaggatggttgccccaaagtctgggtagtcacttctgatcactgccatcagcaagcagcacatggagctggagcctttatttggagttgcaaggcattggttactgagatcaaggcatcacaaaaggaggttgaaaggatgcttcaagagcaaagatccacttcttttcaaggtagattattgaagcacaatcttgatgcagaagtagtggatgctctgaaggacctgaggcaaaaactatctgaaaatgagttgaagtaaaatatcaggttaaatttatagtctgatagtttagtttgacaggtgaattatctactaggttttaatactctatctggtgctagatgcttttcattttttggcatgtgggcgtgcatttattattaacagtgaagctggaacccttcacattttggttggattattttttgacataatggctaaagccaaacagcatcaactgcagaaaatgacactgcctgcgtcaaacagaattgagatattgtatttaccatttaacatcgaaa

SEQ ID NO: 15912 - DNA, 246 bp, Glycine max
ggaagcggagaagaagctgagcgaattgcaatatgaaattgaaagcggttccatggtggcataattggttagtagcatggtggtactagtggccaaaagcaagaagcagactcaggattctgaatccactcctccaataatcacatccaacgtcaaacaaaacctccgcttcctaaagctatggaaggttgcagctttaaaggaggatggttgccccaaagtctgggtagtcacttctgatcactg

SEQ ID NO: 15913 - DNA, 1464 bp, Glycine max
gcaaagggcggtggcgtggtgcttgttgtggttggtggtggagtgcgcaggataagcggcaaagtaaggtgaaggttaggggagagaaagaacgaatcaaatcaaccaaacaaaagaaccccatttaagaaaatatatagaaagaaaaaaaatttattaaaagattgttctttttattaacaacaacccgtcatagttttaaggccatttaattggttcttattgtgcttgtgtgtgtgctataaatccttcgtggtttttggtgaccctttgggttctatagttagtctaaggtaacccactttgagaattctcataaagttgcatgcttttggattggaaggttgttgcaatggggaaggttgtgttgttgtttctttgcatggtattggtggtggtgcctttggcttgtactgattcaattcagaagcttgaggttcagaagcacttgaagaacttgaataggcctcctgttaggtccatcaagagtcctgatggagatgttattgactgtatccatgtctcacaccagccagcttttgatcaccctgacctcaaaaatcacaagattcagatgaaaccaaatttccatccagaaggtcacccttttggagaaagcaaagtctcttcaaattccaagccaattactcagccgtggcaccaaaatgggaggtgccctgatggaacaattccggtccgaaggacgaaaaaggatgacatgttaagggcaagctctgttcagcattttggaaagaagaaggataggagcttccctcagccaaaacctgcaaaacctctacctgacatcatcagtcagagtggccaccagcatgccatagcgtatgtggagggagataagtattatggagccaaggcaaccataaacgtttgggacccaaaaattcaacaacccaatgaatttagcctttctcaaatgtggattttgggtggctcttttggtcaagatctcaacagcattgaagcaggttggcaggtcagccctgatttgtatggagacaacaatactagactcttcacttattggacaagtgatgcatatcaagctactggttgttataatctcctttgctctggctttattcaaattaacagtgatatagccctgggagcaagcatctccccactttctaagtatagctcttcccaatatgatatcagcatcctggtctggaaggaccccaaagagggtaactggtggatgcagtttgggaatgaccatgttatgggatactggccggctcctctattctcgtacctctctgacagcgcgtcaatgattgagtgggggggagaggttgtgaactctgagtccgacggccaacacacctcgactcaaatggggagtggccatttccctgaggagggttttggcaaggctagttacttcaagaacattcagattgttgatggtgacaacaagcttagagctccaaaagaccttgg

SEQ ID NO: 15914 - DNA, 368 bp, Glycine max
  unsure (1)..(368): unsure at all n locations
taataaccggcgnagtcgtcgtccgcgcatgggcggacgcgtgggcgatttgggcccctctctcactcaaccctgtcaaaggtgtcaggcacatttttttgtttgtgtgtgtagcaaagggtggtggtgtggtgcttgttgtggttggtggtggagtgcgcatgataagcggcaaagtaaggttgttgcaatggggaaggttgtgttgttgtttctttgcatggtattggtggtggtgcctttggcttgtactgattcaattcagaagcttgaggttcagaagcacttgaagaacttgaataggcctcctgttaagtccatcaagagtcctgatggagatgttattgattgcattcatgttacacacc

SEQ ID NO: 15915 - DNA, 332 bp, Glycine max
caacaacccaccatagttttaaggccatttaattggttcttattgtgtttgtgagtgtgctataaatccttcgtggtttttggtgaccctttgggttctatagtgagtgcaaggtaacccactttggattggaaggttgtcgcaatggggaaggttgtgttgttgtttctttgcatggtgttggtggtggtgtctttggcttgtgctgattcaattgagaagcttgaggttcagaagcacttgaagaacttgaatagacctcctgttaggtccatcaagagtcctgatggagatgttattgactgtatccatgtctcacaccagccagcttt

SEQ ID NO: 15916 - DNA, 517 bp, Glycine max
ggccaaaaaaacagaacatagtgacagagtgttccagagagtttgttaaagaactgtgaagaagagggtaactgcaaacaaagcaagcaaaacaaaagacgcagtgatggagaggatgaagagggtgcttctgctgcttctggccttcactgttcttctcatgttgccagaagcttctgctacaaagtttactgttggaaacaaccagttttggaaccccaatattaactacactgagtgggctaaaggcaaacatttctaccttggtgactggctctattttgtgtacgataggaaccaagcgagcgtgttggaagtgaacaagacagattatgaaacatgtaactctgatcatccactcacaaattggactaggggagctggaagagacgtggttccattgaatgtaacaaaaacttactacattatcagtggccgagggttctgcttcagcggcatgaagatagcagttcatgttgaaaagctgccaccttcaccaaaagctgcccctgtaaag

SEQ ID NO: 15917 - DNA, 383 bp, Glycine max
tgttgagagttgaaacacacctactacaattgttaaagtcctttcttgtcatagcaaaaatgaagcttgtctttggcaccctactattatgttctcttcttctaagcttctctttcttggagccagtcatagcctatgaagactcatcttattgcagcaacaagtgtgcggacagatgctcatcggcaggggttaaggataggtgtgtgaagtactgtggaatatgctgtgctgagtgcaaatgtgttccttctgggacctatgggaacaagcacgagtgtccttgctacagggacaagctcaacaagaagggcaagcccaaatgcccatgaagtcttgaactcaaagaccaagtcacatagagacttaagagaataagacta

SEQ ID NO: 15918 - DNA, 309 bp, Glycine max
aaacacacctactacaattgttaaagtcctttcttgtcatagcaaaaatgaagcttgtctttgccaccctactgttatgttctcttcttctaagctcctctttcttggagccagtcatcgcctatgaagactcgtgtaagattttctcttactgctataaagaagtatatatataaaatcagtgaatatttttgtgtgtttgtggcagcttattgcagcaacaagtgttcggacagatgctcatcggcaggggttaaggataggtgtctgaggtactgtggaatatgctgtgctgagtgcaaatgtgtt

SEQ ID NO: 15919 - DNA, 440 bp, Glycine max
ctcgagcgaatcggctcgagtgcaccaataccagatctaaaacgagaaaattattgtgtttgggcaagtcatcaagggagaggatgttgtccaggaaattgaagaagtggatacagatgaacattacaagcctagagtatctatcgggatacgggatgtgactcttaaacaaaaggtctgaaggttctctgctagatcaagatcataattagctgtgatacttagtcataacctgttttcggggacactggtcaagtctttttgtatagggatgaaccttgagaattttgcctggggtgcatctatcaagtgtttgagccttgatgttgtttttgctattgcatttttagttaacacagggattatgcaatctcctttccttacatcctgtcattttatctggttggttttctttctttttcttgaaaaaaattgggggc

SEQ ID NO: 15920 - DNA, 506 bp, Glycine max
caagatactagtcaacaatctgaagtgagagatagttcaacctgcattgacaatggattatctggctctcatggagctgagatgaagaaaatccataatgcaaatgatgaaggtttgactagcaggtcaccatttggtccatccttggatgtggcaagaggggatgtatccgggaatcctgtggtgaaaattgcacataagtttgataatggtttttcctccattagtatgtgttctcaacctcaaagcatgcttcctccagtgccaaaccaaaatattcaatttccagtgtttcggacttcttcagcaatgggttattaccatcaaaatccagtttcattgccagctgctcccacaaatgggttgatgcctttcccacacacaaacccctacttatatgctggcccttttggatatagcttaaacgaggatccacgcttctgcttgcagtatggtggcttacagcaaccaacacccctatttaacccagttgcatttccagttta

SEQ ID NO: 15921 - DNA, 535 bp, Glycine max
tttctttcgtccggcctgccgctactttccctttcccggttaatctgctcccgagtttgctcagtcatcaaaccccaaccctaatcctaatcccaatcctctcatccttcaatttaaacccccattcccattgctatcttgtcatcttccgacaaattttctctctgtcttccgtttcgttcttccaatttcaggcatgaatcgtgcatcggtgttccggtagagcatatgacgagggaggttatcggaactgcgaatcgattgcatgggtttagagaatgccagagcttcgtagtggtgtgcgacgggggcgtggccgtggccagaaagcatcggaacctgcaaggaaggaggtgaaggctcgtgcggcgccgagagggagacccaggactcgattggcggcgaaggaattggagcttcaggagccgttgatcccgataccaccgacaccgataccggaaccgttgatcccgatactggagccggcgaaagaagagaaaaaggaagttggtgtgggcgcgaatatgggtgacca

SEQ ID NO: 15922 - DNA, 264 bp, Glycine max
cttgcctcccgctactttccctttcccgattaatctgctcccgagtttgttcgggcatcaagcgctaaccctaatcctcatgctcatcactcgatttaaaaccccattcccattgctatcgtgacatcttccgacaaattttctctctgtcttccgtttcgttcttccaatttcaggcatgaatcgtgcatcggcgttccggtagagcatatgacgagggaggttatcggaactgcgaatcgactgcatgggtttagagaatgc

SEQ ID NO: 15923 - DNA, 439 bp, Glycine max
cccacgcgtccggttaaatcattcggaggttatggtgaccccaggtggttttccgctacgtctgctgtccccaggagacctaaacgacgtgccgttttgaagcagccccctattagtcaatctgtctctgacttttttgatccgcagtctcccgaagaggccaaggtagcaccgctgcttgccaggtccaacttgctaattaccagagatatcgagtgggcaaatcttgtactaggctttgaacaggaaaatcgatatgccattgtagatgcttgctaccctcagtcgcccgtaggttttattcgtgaacagagcaacatcattgccagacagttgcttcgtcttaggcggccatttgttgcatacataactgatgccttggggaacgagctctttagggttcgcagacccttttggtggataacatgctcaatttatg

SEQ ID NO: 15924 - DNA, 389 bp, Glycine max
cccacgcgtccggtggcagaagagtatttggaacggctaaagcccagatagatgccagtggtaaggtaaaatcagataactgctatgatggcagtgatagtgaggatgacttggggaccagcaaaagtggcaacatagagaatgagggaagcgaccttttgcataaggatgtaaacaaggatttggtggtaattcaagatgagactgatactcaccaggaatcagtttttaagaacattgatgagattattaaaaagcctgggccaaaaactacatatgaagtttccatttttgtgtcagatacatggaaaaaggcaaaaaacaaaatgaagaatacgatgagagtctcaagcttcaggctagtaggcaagcttaaagtactgaaatga

SEQ ID NO: 15925 - DNA, 855 bp, Glycine max
gggttgtggaccaagaacccaatgaaatccgccgcttcgagcttctgcgaaatgagctaatagaacttgagaaacgagttcaaagaagtgcctatcaatcagaaaataatgaagatttactggttattgatgatggtgccccttatagcgatgatgctgggggtgttcagatggtcagggttgagaagaaagaaaatatcctggaaaaatcttttagtttgccaaaagattctgccaggatcttctggcaaactaaaagaaacaggaacggatgtctggcaaggaactcagctgctcgctattgatgttgctgctgccatgggtttacttagaagggcattgataggggatgaattgaccgagaaggagaagaaaacacttaaaagaaccttgactgacatggcttcggttgttcctattggtgttttgatgcttcttccagttactgccgttggtcatgcagcaatgttggctgctattcagagatatgtgccatctctaattccatccacttatgcaccagaaaggttagatctcttgaggcagcttgagaaagtaaagcaaatgacagccagtaatatgggctcagatgaggaagtggatgaagataaatgatcagaagcaatgccgatttatgtatagctagcgaaactattctttgtgatctgatgaaaattggactgctttgttaccctctttctggaaaaattttgttgatgccaaatttctcagataggagttgagcatagagaagttcattccacgtgtctggcacccctggtaagcaccagtggctgcaatccttgtggggcatcaggtggagtgcccggttcccggtacttggaagggtgaccg

SEQ ID NO: 15926 - DNA, 460 bp, Glycine max
caagtctgctttgattaactccattcatcaaattgcaaagtctcggtttcctgtgcaggagaagatgaagcgtgctgctgtgggtccgctacctggtgttactcaagacattgctggattcaagatagcacataaaccaagcatatatgtcctagataccccaggggttctggttccaagtatctcagacatagagacagggttaaaactggctctggcaggtactatatctattaaaattatccatcttaaatacttttttggttattaataaaatttgaaatttgatattatcaattcatggctttttttttaaatttttttttatctaaaagtaattactgaaattacatttggttcatctccatatctttgattcctggggattcagtctaaacctcttctggggattgggaaatatgatttgggaagtgagtctttgctttaatttgaatttttc

SEQ ID NO: 15927 - DNA, 648 bp, Glycine max
tgtatcaatggtttcatatttcaaatctacgccataggtcttctcttcctataaataccaaatcccaatttctttctccacgtccacacacttttctttcaggcacccatctaagattacccaataagaagcaactctcaatttctgattttcgaattcgcagacatttcttcaatcgagtgtttccagtggtatcatccaagaggaacgtaggggaagataaagagatgacgataaaacctgttgttcgtgtttcggaggggaagctggtggtgaaggagcgaacgattttgaccggaatgccggagaacgtggtggagacatcgacggtggaaggaatgtttctcggagtggatttcgagaaggaagacagtaggcaggtggtttcgttgggaacgttgaaggacgtccggttcatggcgtgcttccggttcaagctgtggtggatggcccagaaaatgggagatcgaggaagggacattccgttggagactcaatttctgttggtggaaaccaaagatgggtcccacctggagtcagataacgacaaaaaccagaaccagatcgtgtacacagtctttctacctctcgtggaaggctcattcagagcgtgcctccagggtgactccaacgaccaactccagctct

SEQ ID NO: 15928 - DNA, 500 bp, Glycine max
cgcagcagacgatgatggtttgatgagtgttaaggaagaacattttaacaatggtttcaaatctatgccatagttcttatctccctataaattcctaatcccaatttctttctctcacgtccacacactttcctttctcgcacccatctaagactacccgataagaagcaactctcaatttctgacatttctttaatcgagtgcttccggtggtatcattcaagaggagagtataggaagataaagagatgacgataaaacctgttgttcgtgtttcggaggggaagctggtggtgaaggagcgaacgattctgaccggaatgccggagaacgtggttgaaacatcgacagtggaaggaatgtttatcggagtagatttggagaaggaagacagcagacacgtggtttcgctgggaaagttgaaggatgtccggttcatggcgtgcttccggttcaagttgtggtggatggcccagaaaatgggagatcgagggagagac

SEQ ID NO: 15929 - DNA, 585 bp, Glycine max
ggtaaccgaacttcctaaccctaaacgctacgtttttaacattttttcctgttttctctttcaaatcggtgcttccaccggcggcgcgtgagcatttccaacggcgcgtgagggatttgttcccgcgtggcttattgtacagcactgactaatgctttgttcgactcgcattggaaagttcgcgccggagagacggtggattctcaccgtacggccgtgatttcgcacctccatggcttccgccgtcctagctaaccggaacgaacctaattggccgaagcatagagtcggtggtgcaggattcatgggaaaagtacctttctctaaccctaaccctaaatctaaatctaatcctaaattagcgaatagcaagaggactctatcggcatcggacgatgcttcctctatcaataggcgatcgaacgacttcgtaacattctcccagtacgtctccttcaacatcgcatcgtacacgaataaggagatcaacgacctgaaagatcggcttacttcggagctcgaacggactcagaggatcagaaatcgaatcgagtccggtgatttgcaacctggacagagctttaa

SEQ ID NO: 15930 - DNA, 527 bp, Glycine max
ctgtgattgtccgtaagagagagagagagagagagagatggtgatgcattcacgggtcagaagcgtcgccggaaacatcaaatgcgcagcgagactcttctgttcatcttcgacgaccacgccgccggctgcgccgttgcagttcccgcagactctggcggggctccgggcgcggctggcggaggagtcgccgtcgctgtcggacttcctcgcgttaaaatcggagagcgcgtactcggtggaggtcgggactaagaagaagccgcttccgaagccgaagtggatgaaggaggccgttcccggcggcgagaagtacgtgcagatcaagaagaagctccgtgaattgaagcttcacacggtttgcgaggaggctcggtgccctaatttgggggagtgctggtccggaggcgagaccggcactgccaccgccactatcatgattctcggcgacacttgtactcgaggttgcagattttgtaatgttaagacgtcaaggactcctccaccacctgaccctgatgagccca

SEQ ID NO: 15931 - DNA, 423 bp, Glycine max
tgagaagccattatttcagttcagattcattttctcaacatttgttggtacttttactacatttactatctctctaaatgatgtctttgatctcttctctttcagttgttcaaacccatgttaacatcagatcctgatttgttgctctatttattttacgctcgagactaatttactttacactattactacatatactattcacttccccttcacttgtttacatcgcaaaccttctctctcaatactacagaagataacattgcagaaggcgtataccaagcatggcaacagtgacggcctcttcttatgcggtgtcaggaagcgcgtgttacaagcaccgtggcgcgtctagaagagaggccaaagtgaaattcttggctcaggtaaggctcaattatgatgggtttgagatccctgaac

SEQ ID NO: 15932 - DNA, 667 bp, Glycine max
aaaggctcctccaagagtttcaggggaagactcttctggagtgaagttgccgtcaggtgcaaaattcaaccctgatacacatagctcagcaatgcaaaggaaaaaggttaaagacaatgaggcctcaataaaagcaaaagttaaggcctccaagagcaatcatgacgatgactctgacaaatctgaagagcatgacatgaagagtcctgataatacaaagccaactgacaagtccaaaagtaacaatctcaagccatccataggatctactaaaaagctgaaaagaaaaagtattggaggattggctaagtgtacaacaaaggaaggtgaaagtgatgctgaagatctaattggctgcagaattaaagtttggtggcctttggataagaaattttatgaaggcactgttaagtcttatgactctttaaagaggaaacatgtgatattatataatgatggggatgtagcaagttctcaatttggaaaaggagcgatgggagcttagtgacagcaaacctactaagaagctaaagctctcaaaaactgtctcttcccctgaagtgtctactgggaagaagcagagaagttctagtggttcagcaagtaaaaagacagaaaaaatagttaatggtaagaaatctccaagcaaccatgtaaaacatggaca

SEQ ID NO: 15933 - DNA, 587 bp, Glycine max
gcgtggcccaacggcaatgcgtttgttgcgaacgtagggcaaagtaaaaaggaaggaggaagatgacttgagttgagctgttaagacagaaagctaaaacagaagaagcaaagatgatattgcagttcttcgtgctttcacagagaggcgataacatcgtctaccgcgactatcgtggtgaagctcaaaaaggaagcgctgagacatttttccgaaaagtaaagttctggaaagaagatgctgagggagatgctccacctgtttttaatatagacggtgtgaactacttccacgtaaaggttgctggattgctatttgttgctactactagagtcaatgtctccccttctcttgttttggaacttttacaaagaattgcacgtgtcatcaaagattaccttggtgttctcaatgaagattcctttagaaagaacttcgtgctcgtttatgaattactggatgaagtcattgattttggttatgtgcaaacaacatccactgaggatttgaagtcatatgttttcaatgagccaatagtgattgatgctgcacggatgcctccacttggccctgcttccatttttatg

SEQ ID NO: 15934 - DNA, 572 bp, Glycine max
gctccgtctccgatctcgccgtggagaaccagaatctgaaaactgcgaagaggaaggagcgagagaagaaggttaaagcgtcgtcgaagaagagcaagagcgtcgccgccgccgacgagatttccggcgacggcgagaagcttccgtacgttcacgttcgagttcgtcgaggtcaagccactgatagccatagcttagcagaaagggctaggagagagaagataaatgctcggatgaagcttttacaagagctggtcccgggttgcaacaagatatcgggaacggcattggctctggataaaatcatcaaccatgtgcaatctctacagaatgaagtggagatattatcaatgaaactggcagcaggtaacccaggaattgctttcaacctcgatagcttactggctaccgaaggagtgactccaatggactgtaacttccctccgacagttgcacctgtcatgtggccagaaatcccacagaacggaaacagacaacaatatcagcaaccgtggcagtttgatgcattccaccaacccctttgggggagggaagaagacaaaactaacatg

SEQ ID NO: 15935 - DNA, 529 bp, Glycine max
  unsure (1)..(529): unsure at all n locations
acgagcttgactccacaagcgtataaccctgtgattcaagcactctgcaaaaggaagagaacaaaagaagccatgaggcttttcagagaaatgatggaaaagggtgatcctccggatgttataacatacaagattgttttccgtggcctctgtaatggtggagggccgatacaagaggctgttgattttacagttgagatgttggagaaagggatatttgccggagttcccatcatttggtttcttggctgaaggtctttgttctttatccatggaggacaccctcattcaactcatcaatatggtgatggagaaaggaagattctcacaatccgaaacatctattattagaggcttcctcaagattcagaaatttaatgatgcactagccaatcttggagctatcttggatcggaaaaagcccaggagattttgagtggttaaaagctttgttgtaagtgcactctggtgatgcttttaagaatgttatgggaaagctcctcattgcatanaggtgctgaagcatatg

SEQ ID NO: 15936 - DNA, 513 bp, Glycine max
gcacgaggtcaaagtcattcctaaagccaagatgaccacagcaattgctatagaggatgtaaggagagaagtgaagatattgagggctttaacaggacataagaatctggtgcaattctatgaagcctatgaagatgatgacaatgtttatatagttatggagttgtgcaaaggaggggaattgctagataggattctttccaggggtggaaagtactcagaagaggatgccagagtagttatgatccaaatattgagtgtggtagctttttgtcatctgcagggtgttgttcaccgtgatctcaagccagaggtgattaagttataaagctaattaacttttattttttttggtagctgagaaacttaggcattgaggttttcttgtttttgggattaattacatcatagaactacatttccactatgtttctcatttaatatggatactgcactagccagtgtgacaccctctacccctcacatacatactaataaaaaaaaaaaaaaaaa

SEQ ID NO: 15937 - DNA, 1028 bp, Glycine max
  unsure (1)..(1028): unsure at all n locations
cggaattcccgggtcgaccaacccgtcctaccggttgcaaaggacaccagagggggaggccattgttaatatagttatggagttgtccaaaggaggggaattgctagataggattctttccaggggtggaaagtcctcagaagaggatgccagagtagttatgatccacatattgagtgtggtagctttttgtcatctgcagggtgttgttcaccgtgatctcaagccagagaattttcttttcacttctaaggatgacaagtccacgctgaaggccattgattttgggttgtctgactatgtaaagccagatgagaggttgaatgatattgtgggaagtgcttattatgtagctccagaagttttgcatagatcttatgggacagaggcagatatgtggagcattggtgtaattgcttatattcttttatgcggaagccgtcccttttgggcccggacagaatctggtatatttcgggctgtactgaaggcagatccaagttttgatgaggctccttggccttctttatcggttgatgccaaagattttgtaaagaggttgttgaataaggattaccgtaaaagattgactgcggctcaggcactaagtcatccatggctggtgaatcatcatgatgatatgaggatacctttggatatgataatccacaagcttgttaaagcttacatttgctcgtcttccttacgcaaatctgctttacgggctcttgcaaagacattaacagtagctcagctaacatatctcagagatcaatatactctgttagggccaaacaaaagtggattaatttctatgcagaactttaagacggctgttttgaggagctccacagatgcctcaaaggattcacgggtcttagaatatgtcagtatggttagttctatccaatataggaaattagattttgaggagttttgtgctgctgctataagtgtgcaccaacttgagggaatggagacctgngagcaacatgcaaggcgtgcctatgagctttttgaaaaggaag

SEQ ID NO: 15938 - DNA, 470 bp, Glycine max
attcccggactagggtgttggaggctgctgtggtggcaatgccacaccctaggtggggtgaaactccttgtgcttttgtgtccttgaggaagaacatcaacagctacaactcatcatccaaaattgatcatgtcactgaggctgagataattgcctattgcaggaagaatttgccacactttatggtgcctaaggtggtgaagttcatggaggagctgccaaagacttcaactgggaagattcagaactttgagttgagggtcatggctaaggttatcgagcagaccaagaataatactaccactgtcaacaagaagtcttgccaagtgagtcaaaatagtattgttggggggtacaataatgagcaagctttggctgcgtctcgtctttgaattaattaagtgttcagatctatatatcaatgatctttgaatctttgcgtatttggataaatgtgtgtacatatacta

SEQ ID NO: 15939 - DNA, 749 bp, Glycine max
gtcacaacttcagtgctatggtgaatcagtgtattgcacaggttcggacttgctaagcatgtgcaacaatggtcagagtccacttgataggttcatatctgtggtagcatggtgcatatctaccactcgccctctgacttttggtgttgctccttataatcctattcttggtgagacacatcatgtttcaaggggaaatcttaatgtgttattggagcagatttcacatcaccctccagtaactgctctccatgcaacagatgaaaaggaaaacattgaaatgttatggtgccagcgacctgatccaaagtttaatggcacatcagttgaagctaaagtgcatggtatacgccagttgaagctcctaaatcatggtgaaacatatgaaatgaattgtcctcaccttttacttagaattcttccagttcctggggctgattgggctggcacagttaatatacggtgcccagagacaggtctagtagctgaattatcctacagatcaagttcttttctaggaattggggggaatcatagagtgatcaaagggaagatccttgactcttcatcattgaaagttctatatgaagttgatggtcattgggataggaccgtaaaagtgaaggacacaaataatgggaaaagtagagtgatatatgatgcaaaggaagttatgtcaagtctcgaaactcctatactcaaggacataagaggtgtgtggcaaacagaatcagctcatgtttggggtg

SEQ ID NO: 15940 - DNA, 1257 bp, Glycine max
cgcaagtattttcagcagttaatcagcgccgttgattactgccacagcagcaggtgtatcccaccgtgatctcaaaccagagaatctactcctcgacgaagacgaaaaccttaaaatctccgatttcggtctctctgcgctgccggaacagcttcgttacgattggctcctccacacacagtgcggcacccctgcctacgtggcacccgaagtgttaagaaaaaaaggctacgatggttccaaagctgatatctggtcatgcggcgtcgttttgtatgttcttctcgctggctttcttcctttccaacacgagaatctcatgacaatgtattacaaagttctcagagccgagtttgagtttccaccgtggttttcgcctgagtcaaagaggctaatctccaagattctagtggcggatcccgcgaagagaaccaccatttccgccataactcgcgtgccgtggttccggaagggcttttcttcgttttccgcgccggacttgtgccagttggagaaacaagaggccgttacggaggaagaaaacaattccaaggtgcccaagttcttcaacgcgtttgagtttatttcgtcgatgtcttccgggttcgacctctcggggctgttcgagaccaagaggaagacagcggcggtgttcacgtcgaagtgctccgcggcggcgattgtggcgaagattgcggcggcggcgcgggggctgaggttccgcgtggcggaggtcaaggacttcaagatccggctgcagggtgcggcggaggggaggaaggggaggctggaggtcacggcggaggtgtttgaggtggcgccggaggtcgccgttgtggagttttcgaagtccgccggcgacacgttggaatacgccaagttctgtgaggaggacgtgaggcccgcgctgaaggacattgtttggacgtggcaaggggatgccacgtgtgctgctaacgtccccgcctgtcacggtgaggagtgtcaaaagcaggttgttgttagtactatataattagttaattaactattaattataattagtgtgagggtccactgagagggttctagaaacggtagcgttctaacgacttttcttttgctttgggttttgtcgctttcgtctttattccctgcctgatttttggaaagatagggttttgcaccttttgaaggtgaggctgtacataaactgtaattaatatattgtgctgctgctacattcggaatggaacagatttctacaacaatagtaaa

SEQ ID NO: 15941 - DNA, 480 bp, Glycine max
aattcccggatcgacccacgcgtgcgcgaaacgcaactacgtatgaggaaatatcaagtcaaaaatacagtggaagcagaatttatgtgattcaacaagtgcaatgcggcaaacagcataatgaccaacatcataacatagatcaaaccctcttatcttgaaaacaatggccacctctcagggtgctaacagttacagaaatgccagaacctctctcaaacctcacgtcaagtcaaagcctacgcaacaacgccgtaatagcaccggctccgtcaacggcaaggaacacgctgctgttcccggaagagttagagtggctgttagattgcggccacggaatgcagaggaatcagtggcggatgctgactttgctgactgtgttgaattgcagccagagctcaagaggttgaaacttcggaaaaacaattgggatgcggatacttatgaatttgatgaggtgctcactgaattttcatcaca

SEQ ID NO: 15942 - DNA, 689 bp, Glycine max
caaaaggaaattcatgagcagccagagtctctaacaaccacaatgaggggggggcttatacatcgaggatctaacaaatccaagtctgttctgttgggtgggctgaaggatcacctcaaaacaattaggcgaagtagaaggatacttttcattggttgtggtacaagttataatgctgctttggcagctagacccatcttggaagaactttctggtgttcctgttactatggaaattgctagtgatctattggatcgggagggaccaatataccgggaggatactgccgtttttgttagtcaatctggtgaaactgcagacactttacttgcactgcaatatgcttgagacgatggtgcattgtgtgttgggataacaaacactgttggtagtgcaatagcaaggaatacacattgtggtgttcatataaatgctggggctgagattggtgtggcaagtaccaaggcatacacaagtcaaatagtagtgatggtcatgttagctcttgcaataagaagcgatacaatttcaaatcaagccagaagagaagctatcatagatggtctttttgatctgccaaataaagtcagagaggtgctgaagcttgatctggaaatgaaggatctagcaaagcagttgattgctgagcagtctcttcttgtctttgggagaagatacaactatgcaac

SEQ ID NO: 15943 - DNA, 1180 bp, Glycine max
  unsure (1)..(1180): unsure at all n locations
aactacctttaatttatttagctgcaaattctggtgcccgtttaggtgtagctgaagaagtcaaatcctgtttcagagttggttggtctgaggaatctaatcctgagaatggctttcagtatgtatatttaacacctgaggataatgctcggattggatcatcggtgatagcacatgagttaaagcttgagagtggagaaaccagatgggttatagataccattgttggcaaggaggatggccttggcgttgaaaacttgagtggaagtggggctattgctggtgcttattcaagggcatacaaggaaacctttacactgacatatgtaactggcagaactgttggaattggtgcttatcttgctaggcttgggatgagatgcatacaaaggcttgatcagcccataattcttactggtttttcagcattaaacaaacttcttggtcgggaggtatacagctctcacatgcaacttggtggacctaaaatcatggcaactaacggagtcgttcatcttacagtttccgatgatcttgaaggtatttcttctattttgaagtggcttagctacattccttctcatgtaggtggtgcacttcccattgtaaagccgcttgatcctccagaaagaccagtggagtatttcccagaaaactcgtgtgatcctcgtgctgccatttctggaaccttggatggtaatggaagatggctgggaggaatttttgacaaagacagctttgtggagacactagagggatgggcaagaacagttgttacaggaagggcaaagcttggaggaatccctgtgggaatagttgctgtagaaacacagacagtaatgcaaataatacctgctgatcctggtcagcttgattctcacgagagggttgttcctcaagccgggcaagtgtggttccctgattccgcaaccaagacagcccaagcaatattggatttcaacagagaagagctcccgcttttcattcttgcaaactggagaggcttttcaggagggcaaagggaccttttcgaaggaattcttcaggctggttccactattgtggagaaccttagaacatacaagcagcccatatttgtatatatcccaatgatgggcgaactccgtggtggggcatggngtgtttgtgacagtagaatcaattcagaccacatcgaaat

SEQ ID NO: 15944 - DNA, 421 bp, Glycine max
ggcgaatcttttttctcttgtgttgttattttatttcatctgcatctgcatctgctacgttgtgttgagcagtgagatctgtctcgccaaaattcatgatttcgtgttgaatgcatcatcagagttaggtttattttttgacatttggtgtaaaatgggggtgccaacttggagaaaaccagtgatctactgggtttgccttttcgtcattatcaatgcgtttgtacaaattagcaatgcattttatcttccgggaagctacatgcatacttactcaaatggagatccgatatatgccaaggttaattcattaacttctattgagaccgagcttccctacagctactacagtctcccttactggaagccccttggtaaaataaagaaaagcgcttagaatcttggaaagcttcttaaggga

SEQ ID NO: 15945 - DNA, 463 bp, Glycine max
tggttttctgctgcacagaaaatcgctctcttctctgttcaaatctcaatgtcaaaaaggagaatttcaattcccaccttggttctttcttctcacgctgtcaggcccatcttattcactcactcaccacctagggttttcttttccacttcgtagctatgctcgatctttctctcactccgcgttttcccgatcgaacgacgccgttttggcgagttttagcttcgtttcgtctcccgacgcggactcattgcttgctttcgtttcccacgcgattgttggaggagtcgtgttgcgttcgttgaccgaggaggtgcaattagggtttccacaattcggttttggatttggctttgtgatggggatttaagttcttaggagcggtgttggtggtgttgctggtgtttttggagtggggaatttgcgaaatgaaaagggatggtttactctcaatttatttttg

SEQ ID NO: 15946 - DNA, 600 bp, Glycine max
tctcgagcgaatcggctcgagcctagttctgcagcagccatccgatttttaaggaggttgtgtgaattgctggtgagtgatttaaatggctcctactaaggtggacaatgccaaaagggctgatcccaaagctcaggccttgaagacagctaaggctgtcaaatcaagtggtcaagtgtttaggaagaaagctaaaaagatcaggacatcggttacatttcacaggccaaggaccttgaagaaggaaaggaaccctaagtaccctcgcattagtgctccacccagaaacaagttggaccattatcagatacttaaatttcctctaactactgagtctgctatgaagaaaattgaggataacaacacgctggtttttattgttgaccttcgtgcaaacaagaaaaagattaaggatgctgtgaagaagatgtatgacattcaggcaaagaaagtcaatacattaatcaggccggatgggacaaagaaagcctatgttaggttgactccagattatgatgccttggatgtagctaacaagattggtatcatctaagttgtactcttgattttagcgaagctaatccttcattgttaagatag

SEQ ID NO: 15947 - DNA, 660 bp, Glycine max
agcgtcacactaacactcatcactcggaggatgtttgtgttgggtgtttcttcctcctccttcgccgccgccgccgccgccgcccctgctgccgccacctcctccactcaccaccttctctgtggaacccttcactctccttcttccctctcaacttcccatccctttcccacaacttcggtgcggtcatcttcactgcacttcaggtgcgttccaatcaaagccatggctgaagttgatactatagcagtgtcaaaaactgcttcttcttctgctccgggcagcaagcaagccttgatatcattgtcagacaagaaggatcttgcatttgttgggaatgggctccaggaattaggatactctattgtttcaactggaggaacagcttctgcattggagagtgctggagtagctgttactaaagttgaaaagctcactaagttccctgaaatgcttgatggtcgcgtcaaaactctgcaccctaacatacatgggggtatcctggctcgaagggaccaaaaacatcatatcgaagccctcagtactcatgggattggtacttttgatgttgtggtggtgaacctgtacccgatttacgataaagtcacatcagctggcggcattgaatctgaggatggaatttgatatgttgacattggt

SEQ ID NO: 15948 - DNA, 563 bp, Glycine max
gtttacacttgttcttgatctcaatgagacattgattcactatatatggacgcgagatacaggttggcagacttttaaaagacctggagttgatgccttcttggaacatttagctcagttctatgaaatagtgggttacacagatgaacaaaatatgtttgtagaccctgttatagaaaggctggatactaagcattgcattagatacaggctatcaaggccggctactaagtatcaggatgggcaacacttcagagacctctcaaaactaaacagaaatccaggaaaagttctttatttaagtggccatgctttggaaagttgcctacaacctgagaactgtctccctattaaggcttggcagcagcaagatatagatgacacagctcttttggattttataccatttcttgagtttgttgcccgtagtagtccacctgatataagaccagtgctagcctcttaccaaggatgtgatattccaagtgagttcatcagggcgtccaaagagcatcaaaggagaatgcaagaacaaaagaatcgtggtcgcttttggaaatgag

SEQ ID NO: 15949 - DNA, 378 bp, Glycine max
ctaagtatctagtctagtacaaagatggagatccctgtgatagattttagtaacctcaatggggacaagaggggtgacacaatggccctattgcacgaagcttgtgaaaaatggggctgctttatggttgagaaccatgaaattgacacacaactgatggagaagttgaagcagttaatcaatacatactatgaggaagacctaaaggaaagcttctaccagtctgagatagccaagaggttggagaaagagcagaacacctctgatatagattgggaaattaccttcttcagttggcatcgccccacctctaacatcaatgtaatatcaaacatctctcaagaagcttggcaaacaatggatgagtacattgcacag

SEQ ID NO: 15950 - DNA, 480 bp, Glycine max
aattgccgggtcgacccacgcgttcggcaactctcgtactacgtacttattcatcctttctgcagtaatgtacaacttataaccgtccttaagagttagagaccacctatagtttagtttctggagatataaaggttgtatggttggatggttaaataaaaatgatgggtttaatttgtctgctaatataaatataaaaattctagatctcttcttgacagtaggaggcactgacttaacaaactgttttttttgctttttaataacacggtatcacaacggagcactttttccctgtgttgctcaatccttatcttcacctcaagatctagccataagccatgcatgtcaaagtagatatgttcaatcacagtatcacaccattaaagtagcccaggcaagcaagacggatggaggggggaagcaaaatgtatattttttattagtcattgaatcacaacttataaatttattaacttt

SEQ ID NO: 15951 - DNA, 474 bp, Glycine max
tgccagtatcgtgcttgacctaccggaatacaaaccgtttcatgtagactattaaacttcattcaccctctcctagcaaaggcttaaaactgatgtggtcagtgatggtggtttgtatatcttctgtttagatctgagattggacccaaaggtactctcacaactagaaaccataggactaatctcctgaaaaagtaaagtattgattaaggaacaatttctttacctacaggtgctgctctatgcacatcgtcagggatcaaacccctattatatagtcaaagaacccaagctctttgtcacttgtgccacaccttatagttgtttgtattttatttttttttgttttatgagtaatgctttcaatgctacaatcttcaagcattgaattgaaaatattcacttatccccccatctccttcctttcatttcagttttaaaaagtctataaagcaaaaagttcgagtcatttac

SEQ ID NO: 15952 - DNA, 571 bp, Glycine max
aataactaataattataaatattactattattactagagagtgcgcgctcgcctgtgatgcgttgcgttgcctcagattcaggcaactcatggtggatgtttctccctcactagagttgacaaaggtagatgaagttgataatgctagagaagggtgtggtgtggcacttagcttagctatttatgattgcaatttttccaaaaatggaagtttggattcgttgatgttgaccggatctgagtaccccatttcactatcaccaccttttagctatagttcatgccttgcatcgcctgaatttgcttccccttttgtcttataaggttcattaggaatggaaaatgcctccctttcacattcttagatcctattcaatcaaaaaagcaggtgctaatttagttgaagtatgacaggttttgtcttggcagacgggtgggagggtaactttttgttctacttagatagggatttcaatggaggagatgtcctttattgttgttgtgccattaagagtaggtaattgttattgttatttagtctgtgataacccaaccatagttccccacatgg

SEQ ID NO: 15953 - DNA, 1066 bp, Glycine max
cgatcttcagtttttgtggccccaacacctgggatggcagttagccagatatggattcagagatcatctcttgcagctgatcatgtagctgctggcaattttgatactgcaatgagattactgaacaggcaactcgggatacggaactttgcccccttgaaacccatgttcccagatctacatactggcagtcattcctatctgcgtgccttttcatccgctccagttgtatcaattgctgttgaaagaggttggactgagtcatctagtccaaatgtgagaggcccaccagcacttcctttcagattgtctcaattagatgaaaaactcaaagttggatacaagtcaacaactgctgggaaatttactgatgctcttcgcacttttgtcaatattcttcatacaattcctttgattgttgttgagtcaaggagggaggtcgatgaagtgaaagaattgattatcatagtgaaagagtatgtcttgggtctgcagatggagctcaaaagaagggaaattaaggacaatccagcacgccagcaagagcttgcagcttatttcacccactgcaatcttcaaacacctcacttgaggctagctttgctgaatgccatgactgtctgctacaaggcaaagaacctttccacggctgcaaactttgccaggaggctacttgagaccaatcctactgttgaaaaccaagctaagacagcaaggcaagtgctggcagctgcagaaaagaatatgacggatgccttacaattgaactatgatttccgaaacccatttgtaatttgtggagcaacctatgtgcccatttatcgtggacagaaggatgtcgcttgcccctattgtacttcccgtttcgtgccaagccaggcgggccagctatgtgctgtgtgtgagctttcggtggtaagggcggatgcttctgggttgctctgctctcctttccagattcggtgatttcactggatcaagaacgggtaatgaattttggttcaagtcaagtttcaattttcaacaaccgataagagtcctattgatcaattaatatattttcttt

SEQ ID NO: 15954 - DNA, 1778 bp, Glycine max
ggcgttgagcacgccaacgtgcttcttcctcccttggagacgctctgcaccgttgaggaaaccagcgtcagagacaagtcggtggagtcgctgtgcagaattggagctcagatgagagagcaagacttggttgaatacttgattcctttagttaagaggctggctgctggtgagtggttcacggcacgggtttcgtcgtgcggtttgttccatattgcttaccccagtgcaccagagtcggtgaagactgaactgagagccatatatggtcagctgtgtcaagatgatatgcccatggttaggagatccgcggccacaaacctgggaaagtttgccgcaactgttgaagctcctcacttgaaatctgacatcatgtctgtgtttgaggatctcacacaggatgatcaagattctgttcggctacttgctgttgagggttgtgcagctctgggaaaattgttggaacctcaagattgcgtggcacatattcttcctgtcatagtcaatttttctcaggataagtcatggcgtgttcgttacatggttgctaatcaactatatgagctatgtgaagctgttggtcctgaccccaccagatcagaattggtccctgcatatgttcgtctgctgcgtgataatgaggctgaagtacgtattgctgctgctgggaaagtaactaagttttcccgcatattaaatcccgatcttgcgattcagcatattctaccatgtgtgaaggagttatcaactgattcatctcaacatgttcgctctgcactggcttctgttataatgggtatggcaccggtgttagggaaggatgctacaattgagcaacttctgcctattttcctttctcttttgaaagacgagtttcctgatgtcaggctaaatattatcagcaagcttgatcaagtgaaccaggttattggtattgatttgttatctcagtctctgttgccagccatagtagaattagctgaggatcggcactggagagttcgacttgcaatcatagaatacatacccttattggcaagccagttgggtgttggtttttttgatgataagcttggagctctttgcatgcaatggctaaaggacaaggtatactcaatccgtgatgcagccgctaataacatcaaacgcttggcagaagaatttggaccggattgggcaatgcagcacattattccccaggttttggacatggttactgatccacattatctgtatcggatgacaatcttacaagcaatttctctactagctcctgttctgggctcggagattacttcttcaaaactgctccctctggtcattaatgcatcaaaagatagggtacccaatatcaaattcaatgtagctaaagtgttgcagtctctcatcccaattgttgatcagtctgttgttgagagtaccatccgtccctgtctggttgagctcagtgaggatccagatgttgatgttaggtttttcgcctcacaagcactacaatctagtgatcaagtcaagatgtctagctagatcagtttgcatgtggtctttagttatttttttttcttataagatttccattttcttgtgtaattggcatgacgccaacttgccccatcctttgtatcacatataattgttgcgatcctgctttgctttcattctatccgtacctatgctaccgggttctttgtagtgatgaaacattgttcagaagtgagatgggttttgacgaccactcattatatgggttaccaatgtgaagattatgcatgaaattt

SEQ ID NO: 15955 - DNA, 453 bp, Glycine max
attgacttctattatgaaatctaccaacaaattttttttacatgaaataatcctctggtaaatcaaagacagcaacaacagagaaaaaaaaaatggaggcactgttgtgcagaaaactgggtgatccaacggtatctttggaagacaacgatgatagcccaatagttctgtcaaagaatcatccaattccccaactcgattctcccactgcagtaagagtgagaatcaaagccacaagcttgaacttcgccaactacttgcagatactgggcaagtaccaagagaaaccctctttgcccttcattcccggttcggatttttctggcttcgtcgacgccgttggatccaaagtttccaaattccgagtcggcgacgccgtttgctccttcgccggcctcggctccttcgctcagttcatcgtcgttgacgagtcccagttgtttcaagtgcccc

SEQ ID NO: 15956 - DNA, 1003 bp, Glycine max
gccttctgtttctccaaatcgctccttctgcaattttcttctcttccttcagcatcttcttccaaaattatgagttttttttatcgttcatctcataggtttttgtaggccgaagatgaagagctttgtatattctgacacctcttgtatgagatggatctttcattaaaggtttcatctttgagcacagaaagcaactctctgagtcctacactaccagggttccgattccttacattacgttatttcaatttctttgatttaatttaaattctattcgaataacgatttattcctaccctaatattgcaattctttgcacatctaattggtatgtcaaagaatctatcgttaggccatatgaaatttatttttaacatgtatgtgtataatgatatgtgtacgtgttgtctatctttagctccgagtatcctttttcttgatagggtttttcggtgacaagatagataaaattcttttaattttttattaaattatttattatatatttgtataatgctataatttgatctaggttttctagataaatatatgggtattgaatatatgatgttgaatgatgtgaaatcagacggattcccactgatattatttgtatatgattacacaaccagctactactgacaacatcatgttcatgctctttgttttgtagattcttagtgttttaagtttcatctgctgtgtagatatgttttaaaatagttttttaatgttaacaatggccggtgatgctagaaaatatttgctactcttgatggcaatcgcccatttgatgagtctcttccaccaagatctctgaggcttctttttcaatttttgatatattatttttggcatggtttcacttttatgattatgtaattgaggcttatgatatgtgtatagaatgcttcactatctggtctatgtggattttcagtttccatttgactcgttcccttgaagcgaaattatttgtgttgcttttttcttatcactc

SEQ ID NO: 15957 - DNA, 422 bp, Glycine max
ggaatccttcttaatagtactgttttagaattgctaagatgaagtcaagttttgaggaattgaagaagaagaagaagaagaagggagaaggagagcattcgaaggcatagacataaagaattgaagataatgcgaaccctttgcgacgtatgcgagagcgccgctgccattctcttctgcgccgctgatgaggccgctctctgctccgcttgtgaccacaagatccatatgtgtaacaaacttgctagtagacacgttcgggttggccttgctgaccccactgatgttccacgctgtgacatatgtgaaaacgcacctggtactgaatgctttcttttactgtgagatagatggtagttcgctgtgtctgcaatgtgatatgattgtgcatgttggttggtaaaagactcatggaagatatc

SEQ ID NO: 15958 - DNA, 452 bp, Glycine max
gtgtgatttgcagtcggattgccggtgtctgtttcgtcgaagtcttcctcgtttctggtttcctgattcgagcatttaactggtggttgggccaatctcactgggttgatccccagtccgaaactgacaactatgagcagcactctttaaaaccatatttcaagtatataaagtttttgaatgaagtaagctaaaagaagtactatggagaccaagcgctgcaacttctggcttcctaacaaaaacagattttgtgcaaactgccctctcaatggctccttattctgtggcaatcacaactcaaggtctcaaggccagtggatcccctgccccatagatccatcccactcggtgctcaagcaaaatctcaaagggcatgttaagcggtgtccattgctgaaacacggtcaatctttgtgtgaccaaccgctctatgataaaggcgtcaatgc

SEQ ID NO: 15959 - DNA, 272 bp, Glycine max
acgcgttcggagaagacaagtgtgatttgcagtcggattgccggtgtctgtttcgtcgaaggcgtcctcggttctggtgcgcgttcgaagccgctactcacttcgctagcgttccttctttgttaatttgtttcctgattcgagcatttaactggtggttgggccaatctcactgggttgatccccagtccgaaactgacaactatgagcagcactctttaaaaccatatttcaagtatataaaagttttgaattaagtaagcttaaagaag

SEQ ID NO: 15960 - DNA, 460 bp, Glycine max
cccacgcgtccgctgcagcagtgtcagtggcatcaagcagtttgactagttcaaacaccagtacagattctaatcgtgtcatgtcatcatcttcaacatcagcttttcttcacttatctaatcaagcacctaaagacacagtgccatcattacctaacccacctggcttgaagttaaccttagagtcacttaagtcagagattccaccagctgctgcactgaaatcagatatgcaaccagctgctgtgtctaattcaaagactgttttaaatgcttctgcagaagtagtcactcggccaaatgaacctttaaatggtgcatctgaattgaagcttggaccctcaagaaatttcagtcctactattgaacaaccttccaacaatacaacaagttttggtctcaatgttgtctcagtttctcaagcagcacagccttctgatgctcctttgcagctttcaac

SEQ ID NO: 15961 - DNA, 553 bp, Glycine max
cccacgcctccgtgattgataagaactagattataccttgaaatttgcgacatcgagtttggccaaaccctaagcatctggtcgtcgttgtcatcatccatccatgcccacgcccacgcgttcgctcctctctcttccccttctccaatccatggtctccatctccgtcacaaagaagcgagattcttggcggtggcttctaccctctactttgatggaatcccattcatattgcacctgcgtactcatagaggaacaaccacttataaacacccaattttgaggacttcacacaatgctcctcaatgtagcttgcgagcaatctccaagaagcatgaaaatgtggcgtggttatctgttagtcctaaattgcatgttcagaataaattccccagagatgtagttgtaagatctgaacttactgctgctgggtctgctggagatggctatttcctacctgagctgaaagtggaatctaaagtcaggggagtttggttttaatgtgtcactgccttttgtgccatatttctttttatgatgatgctggttgggc

SEQ ID NO: 15962 - DNA, 548 bp, Glycine max
gaagtatttcaagaaggtgaagcctctctacgagaaactctcccagaagcagcaacagcagcagcatagaacgggaggagaggctggcgtactgttaacggcggaggctggtgcaacaacgacaactacaacgacgacgacgacgacgacgtcggttttgtctctgttaaccaagacggagagatctaccaaacaaaccgagggtactaataagagagggagaaaagacagtagtgtgactgcactttctcactctttctcggggaatctcagatacccgagaagaagaagaagctgcgtttcgagttgtccttcttccatgagatcatcgcccaaccattctggggtgctttctcagagagctgctgccgccgctgctggtatgtattgcggagacacttctacaatggaagagttgcagagtgcaatccaaggagctatcgcgcattgcaagaactctttgattcagaccaacaaaacaatggtcagtaacgaaatctaagtctaattaattaatctaatcaaatcactctttttccgttgttaat

SEQ ID NO: 15963 - DNA, 467 bp, Glycine max
gtgtcttaccaagaggatcagctggaacaagttgctgcattgattacatcttgtgtccaccctgatccacagcagagaccaccaatgaaagatgtgagtgagagactcagagagataacaaaaataacacctgaatcagcagttccaaaactttctcctctttggtgggcagaacttgagattgcttctgcagaagcacgctgaaacaagtgaagcagattatgattattgagtctgagagcttttagctttttgatccttttttcccttaggtgaagtcataaaaaagtttttacttaaagtatctgttgttgtagaacatggtcacaaatgacgagtgagagaccaagaaagtgtgctgaagttcttttgggtgcttttttttaattgtagcttacggaaatgcacctcgaaaaatagcgtttgtatattacttaatttcaagtcagtatatgtggttaatcatg

SEQ ID NO: 15964 - DNA, 464 bp, Glycine max
cccacgcgtccgaaagagtctcacgcagcctcctcaaacatcagaccgagaagaggagtcagacacataacgtagcagaaagaaagagaaaaaagagggtctcactcgcgctccggagttattgagttttctataacaaaacaggctgtagaggtagggattctgttagctgccactgccagattacttgcttctgagttttatgactctgttgggttttcattatgagtggtgcacctaagagatctcatgaagagtctgttcattcatcttcaaagcacccgaatgaagatttgggtacatattccaagttggtttcatcgtcagtttcaaatgagtaccatatgcctcatgatataactcaggactcccgggtggcaaaagtgcctcgaactgaatttcatgatgcagatagaagatctcctcttaatcctgtgtatcggatgtcgccaccgttgaatgat

SEQ ID NO: 15965 - DNA, 531 bp, Glycine max
cttgcaccttcaacctttaaaactggctttctttcctacccaactaacacactaaaagtggtatttttaaaccaaaggccacagacaaggaacttcataggctccggcaatttctgcagcacctgtgacagaagcctgcaagacccataccacttctgctccctctcttgcaagatcaattatctcgtccgaacaacgggctctctctgcaactatctcttcgagtgcaactacctgccactaccggaatctggactcgacgacggattgatgacccctgactcggttctcgaaccggccggttcggcccgaacctcgtccggttcgggagggtacggaggggtggattgcagaaccaccttggcttgcactgccaccaccgaaattgtgagaaagaagaggaccggcggctccactttccggccaccgtgccggccggcgtgctcgccagtctcggaaatctcagcgggtctcatgaaccggaggaaagggaacccccagcgggccccactctattgaagaacttgcgag

SEQ ID NO: 15966 - DNA, 523 bp, Glycine max
aggccacttcatgatccctatttattgagtggtagtggaccacttttaagaaacaaattgtcttactaagtcttatagtgattgctaccacaaccatgaattgtaggaggttggtttatgtagttgtgtggttcaatctgtatgtggcatgcacattcattcaagtttcaggtctggacgcctctaacttcagcaagtgttggttcccagcaatttacaactttggtgactcaaattcagacacaggagctgtttttgcagcattcacaggggtgaagcctcccaatggcataagcttctttggaagcctctcaggaagggcctctgatggtcgtctcatcatagattttatgactgaagagttgaagctgccatacctgaatgcatatttggactcggttggatcgaattacaggcatggtgcaaactttgcagtaggtcgctcctccattcggcctggtggttttagtccattccctcttggccttcaagtagctcagttcctactgttcagtttcacaca

SEQ ID NO: 15967 - DNA, 344 bp, Glycine max
ggtaaatagtagtagggaatacgcatgcccttggttcctctacaaaatcaaaagggtttatctgagaaacctagacagtagacacggcagatgttgtccttggtcttcgccacagccccggtttttccaaaacccagttacctgtctttggggcattagggtaacttcaagggtggttttgccaaatctggcaaccttcacttgaaatctgggagtgaataaatgggtcctaaattttctcattgccagggtaaccggcttattattattggtcaccacccaaagggattcccaaacccaattggggtctttggtttaaccccaaccccatggtttcctttttt

SEQ ID NO: 15968 - DNA, 428 bp, Glycine max
cagtgaactgaatcgtatcgtgttctgatgggttcccaaaggaaaatgaaaagcatcaggtcaggtcaggtcacgtcaggtcagggaattagcgtgtaaccgacttctccttccatcctctccggagttgtgtggaaagaaattaaattggataggatcgtacttcagctcaagtgaggattcgattgattgattgatcgaattagaattagggtttgtggtgaagaaatgcagatagaggtatgttcatccgtgttacaatgattatgcgctcccattcttcattttcttcttcttcttcccctttgtgcaacaacgattaaatgtgttccgtcgaatgccgattccgatcggccgtcgattcatattccgtcgcttgtgaggcctttctctgaccctcagccttcccctctttgatacactctctt

SEQ ID NO: 15969 - DNA, 661 bp, Glycine max
aatcaacaaaagccttatcgccattgttaacaactgacgagcagaaaatgctgcaagatggtagtgataaaattcgtataagaaggatcagtaaaagcttagactttgacagtgtgatggcagataatgacagacttactaagagtagcagttattcttattcatcaacaagtagaagcaaggaattatcttttaatagaattttgtctaagcttcctgttattgattttggtattgacaaaaagagagcattggatgtgattgacagattagacgtggtcagataatttgcaactattcttgagtgcctttgaaatgaaagggtagtagcaagacatggacagacgcatgggacttctttgtgtaaatatacaagcatacaaatgctgcaagtcttgagtgccaaattttggcaccctggattccttttgcttcattagagtgctttgttttggtgatatgctgctccacatcatgatgtagatatggaaccaaggaaattgttgaggtgataatcattcttgcttgtatcaatgtgattgaagtggccactcgctattggagcggagtggattctgtttttttgttcttgagtgtatagacactgaggatatggtacttacgattggtttttgttacatgtataattattggtttggtt

SEQ ID NO: 15970 - DNA, 939 bp, Glycine max
acgagaagatgtgaatattggcgcttgtcagatcagaatgggaaaccccccggtgttcttggatggtggccgtctcgtgctgttacttttatagaaaatcatgacactggctctacccagggtcattggagatttcccagtggaaaagaaatgcagggatatgcctacactcttactcacccaggaacaccatcagtgttctatgaccatattttttctcactataaaactgaaatagcaacacttatctctatcaggaagcggaacaagatccactgcaggagtacacttaaaatttgcaaggcagaaagggatgtttatgcagctatcgttgatgacaaagttgctatgaaaattggacctggtcattttgaaccacctagtggatctcaaagatggtcctcagctttggagggaagggactataagatttgggaggcatcataatataattgtttgtatcttaagtgtatgttcctttggaaaatcaccaccaccttgtatatgtttcttaggaggcaagtataaagacagaagagtagatgatggtatggcaagtcacaattgaagtgagttgaaatgtgccactgttgctgaacgtatatatgctgcattgaagcaaatattatagagaaggttgcagagggttcatttcagccaaatgctggctcttctgaaattaggaagccttcatattatatatacattattatgtttacaaagtatacaatatttagatagtatggcaagattgtataaaattgccattgatagcacataattcttcaacaggttcctggatctagatggcaatgtattggggaaaatttggattgggaggttttggacaaaaaggaaagggagtgtaaagttttattttttgaattaagagtatatagtgtttataaataaatgaataagagatgaaaatttcatgat

SEQ ID NO: 15971 - DNA, 524 bp, Glycine max
gaagcggcgcaaaatgacaacaacgacgaggaaaaaccacaggattccgacgatatcccatcttctggctctgaagaaaaacccgaatttgtgtatgtggaacttctggaaattcgtaaggatgtccaatgtccaatttgccttggtattattaagaagacaagaaccgttatggaatgcttgcaccgtttttgcagggaatgcattgacaaatcaatgcgactagggaacaatgaatgccctgcttgtcgcacacattgcgccagtcgtcgttccttgagagacgatccaaattatgatgccctcattgccgctttatatccagatattgagaagtacggacaagaggagcttgaatttcgtgaagaggagaagaaccgcaataagcagattcaagcttcaatagcaaaagtagttcaacggcaatctgaagcattggttaagagacgtaaagacacaccaggtgtatttgtaactagaccgcagcgtaatcagcgaaacattcattctaggagacaactcaa

SEQ ID NO: 15972 - DNA, 390 bp, Glycine max
  unsure (1)..(390): unsure at all n locations
cccacgcgtccgcccacgcgtccgattaagggagccgattaaaaagttggggttctttcatcacttcattccaaaccctagcgaactatccatcgctcccgctcccaaagttcacattggcgcccgacgcagctgagttcgtaacaacgttgttaatgacttcattcccaaccccagtgaactatcaaccgctcccaaagttcacattggcgcccggggcaggctcagtttgtcaccgcgttaccaccgttgcgtagggctcgggaagctcggcatttggccattctcgctctgtgcgcttggctctttcattagacatcactccttcacaagctgagtcaaattctcagtctacaaaanaaagggttagaggtcccacatgcttgaaga

SEQ ID NO: 15973 - DNA, 532 bp, Glycine max
gttgccactcatttgcatgcttcgttattctctatatttctctccctcctcctcttcagagtagcattgttcattcacactccctctctggctttcattctttggcattgcgaaaaaacgaaaactcagaaaaccgcaacaaactcacactcactcacaagaagtagtaacaacatcaacaactctctcatcatcatggcagttgaggctcctccgcacaacatgaatctcttcccctcgcagttactaacctccagagaaatgatgaaaccgaatctcggcttctacaccgcgcagcaaacggaaggcggcggtggcgccgcgccgccatgcctattcttccgtcatcaacagcgttacctttttaccaccaatccgacagcggtctcacctgccacgccaccaccgctgccgctccgccgagaaaacgctccagagactccatcactaccaccgaatcaaacacgcttcttctccctgttccgcagaagaacaaactctcatcatcaccaccgtccattctcgatcaaga

SEQ ID NO: 15974 - DNA, 414 bp, Glycine max
gatgcttcgttattctctatatttctctccctctttctcttcacactctggctttcattcatttgcattgcgagaaaacgaaaaactctgaaaaccgcaacaaactcacacacactcacaagagagtaacaaccaaacaaacaacaaatctctcatcatggcagttgaggctcctccgcacaacatgaatctcttcccctcgcagttactaaccgccagagaaatgatgaaaccgaatcttggcttctacaccgcacagcaaacggaagctgctgctgctgctgctacgcctcttcttcagtcaacggcgttaccttctctccaccaatccgatagtggcctcacctgccacgtcaccaccaccgctccgacgagaaaacgctccagagactgcatcaccactgtaccaaacgc

SEQ ID NO: 15975 - DNA, 592 bp, Glycine max
cccacgcgtccggttgggccttccctgaatagtgtttctacttttaggccgcctccaatgggtgcatatcagggttttcagggttcagatggaaattactataaccagccctcatcaatgcctatggccccaatatctcgacaataaaattcccagtcctagatcttttcggcgtaaggttgcttagaaaaagccttcatacctccacccataaccttggtatggtaatctgattcttctacagtctggtgtgcacagtaaagtgctttgtaactttagttggtggctggtactaatctccctggagctagaataatttcattgtgttacaccgaagataacgggtttgtactattgttgagtagggtttatttatttctttatttatcttactgtaaaacttagcatattattattgccttgtggcttattagatgtgtggttttagagggttgtaggaatgtctttagtaattcgacatcagtcaaaagccagcttgcacttctaaaaatctgcatccttctctgctgatgtggtgttatatgtacagcccatgtcgtattttatgcatttagatgttgtgttggagccg

SEQ ID NO: 15976 - DNA, 424 bp, Glycine max
tgtctgtattccatgttcacctcttcctttgagcccaaggttatctaggaaactctctgatatcagaagtccacaatccaacttgagcgatcatgctggggaccatcccgttaatgattattcaatagacagacaaatggatacaattcacaggaacttgtctgacccattgaatagtgattcaaagaatgatgagaggaccatgaagcacgatgacatttctagtgtacttaatccttctgtcttgtttaagcaaccaactcatctaattacaccatctgagatcaccaaagctggttcctcctctgagactaatataattgataggaaaaatgagggagaagcaaagatccaggatgttgttgatgtaggtaatgctgaagtggaagtgaaagtggtgggtgagacaagatctaatcaagtg

SEQ ID NO: 15977 - DNA, 414 bp, Glycine max
  unsure (1)..(414): unsure at all n locations
ggaaagcgtcactcgctctccccgcaactcactgagtcaactcgccggcattgtcggcgaactccaccaatcgggggagcaaagctagatcctaggcgcgttactgagtcgtgactcgtccttaactcgggaatggcttctgcggaagctgattcccgtctgaagcaggtgctcgttcccgcgctcgagaaaatcatcaagaacgcgtcgtggcgaaagcacgcgaagctctcgcacgagtgcaagtccgtggtcgaaatcctaacctcgccgccgaagcctcaatcgcctgcctccgacgaagccgctgagccggaggcctcggtccccggcccaatccatgatggaggtcccgtggagtactcccttgccgagtcggagtcgatcctncgcccgctcattgccgccgcgtcc

SEQ ID NO: 15978 - DNA, 548 bp, Glycine max
ctactcgtccgcccacgcgtccggagacaagaagcatggtagcaatttcgctttacagagggaaccttcaccgagtaccggacgtgcctcgtcgatggccaatgccagcccccaaaatcactctcaaagacttcaaatcccttctcgctcgtcgctccaaggcactctcgcgccttcaaaaccctaaccctacccctacccctctccccaacggttcccaacccgaaccacctcccaccgttaccgttaatcacggcgaaggcccctccatcaccgtcgcccgagaagacggagatcgcaacgaaacgccgctcgtcgccgttagttccgccaagaaaccgctcgctggatctgattcggagaaacctcagctcgattccaagattgatgaggcttcggagaaaaaaacatctgacggtgtcgccgctccggaggaagaacagactgagccggtcgctgagaatgaggatctgcttaacgaacagaagaaaaggaaaaaagaaattggagagaagttgcatgggttgaatgataataaacataacctg

SEQ ID NO: 15979 - DNA, 486 bp, Glycine max
ttgctgcctatccccttgcgatcgaacagaacagaagagagatgggggacggaagtgggaaccggtggagcagggcggagtgggtgcagcagtacgatctcttaggcaaaatcggagaaggcacttacggcctcgtcttcctggcccgaaccaaaggcactccctccaaatccatcgccatcaaaaagttcaagcaatccaaggacggcgacggcgtctcccccaccgccatccgcgaaatcatgctgctcagggagattacgcacgagaacgtcgtcaagctcgtcaatgtccacatcaaccacgccgacatgtcgctctacctcgcctttgattacgccgagcacgatctctattaaattattaggcatcacagggataaactcaaccattccattaaccaatacactgttaagtctttgctctggcagttgctcaatggactaagctatctgcacagtatttggatgatacatcgagatttga

SEQ ID NO: 15980 - DNA, 759 bp, Glycine max
atatcgatatttatgatcacgtgatatcaccttgtgcactgtgcatgcttccgaatccgactcggtatcatgcccctaatcatctcattgttatcgtgactttgaggtacgtacatacaaggttgcggctttgtcggactgcgattttatcgtatttgttgatatggtgacaaattatgaataaatgtgcatgattaatatgatcctaatcgtgatcaagttacagtcatggatcgatttttaaaaccttgagtagatatcatctgctacacgtacttatgtatcacacaacttcactaccttaaccttatagcttcattaattattttgaacctagctcgcccgctcgatgatcagtaatgtccacggaactggctttgcaggttgatcactggtccaatacccatgagatctttggttaagtgctcttcagtagcgtttgaagtacttgaacgtagttgttgcttctgcattatttctggttctccactctcccactcttcaatccgcggcatcaccatgtgctccaaacccttggtgctactcaatgaaaacccacctccaataatattgttggtgcttgcttgggaattcaccatgtggttgaagttctcaacagcctggtttccttgcttgaacaatttctgaatttcaaccacgttattgttgtagcggttgttgttgttgctggacgtgcttgacatgttcgggtccaacaggccaaagttggagttgtcgaaggccaaattattattacca

SEQ ID NO: 15981 - DNA, 786 bp, Glycine max
cggacgcgtgggcggacgcgtgggcggacgcgtgggaaaaaacaaaacactgggcctggggaccccgctcactctcaaggtacttcccactgttcccattttatgcccgtactaatctgacccttttagtggcatagattgaggtacaattacaaaagcatattacccgtatcatatcctttctgctgcaaacccccccccccccaaacacactgcgttatttttttcaacacatttctcttctcttgtactactagctagatagatactaaagcttttctatttatttatttatttcccggcactgagttgagttaatattttggtcatagtctcaattagctggatgtgacttgtgtggttagggtttacatgcagaaacgcatgtgcttcgtgtctaattcatcctcagacaaggttttgggacagagatctgaattttattaagtagaaaagaaagtatctatctatctatctatctatctatctagaaaggttttgagaagaaaaaaaaaatcaaagatggcgaatcgatggtggactgggaatgtgggaatgataagagagcaagagttgatggagaacagcaacaacaacaacgctactactacaccgacgaatagcagcaacagcaacactaatgcgaacacaaacacgaccgaggaagaggtgagcagggacaacggagaggacctgcagaaccaaaacctcggaagccacgaaggctcggagccaggaagcagcggtcggaggccacgtggcatgccacctgggtccaagaacaag

SEQ ID NO: 15982 - DNA, 452 bp, Glycine max
cccacgcgtccgcccacgcgtccgcccacgcgtccgcccacgcgtccgggaggaaaatggccaagatggaagcttaatgattacttgcatgccttctcgctatgaaatcacccaactcactgttactggggaatggtccaccccaaagattaacgagggaatgcagctgtgtttggatgcttgtgcaaagcttgcgaagattatgaggtcatgtttaaaagaagctgtttcggattcccaggaatagaatggcagttctaaattaacatagttcgcattatgtgctgttaatttcttcttatattgagataattttgtgttgaaggtagggagagttgctttgcatgccctgaaaattttgtgctcatgatcttgtcaaagacaaagttaattattcttatagcaattgctatatgcatgtcacatagttttgcaagtcaattcaatattat

SEQ ID NO: 15983 - DNA, 547 bp, Glycine max
agaagacccatctttgggagagaaaaaatggtagtagtagcacctgtcctgtcgtcactcggaaacgaaaccctagaatactagcattgcaaatccataaatacccctccctcttagcctaataaaatctatttgcaaatccaataactaaacgaaacgaaaacactttctctccgattcttagcatccaatcagaggttccatttctcttccttctttcgcaccgaagttccaatcggtaaattgcttctctctttcgtcaatcttcattccttctctctgaacaataactgtaataacgctcatgctgcgtgagctagggttagggtttttcctcgtcgtcgttccgttactcctttcgcggttttttggtcttgacttcgatcctcttcgcgatcgagacgctaattcttggttcttcttcctgattgcttttgttcttgtgctcacgatcgcgtttcgtcgcagctcattactgcactatatgcttccaactaagagaccttgcgaaggactggttgcagaagaagagatcgaccacaacatc

SEQ ID NO: 15984 - DNA, 667 bp, Glycine max
gaagaaaaagcggcgtacgaactctctgtcagactctcacgcactgaggcataactctatcatctttcattacttactcttctctctctcaaacatccaaagctccaaaccaaaacctgttttgttcccagtctctgaagacacacaagtgttagtgttacagacaccccatccccaccgacagatgttggaggcgaagtgtctgaagaaagcagtggttccttccactctgattgacgacccttctcctggaagccttcagtgcacacgtcttgctctccgtgtttgcgaggacccaagttcttgttttgtctacatagcctccggtccccacatttataagctccacattgctctgggagaatcttcagtcagcgaaggaaaagatagcctattgatacctgaacacactgagattattgcctcttcgttactcaaccgatgccctcatcgttcagaaattcagagtattgctcttgctgaggtggtgggctgtggctatatattgctgggaagtgtggattcacatggtcatctcattgtgtctaaactagatgcgtctggtgaagatgttgacaagctaacatattctgcattgcctcatgataatggtatcggggaaggaagttggtcaggactctgcttttgcccaaatcaatggtctatg

SEQ ID NO: 15985 - DNA, 1759 bp, Glycine max
cttttcaatactctgtatgattttcttatttcaatatgatcctttgggtggtattgatcacaaaatgatattagtgttgttgctatatgttcccctgcaagagctgccactgtttatattagttttaatctgtagcatgatgctgcttgccgagttattgcaagactaaaaaaggaacgagatgaagctaggtccttacttgcacaagcagagaggcagttccctgcttctgcaccaaatgccataacagcaaatgcccccgtcctgagcaatgggaaaagagctgctgaggatgaggatctggctcctggtgcaaagaaaattcatcctggaatatcttctagcataatttctgagctaactgattgcaatgctgctctttcccagcagagaaagaagcgacagattcctccaactttggctcctgtcgaagctctagaggcatatacccagatatctagtcatccctttcacaaaacaaacaaacaaggcattatatctcttgatatcctttattctaaggacttaattgcaactggaggtattgatacaaatgctgttatttttgaccgcccatcaggacagatattatctacactcagtggtcactctaaaaaggtgaccagtgtaaagtttgtagctcagggtgaatcattcctaactgcttcagcagataagacagttcgtctatggcaagggtcagatgatggtaactataactgcaggcacatcttaaaggatcattcagctgaggtgcaagctgtcactgtccatgcaaccaataattactttgtgactgcttcacttgatggctcttggtgcttttatgaactttcttcagggacgtgtttgactcaggtttatgacacttcaggttcttctgaagggtacacttctgcagcttttcatcctgatggtcttattcttggaaccggcaccacagaatctcttgtcaagatttgggacgtaaaaagtcaggcaaatgttgctaggtttgacggacatgctgggccagtaactgccatatctttctctgagaatggatacttccttgcgactgctgctcatgatggtgttaagctttgggatctacgtaaattgaagaacttcaggaattttgctccatatgattcggaaacaccgacgagctccgtggagtttgatcacagtggatcctacctagcagttgctggctctgatataaggatttaccaagttgcaaatgtaaaatctgaatggaactgtatcaaaaccttccctgatttatctggaacagggaagaacacgtgtgtaaaatttggtccagattctaaatacatagctgtgggatcaatggaccgaaatcttcggatattcggcttgcccggtgaagatgctcctactgagtcataaaatgcctcagttgtacaagccaaagtcttgctctggagtaaacagttgctacctgctattggtgcttggtctaaatatctatgatgagattggaaaagttaatgaaggtagtggtttctttgattattcagtctcgctcctcacatgccctgttgcgtatgtgggatggagcaaatgtactttcaaggcttttgtgcagcaacattaccatgccttgatcatggctgctaaccttaatgacagaagctgcaatattttccgtagtcatccgtagataattttgtaacgtcaattgtttaattagtgagataactgatttgtcggccattacttactatcggaattttatatggtggtaactattctt

SEQ ID NO: 15986 - DNA, 1080 bp, Glycine max
ctttcgtttcgttcactttcgttcacttccgtttccctctcactcacacacttctccccaaaacccaaaaccctaactctctttcgcgctcgttctctcgctcgctgcaaccatgaattgctccatctccggcgaagttccggaagatcccgtcgtgtcccggaactccggtctcctcttcgagaagcgtttgattgagcgacacatctcggattatgggaagtgtccaattactggagaaccacttactatggatgacattgtaccaatcaagacaggcaagatagtgaaacccagacctgttcaggcagctagcatccctggcatgcttggaatgttccaaaatgaatgggatggattgatgctatctaattttgcattggagcaacaattgcacacagcaagacaagagctgagtcatgctttgtatcagcatgatgctgcttgccgagttattgcaagactaaaaaaggaacgagatgaagctaggtccttacttgcacaagcagagaggcagttccctgtttctgcaccaaatgccataacagcaaatgcccccgtcctgagcaatgggaaaagagctgctgaggatgaggatctggctcctggtgcaaagaaaattcatcctggaatatcttctagcataatttctgagctaactgattgcaatgctgctctttcccagcagagaaagaagcgacagattcctccaactttggctcctgtcgaagctctagaggcatatacccagatatctagtcacccctttcacaaaacaaacaaacagggcattatatctctggatatcctttattctaaggatttaattgcaactggaggtattgatacaaatgctgttatttttgaccgaccatcaggacagatattagctacgctcagtggtcactctaaaaaggtgaccagtgtaaagtttgtagctcagggtgaatcattcttaactgcttcagcaaataaggtgtaactttatccaatttgatcgaaaggtttacattagtgtttctgtggggtttgtccaagcatgtttttcttgtctctggtcatcagctagtagtcagtaat

SEQ ID NO: 15987 - DNA, 498 bp, Glycine max
atcaatggaccgaaatcttcggatattcggcttgcccggtgaagatgctcctactgagtcataaaatgcctcagttgtacaagccaaagtcttgctctggagtaaacagttgctacctgctattggtgcttggtctaaatatctatgatgagattggaaaagttaatgaaggtagtggtttctttgattattcagtcttgctcctcacatggcatgttgcgtatgtaggatggaacaaatgtactttcaggctttgtgcagcaacattacgatgccttgatcatggctgctaaccttagtgatagaaagctgcaatatttgccttagtcatcaaaacctcaaagcttatgttgtccgtagataattttgtaacgtcaattgtttaattagtgagataactgatttgtcggccaatacttactatcggaaatttatatggttgtgtaaaaaaaaaaaaaaataacaaaaaaaaaaaaaaaaaaagggcggccgccgact

SEQ ID NO: 15988 - DNA, 492 bp, Glycine max
cttccatgatccgtggcggtgactcttcttcttcgtagcatttccccacacgttttcctcgccgaacggcgatcagagctcgccgccgatcgatttggcgtcgtagcagtttcatagtgacgttggactctgaaaacggcgcgttttgagatttggcttttcgcgtgcgttgtcgaagagagagaaaccaaaaaatgaatgggattggtaacgacggaggaggaggattgagcaacgtggagatggagtacataagaagacaccacaggcacgagcctggtgagaatcagtgtggctctgcgctcgttaagcatataagagcaccggttcctcaggtatggtccttggtgaggaggtttgatcagccacagacgtgcaatccatttataagtagatgtgttgtaaggggaaaccttgagattgggagtctgagagaagttgatgttaaatcagggcttcgtgccgactacaagtacagaaagattggagctc

SEQ ID NO: 15989 - DNA, 891 bp, Glycine max
ctcgagccccaaacattctcaaaccaaagccatgaccaatatggaatccaccacacctatactcactcctctagtgctcctcctcctcttctctctagccaaagggcttcacaaccccaaatgtgatgctgcctatcaacatgaccatgatggctcaaccctccaagtgttccatgtgttcagcccttgttccccattcaggccctcaaaaccaatgtcatgggaagagagtgtcctacagctacaagccaaggaccaagccaggatgcagtacctttctaacttggtggctagaagatccattgtcccaattgcctcagggagacaaatcacacagagccctacatacatagtgagggccaagtttggtaccccagctcagaccctcctcttggccatggacactagcaatgatgcttcctgggtcccttgcactgcctgtgttggctgctcaacaaccacaccctttgctcctgctaagtccaccactttcaagaaagttggatgtggtgcttctcagtgcaaacaggtacggaaccccacttgcgacggaagcgcgtgtgcattcaacttcacttatggcacttcctcagtggcagctagcctggtccaagacacagtgaccctagccactgatcctgtcccagcctacgcctttgggtgcattcaaaaggtcacagggagctcagtgccaccacaagggctattgggcctgggccgaggcccattatcactcttggcccaaacccaaaagctctaccaatctacattttcttattgcttacccagcttcaaaacacttaacttcagtgggtcactgagacttgggcctgtggccaaccccaggagatcaagtttacccccttctaaaaatcctagaagatcatcact

SEQ ID NO: 15990 - DNA, 292 bp, Glycine max
gactggcattcggctctcaaccaaagccttgaccatgaaagcaacccctttagtgctcttcctcctcttcaccatagccaaagggcttcacaaccccaaatgtgatgctacccatcaacatgaccatgatggctcaaccctccaagtgttccatgtgttcagcccatgttccccatttaggccctcaaagccaatgtcatgggaagagagtgtcctaaagctacaagccaaggaccaagccaggatgcagtacctttctagcttggtggctaggaggtccattgtcccaatt

SEQ ID NO: 15991 - DNA, 444 bp, Glycine max
tctcgagccgattcggctcgaggacaaattattgttaaatctgcttctccattcctgttgcggggaagggatcagatccagtgagaaaaaaactccaaaacacaggtctttttttgtgatcccttattcattcccagagcatagaggaagagcatgctacgcaactgcttcttgtaagcactgtttcaccccagaaaagaaggacacttttttgttgaatactgagtatctcagtttgcttcgggttatattggaaagaagtaaaattttggagagtgaggaatttccagaatgttcaggttatctccccggaggagccaaagatccaaaggcttcaaggtgaagcatgctctacagttatgtgttctgcttggagtttgtatctggctggtttaccaactcaaacactctaatgagaagaaatcgtcctatgtagaaagcaca

SEQ ID NO: 15992 - DNA, 494 bp, Glycine max
cggacgcgtgggatgagttattgatcatttttgtatatacattttcgatttttctctcggttgttcctttggctctcgtcaaaagcaacaactgcattcaaagggagggctaaaaaacaatgttgccatcattaacacacatggtttcgctctccattttgaatctcctccacactcaaaaatcatagtacatagatagatagctcctttattatacacaaacaatcacacaccgtatcccttgttttgagtttccgaggtcagaacatggcctgcgccgaaaacagacaaccgaaggttcctgttttcctctgtttcttctcatttacgtttgttgccagcgttttgctgaattgcaaccgggtttcggggcagacatccgctgtttttgcctgcgatgttgcgaagaacccggctttggcgggttatgggttctgtgacaagtcactctcggtggaggacagggtggctgatttggtgaagaggctcacatt

SEQ ID NO: 15993 - DNA, 441 bp, Glycine max
ttgatgatcaagcaatggcctatgcccgtgctttagtagcatgatattacccagaatctgtggatgatcttatatgttttgctgatgcatttggagcttcacgtttgagggaagcatgcattaatttcttagagctgtgcaaacaaaagaatgaagacaagctatggatagatgagatagcagccatgcaggcggctgctcagcctgaactgccatacttgaggacatctggaatcatacttgctggagaagatgatacaagcagtaaattaaatggcatagttgatgcctcaatttctgagtcaacaccaagtcatgcaagtttggacataggccatgattatagcttgccaacatcgggtcaaacaccatcaacagatggaagagctcaaataccaatgtcctggccaaaccatcttccacagtacatgcacaactttc

SEQ ID NO: 15994 - DNA, 1095 bp, Glycine max
gtcaggtaaaccgaacaattacaaaacaaaaaatataaagacagacccacagacagaaaaatggtgcgataacgtgttgtgcttgttgtgggtttggaattggattgattcaaacgagttaacgccatgctcagatcactgccgaagctctcactcctcttttcctcagccaggaatccccattatctttcaagtgctcagcgtttcatatctcaagggagaatagcagcttcaagagtcaagattggagtggtaagcactattcctattcgatccaagttgacttcaacaatttcatcagcaattgcatcagaaatggctgcagaagatcaagttcaaagggttaacctactaacatcaactgatgataattatggtggtgttattgtggaacttgatcagcatatggattctgcaacatttgtctcgatccttagagcttcagtttctcattggaagctgctgggcaagaagggtgtttggataaaattacctattcatttagtcaatctggttgaagctttagtgaaggagggtttttggtatcatcatgcagaaccaaaatatttaatgcttgtatattggattcctgaaagtccaagcactattcctgcaaatgccacacacagggtgggcgttggttcatttgtcatgaatgaaaaacaagaggttttcccccaccatcaatcacaatatagtgcaacttcatagttcacaatcaggcttatacttaattggaaggaatctcttattgtttgagggctatatctttggcaaatactgttatgcctgcctgtcctgtatattgataaaatgataacatcatggattaagatgaaaaagaacttttcaatcatttgagacagctgaagggaaaaagcaccttgcttctcatttattcataggaaaaaaagaagtgatgaatggactgtatctttattgtttattttagttcctctctttattttctcacccattgctcctgcttaatttgattcttgtcagtttctgtctggtaggtccattatcagaattttcattggaaaagagtaacatgtctctcaccaatagaaattcttcagaatatagttctat

SEQ ID NO: 15995 - DNA, 377 bp, Glycine max
gacgacgggaaagggtgaaaaatggaattgaatatggagatgtggtggtagggaaggaagagaaaaataagaaggagaagaagagaaggaagaaggaattggaatggtgggaatcaatggaagaggaaaagcttgatggggttatgaagaggaagagaaggacggtgagggaatggtggaaggaggagcgttttgaggagaatgcgaagacgacggcaaagaagaagaagaaaaagaggaagggtgggagtgtgaagagtgatgatgagaagtgtggtgatgattggtggatgagtgatgatgcaatggataagaggaagggcaagagtaggagtaggaacaaccgtgggaacatggattggtggatggatgggttg

SEQ ID NO: 15996 - DNA, 508 bp, Glycine max
aatttccatgcggtactatgttttctttgcaagtactagcacaaacagctagctactatttttgaacttgtcataattagtctctaattctaattagccatacattgaacacaccagcacaccttaaacgtaagtggtatttgttccacacaggtacactatgccttcactctcagaagcctaccgagcccaccccgtgcacgttcaacacaagcaccctgacttaaactccctacaagaactccccgagtcttacacttggacacaccatagccatgatgatcatactcctgcagcttccaacgagagtgtccccgttattgatctcaacgacccaaatgcttcaaagttgatacaccatgcatgcataacttggggagcgtaccaagtggtgaaccatgccatacccatgagcctcctccaagacattcaatgggttggggagacactcttctctctcccttgtcaccaaaaacaaaaagcagctcgttcccctgacggtgctgat

SEQ ID NO: 15997 - DNA, 467 bp, Glycine max
tggttttctctctctctctctctctctctctctctccttctccccctgtttttgcttgctgcgtaatacgaaataaatttttaaaaaaaaacgttcgctggttaatggttttaattttattgttctcagattaacctttctctttgtgaatcctattcaaacgtcgattgtgaatctgagtgtttttttactttgattcgattcgatatgaagcgagcgaggaaatccaacagggtttcgtgggctactggagagaacctgtgtcaggtaaaattgttcttgtctgacgattacccctcaatagttggtcagaaatcacaagatcatcttcaagcaaagacatcatcaatgttacattctagtattaacgaacctaatgatttgccccccgggtttgaaagcagtcatttcctaaaccaacccaaggttgaattatccaacattcccctgataaaatgggaatgccc

SEQ ID NO: 15998 - DNA, 407 bp, Glycine max
cccacgcgtccgcccacgcgtccgcccacgcggccgttgatacatcaactggatcattgaaaatattaaatggcaatgagcattttgtgtctaatttatccttgctgttgcgttggtcaccatattcatcagaagcagatcttctgaaacaagtcagttttctatattttccctttcatccatgataatttgctggctttgttagaatatacttaatggttggcatatttattctttcccccccattgtagacaatacagcctagtatcatgaatagatagatagtttagtttgagacttattttctgacctttttcctgtccccttaaattaggctttttctcaagactgtaatgttttggctttgaatgccaaaatataattgtatatttgttatgttgtgatac

SEQ ID NO: 15999 - DNA, 433 bp, Glycine max
acagtttgctattggacggtatggaaatggcttcaagaccagtagtatgaggcttggtgcagatgtcatagtcttcagttgccatctaaataataggattttgactcaaagcattggacttctgtcatatacatatttgataaaaacacagcttgacagaatagtagtacccatggtgaattatgagtttgatacatcaactggatcattgaaaatattaaatggcaatgagcattttgtgtctaatttatccttgctgttgcgttggtcaccatattcatcagaagcagatcttctgaaacaatttgatgacattggatctcatggtactaaagttattatctataatttgtggtgcaatgatgatgcaaatttggagctagactttgatacagatcctacggatattcgtattgctggggatgtcaagcag

SEQ ID NO: 16000 - DNA, 431 bp, Glycine max
  unsure (1)..(431): unsure at all n locations
cggaagcgtgggtccaaatgtttcatttcttgttgcattagatgctggaagtgacatgctttgggttccctgtgactgcattgaatgtgcttccctgtcggccggtaattacaatgtgttgatgctcccttttatatgggggcatctctgatgcaggacagggatctgaatcagtatagaccatcattatccaacaccagcaggcatctaccttgtggtcataagttgtgtgatgtccattccgtttgcaaaggctctaaggatccttgcccttatgccgttcagtatgcctcagccaatacctcaagttctggatatgtcttcgaagacaaactacatttgacatccgatggcaaacatgcagtacaaaattctgtgcaagcctntatcattttaagttgtggaagggaacaaactggtgactttttaca

SEQ ID NO: 16001 - DNA, 449 bp, Glycine max
  unsure (1)..(449): unsure at all n locations
tttcgagcgaatcggctcacgtatccaaccgtgtgacagtcaaaagaaaagacgttacggcatagcatgggattgataagcgccagtgttcccatgaatatcgttcctcaattcgggtcgctccgaacacccattcgggtcggaaacccttccgggttgagcttccttcggaagaggaataacggctttgtttgcttcgccgtcgatgacgagctcagacagaagcagcaggacttgagtactaccgcaactgggctgggctccgcccttgaagaaaggcccggaaacacagatctttttgagagtacaactgaagaaacgcagggaaattttaggcaagatggtgaaccaggtcctatctacaattttctttatcctgataaagagcttcttcccgatgataaaggaatgagcatnattgatcatcttgaagagctgcgacagagaat

SEQ ID NO: 16002 - DNA, 1104 bp, Glycine max
ggatttggaaaggtttataaaggacgcttagctgatggatctcttgtagcagtaaaaagacttaaagaggaacgcacgcatggtggggagctgcagtttcaaaccgaagtggaaatgatcagcatggctgtacatcgtaatttgcttcggcttcgtggtttttgtatgacacctactgaacggttgcttgtgtatccttacatggctaacggaagtgtagcatcatgtttacgagaacgtcaagaatcccaaccgccacttggctggccagaacggaagcgtattgcactgggatctgcaagggggcttgcgtatttgcatgatcattgtgaccctaagattattcaccgtgatgtcaaagcagctaatatattgttggacgaggaatttgcagcagttgttggagattttggtttagctaaacttatggattataaaggtactcatgtcactactgctgtacgtggaacaattggacatatagcaccagagtacctctcaactggaaagtcttcagagaagactgatgtttttggatatggtgtgatgcttcttgaactaataactggacaaagggcttttgatctagctcgacttgccaatgatgatgatgtcatgttgcttgattgggttaaaggacttctcaaagacaggaaattggaaacactagtagatgcagatttacatggtaactacaatgatgaggaggtagagcagttaatccaagtggccttactatgcacacaaggatctcctgtggaaagacctaagatgtctgaggtggtaagaatgctagaaggtgatggtttggctgagaaatgggagcaatggcagaaagacgagacgttccggcaagactttaacagcaacatacatcaccctaatgcaaattggatagtagattcaacttcccatattcaggcagatgaactatcaggtcctagatgataacattctaaggacaggtgaatacacaatactgccggctttctgttggaaagagatatacttctgatttgtgcatatgattttcgccctctctaccttttctcttgttttcatccttgtgcgcagattccatgcccattggtcagttgtgattat

SEQ ID NO: 16003 - DNA, 435 bp, Glycine max
gtttagaaccatgacttgaacctctatctccttctccaccttcacaccttccaccatgacggatcgtgaccgcgaccgagaccgtgaccgaactcgcgacagagaaagagaacgaagaagagataaggacgaccgtgaccgcgaccgtgaccgagcacgcagcaagagatctcgctcgcgttcgcctgaccgtggccgctcccgccacccgcgctctccctctcccagcgagcgctcccaccgccggcggcaccaccggacgccgtcccccgacccgccgcggaagcgccaccggagagactcggcggaggaggagcacaaggagacgaaaaagcggtgtcggacttcgtggacggcatcgtgaaggagcagcagcagaaggagaacggagacggaggagaaggagaagctgaggggagcgaggatgagttggag
